United States Patent Application Publication US 2004/0234960 A1 - sequence listing, part 2

SEQ ID NO: 3123 - DNA, 882 bp, Artificial Sequence
  chemically treated genomic DNA (Homo sapiens) CpG-island No: 3123
tagttatggtagaattagattagtttttatttaaggttatagtgttcgttcgacgggtagcgagtagtagggagttttttcgaggtttcgtttcgcgagggcgtttagtttttttgggttttgagttagagtgcgttgtttttaagacgttttggaaagttatcgcgttcgtgggcggggaattaggcgcggcgcgttttgtttttcgcgggtcgtcgtgggttgggtcgggcgcgagggtggggtagggaaacggcggcggggttaaaggttacggcgcgtattacgtgggtcggtgatttcgttttttttttagtagtcgcggcgcgtagggtatttgggttagtggcgcggcgggcggcgcggatagtcgaggcggacgttcgttttcgttattatggttattaagacggacgagttgtcggcggtcgtttcggtcgatagcgttcgggaatacggttcgtaggtcgggggtaaggggcggtcgggcgcggtcggtgagcggggttagggttagcgggtcgttgggcggggggcgtcggattagggcgggcgggttcgggatttcgcggggatcgtcgtttttttttcgcgtcgggttcggttgtatttcgttggggtttttatcgggtcgttttcgcgttgaaggttatttttatagtcgttttcggttgcggttcgggtttcgtacgtgcggtttcgtggagggtagtttcggttggtattttcggcgggtatacgcgcgttttatcgcggggatacgtgcgcgtatacgcggtttcggggtgcgtcgtcgtcgtagatcgaaagaatcggcggttttattttttttgcgttcgagtatgggagttttttgagttggggtcgtttcgacgtttgcgg

SEQ ID NO: 3124 - DNA, 882 bp, Artificial Sequence
  chemically treated genomic DNA (Homo sapiens) CpG-island No: 3124
ccgcaaacgtcgaaacgaccccaactcaaaaaactcccatactcgaacgcaaaaaaaataaaaccgccgattctttcgatctacgacgacgacgcaccccgaaaccgcgtatacgcgcacgtatccccgcgataaaacgcgcgtatacccgccgaaaataccaaccgaaactaccctccacgaaaccgcacgtacgaaacccgaaccgcaaccgaaaacgactataaaaataaccttcaacgcgaaaacgacccgataaaaaccccaacgaaatacaaccgaacccgacgcgaaaaaaaaacgacgatccccgcgaaatcccgaacccgcccgccctaatccgacgccccccgcccaacgacccgctaaccctaaccccgctcaccgaccgcgcccgaccgccccttacccccgacctacgaaccgtattcccgaacgctatcgaccgaaacgaccgccgacaactcgtccgtcttaataaccataataacgaaaacgaacgtccgcctcgactatccgcgccgcccgccgcgccactaacccaaataccctacgcgccgcgactactaaaaaaaaaacgaaatcaccgacccacgtaatacgcgccgtaacctttaaccccgccgccgtttccctaccccaccctcgcgcccgacccaacccacgacgacccgcgaaaaacaaaacgcgccgcgcctaattccccgcccacgaacgcgataactttccaaaacgtcttaaaaacaacgcactctaactcaaaacccaaaaaaactaaacgccctcgcgaaacgaaacctcgaaaaaactccctactactcgctacccgtcgaacgaacactataaccttaaataaaaactaatctaattctaccataacta

SEQ ID NO: 3125 - DNA, 886 bp, Artificial Sequence
  chemically treated genomic DNA (Homo sapiens) CpG-island No: 3125
ttcgttcggtttcgcggaggaattttcgcgcgaggagagggttcgaagttttggaaacgtcgggaagtataaaaggttggcggttcggggatttggggggagtcggggtcgtttcgtttcgttttttggaggaggggcggttgtttttcgattcgggatttgtttgcggggatcgagttgcgtttttggtcggtttttttcgttcgtttcgcgttatttcggttagtttggcgtttatttcgggttttcgggcgcgttgggttggttgggcgcgggttgcgggtcggttcggttcgggggtttttggggaggcggttggcgcgggttgcgggcgttgggtcgtagcggtttgcgtgtatagaggaagagcgcggggtcgggtatggggtcggcgtcgtcgagggcgtcggtttcgcggttttaggcggtttagtttcggtcggggtttttggcggcggtttcgtgggtagtaggcgggcggcgggttcgtagtgcgcggcggcgtggtttgggttcggcggtggcgtcggggttcgggcgcggggtttgtagtttttggcgcgtcgcgtgtagttggtaggagaggtaggcggtcgtttcggtgtgtttttgtagttcggtgtttagtacggtggcgcggtggttgcggcggcgtagtttttttaggaagcggcgtttttcggtgcgtaggttgtagcgtagcgcggatattagcgtttcgcgttgcgttatttttcgtcgtagtttcgcgttggtcgtagtacgcgtttttagttgcgattttagcgcgcggtatttgttttttagttttcgggacgtcgtttttggaacggggtagaggttagaggtgacggtttttttttggtttggaatagaatttgtacgg

SEQ ID NO: 3126 - DNA, 886 bp, Artificial Sequence
  chemically treated genomic DNA (Homo sapiens) CpG-island No: 3126
ccgtacaaattctattccaaaccaaaaaaaaaccgtcacctctaacctctaccccgttccaaaaacgacgtcccgaaaactaaaaaacaaataccgcgcgctaaaatcgcaactaaaaacgcgtactacgaccaacgcgaaactacgacgaaaaataacgcaacgcgaaacgctaatatccgcgctacgctacaacctacgcaccgaaaaacgccgcttcctaaaaaaactacgccgccgcaaccaccgcgccaccgtactaaacaccgaactacaaaaacacaccgaaacgaccgcctacctctcctaccaactacacgcgacgcgccaaaaactacaaaccccgcgcccgaaccccgacgccaccgccgaacccaaaccacgccgccgcgcactacgaacccgccgcccgcctactacccacgaaaccgccgccaaaaaccccgaccgaaactaaaccgcctaaaaccgcgaaaccgacgccctcgacgacgccgaccccatacccgaccccgcgctcttcctctatacacgcaaaccgctacgacccaacgcccgcaacccgcgccaaccgcctccccaaaaacccccgaaccgaaccgacccgcaacccgcgcccaaccaacccaacgcgcccgaaaacccgaaataaacgccaaactaaccgaaataacgcgaaacgaacgaaaaaaaccgaccaaaaacgcaactcgatccccgcaaacaaatcccgaatcgaaaaacaaccgcccctcctccaaaaaacgaaacgaaacgaccccgactccccccaaatccccgaaccgccaaccttttatacttcccgacgtttccaaaacttcgaaccctctcctcgcgcgaaaattcctccgcgaaaccgaacgaa

SEQ ID NO: 3127 - DNA, 886 bp, Artificial Sequence
  chemically treated genomic DNA (Homo sapiens) CpG-island No: 3127
tcgtgtaggttttgttttaagttagggggagatcgttatttttggtttttgtttcgttttagaggcggcgtttcgggagttggagagtaagtgtcgcgcgttggagtcgtagttggaggcgcgtgttgcggttaacgcggagttgcggcgggaggtggcgtagcgcgaggcgttggtgttcgcgttgcgttgtagtttgcgtatcgaggagcgtcgttttttggaggagttgcgtcgtcgtagttatcgcgttatcgtgttgggtatcgagttgtagaagtatatcgaggcggtcgtttattttttttgttagttgtacgcggcgcgttagagattgtaggtttcgcgttcgggtttcggcgttatcgtcgagtttaggttacgtcgtcgcgtattgcgagttcgtcgttcgtttgttgtttacgaggtcgtcgttaagggtttcggtcgggattgggtcgtttgggatcgcggggtcggcgttttcgacgacgtcgattttatgttcgatttcgcgttttttttttatgtacgtaggtcgttgcggtttagcgttcgtagttcgcgttagtcgtttttttaggagttttcggatcgagtcggttcgtagttcgcgtttagttagtttagcgcgttcggggattcggagtaggcgttaggttggtcggggtgacgcgggacggacggggagggtcggttagggacgtagttcggttttcgtaggtaggtttcgggtcggagggtagtcgttttttttttaggaagcggggcgaggcggtttcggttttttttaaattttcgaatcgttagttttttgtatttttcgacgtttttaaagtttcgagtttttttttcgcgcgagagttttttcgcggggtcgagcggg

SEQ ID NO: 3128 - DNA, 886 bp, Artificial Sequence
  chemically treated genomic DNA (Homo sapiens) CpG-island No: 3128
cccgctcgaccccgcgaaaaaactctcgcgcgaaaaaaaaactcgaaactttaaaaacgtcgaaaaatacaaaaaactaacgattcgaaaatttaaaaaaaaccgaaaccgcctcgccccgcttcctaaaaaaaaaacgactaccctccgacccgaaacctacctacgaaaaccgaactacgtccctaaccgaccctccccgtccgtcccgcgtcaccccgaccaacctaacgcctactccgaatccccgaacgcgctaaactaactaaacgcgaactacgaaccgactcgatccgaaaactcctaaaaaaacgactaacgcgaactacgaacgctaaaccgcaacgacctacgtacataaaaaaaaaacgcgaaatcgaacataaaatcgacgtcgtcgaaaacgccgaccccgcgatcccaaacgacccaatcccgaccgaaacccttaacgacgacctcgtaaacaacaaacgaacgacgaactcgcaatacgcgacgacgtaacctaaactcgacgataacgccgaaacccgaacgcgaaacctacaatctctaacgcgccgcgtacaactaacaaaaaaaataaacgaccgcctcgatatacttctacaactcgatacccaacacgataacgcgataactacgacgacgcaactcctccaaaaaacgacgctcctcgatacgcaaactacaacgcaacgcgaacaccaacgcctcgcgctacgccacctcccgccgcaactccgcgttaaccgcaacacgcgcctccaactacgactccaacgcgcgacacttactctccaactcccgaaacgccgcctctaaaacgaaacaaaaaccaaaaataacgatctccccctaacttaaaacaaaacctacacga

SEQ ID NO: 3129 - DNA, 707 bp, Artificial Sequence
  chemically treated genomic DNA (Homo sapiens) CpG-island No: 3129
gcgtggcgggaggtggcggggttcgatttcgggtcgttttggacgttcggtagtgttaggtagggttcgggtttgggcggtggaggataatttttgttagtagttcgtcgcgagttttgttcgtttttcgcgcgttgcggtgtttagtttcgcgttagttttttcgggggagttggagtttggtcgcgttgtttttttttggggtcgtttcggcgtttatattttttacgtttatcgatcggtttttttattttcgggatttgggagttatcggtcggcggggttttgggttcgggtcgggttgggtgggggcggcgtttttttttttacgttagttgcgttcggggatttgtagcgttcgtttcggttgcggcgttattagttgttgggaggttgcggggtagtcgggtcggggtttcggggggttcgggggcgtcgaaggggggtcgggggcgggttcgaggcgtaaatatttagtaacgtgatcggaattggcgaacgagtcggaggggtgcggggggcgggagagagaaagggggaggggagggatttgagacgggcggggaggggtcgtgggcggggcggggggaggggaggtcggcggcgcgcggtcggggggagggggaatttcgggagtttcgagagtttcgggaatcgggtttgaggtttttagcgggtcgttgggttcgcggagttggttttggttg

SEQ ID NO: 3130 - DNA, 707 bp, Artificial Sequence
  chemically treated genomic DNA (Homo sapiens) CpG-island No: 3130
caaccaaaaccaactccgcgaacccaacgacccgctaaaaacctcaaacccgattcccgaaactctcgaaactcccgaaattccccctccccccgaccgcgcgccgccgacctcccctccccccgccccgcccacgacccctccccgcccgtctcaaatccctcccctccccctttctctctcccgccccccgcacccctccgactcgttcgccaattccgatcacgttactaaatatttacgcctcgaacccgcccccgaccccccttcgacgcccccgaaccccccgaaaccccgacccgactaccccgcaacctcccaacaactaataacgccgcaaccgaaacgaacgctacaaatccccgaacgcaactaacgtaaaaaaaaaaacgccgcccccacccaacccgacccgaacccaaaaccccgccgaccgataactcccaaatcccgaaaataaaaaaaccgatcgataaacgtaaaaaatataaacgccgaaacgaccccaaaaaaaaacaacgcgaccaaactccaactcccccgaaaaaactaacgcgaaactaaacaccgcaacgcgcgaaaaacgaacaaaactcgcgacgaactactaacaaaaattatcctccaccgcccaaacccgaaccctacctaacactaccgaacgtccaaaacgacccgaaatcgaaccccgccacctcccgccacgc

SEQ ID NO: 3131 - DNA, 707 bp, Artificial Sequence
  chemically treated genomic DNA (Homo sapiens) CpG-island No: 3131
tagttaaagttagtttcgcgagtttagcggttcgttgggggttttaggttcggttttcggggttttcggggttttcggggtttttttttttttcgatcgcgcgtcgtcggtttttttttttttcgtttcgtttacggttttttttcgttcgttttaggttttttttttttttttttttttttttcgtttttcgtattttttcggttcgttcgttagtttcggttacgttgttgggtgtttacgtttcgagttcgttttcgattttttttcggcgttttcgagtttttcggagtttcggttcgattgtttcgtagttttttagtagttgatggcgtcgtagtcggggcgggcgttgtagattttcgggcgtagttagcgtggggggaagagcgtcgtttttatttagttcggttcggatttagggtttcgtcggtcggtgatttttaggtttcgaaggtgaggaggtcggtcggtgggcgtggggggtgtgggcgtcggagcggttttaggggggagtagcgcggttaagttttagttttttcgggagggttggcgcggggttgggtatcgtagcgcgcgggaggcggataggattcgcggcgggttgttggtagaagttgttttttatcgtttagattcgggttttgtttggtattgtcgggcgtttagagcggttcgaggtcgagtttcgttatttttcgttacgt

SEQ ID NO: 3132 - DNA, 707 bp, Artificial Sequence
  chemically treated genomic DNA (Homo sapiens) CpG-island No: 3132
acgtaacgaaaaataacgaaactcgacctcgaaccgctctaaacgcccgacaataccaaacaaaacccgaatctaaacgataaaaaacaacttctaccaacaacccgccgcgaatcctatccgcctcccgcgcgctacgatacccaaccccgcgccaaccctcccgaaaaaactaaaacttaaccgcgctactcccccctaaaaccgctccgacgcccacaccccccacgcccaccgaccgacctcctcaccttcgaaacctaaaaatcaccgaccgacgaaaccctaaatccgaaccgaactaaataaaaacgacgctcttccccccacgctaactacgcccgaaaatctacaacgcccgccccgactacgacgccatcaactactaaaaaactacgaaacaatcgaaccgaaactccgaaaaactcgaaaacgccgaaaaaaaatcgaaaacgaactcgaaacgtaaacacccaacaacgtaaccgaaactaacgaacgaaccgaaaaaatacgaaaaacgaaaaaaaaaaaaaaaaaaaaaaaaaacctaaaacgaacgaaaaaaaaccgtaaacgaaacgaaaaaaaaaaaaaccgacgacgcgcgatcgaaaaaaaaaaaaaccccgaaaaccccgaaaaccccgaaaaccgaacctaaaacccccaacgaaccgctaaactcgcgaaactaactttaacta

SEQ ID NO: 3133 - DNA, 761 bp, Artificial Sequence
  chemically treated genomic DNA (Homo sapiens) CpG-island No: 3133
tttcgcgcgttagtaggattcggggaattagatttcgtttagtgttttttagaaattcggtttttcggcgcggcggggagagattcggacggggagaggtcgttgtttcgttcgttttgcggggtcggcgttgattcggttttagtcgtttttaggggcggggtttgagcgtcgcgtttttttcgcgtttttttcgcgtttttttcgcgtttttttcgcgagcgcgtttcggatattcgtttgcggtagtcgagttttttttatcgtgcggttcgcggagggtagggagcggtcgggcgaggtatggcgggtcgtcgggcgtcgggggagaagcgttggtagttggtgcgttggtgagtgggcgtcgggcggcgcggggtttaatgcgggagcgaatttcgaggttcggtcggcgcgggaagtagcggggcgcgggtttaaagtttcgtttcgggttgaggttgcggggttcgggtgggcggaggggcgtcggttgtttggtttttattatttttttcggtttttattatttcgcgttttcgcgtcgggtttttgcggttttttaaagagatgggcgacggggattttgtgcgagtcgttaggttttgggggaatttcgtttttttttcgcgggggcgttttttttttgtattttattttttacgttcgtacggggttttcgttttttttttcgttttttttaggttttttatttgtgttttttttcgttttttttgttattcggggtagggttttggatt

SEQ ID NO: 3134 - DNA, 761 bp, Artificial Sequence
  chemically treated genomic DNA (Homo sapiens) CpG-island No: 3134
aatccaaaaccctaccccgaataacaaaaaaaacgaaaaaaaacacaaataaaaaacctaaaaaaaacgaaaaaaaaaacgaaaaccccgtacgaacgtaaaaaataaaatacaaaaaaaaaacgcccccgcgaaaaaaaaacgaaattcccccaaaacctaacgactcgcacaaaatccccgtcgcccatctctttaaaaaaccgcaaaaacccgacgcgaaaacgcgaaataataaaaaccgaaaaaaataataaaaaccaaacaaccgacgcccctccgcccacccgaaccccgcaacctcaacccgaaacgaaactttaaacccgcgccccgctacttcccgcgccgaccgaacctcgaaattcgctcccgcattaaaccccgcgccgcccgacgcccactcaccaacgcaccaactaccaacgcttctcccccgacgcccgacgacccgccatacctcgcccgaccgctccctaccctccgcgaaccgcacgataaaaaaaactcgactaccgcaaacgaatatccgaaacgcgctcgcgaaaaaaacgcgaaaaaaacgcgaaaaaaacgcgaaaaaaacgcgacgctcaaaccccgcccctaaaaacgactaaaaccgaatcaacgccgaccccgcaaaacgaacgaaacaacgacctctccccgtccgaatctctccccgccgcgccgaaaaaccgaatttctaaaaaacactaaacgaaatctaattccccgaatcctactaacgcgcgaaa

SEQ ID NO: 3135 - DNA, 761 bp, Artificial Sequence
  chemically treated genomic DNA (Homo sapiens) CpG-island No: 3135
agtttagagttttgtttcgggtggtagaaggaacggagggaggtataaatgggaaatttgaagggggcgaaggggaaggcggaagtttcgtgcgagcgtgaaaggtgaagtgtagggaaagggcgttttcgcgggagggggacggggtttttttaaagtttgacggttcgtatagggttttcgtcgtttatttttttggagagtcgtagagattcggcgcggggacgcggggtggtggggatcggagggggtggtggggattaggtagtcggcgttttttcgtttattcgggtttcgtagttttagttcgggacgaaattttgggttcgcgtttcgttgtttttcgcgtcggtcgggtttcggggttcgttttcgtattaggtttcgcgtcgttcggcgtttatttattagcgtattagttgttagcgtttttttttcggcgttcggcggttcgttatgtttcgttcggtcgttttttgtttttcgcgggtcgtacggtggaggaggttcggttgtcgtaggcgggtgttcggggcgcgttcgcggggagggcgcggggagggcgcggggagggcgcggggagggcgcggcgtttagatttcgtttttggaggcggttggagtcgggttagcgtcggtttcgtagaacgggcgggatagcggttttttttcgttcgggttttttttcgtcgcgtcgaggagtcgggtttttggggagtattgggcggagtttggtttttcgagttttattgacgcgcggag

SEQ ID NO: 3136 - DNA, 761 bp, Artificial Sequence
  chemically treated genomic DNA (Homo sapiens) CpG-island No: 3136
ctccgcgcgtcaataaaactcgaaaaaccaaactccgcccaatactccccaaaaacccgactcctcgacgcgacgaaaaaaaacccgaacgaaaaaaaaccgctatcccgcccgttctacgaaaccgacgctaacccgactccaaccgcctccaaaaacgaaatctaaacgccgcgccctccccgcgccctccccgcgccctccccgcgccctccccgcgaacgcgccccgaacacccgcctacgacaaccgaacctcctccaccgtacgacccgcgaaaaacaaaaaacgaccgaacgaaacataacgaaccgccgaacgccgaaaaaaaaacgctaacaactaatacgctaataaataaacgccgaacgacgcgaaacctaatacgaaaacgaaccccgaaacccgaccgacgcgaaaaacaacgaaacgcgaacccaaaatttcgtcccgaactaaaactacgaaacccgaataaacgaaaaaacgccgactacctaatccccaccaccccctccgatccccaccaccccgcgtccccgcgccgaatctctacgactctccaaaaaaataaacgacgaaaaccctatacgaaccgtcaaactttaaaaaaaccccgtccccctcccgcgaaaacgccctttccctacacttcacctttcacgctcgcacgaaacttccgccttccccttcgcccccttcaaatttcccatttatacctccctccgttccttctaccacccgaaacaaaactctaaact

SEQ ID NO: 3137 - DNA, 740 bp, Artificial Sequence
  chemically treated genomic DNA (Homo sapiens) CpG-island No: 3137
ggtgttcgttttttcgtttttttttcgcggttgcgttaggcgattcgtaggtagcggtatagggattagggcgcgtttcgggtggcggaggcgcggcgagggcgggagtacgaggatttcggattttggatcggcgcgggtttcggttgcgcgtgcgcggcggcggcggcgaggggcgttaggtgtgcgggcggtggcggttgcggagggcgcggttttgtgcgttggggtcggtcggggtgcgcgcgtgcgcggtaggattgttgcgagggatttcgtcgtttcggaggaggaggaggaggaggaggaggaggaggagggggttgggtcgagggagggggcgatcgcggggattgaggtgtttttcgtttcgggtttagaggtagtcgcgcgttaggcggcgtagaaggttagtggtttcggggttgggatttcgtagttagtttggatcgggacgtgagttttggtgtgattgacggggaatcggagcgtgtgtggagtgtgaacgcgtgtgtttgtagatagatatcggtacgtatggacggcgcgagtcggtattgcgtttcggaggagttattcggcgttataggttgtgttggggaggtggggtgatcgtttttagaaattttcgcgggcggggcgttgtatatacgtttatttatagggtgtgtgtgcgtgcgtgaggtgtgtagtttttgttaggatttggcgagagaagttgatcgggatggaggttagag

SEQ ID NO: 3138 - DNA, 740 bp, Artificial Sequence
  chemically treated genomic DNA (Homo sapiens) CpG-island No: 3138
ctctaacctccatcccgatcaacttctctcgccaaatcctaacaaaaactacacacctcacgcacgcacacacaccctataaataaacgtatatacaacgccccgcccgcgaaaatttctaaaaacgatcaccccacctccccaacacaacctataacgccgaataactcctccgaaacgcaataccgactcgcgccgtccatacgtaccgatatctatctacaaacacacgcgttcacactccacacacgctccgattccccgtcaatcacaccaaaactcacgtcccgatccaaactaactacgaaatcccaaccccgaaaccactaaccttctacgccgcctaacgcgcgactacctctaaacccgaaacgaaaaacacctcaatccccgcgatcgccccctccctcgacccaaccccctcctcctcctcctcctcctcctcctcctcctccgaaacgacgaaatccctcgcaacaatcctaccgcgcacgcgcgcaccccgaccgaccccaacgcacaaaaccgcgccctccgcaaccgccaccgcccgcacacctaacgcccctcgccgccgccgccgcgcacgcgcaaccgaaacccgcgccgatccaaaatccgaaatcctcgtactcccgccctcgccgcgcctccgccacccgaaacgcgccctaatccctataccgctacctacgaatcgcctaacgcaaccgcgaaaaaaaaacgaaaaaacgaacacc

SEQ ID NO: 3139 - DNA, 740 bp, Artificial Sequence
  chemically treated genomic DNA (Homo sapiens) CpG-island No: 3139
ttttgatttttatttcggttagtttttttcgttagattttgataggggttgtatattttacgtacgtatatatattttataggtggacgtgtgtgtagcgtttcgttcgcgggggtttttgaggacggttattttatttttttagtatagtttgtgacgtcggatggttttttcggaacgtagtatcggttcgcgtcgtttatacgtgtcgatgtttgtttgtaaatatacgcgtttatattttatatacgtttcgatttttcgttagttatattaggatttacgtttcgatttaggttggttgcggaattttagtttcggggttattgattttttgcgtcgtttggcgcgcggttgtttttggattcggagcgaagggtattttagttttcgcggtcgttttttttttcggtttagtttttttttttttttttttttttttttttttttttttcggggcggcggggtttttcgtagtagttttgtcgcgtacgcgcgtatttcggtcggttttagcgtataaagtcgcgtttttcgtagtcgttatcgttcgtatatttggcgtttttcgtcgtcgtcgtcgcgtacgcgtagtcggagttcgcgtcgatttagggttcggggttttcgtgttttcgttttcgtcgcgttttcgttattcggggcgcgttttggtttttgtgtcgttgtttgcggatcgtttggcgtagtcgcggagagggggcggaggggcgggtatt

SEQ ID NO: 3140 - DNA, 740 bp, Artificial Sequence
  chemically treated genomic DNA (Homo sapiens) CpG-island No: 3140
aatacccgcccctccgccccctctccgcgactacgccaaacgatccgcaaacaacgacacaaaaaccaaaacgcgccccgaataacgaaaacgcgacgaaaacgaaaacacgaaaaccccgaaccctaaatcgacgcgaactccgactacgcgtacgcgacgacgacgacgaaaaacgccaaatatacgaacgataacgactacgaaaaacgcgactttatacgctaaaaccgaccgaaatacgcgcgtacgcgacaaaactactacgaaaaaccccgccgccccgaaaaaaaaaaaaaaaaaaaaaaaaaaaaaaaaaaaaactaaaccgaaaaaaaaaacgaccgcgaaaactaaaatacccttcgctccgaatccaaaaacaaccgcgcgccaaacgacgcaaaaaatcaataaccccgaaactaaaattccgcaaccaacctaaatcgaaacgtaaatcctaatataactaacgaaaaatcgaaacgtatataaaatataaacgcgtatatttacaaacaaacatcgacacgtataaacgacgcgaaccgatactacgttccgaaaaaaccatccgacgtcacaaactatactaaaaaaataaaataaccgtcctcaaaaacccccgcgaacgaaacgctacacacacgtccacctataaaatatatatacgtacgtaaaatatacaacccctatcaaaatctaacgaaaaaaactaaccgaaataaaaatcaaaa

SEQ ID NO: 3141 - DNA, 533 bp, Artificial Sequence
  chemically treated genomic DNA (Homo sapiens) CpG-island No: 3141
atagagcgtatattttcgtttttcgattttttttagagagagatggggtttcgttcgggttcggagtttatcgttttttttttagggcggatttcggttcgcggggtatttggttttgcgcgggtagtagttaggtttcggtcggaggattttgtagagtagtttgtatagtcggggttcggcggtttcgtacgtcgcgtttagtttttcgcgtatggttcggttttttaggcgtagtttcgttggttttacgcgttttttagcgttcgcgttttatcgttcggagtttgtagttttcgtttcgggggcggggcgagtcgagtagcggcgggggttttttatttacgcgatgtttcgggtcgagttgtttttttttttttgtttttttcggcgatttcgggatttaagtatttaggggttcgtagtcggcgtttgtcgcggagtttggatggtattggattgtgtttgggttaagatgttcgggtcgtgttgggtttcgtgtttgtttattttttataaaatcgtaataaagt

SEQ ID NO: 3142 - DNA, 533 bp, Artificial Sequence
  chemically treated genomic DNA (Homo sapiens) CpG-island No: 3142
actttattacgattttataaaaaataaacaaacacgaaacccaacacgacccgaacatcttaacccaaacacaatccaataccatccaaactccgcgacaaacgccgactacgaacccctaaatacttaaatcccgaaatcgccgaaaaaaacaaaaaaaaaaaaacaactcgacccgaaacatcgcgtaaataaaaaacccccgccgctactcgactcgccccgcccccgaaacgaaaactacaaactccgaacgataaaacgcgaacgctaaaaaacgcgtaaaaccaacgaaactacgcctaaaaaaccgaaccatacgcgaaaaactaaacgcgacgtacgaaaccgccgaaccccgactatacaaactactctacaaaatcctccgaccgaaacctaactactacccgcgcaaaaccaaataccccgcgaaccgaaatccgccctaaaaaaaaaacgataaactccgaacccgaacgaaaccccatctctctctaaaaaaaatcgaaaaacgaaaatatacgctctat

SEQ ID NO: 3143 - DNA, 533 bp, Artificial Sequence
  chemically treated genomic DNA (Homo sapiens) CpG-island No: 3143
gttttattgcgattttatggggaataaataaatacgaggtttaatacgattcgggtattttagtttagatatagtttagtgttatttaaatttcgcggtagacgtcggttgcgggtttttgggtgtttgggtttcgggatcgtcggggaaggtagggaaggaggggtagttcggttcgggatatcgcgtgggtgaagagttttcgtcgttgttcggttcgtttcgttttcggggcgggggttgtaggtttcgagcgataaagcgcgggcgttgggaggcgcgtggagttagcggagttgcgtttaaggagtcgggttatgcgcgaggggttgggcgcggcgtgcgaggtcgtcgggtttcggttgtgtaggttgttttgtaggatttttcggtcgaagtttgattgttgttcgcgtagagttaggtatttcgcgggtcgaagttcgttttgggagggaagcggtgggtttcgagttcgggcggggttttatttttttttgggagaaatcggagggcggggatgtgcgttttgt

SEQ ID NO: 3144 - DNA, 533 bp, Artificial Sequence
  chemically treated genomic DNA (Homo sapiens) CpG-island No: 3144
acaaaacgcacatccccgccctccgatttctcccaaaaaaaaataaaaccccgcccgaactcgaaacccaccgcttccctcccaaaacgaacttcgacccgcgaaatacctaactctacgcgaacaacaatcaaacttcgaccgaaaaatcctacaaaacaacctacacaaccgaaacccgacgacctcgcacgccgcgcccaacccctcgcgcataacccgactccttaaacgcaactccgctaactccacgcgcctcccaacgcccgcgctttatcgctcgaaacctacaacccccgccccgaaaacgaaacgaaccgaacaacgacgaaaactcttcacccacgcgatatcccgaaccgaactacccctccttccctaccttccccgacgatcccgaaacccaaacacccaaaaacccgcaaccgacgtctaccgcgaaatttaaataacactaaactatatctaaactaaaatacccgaatcgtattaaacctcgtatttatttattccccataaaatcgcaataaaac

SEQ ID NO: 3145 - DNA, 625 bp, Artificial Sequence
  chemically treated genomic DNA (Homo sapiens) CpG-island No: 3145
ttcgttttttaaggttttttttttttttttttatttagttttagtcgcgcggggatattaatttatttttattttcgagaatagcgcggttaggtgttttagaggtgtcgcgggtaggttttcgtagattattgcgtcgcggaagttgtcgggttttggaggttcgggttcggtgcgaaggaaaaaaagcgttttagcgttagttaggttcgatttaggttttatttttagttcggggcgtattgttaggtttttgggttcgggtcgtattattagtagcggtcgcggtttttcggtagtatcgcggtttaggaaggtttggagtagttgtttcgttttagtatttttcgcgtaacgtttttaggcgttcgtagtcggtcgtaggtttatggttacgtaggtttttaggagtcgtagtcgtcggtcggcgtcgggttttttattcgcgtttttcgtcgcgagcgcggttcgttttttcgcgagtcgtatcgcgcgcggtttttagttgtatcggtttttttagcgacggggacgcggttaggatttatttttttgttttttttttattgggtacggatttttggtttcgttttttttaggttaataaggtaggaggtgtacgcgg

SEQ ID NO: 3146 - DNA, 625 bp, Artificial Sequence
  chemically treated genomic DNA (Homo sapiens) CpG-island No: 3146
ccgcgtacacctcctaccttattaacctaaaaaaaacgaaaccaaaaatccgtacccaataaaaaaaaaacaaaaaaataaatcctaaccgcgtccccgtcgctaaaaaaaccgatacaactaaaaaccgcgcgcgatacgactcgcgaaaaaacgaaccgcgctcgcgacgaaaaacgcgaataaaaaacccgacgccgaccgacgactacgactcctaaaaacctacgtaaccataaacctacgaccgactacgaacgcctaaaaacgttacgcgaaaaatactaaaacgaaacaactactccaaaccttcctaaaccgcgatactaccgaaaaaccgcgaccgctactaataatacgacccgaacccaaaaacctaacaatacgccccgaactaaaaataaaacctaaatcgaacctaactaacgctaaaacgctttttttccttcgcaccgaacccgaacctccaaaacccgacaacttccgcgacgcaataatctacgaaaacctacccgcgacacctctaaaacacctaaccgcgctattctcgaaaataaaaataaattaatatccccgcgcgactaaaactaaataaaaaaaaaaaaaaaaaaccttaaaaaacgaa

SEQ ID NO: 3147 - DNA, 625 bp, Artificial Sequence
  chemically treated genomic DNA (Homo sapiens) CpG-island No: 3147
tcgcgtatattttttattttattagtttggaaggggcgggattaggggttcgtgtttaataggaagggagtagaggagtgagttttggtcgcgttttcgtcgttagggaaatcgatgtagttggaggtcgcgcgcgatgcggttcgcggaggagcgggtcgcgttcgcggcggagaacgcggatggggaattcggcgtcgatcgacgattgcgatttttggggatttacgtggttatgagtttgcggtcggttgcgggcgtttgggagcgttgcgcggggagtgttgaggcggagtagttgttttaggtttttttgggtcgcgatgttgtcgaggggtcgcggtcgttgttggtggtgcggttcgggtttaggggtttggtaatacgtttcgggttggaggtgggatttgagtcgggtttggttggcgttaaggcgttttttttttttcgtatcgggttcgagtttttagggttcgatagttttcgcggcgtagtggtttgcggggatttgttcgcggtatttttggagtatttagtcgcgttgttttcggaggtgagggtgggttagtgttttcgcgcggttaaagttgggtgggggaggggaggaggagttttaagggacgga

SEQ ID NO: 3148 - DNA, 625 bp, Artificial Sequence
  chemically treated genomic DNA (Homo sapiens) CpG-island No: 3148
tccgtcccttaaaactcctcctcccctcccccacccaactttaaccgcgcgaaaacactaacccaccctcacctccgaaaacaacgcgactaaatactccaaaaataccgcgaacaaatccccgcaaaccactacgccgcgaaaactatcgaaccctaaaaactcgaacccgatacgaaaaaaaaaaaacgccttaacgccaaccaaacccgactcaaatcccacctccaacccgaaacgtattaccaaacccctaaacccgaaccgcaccaccaacaacgaccgcgacccctcgacaacatcgcgacccaaaaaaacctaaaacaactactccgcctcaacactccccgcgcaacgctcccaaacgcccgcaaccgaccgcaaactcataaccacgtaaatccccaaaaatcgcaatcgtcgatcgacgccgaattccccatccgcgttctccgccgcgaacgcgacccgctcctccgcgaaccgcatcgcgcgcgacctccaactacatcgatttccctaacgacgaaaacgcgaccaaaactcactcctctactcccttcctattaaacacgaacccctaatcccgccccttccaaactaataaaataaaaaatatacgcga

SEQ ID NO: 3149 - DNA, 681 bp, Artificial Sequence
  chemically treated genomic DNA (Homo sapiens) CpG-island No: 3149
atgttgacggtgttttatagttatataggacgcgaggatgttgatagtgttttatagttatataggacgcgaggatgttgacggtgttttatagtcgtataggatcgaggatgttgacggtgttttatagttatataggacgcgaggatgttgacggtgttttatagtcgtataggatcgaggatgttgacggtgttttatagttatataggacgcgaggatgttgacggtgttttatagttatataggacgcgaggatgttgacggtgttttatagtcgtataggacgcgaggatgttgacggtgttttatagttatataggacgcgaggatgttgatagtgttttatagtcgtataggacgcgaggatgttgatagtgttttatagtcgtataggacgcgaggatgttgatagtgttttatagtcgtataggacgcgaggatgttgacggtgttttatagtcgtataggacgcgaggatgttgatagtgttttatagtcgtataggacgcgaggatgttgatagtgttttatagtcgtataggacgcgaggatgttgatagtgttttatagtcgtataggacgcgaggatgttgatagtgttttatagtcgtataggacgcgaggatgttgatagtgttttatagttatataggacgtaaggatgttgacggtgtttta

SEQ ID NO: 3150 - DNA, 681 bp, Artificial Sequence
  chemically treated genomic DNA (Homo sapiens) CpG-island No: 3150
taaaacaccgtcaacatccttacgtcctatataactataaaacactatcaacatcctcgcgtcctatacgactataaaacactatcaacatcctcgcgtcctatacgactataaaacactatcaacatcctcgcgtcctatacgactataaaacactatcaacatcctcgcgtcctatacgactataaaacactatcaacatcctcgcgtcctatacgactataaaacaccgtcaacatcctcgcgtcctatacgactataaaacactatcaacatcctcgcgtcctatacgactataaaacactatcaacatcctcgcgtcctatacgactataaaacactatcaacatcctcgcgtcctatataactataaaacaccgtcaacatcctcgcgtcctatacgactataaaacaccgtcaacatcctcgcgtcctatataactataaaacaccgtcaacatcctcgcgtcctatataactataaaacaccgtcaacatcctcgatcctatacgactataaaacaccgtcaacatcctcgcgtcctatataactataaaacaccgtcaacatcctcgatcctatacgactataaaacaccgtcaacatcctcgcgtcctatataactataaaacactatcaacatcctcgcgtcctatataactataaaacaccgtcaacat

SEQ ID NO: 3151 - DNA, 681 bp, Artificial Sequence
  chemically treated genomic DNA (Homo sapiens) CpG-island No: 3151
tgaggtatcgttagtatttttgcgttttgtgtggttgtgaggtattgttagtattttcgcgttttgtgcggttgtgaggtattgttagtattttcgcgttttgtgcggttgtgaggtattgttagtattttcgcgttttgtgcggttgtgaggtattgttagtattttcgcgttttgtgcggttgtgaggtattgttagtattttcgcgttttgtgcggttgtgaggtatcgttagtattttcgcgttttgtgcggttgtgaggtattgttagtattttcgcgttttgtgcggttgtgaggtattgttagtattttcgcgttttgtgcggttgtgaggtattgttagtattttcgcgttttgtgtggttgtgaggtatcgttagtattttcgcgttttgtgcggttgtgaggtatcgttagtattttcgcgttttgtgtggttgtgaggtatcgttagtattttcgcgttttgtgtggttgtgaggtatcgttagtattttcggttttgtgcggttgtgaggtatcgttagtattttcgcgttttgtgtggttgtgaggtatcgttagtattttcggttttgtgcggttgtgaggtatcgttagtattttcgcgttttgtgtggttgtgaggtattgttagtattttcgcgttttgtgtggttgtgaggtatcgttagtat

SEQ ID NO: 3152 - DNA, 681 bp, Artificial Sequence
  chemically treated genomic DNA (Homo sapiens) CpG-island No: 3152
atactaacgatacctcacaaccacacaaaacgcgaaaatactaacaatacctcacaaccacacaaaacgcgaaaatactaacgatacctcacaaccgcacaaaaccgaaaatactaacgatacctcacaaccacacaaaacgcgaaaatactaacgatacctcacaaccgcacaaaaccgaaaatactaacgatacctcacaaccacacaaaacgcgaaaatactaacgatacctcacaaccacacaaaacgcgaaaatactaacgatacctcacaaccgcacaaaacgcgaaaatactaacgatacctcacaaccacacaaaacgcgaaaatactaacaatacctcacaaccgcacaaaacgcgaaaatactaacaatacctcacaaccgcacaaaacgcgaaaatactaacaatacctcacaaccgcacaaaacgcgaaaatactaacgatacctcacaaccgcacaaaacgcgaaaatactaacaatacctcacaaccgcacaaaacgcgaaaatactaacaatacctcacaaccgcacaaaacgcgaaaatactaacaatacctcacaaccgcacaaaacgcgaaaatactaacaatacctcacaaccgcacaaaacgcgaaaatactaacaatacctcacaaccacacaaaacgcaaaaatactaacgatacctca

SEQ ID NO: 3153 - DNA, 1002 bp, Artificial Sequence
  chemically treated genomic DNA (Homo sapiens) CpG-island No: 3153
gggcgcggagagcgtacgaagcgtttagggggtttgcggtttcgcggcggggggttatgttaagggagaacgcgacgacgcgagggggagggacggagggtatttcgaagtcggggatcgttaagtcggagttagtggagtggggcgaagtcggcgagttggaaattttttgtaatcgtttatttttagtttttggcgttcggttggttttttggcggtttggcgggcggttgcgtagggttgggatttgtgttggatcgttaggttttcgaagagatggtcgttatttttgtcgtggtcgcgggcgtcgttagaggggcggcggcggtcggcgttggtagtggttgggcgcgcgggggcgttatggggtaggtttcgcgggaagtgggggaagtagttagagatttgttggatggggcggatggggtcggggtatacgtcgatggttatatgtttttggatgtaaacggtcgtttttttttcgcgtcgtcgggggttatataggtagcgtttcgtcgttttcgtacggtttggttcggagcgattttcgtcgggggcggtttagtaggttcggtatggcgcggcggggttttcgcgaaggttagcgcgagtgagtgttaggggcgggcgggtagggggtcggtttagttcgtgttattcggtagtaattacgtagcgtgagtgtgcgggttgtttaggtagcgcggagcggagagagttgcgtggggttatatttattcgtatttatatcggcggatacgtcggtttgggatttcgtgcgcgtattttttcgggataagcggggagttagtaggatagggatttacggatcgtatatttatttatacgtttttgtaggtgttagtatatgcggggtttcgttcgtttttacgggatatacgaaggtgtgtaaggataatgtaagtgtacgtatacgtgtgtagatacgtagtggaagtatttattcgtttatatttgtaagatatatatatatataaatat

SEQ ID NO: 3154 - DNA, 1002 bp, Artificial Sequence
  chemically treated genomic DNA (Homo sapiens) CpG-island No: 3154
atatttatatatatatatatcttacaaatataaacgaataaatacttccactacgtatctacacacgtatacgtacacttacattatccttacacaccttcgtatatcccgtaaaaacgaacgaaaccccgcatatactaacacctacaaaaacgtataaataaatatacgatccgtaaatccctatcctactaactccccgcttatcccgaaaaaatacgcgcacgaaatcccaaaccgacgtatccgccgatataaatacgaataaatataaccccacgcaactctctccgctccgcgctacctaaacaacccgcacactcacgctacgtaattactaccgaataacacgaactaaaccgaccccctacccgcccgcccctaacactcactcgcgctaaccttcgcgaaaaccccgccgcgccataccgaacctactaaaccgcccccgacgaaaatcgctccgaaccaaaccgtacgaaaacgacgaaacgctacctatataacccccgacgacgcgaaaaaaaaacgaccgtttacatccaaaaacatataaccatcgacgtataccccgaccccatccgccccatccaacaaatctctaactacttcccccacttcccgcgaaacctaccccataacgcccccgcgcgcccaaccactaccaacgccgaccgccgccgcccctctaacgacgcccgcgaccacgacaaaaataacgaccatctcttcgaaaacctaacgatccaacacaaatcccaaccctacgcaaccgcccgccaaaccgccaaaaaaccaaccgaacgccaaaaactaaaaataaacgattacaaaaaatttccaactcgccgacttcgccccactccactaactccgacttaacgatccccgacttcgaaataccctccgtccctccccctcgcgtcgtcgcgttctcccttaacataaccccccgccgcgaaaccgcaaaccccctaaacgcttcgtacgctctccgcgccc

SEQ ID NO: 3155 - DNA, 1002 bp, Artificial Sequence
  chemically treated genomic DNA (Homo sapiens) CpG-island No: 3155
atgtttgtgtgtgtgtgtgttttataggtatgagcgagtggatgtttttattacgtgtttgtatacgtgtgcgtgtatttgtattgtttttgtatattttcgtgtgtttcgtgagagcgaacggagtttcgtatgtgttggtatttgtaggaacgtgtgagtgagtgtgcgattcgtgggtttttgttttgttggtttttcgtttgtttcgagggagtgcgcgtacggggttttaggtcggcgtgttcgtcggtgtgagtgcgagtgagtgtggttttacgtagtttttttcgtttcgcgttgtttgggtagttcgtatatttacgttgcgtggttgttgtcgggtgatacgggttgggtcggttttttgttcgttcgtttttggtatttattcgcgttggttttcgcggaggtttcgtcgcgttatgtcgggtttgttgagtcgttttcggcgggggtcgtttcgggttaggtcgtgcgggggcggcgaggcgttgtttgtatgattttcggcggcgcggggaaaaggcgatcgtttgtatttaggagtatgtggttatcgacgtgtgtttcggttttattcgttttatttagtagatttttggttattttttttatttttcgcgggatttgttttatgacgttttcgcgcgtttagttattgttagcgtcggtcgtcgtcgtttttttgacggcgttcgcgattacgataaggatggcgattattttttcggaagtttaacgatttagtataggttttagttttgcgtagtcgttcgttaagtcgttagaggattagtcgaacgttaaaggttaggagtggacgattgtaggaagtttttaattcgtcgatttcgttttattttattggtttcggtttggcggttttcggtttcggggtgtttttcgtttttttttttcgcgtcgtcgcgtttttttttggtataatttttcgtcgcggggtcgtagattttttaagcgtttcgtgcgtttttcgcgttt

SEQ ID NO: 3156 - DNA, 1002 bp, Artificial Sequence
  chemically treated genomic DNA (Homo sapiens) CpG-island No: 3156
aaacgcgaaaaacgcacgaaacgcttaaaaaatctacgaccccgcgacgaaaaattataccaaaaaaaaacgcgacgacgcgaaaaaaaaaaacgaaaaacaccccgaaaccgaaaaccgccaaaccgaaaccaataaaataaaacgaaatcgacgaattaaaaacttcctacaatcgtccactcctaacctttaacgttcgactaatcctctaacgacttaacgaacgactacgcaaaactaaaacctatactaaatcgttaaacttccgaaaaaataatcgccatccttatcgtaatcgcgaacgccgtcaaaaaaacgacgacgaccgacgctaacaataactaaacgcgcgaaaacgtcataaaacaaatcccgcgaaaaataaaaaaaataaccaaaaatctactaaataaaacgaataaaaccgaaacacacgtcgataaccacatactcctaaatacaaacgatcgccttttccccgcgccgccgaaaatcatacaaacaacgcctcgccgcccccgcacgacctaacccgaaacgacccccgccgaaaacgactcaacaaacccgacataacgcgacgaaacctccgcgaaaaccaacgcgaataaataccaaaaacgaacgaacaaaaaaccgacccaacccgtatcacccgacaacaaccacgcaacgtaaatatacgaactacccaaacaacgcgaaacgaaaaaaactacgtaaaaccacactcactcgcactcacaccgacgaacacgccgacctaaaaccccgtacgcgcactccctcgaaacaaacgaaaaaccaacaaaacaaaaacccacgaatcgcacactcactcacacgttcctacaaataccaacacatacgaaactccgttcgctctcacgaaacacacgaaaatatacaaaaacaatacaaatacacgcacacgtatacaaacacgtaataaaaacatccactcgctcatacctataaaacacacacacacacaaacat

SEQ ID NO: 3157 - DNA, 1977 bp, Artificial Sequence
  chemically treated genomic DNA (Homo sapiens) CpG-island No: 3157
tggtcgcgaaggttagagaaggtaatggtaggggaggttagtttttgtcgcgggtcggttgtagagcggacgtttcgttttgttttcggtttttttttcgttcgtcgggttcgtcgtgtcgaataattgttgttcggagttttcgtgacgcggagttttaattgttgcgattcggaagaagcgaaaaggagtttttttcgtttcgtattttgagcgttcgggcgtgtaaacgtgggtggcggagagcggttgttttttttttttttgtttttttttttttcgcggcgttttcgtgtgtgcgggtgtgtgagtgcgtgtgtttttttcgtttattttcgtatacgtttcggtattagtgtaggcggcgagtcggcggtttttcgttcgttcgtttcggtagttgcgttttcgtttcgtttcgtcgtcgtcgtcgtcgtcgtcgtcgtcgtttttgtagtcgtagtcgggtatggtgagtgagtgaggtttagtcgtcgcgcgttttttcggttcgtcgtcggattttagttttaatcggtttcgttttagggagttagtttgcggcgggagcgcgttgcggggtcgggcggttgggggattcgggcggtcgagttgcgtttggaggggcggttcgtgcgttttcggttttaggcgcgtagggtcgcgggatttcgttttgggagcgggttttacgtttttttcggtttcgagttttttttttcgagggttgcgcgtatttttttcgttcgtttgttcgcggttttttttttgttttcggagcgttagtcgttttatttcgtgatcggtttttcgttttgtttcgtaggattcgttcggacgggattacgtcgtcgtcgtcgtcgtcgtcgttcggagtcgcgtttcgggttttgtttgagtcgagtcgcgcgcggggtcgtagttatcgtcggcgggggatggggttgtttaggaggcgcgtcgagttcgtagggggagcgcggagtcggcgcgtagtttgagagttcgagtagttcgcgtcgggtcggttcgtgcgtatcgcgcgtcgtcgtcgttattgtcgttcgcgtttcgatggcgttatcgtttcggagtcgttgatcgtttagcgtttttagttcggttcgcgcggcgggtttttcgagttcggttcgtcgggggagcggtttgtcgcggaagttttttcgcgttttttcgttcggtttcgttatggcgttgcggcgttttttgttgttgttgttgttttcgttggagtttttggatttgttgtttagcgtttacggagttcgcggtcgcgtcgttaatcggattttgagtgtaggcggcgttgtcgtcgggggtcggagggtcgggggcgttttggtacggggcggtcgcgagttgaacggtatcgttcgggcgttcggaatttcggaggcgggaagtcggcgggggtagttcgcggcggttgtggcggcggcggttagcgcggtcgttatttacgagacgtgttggggttattacgacgtgagcggttagtacgataaggagttcgagtgtaataatagcgagagcggttatttgtattgttgcggtatttgttattatcgtttttgttgtaagaagcgttacgagaagttggattagcgttagtgtattaattattagagttcggtgtgggtatagacgtttagtattaaggtggtgtcgtcggggttcgagaataagtacgattcggagaaggataagattaattttatcgtttatattatttgcggggtgatcgttttcgttatcgtggtcggcgttttcgttaaggttttttacgataaggtttatcgttttttacgggagatgaatatttataggtgagagcgtcgcgtgtcgcgcgtttcggttttttcgcggttttatttttttagtttgttttttttgttttttttattttcggtattattatatttttttaggttttttagttatttttattatcgtttt

SEQ ID NO: 3158 - DNA, 1977 bp, Artificial Sequence
  chemically treated genomic DNA (Homo sapiens) CpG-island No: 3158
aaaacgataataaaaataactaaaaaacctaaaaaaatataataataccgaaaataaaaaaaacaaaaaaaacaaactaaaaaaataaaaccgcgaaaaaaccgaaacgcgcgacacgcgacgctctcacctataaatattcatctcccgtaaaaaacgataaaccttatcgtaaaaaaccttaacgaaaacgccgaccacgataacgaaaacgatcaccccgcaaataatataaacgataaaattaatcttatccttctccgaatcgtacttattctcgaaccccgacgacaccaccttaatactaaacgtctatacccacaccgaactctaataattaatacactaacgctaatccaacttctcgtaacgcttcttacaacaaaaacgataataacaaataccgcaacaatacaaataaccgctctcgctattattacactcgaactccttatcgtactaaccgctcacgtcgtaataaccccaacacgtctcgtaaataacgaccgcgctaaccgccgccgccacaaccgccgcgaactacccccgccgacttcccgcctccgaaattccgaacgcccgaacgataccgttcaactcgcgaccgccccgtaccaaaacgcccccgaccctccgacccccgacgacaacgccgcctacactcaaaatccgattaacgacgcgaccgcgaactccgtaaacgctaaacaacaaatccaaaaactccaacgaaaacaacaacaacaacaaaaaacgccgcaacgccataacgaaaccgaacgaaaaaacgcgaaaaaacttccgcgacaaaccgctcccccgacgaaccgaactcgaaaaacccgccgcgcgaaccgaactaaaaacgctaaacgatcaacgactccgaaacgataacgccatcgaaacgcgaacgacaataacgacgacgacgcgcgatacgcacgaaccgacccgacgcgaactactcgaactctcaaactacgcgccgactccgcgctccccctacgaactcgacgcgcctcctaaacaaccccatcccccgccgacgataactacgaccccgcgcgcgactcgactcaaacaaaacccgaaacgcgactccgaacgacgacgacgacgacgacgacgtaatcccgtccgaacgaatcctacgaaacaaaacgaaaaaccgatcacgaaataaaacgactaacgctccgaaaacaaaaaaaaaaccgcgaacaaacgaacgaaaaaaatacgcgcaaccctcgaaaaaaaaaactcgaaaccgaaaaaaacgtaaaacccgctcccaaaacgaaatcccgcgaccctacgcgcctaaaaccgaaaacgcacgaaccgcccctccaaacgcaactcgaccgcccgaatcccccaaccgcccgaccccgcaacgcgctcccgccgcaaactaactccctaaaacgaaaccgattaaaactaaaatccgacgacgaaccgaaaaaacgcgcgacgactaaacctcactcactcaccatacccgactacgactacaaaaacgacgacgacgacgacgacgacgacgacgaaacgaaacgaaaacgcaactaccgaaacgaacgaacgaaaaaccgccgactcgccgcctacactaataccgaaacgtatacgaaaataaacgaaaaaaacacacgcactcacacacccgcacacacgaaaacgccgcgaaaaaaaaaaaaacaaaaaaaaaaaaaacaaccgctctccgccacccacgtttacacgcccgaacgctcaaaatacgaaacgaaaaaaactccttttcgcttcttccgaatcgcaacaattaaaactccgcgtcacgaaaactccgaacaacaattattcgacacgacgaacccgacgaacgaaaaaaaaaccgaaaacaaaacgaaacgtccgctctacaaccgacccgcgacaaaaactaacctcccctaccattaccttctctaaccttcgcgacca

SEQ ID NO: 3159 - DNA, 1977 bp, Artificial Sequence
  chemically treated genomic DNA (Homo sapiens) CpG-island No: 3159
ggagcgatggtggaaatgattagagggtttggggaggtgtgatgatgtcgagagtgaagaggataggggaagtaagttgagagggtgaggtcgcggggagatcggggcgcgcggtacgcggcgtttttatttgtggatgtttatttttcgtggagggcggtgggttttgtcgtaggagattttggcgaagacgtcggttacgatgacgaaggcgattatttcgtaggtgatgtagacggtgaagttggttttgttttttttcgggtcgtatttgttttcgggtttcggcgatattattttggtgttgggcgtttgtatttatatcgggttttggtagttggtgtattggcgttggtttagtttttcgtggcgttttttgtagtagaagcggtagtagtaggtatcgtagtagtataggtagtcgttttcgttgttgttatattcgaattttttgtcgtattggtcgtttacgtcgtagtagttttagtacgtttcgtaggtgacggtcgcgttggtcgtcgtcgttatagtcgtcgcgggttgttttcgtcggtttttcgttttcgggatttcgggcgttcgggcggtgtcgtttagttcgcggtcgtttcgtgttagggcgttttcggtttttcggttttcgacggtagcgtcgtttgtatttagggttcggttggcggcgcggtcgcgggtttcgtggacgttgggtagtaggtttagggattttagcgagagtagtagtagtagtaggaggcgtcgtagcgttatggcggggtcgggcgggagggcgcggggaggttttcgcggtaggtcgttttttcggcgggtcgggttcggaggattcgtcgcgcgggtcgggttggaggcgttgagcggttagcggtttcggggcgatggcgttatcgaggcgcgggcggtagtggcggcggcggcgcgcggtgcgtacggatcggttcggcgcgggttgttcgggtttttaggttgcgcgtcggtttcgcgttttttttgcgggttcggcgcgttttttgggtagttttatttttcgtcggcggtgattgcggtttcgcgcgcggttcggtttaggtaggattcgaagcgcggtttcgggcggcggcggcggcggcggcggcgtggtttcgttcgggcgggttttgcgggataagacggggagtcggttacggggtggggcgattggcgtttcgggagtaggaggagaatcgcgggtaggcgggcggggagggtgcgcgtagttttcgaggagagagattcggagtcgggaggggcgtagagttcgtttttaagacggggtttcgcggttttgcgcgtttggaatcgagagcgtacgggtcgtttttttaggcgtagttcggtcgttcgggttttttagtcgttcggtttcgtagcgcgttttcgtcgtaggttggttttttgggacggagtcggttgaggttggggttcggcggcgagtcgggagagcgcgcggcggttggattttatttatttattatgttcggttgcgattgtagaggcggcggcggcggcggcggcggcggcggcggggcgaggcgggaacgtagttgtcggagcgagcgagcggagagtcgtcggttcgtcgtttgtattagtgtcggaacgtgtgcgagagtgagcgagggagatatacgtatttatatattcgtatatacgggagcgtcgcgaggggaggggggataggggaggggagggtagtcgtttttcgttatttacgtttgtacgttcgggcgtttagggtgcggggcgggggggattttttttcgtttttttcggatcgtagtagttgaagtttcgcgttacgaaagtttcggatagtagttattcgatacggcgaattcggcgggcgaagagggggtcgggagtagggcggaacgttcgttttgtagtcggttcgcggtagggattgattttttttgttattgttttttttagttttcgcgatta

SEQ ID NO: 3160 - DNA, 1977 bp, Artificial Sequence
  chemically treated genomic DNA (Homo sapiens) CpG-island No: 3160
taatcgcgaaaactaaaaaaaacaataacaaaaaaaatcaatccctaccgcgaaccgactacaaaacgaacgttccgccctactcccgaccccctcttcgcccgccgaattcgccgtatcgaataactactatccgaaactttcgtaacgcgaaacttcaactactacgatccgaaaaaaacgaaaaaaaatcccccccgccccgcaccctaaacgcccgaacgtacaaacgtaaataacgaaaaacgactaccctcccctcccctatcccccctcccctcgcgacgctcccgtatatacgaatatataaatacgtatatctccctcgctcactctcgcacacgttccgacactaatacaaacgacgaaccgacgactctccgctcgctcgctccgacaactacgttcccgcctcgccccgccgccgccgccgccgccgccgccgccgcctctacaatcgcaaccgaacataataaataaataaaatccaaccgccgcgcgctctcccgactcgccgccgaaccccaacctcaaccgactccgtcccaaaaaaccaacctacgacgaaaacgcgctacgaaaccgaacgactaaaaaacccgaacgaccgaactacgcctaaaaaaacgacccgtacgctctcgattccaaacgcgcaaaaccgcgaaaccccgtcttaaaaacgaactctacgcccctcccgactccgaatctctctcctcgaaaactacgcgcaccctccccgcccgcctacccgcgattctcctcctactcccgaaacgccaatcgccccaccccgtaaccgactccccgtcttatcccgcaaaacccgcccgaacgaaaccacgccgccgccgccgccgccgccgcccgaaaccgcgcttcgaatcctacctaaaccgaaccgcgcgcgaaaccgcaatcaccgccgacgaaaaataaaactacccaaaaaacgcgccgaacccgcaaaaaaaacgcgaaaccgacgcgcaacctaaaaacccgaacaacccgcgccgaaccgatccgtacgcaccgcgcgccgccgccgccactaccgcccgcgcctcgataacgccatcgccccgaaaccgctaaccgctcaacgcctccaacccgacccgcgcgacgaatcctccgaacccgacccgccgaaaaaacgacctaccgcgaaaacctccccgcgccctcccgcccgaccccgccataacgctacgacgcctcctactactactactactctcgctaaaatccctaaacctactacccaacgtccacgaaacccgcgaccgcgccgccaaccgaaccctaaatacaaacgacgctaccgtcgaaaaccgaaaaaccgaaaacgccctaacacgaaacgaccgcgaactaaacgacaccgcccgaacgcccgaaatcccgaaaacgaaaaaccgacgaaaacaacccgcgacgactataacgacgacgaccaacgcgaccgtcacctacgaaacgtactaaaactactacgacgtaaacgaccaatacgacaaaaaattcgaatataacaacaacgaaaacgactacctatactactacgatacctactactaccgcttctactacaaaaaacgccacgaaaaactaaaccaacgccaatacaccaactaccaaaacccgatataaatacaaacgcccaacaccaaaataatatcgccgaaacccgaaaacaaatacgacccgaaaaaaaacaaaaccaacttcaccgtctacatcacctacgaaataatcgccttcgtcatcgtaaccgacgtcttcgccaaaatctcctacgacaaaacccaccgccctccacgaaaaataaacatccacaaataaaaacgccgcgtaccgcgcgccccgatctccccgcgacctcaccctctcaacttacttcccctatcctcttcactctcgacatcatcacacctccccaaaccctctaatcatttccaccatcgctcc

SEQ ID NO: 3161 - DNA, 682 bp, Artificial Sequence
  chemically treated genomic DNA (Homo sapiens) CpG-island No: 3161
gattttcgcgggttttcgagtttcgcggtttcgggtatcgtggtgtgcgttcggggcgtgttttagtttttggttcgttttttttcgtttttttttcggaattacgttcgtttttcgcgtacgtagttcgtcggttttgtagcgtcgtaggatagggcgggattggggtgggaggtcgttggttggttggcgggttgcggaaggcggggttcgtgtgcgtattagcgcgttttcgtttagcgttgtttttgcgcgcgtagttggtcggttcgcggcggtgttgcgcggattcggcgtcggggttcggtatggcgggggtcggggttaagtcgggtcggattcggatttaaatgtttttgttttttttcgcgttgttggttttgttgttagttgcgtttagcgttttttttttaggtcggtgagggttttcggtcgcgtcggcggcggcggcggcggcgggagggagggggcggagaggaggaagaaagattgaggagggggcgcgcgttttattgaggcgcgtgaggtagagtgggtagggtggagggagggggcgcgcggcgaggggagggatcgtgaggaggcgcgtggttcgagtttttagggatgggttgcgagttggggagattgaggaagcgggcggggtttgaggaaatgttgaggttaggaattgaataggagt

SEQ ID NO: 3162 - DNA, 682 bp, Artificial Sequence
  chemically treated genomic DNA (Homo sapiens) CpG-island No: 3162
actcctattcaattcctaacctcaacatttcctcaaaccccgcccgcttcctcaatctccccaactcgcaacccatccctaaaaactcgaaccacgcgcctcctcacgatccctcccctcgccgcgcgccccctccctccaccctacccactctacctcacgcgcctcaataaaacgcgcgccccctcctcaatctttcttcctcctctccgccccctccctcccgccgccgccgccgccgccgacgcgaccgaaaaccctcaccgacctaaaaaaaaaacgctaaacgcaactaacaacaaaaccaacaacgcgaaaaaaaacaaaaacatttaaatccgaatccgacccgacttaaccccgacccccgccataccgaaccccgacgccgaatccgcgcaacaccgccgcgaaccgaccaactacgcgcgcaaaaacaacgctaaacgaaaacgcgctaatacgcacacgaaccccgccttccgcaacccgccaaccaaccaacgacctcccaccccaatcccgccctatcctacgacgctacaaaaccgacgaactacgtacgcgaaaaacgaacgtaattccgaaaaaaaaacgaaaaaaaacgaaccaaaaactaaaacacgccccgaacgcacaccacgatacccgaaaccgcgaaactcgaaaacccgcgaaaatc

SEQ ID NO: 3163 - DNA, 682 bp, Artificial Sequence
  chemically treated genomic DNA (Homo sapiens) CpG-island No: 3163
atttttatttagtttttggttttagtatttttttagatttcgttcgtttttttagtttttttaattcgtagtttatttttgggagttcgggttacgcgtttttttacgattttttttttcgtcgcgcgttttttttttttattttatttattttgttttacgcgttttagtaaggcgcgcgttttttttttagtttttttttttttttttcgttttttttttttcgtcgtcgtcgtcgtcgtcggcgcggtcgggaatttttatcggtttagaaagagggcgttaagcgtaattagtagtaagattaatagcgcggagaagaatagaggtatttaggttcgggttcggttcggtttggtttcggttttcgttatgtcgggtttcgacgtcggattcgcgtagtatcgtcgcgggtcgattagttgcgcgcgtaggagtaacgttgagcgaggacgcgttggtgcgtatacgagtttcgtttttcgtagttcgttagttaattaacggttttttattttagtttcgttttgttttacgacgttgtagggtcgacgggttgcgtgcgcgaggagcgggcgtggtttcgggaggagggcgagggggagcggattaagagttgaaatacgtttcgggcgtatattacggtgttcggaatcgcggggttcggggattcgcgggggtt

SEQ ID NO: 3164 - DNA, 682 bp, Artificial Sequence
  chemically treated genomic DNA (Homo sapiens) CpG-island No: 3164
aacccccgcgaatccccgaaccccgcgattccgaacaccgtaatatacgcccgaaacgtatttcaactcttaatccgctccccctcgccctcctcccgaaaccacgcccgctcctcgcgcacgcaacccgtcgaccctacaacgtcgtaaaacaaaacgaaactaaaataaaaaaccgttaattaactaacgaactacgaaaaacgaaactcgtatacgcaccaacgcgtcctcgctcaacgttactcctacgcgcgcaactaatcgacccgcgacgatactacgcgaatccgacgtcgaaacccgacataacgaaaaccgaaaccaaaccgaaccgaacccgaacctaaatacctctattcttctccgcgctattaatcttactactaattacgcttaacgccctctttctaaaccgataaaaattcccgaccgcgccgacgacgacgacgacgacgaaaaaaaaaaaacgaaaaaaaaaaaaaaaaactaaaaaaaaaacgcgcgccttactaaaacgcgtaaaacaaaataaataaaataaaaaaaaaaaacgcgcgacgaaaaaaaaaatcgtaaaaaaacgcgtaacccgaactcccaaaaataaactacgaattaaaaaaactaaaaaaacgaacgaaatctaaaaaaatactaaaaccaaaaactaaataaaaat

SEQ ID NO: 3165 - DNA, 748 bp, Artificial Sequence
  chemically treated genomic DNA (Homo sapiens) CpG-island No: 3165
ttattcgggtcggagggttttcgcggaattagacgttttgtttcgaggtaggtttttttcgcggcgttatagttttttcggttttgatttcgttagtcggtaggtttttaagtcgatcgcgaagattttttttttttcgttcgttcgtttttttttcgtttttttttcgtttttagtttaggattttttaatttagagttcggttcggattttagtcgtttagtttttgaattgtttacgtcgcggttagtagtttttatatttcggcgttttttagggtttgtatcggttcgggggcggagttacgtatttaggcgaagagcgcggtcgtcgcgggggcggttttcgaggcgttgggttcgcgttttatgcgaggacgtttcgtcggcgttttcgggagggacggtacgggggcggcgtttgtcgggggtaggtgagcgtcggagtcggatcggggacgcgtgatgggtagggcgcggggcggggtttgtggtgggaagcggttcgtaggtcgggagagagggtgcggtcgggttttcgggttattggggattagtggtgggcggggtcggacgatagtttcggagtcgttttttagttagttcgtttcggcggcgttcgtagcgttttcgttcgtagttttttgtttcgttgggttttttagtttttcgtttttattttttcgtattttttatttttagttataattttatgttttatgtaggtgtattgcgcgttatagtttata

SEQ ID NO: 3166 - DNA, 748 bp, Artificial Sequence
  chemically treated genomic DNA (Homo sapiens) CpG-island No: 3166
tataaactataacgcgcaatacacctacataaaacataaaattataactaaaaataaaaaatacgaaaaaataaaaacgaaaaactaaaaaacccaacgaaacaaaaaactacgaacgaaaacgctacgaacgccgccgaaacgaactaactaaaaaacgactccgaaactatcgtccgaccccgcccaccactaatccccaataacccgaaaacccgaccgcaccctctctcccgacctacgaaccgcttcccaccacaaaccccgccccgcgccctacccatcacgcgtccccgatccgactccgacgctcacctacccccgacaaacgccgcccccgtaccgtccctcccgaaaacgccgacgaaacgtcctcgcataaaacgcgaacccaacgcctcgaaaaccgcccccgcgacgaccgcgctcttcgcctaaatacgtaactccgcccccgaaccgatacaaaccctaaaaaacgccgaaatataaaaactactaaccgcgacgtaaacaattcaaaaactaaacgactaaaatccgaaccgaactctaaattaaaaaatcctaaactaaaaacgaaaaaaaaacgaaaaaaaaacgaacgaacgaaaaaaaaaaaatcttcgcgatcgacttaaaaacctaccgactaacgaaatcaaaaccgaaaaaactataacgccgcgaaaaaaacctacctcgaaacaaaacgtctaattccgcgaaaaccctccgacccgaataa

SEQ ID NO: 3167 - DNA, 748 bp, Artificial Sequence
  chemically treated genomic DNA (Homo sapiens) CpG-island No: 3167
tgtgaattgtggcgcgtagtgtatttgtatgaaatatgaaattatgattaaaaataaagagtacgagggggtaggagcgagaggttgagaggtttagcgagataggaggttgcgggcggagacgttgcgagcgtcgtcggggcgggttgattgggaggcggtttcggggttgtcgttcggtttcgtttattattgatttttagtggttcgaaggttcggtcgtattttttttttcggtttgcgggtcgttttttattatagatttcgtttcgcgttttatttattacgcgttttcggttcggtttcggcgtttatttattttcggtaggcgtcgttttcgtgtcgtttttttcggaagcgtcggcggagcgttttcgtatggagcgcgagtttagcgtttcggaggtcgttttcgcggcggtcgcgtttttcgtttgggtacgtgatttcgttttcgggtcggtgtaggttttgaggggcgtcgagatgtgggagttgttggtcgcggcgtgggtagtttaggggttgggcggttgaggttcgagtcgggttttgggttgaaggattttgggttgggagcggagggggagcggaggaggagcgggcgggcggggaaggaagggttttcgcggtcgatttaggggtttgtcggttggcggggttagggtcggaggggttgtggcgtcgcgggaagaatttgtttcggggtagagcgtttggtttcgcgagagtttttcggttcgaatag

SEQ ID NO: 3168 - DNA, 748 bp, Artificial Sequence
  chemically treated genomic DNA (Homo sapiens) CpG-island No: 3168
ctattcgaaccgaaaaactctcgcgaaaccaaacgctctaccccgaaacaaattcttcccgcgacgccacaacccctccgaccctaaccccgccaaccgacaaacccctaaatcgaccgcgaaaacccttccttccccgcccgcccgctcctcctccgctccccctccgctcccaacccaaaatccttcaacccaaaacccgactcgaacctcaaccgcccaacccctaaactacccacgccgcgaccaacaactcccacatctcgacgcccctcaaaacctacaccgacccgaaaacgaaatcacgtacccaaacgaaaaacgcgaccgccgcgaaaacgacctccgaaacgctaaactcgcgctccatacgaaaacgctccgccgacgcttccgaaaaaaacgacacgaaaacgacgcctaccgaaaataaataaacgccgaaaccgaaccgaaaacgcgtaataaataaaacgcgaaacgaaatctataataaaaaacgacccgcaaaccgaaaaaaaaaatacgaccgaaccttcgaaccactaaaaatcaataataaacgaaaccgaacgacaaccccgaaaccgcctcccaatcaacccgccccgacgacgctcgcaacgtctccgcccgcaacctcctatctcgctaaacctctcaacctctcgctcctaccccctcgtactctttatttttaatcataatttcatatttcatacaaatacactacgcgccacaattcaca

SEQ ID NO: 3169 - DNA, 1113 bp, Artificial Sequence
  chemically treated genomic DNA (Homo sapiens) CpG-island No: 3169
gtttttatcgtttttttttcggaggtcgttaaataatttgggtatataaaacgttgagtgtggtcgcggcgtagcgcgcgttaacgagttcgggtcggcgggagtagaggaagggcggggcgttcggcgggaacggggagggattttttatttcgcggtataggtgcgagcgcggcggttttatttatttattcgatgaagtagttggcgttttttttcgtgaagttttttttttagtcgcggggtaggtttgcggaaacgttagaaaagtcgggttaaatttgggtcgtcgttgcgcgcgttttttattcgtcggttcggcgtttatttgagcggattatgtggttcgagttgacgggtttttcggtgcgcgggtgtagttaggtcgtgtagcggagttggttattgcgggtagagaggtgtatttgttagcgtcgttatagttcgtcgggtgttcgttcggttttcgttttcgcgtttttattcgcgttttcgcgttttcgggttttcgcgtcgtatttgatgaagaagacgcggttatttcggtatatttcgtaggattaatgtttaggtaaagtgtttcgttcgatcgtcgtcgtcgttatgttcgtcgagcgcggatcgtcgcggggtgggggggagggggcgggggcgcgggtaggggcgggggcgggggcggtggcgggggttcggtttgcgcgtggttcggcggcgtcgcgaggcgtttatttaggcgcgggttttttagggagcgatcgttcggtcgggttttggcgttcggagttcgtagtcgtttcggttaatttagcgcggtgttcgcggtttttgttttcgcgtttttttcgtttttagtttgttggtatcggcgtttttttttgttttcgaggtcgggagattcgggcggcgcggggggtcgttggcgggggtcgttggcgggcgcgtttgggtagtttcggggcgcgcggttggattcgattaatttcgaaaacggcgagcgttcgaacgtttagtaaattttagtcgattcgtattatagaatttttcgattcgggaatttcgtttgtgtgtgaattaagttaatatttaggtttttgttatatttttagttttttt

SEQ ID NO: 3170 - DNA, 1113 bp, Artificial Sequence
  chemically treated genomic DNA (Homo sapiens) CpG-island No: 3170
aaaaaaactaaaaatataacaaaaacctaaatattaacttaattcacacacaaacgaaattcccgaatcgaaaaattctataatacgaatcgactaaaatttactaaacgttcgaacgctcgccgttttcgaaattaatcgaatccaaccgcgcgccccgaaactacccaaacgcgcccgccaacgacccccgccaacgaccccccgcgccgcccgaatctcccgacctcgaaaacaaaaaaaaacgccgataccaacaaactaaaaacgaaaaaaacgcgaaaacaaaaaccgcgaacaccgcgctaaattaaccgaaacgactacgaactccgaacgccaaaacccgaccgaacgatcgctccctaaaaaacccgcgcctaaataaacgcctcgcgacgccgccgaaccacgcgcaaaccgaacccccgccaccgcccccgcccccgcccctacccgcgcccccgccccctcccccccaccccgcgacgatccgcgctcgacgaacataacgacgacgacgatcgaacgaaacactttacctaaacattaatcctacgaaatataccgaaataaccgcgtcttcttcatcaaatacgacgcgaaaacccgaaaacgcgaaaacgcgaataaaaacgcgaaaacgaaaaccgaacgaacacccgacgaactataacgacgctaacaaatacacctctctacccgcaataaccaactccgctacacgacctaactacacccgcgcaccgaaaaacccgtcaactcgaaccacataatccgctcaaataaacgccgaaccgacgaataaaaaacgcgcgcaacgacgacccaaatttaacccgacttttctaacgtttccgcaaacctaccccgcgactaaaaaaaaaacttcacgaaaaaaaacgccaactacttcatcgaataaataaataaaaccgccgcgctcgcacctataccgcgaaataaaaaatccctccccgttcccgccgaacgccccgcccttcctctactcccgccgacccgaactcgttaacgcgcgctacgccgcgaccacactcaacgttttatatacccaaattatttaacgacctccgaaaaaaaaacgataaaaac

SEQ ID NO: 3171 - DNA, 1113 bp, Artificial Sequence
  chemically treated genomic DNA (Homo sapiens) CpG-island No: 3171
aaggaggttgggaatatggtaggaatttgagtgttaatttggtttatatataagcggagttttcgggtcgggaagttttgtggtgcgggtcggttggggtttattgagcgttcgggcgttcgtcgttttcggagttggtcgggtttaatcgcgcgtttcgaagttgtttaggcgcgttcgttagcggttttcgttagcggtttttcgcgtcgttcgggtttttcggtttcgggggtaaaggggagcgtcggtgttagtaggttgggggcggggaaggcgcggggataaaggtcgcgggtatcgcgttgggttggtcggagcggttgcgaatttcgggcgttaggattcggtcgggcggtcgttttttgaggagttcgcgtttggatggacgtttcgcggcgtcgtcgggttacgcgtaggtcgagttttcgttatcgttttcgttttcgtttttgttcgcgttttcgtttttttttttttatttcgcggcggttcgcgttcggcgaatatggcggcggcgacggtcgggcgggatattttatttgagtattggttttacggggtgtgtcgggatggtcgcgttttttttattaagtgcggcgcgaggattcggggacgcggggacgcgggtgggggcgcgggggcgggggtcgggcgggtattcggcgggttgtggcggcgttaataggtgtatttttttgttcgtagtgattagtttcgttgtacgatttggttgtattcgcgtatcggggagttcgttaattcgggttatatgattcgtttaggtgggcgtcgggtcggcgggtggggggcgcgcgtagcggcggtttaagtttgattcgatttttttggcgttttcgtagatttgtttcgcggttgggaggagggttttacggaggagggcgttagttattttatcgagtgagtgagtggggtcgtcgcgttcgtatttgtgtcgcggggtggggggttttttttcgttttcgtcgggcgtttcgttttttttttgttttcgtcggttcgggttcgttggcgcgcgttgcgtcgcggttatatttaacgttttgtgtgtttaagttgtttggcggttttcgagaggaaggcggtgggggt

SEQ ID NO: 3172 - DNA, 1113 bp, Artificial Sequence
  chemically treated genomic DNA (Homo sapiens) CpG-island No: 3172
acccccaccgccttcctctcgaaaaccgccaaacaacttaaacacacaaaacgttaaatataaccgcgacgcaacgcgcgccaacgaacccgaaccgacgaaaacaaaaaaaaaacgaaacgcccgacgaaaacgaaaaaaaaccccccaccccgcgacacaaatacgaacgcgacgaccccactcactcactcgataaaataactaacgccctcctccgtaaaaccctcctcccaaccgcgaaacaaatctacgaaaacgccaaaaaaatcgaatcaaacttaaaccgccgctacgcgcgccccccacccgccgacccgacgcccacctaaacgaatcatataacccgaattaacgaactccccgatacgcgaatacaaccaaatcgtacaacgaaactaatcactacgaacaaaaaaatacacctattaacgccgccacaacccgccgaatacccgcccgacccccgcccccgcgcccccacccgcgtccccgcgtccccgaatcctcgcgccgcacttaataaaaaaaacgcgaccatcccgacacaccccgtaaaaccaatactcaaataaaatatcccgcccgaccgtcgccgccgccatattcgccgaacgcgaaccgccgcgaaataaaaaaaaaaaaacgaaaacgcgaacaaaaacgaaaacgaaaacgataacgaaaactcgacctacgcgtaacccgacgacgccgcgaaacgtccatccaaacgcgaactcctcaaaaaacgaccgcccgaccgaatcctaacgcccgaaattcgcaaccgctccgaccaacccaacgcgatacccgcgacctttatccccgcgccttccccgcccccaacctactaacaccgacgctcccctttacccccgaaaccgaaaaacccgaacgacgcgaaaaaccgctaacgaaaaccgctaacgaacgcgcctaaacaacttcgaaacgcgcgattaaacccgaccaactccgaaaacgacgaacgcccgaacgctcaataaaccccaaccgacccgcaccacaaaacttcccgacccgaaaactccgcttatatataaaccaaattaacactcaaattcctaccatattcccaacctcctt

SEQ ID NO: 3173 - DNA, 546 bp, Artificial Sequence
  chemically treated genomic DNA (Homo sapiens) CpG-island No: 3173
gaacggtggttcgttttaggtatttagggttcgggaaagaggcgcgggtagtacgcgcgggttacgtgggcgatgcgggcgtgcgtttttgtattcgcgggagggggatggggaaaaggggcggggtcggcgtttgatttttcgtgaagtttagcgcggggaaggatcggaatttcgggcgggcggtttgttgataatatggcggttggagttgtttgggtatttcgaggaggcggtggggtttattttcggaagaagggttttttttcgcgttagtgtagcggtttttttggattcggaagttcgggtcggttgttgaatgaggggagtcgggtttttttcgcgttagttttttcgtatttttcgtttcgattcgggtttcgttatgtttttttttcggcggaaaggtagttgagggggcgtcggcggggagttaggtcgggttttaggggcggcggtggggtaggtgggtttgcgagggttttttttaaggcggtagtaaggtttttagcgagtttcgatttcggcgtagatgttttttgagtg

SEQ ID NO: 3174 - DNA, 546 bp, Artificial Sequence
  chemically treated genomic DNA (Homo sapiens) CpG-island No: 3174
cactcaaaaaacatctacgccgaaatcgaaactcgctaaaaaccttactaccgccttaaaaaaaaccctcgcaaacccacctaccccaccgccgcccctaaaacccgacctaactccccgccgacgccccctcaactacctttccgccgaaaaaaaaacataacgaaacccgaatcgaaacgaaaaatacgaaaaaactaacgcgaaaaaaacccgactcccctcattcaacaaccgacccgaacttccgaatccaaaaaaaccgctacactaacgcgaaaaaaaacccttcttccgaaaataaaccccaccgcctcctcgaaatacccaaacaactccaaccgccatattatcaacaaaccgcccgcccgaaattccgatccttccccgcgctaaacttcacgaaaaatcaaacgccgaccccgccccttttccccatccccctcccgcgaatacaaaaacgcacgcccgcatcgcccacgtaacccgcgcgtactacccgcgcctctttcccgaaccctaaatacctaaaacgaaccaccgttc

SEQ ID NO: 3175 - DNA, 546 bp, Artificial Sequence
  chemically treated genomic DNA (Homo sapiens) CpG-island No: 3175
tatttagggggtatttgcgtcgaggtcgaggttcgttgaaggttttgttgtcgttttggggaaagttttcgtaggtttatttgttttatcgtcgtttttgaggttcggtttgatttttcgtcggcgtttttttagttattttttcgtcggaagaaggatatggcggggttcgggtcgggacggagggtgcggggggattggcgcggggagggttcggttttttttatttagtaatcggttcggattttcgggtttagaggggtcgttgtattagcgcgaaaagggatttttttttcgggagtgggttttatcgttttttcgggatgtttaggtagttttagtcgttatattattaataagtcgttcgttcggagtttcggttttttttcgcgttaggttttacgggaggttaagcgtcggtttcgttttttttttttatttttttttcgcgggtgtaggggcgtacgttcgtatcgtttacgtgattcgcgcgtgttattcgcgtttttttttcgggttttgggtgtttggagcgagttatcgttt

SEQ ID NO: 3176 - DNA, 546 bp, Artificial Sequence
  chemically treated genomic DNA (Homo sapiens) CpG-island No: 3176
aaacgataactcgctccaaacacccaaaacccgaaaaaaaaacgcgaataacacgcgcgaatcacgtaaacgatacgaacgtacgcccctacacccgcgaaaaaaaaataaaaaaaaaaaacgaaaccgacgcttaacctcccgtaaaacctaacgcgaaaaaaaaccgaaactccgaacgaacgacttattaataatataacgactaaaactacctaaacatcccgaaaaaacgataaaacccactcccgaaaaaaaaatcccttttcgcgctaatacaacgacccctctaaacccgaaaatccgaaccgattactaaataaaaaaaaccgaaccctccccgcgccaatccccccgcaccctccgtcccgacccgaaccccgccatatccttcttccgacgaaaaaataactaaaaaaacgccgacgaaaaatcaaaccgaacctcaaaaacgacgataaaacaaataaacctacgaaaactttccccaaaacgacaacaaaaccttcaacgaacctcgacctcgacgcaaataccccctaaata

SEQ ID NO: 3177 - DNA, 522 bp, Artificial Sequence
  chemically treated genomic DNA (Homo sapiens) CpG-island No: 3177
gagttttacgaggagaattacgagggcggtaaggagtgttatcgggtttttaacgagtttatcggggattttgacgagtttttaagtaagtcggattatagtagtatcgagaagattaagattatcggagttacgtatatggcggcgttagggttgaatatcgcgtaggtttaggacggtagttattcgtaggagtatttgtagattttgttcgagttcgttaaggagatgatgcgcgtggtggacgattttaataataatatgttgtggtttaattttaagtttcgcgtcggttttaattatgggttttttacggtcggggttatcggtattattaagttgttgtacgatatttggggagatatcgttaatatcgttagtaggatggatattatcggcgtggagtgtcgtatttaggtgagcgaagagagttatcgcgttttgagtaagatgggttatgatttcgattatagagggatcgtgaatgttaaggggaaaggttagatgaagatttatttgtat

SEQ ID NO: 3178 - DNA, 522 bp, Artificial Sequence
  chemically treated genomic DNA (Homo sapiens) CpG-island No: 3178
atacaaataaatcttcatctaacctttccccttaacattcacgatccctctataatcgaaatcataacccatcttactcaaaacgcgataactctcttcgctcacctaaatacgacactccacgccgataatatccatcctactaacgatattaacgatatctccccaaatatcgtacaacaacttaataataccgataaccccgaccgtaaaaaacccataattaaaaccgacgcgaaacttaaaattaaaccacaacatattattattaaaatcgtccaccacgcgcatcatctccttaacgaactcgaacaaaatctacaaatactcctacgaataactaccgtcctaaacctacgcgatattcaaccctaacgccgccatatacgtaactccgataatcttaatcttctcgatactactataatccgacttacttaaaaactcgtcaaaatccccgataaactcgttaaaaacccgataacactccttaccgccctcgtaattctcctcgtaaaactc

SEQ ID NO: 3179 - DNA, 522 bp, Artificial Sequence
  chemically treated genomic DNA (Homo sapiens) CpG-island No: 3179
gtataggtaggtttttatttggtttttttttttgatatttacggtttttttgtagtcgaagttatagtttattttgtttaagacgcggtagtttttttcgtttatttggatgcggtattttacgtcggtggtgtttattttgttggcgatgttgacggtgtttttttagatgtcgtatagtagtttggtggtgtcgatgatttcggtcgtgaggggtttatggttgaagtcgacgcggagtttgaagttgaattatagtatgttgttgttgaagtcgtttattacgcgtattatttttttggcgaattcgaataggatttgtaggtgtttttgcgggtggttgtcgttttgggtttgcgcggtgtttagttttgacgtcgttatgtacgtggtttcgatggttttgattttttcgatgttgttgtagttcggtttgtttaggagttcgttaaagttttcgatgagttcgttgaggattcggtagtattttttgtcgttttcgtagtttttttcgtagaattt

SEQ ID NO: 3180 - DNA, 522 bp, Artificial Sequence
  chemically treated genomic DNA (Homo sapiens) CpG-island No: 3180
aaattctacgaaaaaaactacgaaaacgacaaaaaatactaccgaatcctcaacgaactcatcgaaaactttaacgaactcctaaacaaaccgaactacaacaacatcgaaaaaatcaaaaccatcgaaaccacgtacataacgacgtcaaaactaaacaccgcgcaaacccaaaacgacaaccacccgcaaaaacacctacaaatcctattcgaattcgccaaaaaaataatacgcgtaataaacgacttcaacaacaacatactataattcaacttcaaactccgcgtcgacttcaaccataaacccctcacgaccgaaatcatcgacaccaccaaactactatacgacatctaaaaaaacaccgtcaacatcgccaacaaaataaacaccaccgacgtaaaataccgcatccaaataaacgaaaaaaactaccgcgtcttaaacaaaataaactataacttcgactacaaaaaaaccgtaaatatcaaaaaaaaaaaccaaataaaaacctacctatac

SEQ ID NO: 3181 - DNA, 778 bp, Artificial Sequence
  chemically treated genomic DNA (Homo sapiens) CpG-island No: 3181
ggcggtaggtgaagttttcggaggcggttgggttattggggttagagagcggggaggcggcggcggtatttgagttttaggatttcgcgtcgttggcggggtttgggggatcgggtaggtaggggacgtattgcggcggtaggaggcgttttcgggtatcgttttcgggtagtttttgattcgttaggcgtagtgtttcggttagagtttagatgtagttgtaggcgaagcgtagcgtttcgattttggtgagtttggtgtcgtcggggaacgagggtagtacgttgcgtagtgcgtttagggtcgcgtttaagttgtgtatgcggttgcgttcgcgatcgttggttttgacgcgtcggtttttgcgtagcgagtgtagtagcgtttcggagcggattcgcgttcggtcgcggcgtcgtcgttttttttgttcgtcgttttgtgtttttggaattttagacgttcgggagatattgggcgcgtttttgcgggtcggcgcgggcggtttcgaagcggaggttgtttgttggagtttggtatagtttttttcgtcggtgaggaagtcggataggttattgtcgttgttgttggcgtagtcgaggtcggagatgtaggttttaaggcgggttggtatcgttgcgttgtgtaggatcgacggatagatagaaaggcgtttagagcgttgtagttcggattgagggtagagtcgttagggcgtatttacgtttttaatagtttggggttgttattttgtgttagttgcgggtgcgagagtttg

SEQ ID NO: 3182 - DNA, 778 bp, Artificial Sequence
  chemically treated genomic DNA (Homo sapiens) CpG-island No: 3182
caaactctcgcacccgcaactaacacaaaataacaaccccaaactattaaaaacgtaaatacgccctaacgactctaccctcaatccgaactacaacgctctaaacgcctttctatctatccgtcgatcctacacaacgcaacgataccaacccgccttaaaacctacatctccgacctcgactacgccaacaacaacgacaataacctatccgacttcctcaccgacgaaaaaaactataccaaactccaacaaacaacctccgcttcgaaaccgcccgcgccgacccgcaaaaacgcgcccaatatctcccgaacgtctaaaattccaaaaacacaaaacgacgaacaaaaaaaacgacgacgccgcgaccgaacgcgaatccgctccgaaacgctactacactcgctacgcaaaaaccgacgcgtcaaaaccaacgatcgcgaacgcaaccgcatacacaacttaaacgcgaccctaaacgcactacgcaacgtactaccctcgttccccgacgacaccaaactcaccaaaatcgaaacgctacgcttcgcctacaactacatctaaactctaaccgaaacactacgcctaacgaatcaaaaactacccgaaaacgatacccgaaaacgcctcctaccgccgcaatacgtcccctacctacccgatcccccaaaccccgccaacgacgcgaaatcctaaaactcaaataccgccgccgcctccccgctctctaaccccaataacccaaccgcctccgaaaacttcacctaccgcc

SEQ ID NO: 3183 - DNA, 778 bp, Artificial Sequence
  chemically treated genomic DNA (Homo sapiens) CpG-island No: 3183
taggttttcgtattcgtaattggtatagagtaataattttaggttgttgggaacgtaagtgcgttttggcggttttgtttttagttcgggttgtagcgttttgagcgtttttttatttgttcgtcggttttgtatagcgtaacgatgttagttcgttttgagatttgtattttcgatttcgattgcgttagtagtagcggtagtgatttattcggtttttttatcgacgaggaagattgtgttagattttaataggtagttttcgtttcggggtcgttcgcgtcggttcgtaggggcgcgtttaatatttttcgggcgtttgaggttttaggggtataggacgacgagtaggagaggcggcggcgtcgcggtcggacgcgggttcgtttcgaggcgttgttgtattcgttgcgtaggagtcggcgcgttaaggttaacgatcgcgagcgtaatcgtatgtataatttgaacgcggttttggacgtattgcgtagcgtgttgttttcgtttttcgacgatattaagtttattaaaatcgagacgttgcgtttcgtttataattatatttgggttttggtcgagatattgcgtttggcggattaagggttgttcggaggcggtgttcgggagcgttttttgtcgtcgtagtgcgttttttgtttgttcggttttttaagtttcgttagcgacgcggagttttggggtttaggtgtcgtcgtcgttttttcgttttttgattttagtagtttagtcgttttcgaagattttatttatcgtt

SEQ ID NO: 3184 - DNA, 778 bp, Artificial Sequence
  chemically treated genomic DNA (Homo sapiens) CpG-island No: 3184
aacgataaataaaatcttcgaaaacgactaaactactaaaatcaaaaaacgaaaaaacgacgacgacacctaaaccccaaaactccgcgtcgctaacgaaacttaaaaaaccgaacaaacaaaaaacgcactacgacgacaaaaaacgctcccgaacaccgcctccgaacaacccttaatccgccaaacgcaatatctcgaccaaaacccaaatataattataaacgaaacgcaacgtctcgattttaataaacttaatatcgtcgaaaaacgaaaacaacacgctacgcaatacgtccaaaaccgcgttcaaattatacatacgattacgctcgcgatcgttaaccttaacgcgccgactcctacgcaacgaatacaacaacgcctcgaaacgaacccgcgtccgaccgcgacgccgccgcctctcctactcgtcgtcctatacccctaaaacctcaaacgcccgaaaaatattaaacgcgcccctacgaaccgacgcgaacgaccccgaaacgaaaactacctattaaaatctaacacaatcttcctcgtcgataaaaaaaccgaataaatcactaccgctactactaacgcaatcgaaatcgaaaatacaaatctcaaaacgaactaacatcgttacgctatacaaaaccgacgaacaaataaaaaaacgctcaaaacgctacaacccgaactaaaaacaaaaccgccaaaacgcacttacgttcccaacaacctaaaattattactctataccaattacgaatacgaaaaccta

SEQ ID NO: 3185 - DNA, 526 bp, Artificial Sequence
  chemically treated genomic DNA (Homo sapiens) CpG-island No: 3185
ttacgcgttcggtcggttttttgagtgatgtcgtcggcgattagattagttcgtgtgagtatcgagtgtggtatacgattggttttaggattttttaagtattcggcgtaataatgggcgttttttttttttgttattttcgttttcgcggtagttcgggtgaatggagcgaggcggtaggttattttcgtgtagcgttcgggtatttgtataatttatgttcgcgggaggtcgttatcgttttttttttaattcggagtgtgttcgtaattatcgtcggttaatcggcggcgtcgcgcggtttcgggagtcggttcgggttaagttggttagggcgtttttaggtagtgaaatagaggcggggtcggcgggcgattagcggtcgaggtacgttttttttggggcgggttgggcgtttttcgttggggtgggacggggaggcggggcgcgagcgcgaaagtgtgagtcgtttagtgagttgcggaaatttggagggtatttggagtttgggttcgtattttttttt

SEQ ID NO: 3186 - DNA, 526 bp, Artificial Sequence
  chemically treated genomic DNA (Homo sapiens) CpG-island No: 3186
aaaaaaaaatacgaacccaaactccaaataccctccaaatttccgcaactcactaaacgactcacactttcgcgctcgcgccccgcctccccgtcccaccccaacgaaaaacgcccaacccgccccaaaaaaaacgtacctcgaccgctaatcgcccgccgaccccgcctctatttcactacctaaaaacgccctaaccaacttaacccgaaccgactcccgaaaccgcgcgacgccgccgattaaccgacgataattacgaacacactccgaattaaaaaaaaaacgataacgacctcccgcgaacataaattatacaaatacccgaacgctacacgaaaataacctaccgcctcgctccattcacccgaactaccgcgaaaacgaaaataacaaaaaaaaaaaacgcccattattacgccgaatacttaaaaaatcctaaaaccaatcgtataccacactcgatactcacacgaactaatctaatcgccgacgacatcactcaaaaaaccgaccgaacgcgtaa

SEQ ID NO: 3187 - DNA, 526 bp, Artificial Sequence
  chemically treated genomic DNA (Homo sapiens) CpG-island No: 3187
gagaggggatgcgaatttaaattttaagtattttttaggttttcgtaatttattgggcggtttatattttcgcgttcgcgtttcgttttttcgttttattttagcgaggggcgtttagttcgttttaagaggagcgtgtttcggtcgttaatcgttcgtcgatttcgtttttgttttattgtttggagacgttttggttagtttagttcgagtcgattttcggggtcgcgcgacgtcgtcgattggtcggcggtaattacgggtatatttcgggttgggggaggggcgatggcggtttttcgcgagtataaattatgtaaatattcgggcgttgtacggggatgatttgtcgtttcgttttatttattcgggttgtcgcgggggcggaggtggtaagggaggggggcgtttattgttgcgtcgggtatttaaggggttttgaggttagtcgtgtgttatattcggtgtttatacgagttgatttgatcgtcggcgatattatttaggagatcggtcgggcgcgtgg

SEQ ID NO: 3188 - DNA, 526 bp, Artificial Sequence
  chemically treated genomic DNA (Homo sapiens) CpG-island No: 3188
ccacgcgcccgaccgatctcctaaataatatcgccgacgatcaaatcaactcgtataaacaccgaatataacacacgactaacctcaaaaccccttaaatacccgacgcaacaataaacgcccccctcccttaccacctccgcccccgcgacaacccgaataaataaaacgaaacgacaaatcatccccgtacaacgcccgaatatttacataatttatactcgcgaaaaaccgccatcgcccctcccccaacccgaaatatacccgtaattaccgccgaccaatcgacgacgtcgcgcgaccccgaaaatcgactcgaactaaactaaccaaaacgtctccaaacaataaaacaaaaacgaaatcgacgaacgattaacgaccgaaacacgctcctcttaaaacgaactaaacgcccctcgctaaaataaaacgaaaaaacgaaacgcgaacgcgaaaatataaaccgcccaataaattacgaaaacctaaaaaatacttaaaatttaaattcgcatcccctctc

SEQ ID NO: 3189 - DNA, 634 bp, Artificial Sequence
  chemically treated genomic DNA (Homo sapiens) CpG-island No: 3189
ttttcgtatttatcgtttatacgcgcggtgtatagcgttagtagtagtaggagtagcgcggtcgttaggagttttatgttgatcggaggggcgcggcgtgggagtagggatatggggagggcgttggttcgtcggagcggcggttcggagacgttatttagttttgttcggttttttttgttcggggcgcgtttttcggttttgttggtttcggttgcgtcgtcggtggatgtttagggttgtttgtggtcgtgcgttgcgttttgcgtttgttttcgcgttttttttatagttttttttcgttcgttttggttttttttaaattcgtttttgttttcgtagcgagcgagtttattaatatgtagaattattcggtgatttattgagattttttaatgtggtgaggggaggagatttttttagttcgttcgtcgttcgtttcgggaaaggattcgttatcgtagcggcgtatattcggagttacgcgcgtatacgtatatatatattcgttattttttcgtttatataatacgtcgttttcgtatatttgtatatttatattatagcgcgtatatatttttagcgtttcgttttgtttttggggagtttagacggtggagaggttgttgaaggg

SEQ ID NO: 3190 - DNA, 634 bp, Artificial Sequence
  chemically treated genomic DNA (Homo sapiens) CpG-island No: 3190
cccttcaacaacctctccaccgtctaaactccccaaaaacaaaacgaaacgctaaaaatatatacgcgctataatataaatatacaaatatacgaaaacgacgtattatataaacgaaaaaataacgaatatatatatacgtatacgcgcgtaactccgaatatacgccgctacgataacgaatcctttcccgaaacgaacgacgaacgaactaaaaaaatctcctcccctcaccacattaaaaaatctcaataaatcaccgaataattctacatattaataaactcgctcgctacgaaaacaaaaacgaatttaaaaaaaaccaaaacgaacgaaaaaaaactataaaaaaaacgcgaaaacaaacgcaaaacgcaacgcacgaccacaaacaaccctaaacatccaccgacgacgcaaccgaaaccaacaaaaccgaaaaacgcgccccgaacaaaaaaaaccgaacaaaactaaataacgtctccgaaccgccgctccgacgaaccaacgccctccccatatccctactcccacgccgcgcccctccgatcaacataaaactcctaacgaccgcgctactcctactactactaacgctatacaccgcgcgtataaacgataaatacgaaaa

SEQ ID NO: 3191 - DNA, 634 bp, Artificial Sequence
  chemically treated genomic DNA (Homo sapiens) CpG-island No: 3191
ttttttagtagtttttttatcgtttgggttttttaaaggtagagcgggacgttggaaatgtgtgcgcgttgtggtatgggtgtgtaagtgtgcgaaggcggcgtgttgtgtgagcgagagggtagcggatgtgtgtgtgcgtgtgcgcgcgtggtttcgggtgtgcgtcgttgcgatagcgggttttttttcggggcgggcgacgggcgggttgggaaggttttttttttttattatattgagaaattttagtgagttatcgagtggttttgtatattaatgagttcgttcgttgcgagggtaggagcggatttaaaagaggttagggcgggcggagggaggttgtggagagagcgcggagataagcgtagagcgtagcgtacggttatagatagttttgggtatttatcgacggcgtagtcggagttagtagagtcggaaggcgcgtttcgggtagagaaagtcgagtagagttgggtggcgttttcgggtcgtcgtttcgacgggttagcgttttttttatgtttttgtttttacgtcgcgttttttcggttagtatgaggtttttggcggtcgcgttgtttttgttgttgttggcgttgtatatcgcgcgtgtggacggtgagtgcgggga

SEQ ID NO: 3192 - DNA, 634 bp, Artificial Sequence
  chemically treated genomic DNA (Homo sapiens) CpG-island No: 3192
tccccgcactcaccgtccacacgcgcgatatacaacgccaacaacaacaaaaacaacgcgaccgccaaaaacctcatactaaccgaaaaaacgcgacgtaaaaacaaaaacataaaaaaaacgctaacccgtcgaaacgacgacccgaaaacgccacccaactctactcgactttctctacccgaaacgcgccttccgactctactaactccgactacgccgtcgataaatacccaaaactatctataaccgtacgctacgctctacgcttatctccgcgctctctccacaacctccctccgcccgccctaacctcttttaaatccgctcctaccctcgcaacgaacgaactcattaatatacaaaaccactcgataactcactaaaatttctcaatataataaaaaaaaaaaaccttcccaacccgcccgtcgcccgccccgaaaaaaaacccgctatcgcaacgacgcacacccgaaaccacgcgcgcacacgcacacacacatccgctaccctctcgctcacacaacacgccgccttcgcacacttacacacccataccacaacgcgcacacatttccaacgtcccgctctacctttaaaaaacccaaacgataaaaaaactactaaaaaa

SEQ ID NO: 3193 - DNA, 534 bp, Artificial Sequence
  chemically treated genomic DNA (Homo sapiens) CpG-island No: 3193
tacgatcgtttcggttgttttttcgggttcgtttttattttagttcggtttttgcggtttagagtgacgttggttgtttggacgttttttatttcggtttaggagtttcgggaggcgttatatgtcgttgttagtattatagagagttcgtagtcgaaagcgcgagattaatttttgggatagcggttagaaaggtcgtcgcgatgtttcgagtggtcgagtattcgaggaagttttgagttggttaattagaagggagttcggtcggaaagacggcgttgtagagaggaagtgtagggcggaggcgtattcggggttagcggggcggtgacgtgcggtaagggtatggggatgtgggtttaggttttcgtgggggatgtttttggcgtttttaagtcgaggtaggggatcgtaggtggcgaagcgagttattcggaagcgggattttcgggaagtggggttggagcggttttagggaagtaagaggattttgtagatcgtgaggtcgcgaattaggaaaggtttttttaggtt

SEQ ID NO: 3194 - DNA, 534 bp, Artificial Sequence
  chemically treated genomic DNA (Homo sapiens) CpG-island No: 3194
aacctaaaaaaacctttcctaattcgcgacctcacgatctacaaaatcctcttacttccctaaaaccgctccaaccccacttcccgaaaatcccgcttccgaataactcgcttcgccacctacgatcccctacctcgacttaaaaacgccaaaaacatcccccacgaaaacctaaacccacatccccatacccttaccgcacgtcaccgccccgctaaccccgaatacgcctccgccctacacttcctctctacaacgccgtctttccgaccgaactcccttctaattaaccaactcaaaacttcctcgaatactcgaccactcgaaacatcgcgacgacctttctaaccgctatcccaaaaattaatctcgcgctttcgactacgaactctctataatactaacaacgacatataacgcctcccgaaactcctaaaccgaaataaaaaacgtccaaacaaccaacgtcactctaaaccgcaaaaaccgaactaaaataaaaacgaacccgaaaaaacaaccgaaacgatcgta

SEQ ID NO: 3195 - DNA, 534 bp, Artificial Sequence
  chemically treated genomic DNA (Homo sapiens) CpG-island No: 3195
ggtttggagaagttttttttggttcgcggttttacggtttgtaaggtttttttatttttttgaagtcgttttagttttatttttcgaaggtttcgttttcgggtggttcgtttcgttatttgcggttttttgtttcggtttgggaacgttaaggatattttttacggaagtttgggtttatatttttatgtttttgtcgtacgttatcgtttcgttggtttcgaatacgttttcgttttgtattttttttttgtagcgtcgttttttcggtcgggtttttttttaattggttagtttagagttttttcgggtattcggttattcggggtatcgcggcggtttttttagtcgttgttttaagggttggtttcgcgttttcggttgcgagttttttgtggtgttggtagcgatatgtggcgtttttcgggatttttgggtcgaggtaagggacgtttaagtaattagcgttattttgggtcgtaaagatcgaattggagtgggggcgggttcgaggaaatagtcgaagcgatcgtg

SEQ ID NO: 3196 - DNA, 534 bp, Artificial Sequence
  chemically treated genomic DNA (Homo sapiens) CpG-island No: 3196
cacgatcgcttcgactatttcctcgaacccgcccccactccaattcgatctttacgacccaaaataacgctaattacttaaacgtcccttacctcgacccaaaaatcccgaaaaacgccacatatcgctaccaacaccacaaaaaactcgcaaccgaaaacgcgaaaccaacccttaaaacaacgactaaaaaaaccgccgcgataccccgaataaccgaatacccgaaaaaactctaaactaaccaattaaaaaaaaacccgaccgaaaaaacgacgctacaaaaaaaaaatacaaaacgaaaacgtattcgaaaccaacgaaacgataacgtacgacaaaaacataaaaatataaacccaaacttccgtaaaaaatatccttaacgttcccaaaccgaaacaaaaaaccgcaaataacgaaacgaaccacccgaaaacgaaaccttcgaaaaataaaactaaaacgacttcaaaaaaataaaaaaaccttacaaaccgtaaaaccgcgaaccaaaaaaaacttctccaaacc

SEQ ID NO: 3197 - DNA, 750 bp, Artificial Sequence
  chemically treated genomic DNA (Homo sapiens) CpG-island No: 3197
ggagtatttgtagcgtggcggtggtcgagcgcggaggttcgttattgtttttgattagtattattagtttgtgtttggttacgtcgcgttcgtttagtagtttggcggtgcgtatttcgttattgtgcgtttatacgtcgaatagttcgggtttcgtggttttgagtagttggtacgatagttaggcgttttggttcgagtcgtcgtttatcgttattattttggttattaggtagttcggttcggtcgttcggggtattagttcggtgtagggcgcggagtcgttttgtagcgggtatagtacgaagggcgagttgtcgttggcgtttagtattagtattcgtattagcgtttcgttgtttagcgtcgggaagtcgcggtttgtggcgtttacgcggaattcgaaagtttgtagggtttcgtagtttagcgattggagagcgaataggtggtcgttgttcgtgttaatggagattagggaggtgaggggtaggtgcgggtttcggggcggtagtagcgagtaggtgatttgggcgttggtgttcgagtttttgtttgtggcgttgatattgtcgatgtgtagggcggggttgttgttttcgcggacgaatagggtgtaggaggtttgggtgaaggcgggggcgttgttattgacgttcgatattagtacggttatgttttgttcggtttttagttttggagtttttaagtttgtgatggtgatggtgatgttgtattcggttttggttt

SEQ ID NO: 3198 - DNA, 750 bp, Artificial Sequence
  chemically treated genomic DNA (Homo sapiens) CpG-island No: 3198
aaaccaaaaccgaatacaacatcaccatcaccatcacaaacttaaaaactccaaaactaaaaaccgaacaaaacataaccgtactaatatcgaacgtcaataacaacgcccccgccttcacccaaacctcctacaccctattcgtccgcgaaaacaacaaccccgccctacacatcgacaatatcaacgccacaaacaaaaactcgaacaccaacgcccaaatcacctactcgctactaccgccccgaaacccgcacctacccctcacctccctaatctccattaacacgaacaacgaccacctattcgctctccaatcgctaaactacgaaaccctacaaactttcgaattccgcgtaaacgccacaaaccgcgacttcccgacgctaaacaacgaaacgctaatacgaatactaatactaaacgccaacgacaactcgcccttcgtactatacccgctacaaaacgactccgcgccctacaccgaactaataccccgaacgaccgaaccgaactacctaataaccaaaataataacgataaacgacgactcgaaccaaaacgcctaactatcgtaccaactactcaaaaccacgaaacccgaactattcgacgtataaacgcacaataacgaaatacgcaccgccaaactactaaacgaacgcgacgtaaccaaacacaaactaataatactaatcaaaaacaataacgaacctccgcgctcgaccaccgccacgctacaaatactcc

SEQ ID NO: 3199 - DNA, 750 bp, Artificial Sequence
  chemically treated genomic DNA (Homo sapiens) CpG-island No: 3199
agattagagtcgagtataatattattattattattatagatttggggattttaaggttgaaaatcgagtagagtataatcgtgttggtgtcggacgttaatgataacgttttcgtttttatttaaattttttatattttgttcgttcgcgagaataatagtttcgttttgtatatcggtagtgttagcgttatagatagagattcgggtattaacgtttaggttatttattcgttgttgtcgtttcgggattcgtatttgttttttatttttttggtttttattaatacggataacggttatttgttcgttttttagtcgttggattacgaggttttgtaggttttcgagtttcgcgtgggcgttatagatcgcggtttttcggcgttgagtagcgaggcgttggtgcgagtgttggtgttggacgttaacgataattcgtttttcgtgttgtattcgttgtagaacggtttcgcgttttgtatcgagttggtgtttcgggcggtcgagtcgggttatttggtgattaaggtggtggcggtggacggcgattcgggttagaacgtttggttgtcgtattagttgtttaaggttacggagttcgggttgttcggcgtgtgggcgtataatggcgaggtgcgtatcgttaggttgttgagcgagcgcgacgtggttaagtataggttagtggtgttggttaaggataatggcgagttttcgcgttcggttatcgttacgttgtaagtgtttt

SEQ ID NO: 3200 - DNA, 750 bp, Artificial Sequence
  chemically treated genomic DNA (Homo sapiens) CpG-island No: 3200
aaaacacttacaacgtaacgataaccgaacgcgaaaactcgccattatccttaaccaacaccactaacctatacttaaccacgtcgcgctcgctcaacaacctaacgatacgcacctcgccattatacgcccacacgccgaacaacccgaactccgtaaccttaaacaactaatacgacaaccaaacgttctaacccgaatcgccgtccaccgccaccaccttaatcaccaaataacccgactcgaccgcccgaaacaccaactcgatacaaaacgcgaaaccgttctacaacgaatacaacacgaaaaacgaattatcgttaacgtccaacaccaacactcgcaccaacgcctcgctactcaacgccgaaaaaccgcgatctataacgcccacgcgaaactcgaaaacctacaaaacctcgtaatccaacgactaaaaaacgaacaaataaccgttatccgtattaataaaaaccaaaaaaataaaaaacaaatacgaatcccgaaacgacaacaacgaataaataacctaaacgttaatacccgaatctctatctataacgctaacactaccgatatacaaaacgaaactattattctcgcgaacgaacaaaatataaaaaatttaaataaaaacgaaaacgttatcattaacgtccgacaccaacacgattatactctactcgattttcaaccttaaaatccccaaatctataataataataataatattatactcgactctaatct

SEQ ID NO: 3201 - DNA, 537 bp, Artificial Sequence
  chemically treated genomic DNA (Homo sapiens) CpG-island No: 3201
taattgttacgatagttaggcgttttggttcgagttatcgtttatcgttattattttggttattaggtagttcggttcggcggttcgttcggggtattagttcggtgtagggcgcggagtcgttttgtagcgggaatagtacgaagagtgagttgtcgttggcgtttagtattagtacgcgtattagcgtttcgttgtttagcgtcgtggagtcgcggtttgaagcgtttacgcggaattcgaatttttgtagggtttcgtagtttagcgatttgagggcgaataggtggtcgttgtttgtgttgatggagattagggaggcgaggggtaggtgcgggtttcggggcggtagtagcgagtaggtgatttggatgttggtgttcgagtttttgcggtgttgacgttgttaatatgtagggcggggttgttgttttcgcggacgaatagggtgtaggaggtttaggtgaaggtgggggttttgttattgacgtaggagattagtatcgttatgttgtattcggtttttagtttaggagt

SEQ ID NO: 3202 - DNA, 537 bp, Artificial Sequence
  chemically treated genomic DNA (Homo sapiens) CpG-island No: 3202
actcctaaactaaaaaccgaatacaacataacgatactaatctcctacgtcaataacaaaacccccaccttcacctaaacctcctacaccctattcgtccgcgaaaacaacaaccccgccctacatattaacaacgtcaacaccgcaaaaactcgaacaccaacatccaaatcacctactcgctactaccgccccgaaacccgcacctacccctcgcctccctaatctccatcaacacaaacaacgaccacctattcgccctcaaatcgctaaactacgaaaccctacaaaaattcgaattccgcgtaaacgcttcaaaccgcgactccacgacgctaaacaacgaaacgctaatacgcgtactaatactaaacgccaacgacaactcactcttcgtactattcccgctacaaaacgactccgcgccctacaccgaactaataccccgaacgaaccgccgaaccgaactacctaataaccaaaataataacgataaacgataactcgaaccaaaacgcctaactatcgtaacaatta

SEQ ID NO: 3203 - DNA, 537 bp, Artificial Sequence
  chemically treated genomic DNA (Homo sapiens) CpG-island No: 3203
atttttaggttgaaaatcgagtataatataacggtgttggttttttacgttaatgataaagtttttatttttatttaaattttttatattttgttcgttcgcgagaataatagtttcgttttgtatattggtagcgttagtatcgtagagattcgggtattaatatttaggttatttattcgttgttgtcgtttcggaattcgtatttgtttttcgtttttttggtttttattaatatagataacggttatttgttcgtttttaggtcgttggattacgaggttttgtaggagttcgagtttcgcgtgggcgttttagatcgcggttttacggcgttgagtagcgaggcgttggtgcgcgtgttggtgttggacgttaacgatagtttatttttcgtgttgttttcgttgtagaacggtttcgcgttttgtatcgagttgatgtttcgggcgggtcgtcgagtcgggttatttggtgattaaggtggtggcggtggacggtgattcgggttagaacgtttggttgtcgtagtagttg

SEQ ID NO: 3204 - DNA, 537 bp, Artificial Sequence
  chemically treated genomic DNA (Homo sapiens) CpG-island No: 3204
caactactacgacaaccaaacgttctaacccgaatcaccgtccaccgccaccaccttaatcaccaaataacccgactcgacgacccgcccgaaacatcaactcgatacaaaacgcgaaaccgttctacaacgaaaacaacacgaaaaataaactatcgttaacgtccaacaccaacacgcgcaccaacgcctcgctactcaacgccgtaaaaccgcgatctaaaacgcccacgcgaaactcgaactcctacaaaacctcgtaatccaacgacctaaaaacgaacaaataaccgttatctatattaataaaaaccaaaaaaacgaaaaacaaatacgaattccgaaacgacaacaacgaataaataacctaaatattaatacccgaatctctacgatactaacgctaccaatatacaaaacgaaactattattctcgcgaacgaacaaaatataaaaaatttaaataaaaataaaaactttatcattaacgtaaaaaaccaacaccgttatattatactcgattttcaacctaaaaat

SEQ ID NO: 3205 - DNA, 524 bp, Artificial Sequence
  chemically treated genomic DNA (Homo sapiens) CpG-island No: 3205
ggaggttcgttattgtttttgattagtattattagtttgtgtttggtcgcgtcgcgttcgtttagtagtttggcggtgcgtttttcgttattgtgcgtttatacgtcgaatagttcgggtttcgtggttttgagtagttggtacgatagttaggcgttttggttcgagtcgtcgtttatcgttattattttggttattaggtagttcggttcggtcgttcgaggtattagttcggtgtagggcgtcgagtcgttttgtagcgggtatagtacgaagggcgagttgtcgttggcgtttagtattagtacgcgtattagtatttcgttgtttagcgtcggggagtcgtggtttgcggcgtttacgcgaaattcgaatttttgtagggtttcgtagtttaaagatttgagggcgaataggtggtcgttgttcgcgttgatggagattagggaggtgaggggtaggtgcgggttttggggcggtagtagcgagtaggtgatttgggcgttggtgtttgagtttttgtt

SEQ ID NO: 3206 - DNA, 524 bp, Artificial Sequence
  chemically treated genomic DNA (Homo sapiens) CpG-island No: 3206
aacaaaaactcaaacaccaacgcccaaatcacctactcgctactaccgccccaaaacccgcacctacccctcacctccctaatctccatcaacgcgaacaacgaccacctattcgccctcaaatctttaaactacgaaaccctacaaaaattcgaatttcgcgtaaacgccgcaaaccacgactccccgacgctaaacaacgaaatactaatacgcgtactaatactaaacgccaacgacaactcgcccttcgtactatacccgctacaaaacgactcgacgccctacaccgaactaatacctcgaacgaccgaaccgaactacctaataaccaaaataataacgataaacgacgactcgaaccaaaacgcctaactatcgtaccaactactcaaaaccacgaaacccgaactattcgacgtataaacgcacaataacgaaaaacgcaccgccaaactactaaacgaacgcgacgcgaccaaacacaaactaataatactaatcaaaaacaataacgaacctcc

SEQ ID NO: 3207 - DNA, 524 bp, Artificial Sequence
  chemically treated genomic DNA (Homo sapiens) CpG-island No: 3207
gatagagatttaggtattaacgtttaggttatttattcgttgttgtcgttttaggattcgtatttgttttttatttttttggtttttattaacgcggataacggttatttattcgtttttaggtttttggattacgaggttttgtaggagttcgggtttcgcgtgggcgtcgtagattacggtttttcggcgttgagtagcgaggtgttggtgcgcgtgttggtgttggacgttaacgataattcgtttttcgtgttgtattcgttgtagaacggttcggcgttttgtatcgagttggtatttcgggcggtcgagtcgggttatttggtgattaaggtggtggcggtggacggcgattcgggttagaacgtttggttgtcgtattagttgtttaaggttacggagttcgggttgttcggcgtgtgggcgtataatggcgaggggcgtatcgttaggttgttgagcgagcgcgacgcggttaagtataggttggtggtgttggttaaggataatggcgagttttt

SEQ ID NO: 3208 - DNA, 524 bp, Artificial Sequence
  chemically treated genomic DNA (Homo sapiens) CpG-island No: 3208
aaaaactcgccattatccttaaccaacaccaccaacctatacttaaccgcgtcgcgctcgctcaacaacctaacgatacgcccctcgccattatacgcccacacgccgaacaacccgaactccgtaaccttaaacaactaatacgacaaccaaacgttctaacccgaatcgccgtccaccgccaccaccttaatcaccaaataacccgactcgaccgcccgaaataccaactcgatacaaaacgccgaaccgttctacaacgaatacaacacgaaaaacgaattatcgttaacgtccaacaccaacacgcgcaccaacacctcgctactcaacgccgaaaaaccgtaatctacgacgcccacgcgaaacccgaactcctacaaaacctcgtaatccaaaaacctaaaaacgaataaataaccgttatccgcgttaataaaaaccaaaaaaataaaaaacaaatacgaatcctaaaacgacaacaacgaataaataacctaaacgttaatacctaaatctctatc

SEQ ID NO: 3209 - DNA, 768 bp, Artificial Sequence
  chemically treated genomic DNA (Homo sapiens) CpG-island No: 3209
gtagcgtggcggtggtcgagcgaggaggttcgttattgtttttgattagtattattagtttgtgtttggtcgcgtcgcgttcgtttagtagtttggcggtgcgtatttcgttattgtgcgtttatacgtcgaatagttcgggtttcgtggttttgagtagttggtacgatagttaggcgttttggttcgagtcgtcgtttatcgttattattttggttattaggtagttcggttcggtcgttcggggtattagttcggtgtagggcgcggagtcgttttgtagcgggtatagtacgaagggcgagttgtcgttggcgtttagtattagtacgcgtattagcgtttcgttgtttaacgtcggggattcgcggtttgtggcgtttacgcgaaattcgaatttttgtagggtttcgtagtttagcgatttgagggtaaataggtggttattgttcgcgttgatggagattaaggaggcgaggggtaggtgtcggttttggggcggtagtagcgagtagttgatttgggcgttggtgtttgagtttttgtttgtggcgttgacgttgtcgatgtgtagggcggggttgttgttttcgcggacgaatagggtgtaggaggtttgggtgaaggtgggggcgttgttattgacgttagagagtagtacggttatgttgtattcggtttttagtttgggtgtttttaagtttgtgacggtgatcgtgatgttgtattcggtttggttttttttgtttagtgtttttttagaaatta

SEQ ID NO: 3210 - DNA, 768 bp, Artificial Sequence
  chemically treated genomic DNA (Homo sapiens) CpG-island No: 3210
taatttctaaaaaaacactaaacaaaaaaaaccaaaccgaatacaacatcacgatcaccgtcacaaacttaaaaacacccaaactaaaaaccgaatacaacataaccgtactactctctaacgtcaataacaacgcccccaccttcacccaaacctcctacaccctattcgtccgcgaaaacaacaaccccgccctacacatcgacaacgtcaacgccacaaacaaaaactcaaacaccaacgcccaaatcaactactcgctactaccgccccaaaaccgacacctacccctcgcctccttaatctccatcaacgcgaacaataaccacctatttaccctcaaatcgctaaactacgaaaccctacaaaaattcgaatttcgcgtaaacgccacaaaccgcgaatccccgacgttaaacaacgaaacgctaatacgcgtactaatactaaacgccaacgacaactcgcccttcgtactatacccgctacaaaacgactccgcgccctacaccgaactaataccccgaacgaccgaaccgaactacctaataaccaaaataataacgataaacgacgactcgaaccaaaacgcctaactatcgtaccaactactcaaaaccacgaaacccgaactattcgacgtataaacgcacaataacgaaatacgcaccgccaaactactaaacgaacgcgacgcgaccaaacacaaactaataatactaatcaaaaacaataacgaacctcctcgctcgaccaccgccacgctac

SEQ ID NO: 3211 - DNA, 768 bp, Artificial Sequence
  chemically treated genomic DNA (Homo sapiens) CpG-island No: 3211
tagtttttgaaaaagtattggatagagagagttaagtcgagtataatattacgattatcgttatagatttggggatatttaggttgaaaatcgagtataatataatcgtgttgttttttgacgttaatgataacgtttttatttttatttaaattttttatattttgttcgttcgcgagaataatagtttcgttttgtatatcggtagcgttagcgttatagatagagatttaggtattaacgtttaggttaattattcgttgttgtcgttttaggatcggtatttgtttttcgtttttttggtttttattaacgcggataatggttatttgtttgtttttaggtcgttggattacgaggttttataggagttcgagtttcgcgtgggcgttatagatcgcgggttttcggcgttgagtagcgaggcgttggtgcgcgtgttggtgttggacgttaacgataattcgtttttcgtgttgtattcgttgtagaacggtttcgcgttttgtatcgagttggtgtttcgggcggtcgagtcgggttatttggtgattaaggtggtggcggtggacggcgattcgggttagaacgtttggttgtcgtattagttgtttaaggttacggagttcgggttgttcggcgtgtgggcgtataatggcgaggtgcgtatcgttaggttgttgagcgagcgcgacgcggttaagtataggttggtggtgttggttaaggataatggcgagttttttcgttcggttatcgttacgttgt

SEQ ID NO: 3212 - DNA, 768 bp, Artificial Sequence
  chemically treated genomic DNA (Homo sapiens) CpG-island No: 3212
acaacgtaacgataaccgaacgaaaaaactcgccattatccttaaccaacaccaccaacctatacttaaccgcgtcgcgctcgctcaacaacctaacgatacgcacctcgccattatacgcccacacgccgaacaacccgaactccgtaaccttaaacaactaatacgacaaccaaacgttctaacccgaatcgccgtccaccgccaccaccttaatcaccaaataacccgactcgaccgcccgaaacaccaactcgatacaaaacgcgaaaccgttctacaacgaatacaacacgaaaaacgaattatcgttaacgtccaacaccaacacgcgcaccaacgcctcgctactcaacgccgaaaacccgcgatctataacgcccacgcgaaactcgaactcctataaaacctcgtaatccaacgacctaaaaacaaacaaataaccattatccgcgttaataaaaaccaaaaaaacgaaaaacaaataccgatcctaaaacgacaacaacgaataattaacctaaacgttaatacctaaatctctatctataacgctaacgctaccgatatacaaaacgaaactattattctcgcgaacgaacaaaatataaaaaatttaaataaaaataaaaacgttatcattaacgtcaaaaaacaacacgattatattatactcgattttcaacctaaatatccccaaatctataacgataatcgtaatattatactcgacttaactctctctatccaatactttttcaaaaacta

SEQ ID NO: 3213 - DNA, 774 bp, Artificial Sequence
  chemically treated genomic DNA (Homo sapiens) CpG-island No: 3213
tgtagcgtggcggtggtcgagcgcggaggttcgttattgtttttgattagtattattagtttgtgtttggtcgcgtcgcgttcgtttagtagtttggcggtgcgtatttcgttattgtgcgtttatacgtcgaatagttcgggtttcgtggttttgagtagttggtacgatagttaggcgttttggttcgagttatcgtttatcgttattattttggttattaggtagttcggttcggtcgtttagggtattagttcggtgtagggcgcggagtcgttttgtagcgggtatagtacgaagggcgagttgtcgttggcgtttagtattagtacgcgtattagcgtttcgttgtttaaagtcggggagtcgtggtttgtggcgtttacgcggaattggaatttttgtagggtttcgtagtttagcgatttgagggtaaataggtggtcgttgttcgcgttgatggagattagggaggcgaggggtaggtgcgggttttgggacggtagtagcgagtagttgatttgggcgttggtgttcgagtttttgtttgtggcgttgatgttgtcgatgtgtagggcggggttgttgttttcgcggacgaatagggcgtaggaagtttgggtgaaggcgggggcgttgttattgacgtcggagattagtacggttatgttgtgttcggtttttagtttgggggtttttaagtcggtgacggtgatggtgatgttgtattcggttttgttttttttgtttagcggtttttttgtttttaaagtg

SEQ ID NO: 3214 - DNA, 774 bp, Artificial Sequence
  chemically treated genomic DNA (Homo sapiens) CpG-island No: 3214
cactttaaaaacaaaaaaaccgctaaacaaaaaaaacaaaaccgaatacaacatcaccatcaccgtcaccgacttaaaaacccccaaactaaaaaccgaacacaacataaccgtactaatctccgacgtcaataacaacgcccccgccttcacccaaacttcctacgccctattcgtccgcgaaaacaacaaccccgccctacacatcgacaacatcaacgccacaaacaaaaactcgaacaccaacgcccaaatcaactactcgctactaccgtcccaaaacccgcacctacccctcgcctccctaatctccatcaacgcgaacaacgaccacctatttaccctcaaatcgctaaactacgaaaccctacaaaaattccaattccgcgtaaacgccacaaaccacgactccccgactttaaacaacgaaacgctaatacgcgtactaatactaaacgccaacgacaactcgcccttcgtactatacccgctacaaaacgactccgcgccctacaccgaactaataccctaaacgaccgaaccgaactacctaataaccaaaataataacgataaacgataactcgaaccaaaacgcctaactatcgtaccaactactcaaaaccacgaaacccgaactattcgacgtataaacgcacaataacgaaatacgcaccgccaaactactaaacgaacgcgacgcgaccaaacacaaactaataatactaatcaaaaacaataacgaacctccgcgctcgaccaccgccacgctaca

SEQ ID NO: 3215 - DNA, 774 bp, Artificial Sequence
  chemically treated genomic DNA (Homo sapiens) CpG-island No: 3215
tattttggaaatagagagatcgttggatagagagagtagagtcgagtataatattattattatcgttatcgatttggggatttttaggttaaaaatcgagtataatataatcgtgttggttttcgacgttaatgataacgttttcgtttttatttaaattttttacgttttgttcgttcgcgagaataatagtttcgttttgtatatcggtagtattagcgttatagatagagattcgggtattaacgtttaggttaattattcgttgttgtcgttttaggattcgtatttgtttttcgtttttttggtttttattaacgcggataacggttatttgtttgtttttaggtcgttggattacgaggttttgtaggggttttagtttcgcgtgggcgttatagattacggtttttcggttttgagtagcgaggcgttggtgcgcgtgttggtgttggacgttaacgataattcgtttttcgtgttgtattcgttgtagaacggtttcgcgttttgtatcgagttggtgttttgggcggtcgagtcgggttatttggtgattaaggtggtggcggtggacggtgattcgggttagaacgtttggttgtcgtattagttgtttaaggttacggagttcgggttattcggcgtgtgggcgtataatggcgaggtgcgtatcgttaggttgttgagcgagcgcgacgcggttaagtataggttggtggtgttggttaaggataatggcgagttttcgcgttcggttatcgttacgttgta

SEQ ID NO: 3216 - DNA, 774 bp, Artificial Sequence
  chemically treated genomic DNA (Homo sapiens) CpG-island No: 3216
tacaacgtaacgataaccgaacgcgaaaactcgccattatccttaaccaacaccaccaacctatacttaaccgcgtcgcgctcgctcaacaacctaacgatacgcacctcgccattatacgcccacacgccgaataacccgaactccgtaaccttaaacaactaatacgacaaccaaacgttctaacccgaatcaccgtccaccgccaccaccttaatcaccaaataacccgactcgaccgcccaaaacaccaactcgatacaaaacgcgaaaccgttctacaacgaatacaacacgaaaaacgaattatcgttaacgtccaacaccaacacgcgcaccaacgcctcgctactcaaaaccgaaaaaccgtaatctataacgcccacgcgaaactaaaacccctacaaaacctcgtaatccaacgacctaaaaacaaacaaataaccgttatccgcgttaataaaaaccaaaaaaacgaaaaacaaatacgaatcctaaaacgacaacaacgaataattaacctaaacgttaatacccgaatctctatctataacgctaatactaccgatatacaaaacgaaactattattctcgcgaacgaacaaaacgtaaaaaatttaaataaaaacgaaaacgttatcattaacgtcgaaaaccaacacgattatattatactcgatttttaacctaaaaatccccaaatcgataacgataataataatattatactcgactctactctctctatccaacgatctctctatttccaaaata

SEQ ID NO: 3217 - DNA, 770 bp, Artificial Sequence
  chemically treated genomic DNA (Homo sapiens) CpG-island No: 3217
cgtggcggtggtcgagcgaggaggttcgttattgtttttgataagtattacgagtttgtgtttggttgcgtcgcgttcgtttagtagtttggcggtgcgtatttttttattgtgcgtttatatatcgaatagttcgggtttcgtggttttgagtagttggtacgatagttaggcgttttggttcgagtcgtcgtttatcgttattattttggttattaggtagttcggttcggtcgttcggggtattagttcggtgtagggcgcggagtcgttttgtagcgggtatagtacgaagggcgagttgtcgttggcgtttagtattagtacgcgtattagcgtttttttgtttagcgcgggggagtcgcggtttgtggcgtttacgcggaattcgaaagtttgtagggtttcgtagtttagcgatttgagggcgaataggtggtcgttgttcgcgttgatggagattagggaggcgaggggtaggtgcgggttttggggcggtagtagcgagtaggtgatttgggcgttggtgttcgagtttttgtttgtggcgttgacgttgtcgatgtgtagggcggggttgttgttttcgcggacgaatagggtgtaggaggtttgggtgaaggcgggggcgttgttattgacgtcggagattaggatcgttatgttgtgttcggtttttagtttgggtgtttttaagttagtgacggtgatagtgatgttgtattcggttttgatttttttgtttagcgcgttttttgtaattaggatgt

SEQ ID NO: 3218 - DNA, 770 bp, Artificial Sequence
  chemically treated genomic DNA (Homo sapiens) CpG-island No: 3218
acatcctaattacaaaaaacgcgctaaacaaaaaaatcaaaaccgaatacaacatcactatcaccgtcactaacttaaaaacacccaaactaaaaaccgaacacaacataacgatcctaatctccgacgtcaataacaacgcccccgccttcacccaaacctcctacaccctattcgtccgcgaaaacaacaaccccgccctacacatcgacaacgtcaacgccacaaacaaaaactcgaacaccaacgcccaaatcacctactcgctactaccgccccaaaacccgcacctacccctcgcctccctaatctccatcaacgcgaacaacgaccacctattcgccctcaaatcgctaaactacgaaaccctacaaactttcgaattccgcgtaaacgccacaaaccgcgactcccccgcgctaaacaaaaaaacgctaatacgcgtactaatactaaacgccaacgacaactcgcccttcgtactatacccgctacaaaacgactccgcgccctacaccgaactaataccccgaacgaccgaaccgaactacctaataaccaaaataataacgataaacgacgactcgaaccaaaacgcctaactatcgtaccaactactcaaaaccacgaaacccgaactattcgatatataaacgcacaataaaaaaatacgcaccgccaaactactaaacgaacgcgacgcaaccaaacacaaactcgtaatacttatcaaaaacaataacgaacctcctcgctcgaccaccgccacg

SEQ ID NO: 3219 - DNA, 770 bp, Artificial Sequence
  chemically treated genomic DNA (Homo sapiens) CpG-island No: 3219
atattttaattatagaaggcgcgttggatagagagattagagtcgagtataatattattattatcgttattgatttggggatatttaggttgaaaatcgagtataatataacggttttggttttcgacgttaatgataacgttttcgtttttatttaaattttttatattttgttcgttcgcgagaataatagtttcgttttgtatatcggtagcgttagcgttatagatagagattcgggtattaacgtttaggttatttattcgttgttgtcgttttaagattcgtatttgtttttcgtttttttggtttttattaacgcggataacggttatttgttcgtttttaggtcgttggattacgaggttttgtaggttttcgagtttcgcgtgggcgttatagatcgcggttttttcgcgttgagtagagaggcgttggtgcgcgtgttggtgttggacgttaacgataattcgtttttcgtgttgtattcgttgtagaacggtttcgcgttttgtatcgagttggtgtttcgggcggtcgagtcgggttatttggtgattaaggtggtggcggtggacggcgattcgggttagaacgtttggttgtcgtattagttgtttaaggttacggagttcgggttgttcggtgtgtgggcgtataatggggaggtgcgtatcgttaggttgttgagcgagcgcgacgtagttaagtataggttcgtggtgtttgttaaggataatggcgagttttttcgttcggttatcgttacg

SEQ ID NO: 3220 - DNA, 770 bp, Artificial Sequence
  chemically treated genomic DNA (Homo sapiens) CpG-island No: 3220
cgtaacgataaccgaacgaaaaaactcgccattatccttaacaaacaccacgaacctatacttaactacgtcgcgctcgctcaacaacctaacgatacgcacctccccattatacgcccacacaccgaacaacccgaactccgtaaccttaaacaactaatacgacaaccaaacgttctaacccgaatcgccgtccaccgccaccaccttaatcaccaaataacccgactcgaccgcccgaaacaccaactcgatacaaaacgcgaaaccgttctacaacgaatacaacacgaaaaacgaattatcgttaacgtccaacaccaacacgcgcaccaacgcctctctactcaacgcgaaaaaaccgcgatctataacgcccacgcgaaactcgaaaacctacaaaacctcgtaatccaacgacctaaaaacgaacaaataaccgttatccgcgttaataaaaaccaaaaaaacgaaaaacaaatacgaatcttaaaacgacaacaacgaataaataacctaaacgttaatacccgaatctctatctataacgctaacgctaccgatatacaaaacgaaactattattctcgcgaacgaacaaaatataaaaaatttaaataaaaacgaaaacgttatcattaacgtcgaaaaccaaaaccgttatattatactcgattttcaacctaaatatccccaaatcaataacgataataataatattatactcgactctaatctctctatccaacgcgccttctataattaaaatat

SEQ ID NO: 3221 - DNA, 798 bp, Artificial Sequence
  chemically treated genomic DNA (Homo sapiens) CpG-island No: 3221
ttcgcgttaggttttcggcgcgttagatttcggttttgcgttttttattttttgtttcgttacgtttttaattgtagatttaattcgggttttttcgaaagtagtaaggagtttcggggtgggttttatgtttcgtgatgtttcgcgtttgggaacggatgaaggggtgttagtaattttcgtcgttttcgttgtcgattcgggtttatacgaggtttattcgggattagtttttgcggtcggttaattttagcggttggatcgatttcggggttcggagcgaggtttatatagtatcggtttagggagttagggcgcgggtcgagtaaaagcgcgcgacgttgggcgggtgtgggggtggggaggggcggaggagggagtaacgtttcgggaggcggggttaggaatcggttgattcggtttttgtttttcgattttttcggagcgggtgtttattcgggagtcggacggaggaggtcggggtcggtcgagttcggaaggggggaggggagcgtagtcggagatcgaggttgagattttttcggttttttttttttaaatcgatttttaattttcgtttttgagcgtgggagaacgcggtagatagatagatgtttttcgttttttattttatttagtttcgtaatttatattcgttgttaaagagtggggagcgggaatggatatattcgggaacgattgtacgttttgcgggcgttcggggaagaaggtagcgtagtataaaattttttttgcggttattttttattttattttgtatttgagtttttgcgggga

SEQ ID NO: 3222 - DNA, 798 bp, Artificial Sequence
  chemically treated genomic DNA (Homo sapiens) CpG-island No: 3222
tccccgcaaaaactcaaatacaaaataaaataaaaaataaccgcaaaaaaaattttatactacgctaccttcttccccgaacgcccgcaaaacgtacaatcgttcccgaatatatccattcccgctccccactctttaacaacgaatataaattacgaaactaaataaaataaaaaacgaaaaacatctatctatctaccgcgttctcccacgctcaaaaacgaaaattaaaaatcgatttaaaaaaaaaaaaccgaaaaaatctcaacctcgatctccgactacgctcccctccccccttccgaactcgaccgaccccgacctcctccgtccgactcccgaataaacacccgctccgaaaaaatcgaaaaacaaaaaccgaatcaaccgattcctaaccccgcctcccgaaacgttactccctcctccgcccctccccacccccacacccgcccaacgtcgcgcgcttttactcgacccgcgccctaactccctaaaccgatactatataaacctcgctccgaaccccgaaatcgatccaaccgctaaaattaaccgaccgcaaaaactaatcccgaataaacctcgtataaacccgaatcgacaacgaaaacgacgaaaattactaacaccccttcatccgttcccaaacgcgaaacatcacgaaacataaaacccaccccgaaactccttactactttcgaaaaaacccgaattaaatctacaattaaaaacgtaacgaaacaaaaaataaaaaacgcaaaaccgaaatctaacgcgccgaaaacctaacgcgaa

SEQ ID NO: 3223 - DNA, 798 bp, Artificial Sequence
  chemically treated genomic DNA (Homo sapiens) CpG-island No: 3223
ttttcgtaagaatttaggtgtaggatggggtgggaggtgatcgtaggagaggttttgtgttgcgttgttttttttttcgggcgttcgtaggacgtgtagtcgttttcgggtgtatttattttcgttttttattttttggtaacgagtgtgaattgcggaattggataggataaggggcgggagatatttgtttgtttgtcgcgtttttttacgtttaggaacgagggttggaagtcgatttaggggaaaggaatcgaaaaggttttagtttcggttttcgattgcgttttttttttttttttcgggttcgatcggtttcggtttttttcgttcggttttcgggtaaatattcgtttcggagaggtcggaaaatagagatcggattagtcggtttttggtttcgtttttcggggcgttgttttttttttcgtttttttttatttttatattcgtttagcgtcgcgcgtttttgttcgattcgcgttttagttttttaggtcggtattgtgtgggtttcgtttcggatttcggggtcggtttagtcgttgggattagtcgatcgtagggattaatttcggatgagtttcgtgtaaattcggatcgatagcggggacggcgggggttgttggtatttttttattcgtttttagacgcggagtattacggggtatagagtttatttcgaggttttttgttgttttcggagagattcgagttggatttgtagttgggggcgtggcggggtaggagatgaagaacgtagggtcgggatttgacgcgtcgagagtttggcgcggg

SEQ ID NO: 3224 - DNA, 798 bp, Artificial Sequence
  chemically treated genomic DNA (Homo sapiens) CpG-island No: 3224
cccgcgccaaactctcgacgcgtcaaatcccgaccctacgttcttcatctcctaccccgccacgcccccaactacaaatccaactcgaatctctccgaaaacaacaaaaaacctcgaaataaactctataccccgtaatactccgcgtctaaaaacgaataaaaaaataccaacaacccccgccgtccccgctatcgatccgaatttacacgaaactcatccgaaattaatccctacgatcgactaatcccaacgactaaaccgaccccgaaatccgaaacgaaacccacacaataccgacctaaaaaactaaaacgcgaatcgaacaaaaacgcgcgacgctaaacgaatataaaaataaaaaaaaacgaaaaaaaaaacaacgccccgaaaaacgaaaccaaaaaccgactaatccgatctctattttccgacctctccgaaacgaatatttacccgaaaaccgaacgaaaaaaaccgaaaccgatcgaacccgaaaaaaaaaaaaaaaacgcaatcgaaaaccgaaactaaaaccttttcgattcctttcccctaaatcgacttccaaccctcgttcctaaacgtaaaaaaacgcgacaaacaaacaaatatctcccgccccttatcctatccaattccgcaattcacactcgttaccaaaaaataaaaaacgaaaataaatacacccgaaaacgactacacgtcctacgaacgcccgaaaaaaaaaacaacgcaacacaaaacctctcctacgatcacctcccaccccatcctacacctaaattcttacgaaaa

SEQ ID NO: 3225 - DNA, 714 bp, Artificial Sequence
  chemically treated genomic DNA (Homo sapiens) CpG-island No: 3225
atagtcgtatcgttacgaataggagtatcgagaggaggaagagcgaagatatcgaggttaacgttattattaggtagacggtgagcgagttggtttggttcggggtcgttttcgggagtcgtaggtagggttgggagaagtcgtttattaggagtacgtgtagcgtggcggtggtcgagcgcggaggttcgttattgtttttgattagtattattagtttttgtttggttgcgtcgcgttcgtttagtagtttggcggtacgtatttcgttattgtgcgtttatacgtcgaatagttcgggtttcgtggttttgagtagttggtacgatagttaggcgttttggttcgagtcgtcgtttatcgttattattttggttattaggtagttcggttcggtcgttcggggtaacggttcggtgtagggcgcggagttgttttgtagcgggtatagtacgaagggcgagttgtcgttggcgtttagtattagtacgcgtattagcgtttcgttgtttagcgcgggggagtcgcggtttgtggcgtttacgcggaattcgaacgtttgtagggtttcgtagtttagggatttgagggtaaataggtggtcgttgttcgcgttgatggagattagggaggcgaggggtaggtgcgggttttgggacggtagtagggagtagatgatttgggcgttggtgttcgagtttttgtttgtggcgt

SEQ ID NO: 3226 - DNA, 714 bp, Artificial Sequence
  chemically treated genomic DNA (Homo sapiens) CpG-island No: 3226
acgccacaaacaaaaactcgaacaccaacgcccaaatcatctactccctactaccgtcccaaaacccgcacctacccctcgcctccctaatctccatcaacgcgaacaacgaccacctatttaccctcaaatccctaaactacgaaaccctacaaacgttcgaattccgcgtaaacgccacaaaccgcgactcccccgcgctaaacaacgaaacgctaatacgcgtactaatactaaacgccaacgacaactcgcccttcgtactatacccgctacaaaacaactccgcgccctacaccgaaccgttaccccgaacgaccgaaccgaactacctaataaccaaaataataacgataaacgacgactcgaaccaaaacgcctaactatcgtaccaactactcaaaaccacgaaacccgaactattcgacgtataaacgcacaataacgaaatacgtaccgccaaactactaaacgaacgcgacgcaaccaaacaaaaactaataatactaatcaaaaacaataacgaacctccgcgctcgaccaccgccacgctacacgtactcctaataaacgacttctcccaaccctacctacgactcccgaaaacgaccccgaaccaaaccaactcgctcaccgtctacctaataataacgttaacctcgatatcttcgctcttcctcctctcgatactcctattcgtaacgatacgactat

SEQ ID NO: 3227 - DNA, 714 bp, Artificial Sequence
  chemically treated genomic DNA (Homo sapiens) CpG-island No: 3227
gcgttatagatagagattcgggtattaacgtttaggttatttattttttgttgtcgttttaggattcgtatttgtttttcgtttttttggtttttattaacgcggataacggttatttgtttgtttttaggtttttggattacgaggttttgtaggcgttcgagtttcgcgtgggcgttatagatcgcggttttttcgcgttgagtagcgaggcgttggtgcgcgtgttggtgttggacgttaacgataattcgtttttcgtgttgtattcgttgtagaatagtttcgcgttttgtatcgagtcgttgtttcgggcggtcgagtcgggttatttggtgattaaggtggtggcggtggacggcgattcgggttagaacgtttggttgtcgtattagttgtttaaggttacggagttcgggttattcggcgtgtgggcgtataatggcgaggtgcgtatcgttaggttgttgagcgagcgcgacgtagttaagtagaggttggtggtgttggttaaggataatggcgagttttcgcgttcggttatcgttacgttgtacgtgtttttggtggacggttttttttagttttatttgcggttttcggaggcggtttcggattaggttaattcgtttatcgtttatttggtggtggcgttggtttcggtgttttcgtttttttttttttcggtgtttttgttcgtggcggtgcggttgt

SEQ ID NO: 3228 - DNA, 714 bp, Artificial Sequence
  chemically treated genomic DNA (Homo sapiens) CpG-island No: 3228
acaaccgcaccgccacgaacaaaaacaccgaaaaaaaaaaaaacgaaaacaccgaaaccaacgccaccaccaaataaacgataaacgaattaacctaatccgaaaccgcctccgaaaaccgcaaataaaactaaaaaaaaccgtccaccaaaaacacgtacaacgtaacgataaccgaacgcgaaaactcgccattatccttaaccaacaccaccaacctctacttaactacgtcgcgctcgctcaacaacctaacgatacgcacctcgccattatacgcccacacgccgaataacccgaactccgtaaccttaaacaactaatacgacaaccaaacgttctaacccgaatcgccgtccaccgccaccaccttaatcaccaaataacccgactcgaccgcccgaaacaacgactcgatacaaaacgcgaaactattctacaacgaatacaacacgaaaaacgaattatcgttaacgtccaacaccaacacgcgcaccaacgcctcgctactcaacgcgaaaaaaccgcgatctataacgcccacgcgaaactcgaacgcctacaaaacctcgtaatccaaaaacctaaaaacaaacaaataaccgttatccgcgttaataaaaaccaaaaaaacgaaaaacaaatacgaatcctaaaacgacaacaaaaaataaataacctaaacgttaatacccgaatctctatctataacgc

SEQ ID NO: 3229 - DNA, 547 bp, Artificial Sequence
  chemically treated genomic DNA (Homo sapiens) CpG-island No: 3229
agcgtggcggtggtcgagcgcggaggttcgttattgtttttgataagtattattagtttgtgtttggttgcgtttcgttcgtttagtagtttggcggtgcgtatttcgttattgtgcgtttatacgtcgaatagatcgagtttcgtggttttgagtagttggtacgatagttaggcgttttggttcgagtcgtcgtttatcgttattattttggttattaggtagttcggttcggtcgttcggggtattagttcggtgtagggcgcggagtcgttttgtagcgggtataatacgaagggcgagttgtcgttggcgtttagtattagtaagcgtattagcgtttcgttgtttaacgtcggggagtcgcggtttgtggcgtttacgcggaattcgaaagattgtagggtttcgtagtttagcgatttgagggtaaataggtggtcgttgttcgcgttgatggagattagggaagagaggggtaggtgcgggttttggggcggtagtagcgagtaggtgatttgggcgttgatgtttgagtttttgtttg

SEQ ID NO: 3230 - DNA, 547 bp, Artificial Sequence
  chemically treated genomic DNA (Homo sapiens) CpG-island No: 3230
caaacaaaaactcaaacatcaacgcccaaatcacctactcgctactaccgccccaaaacccgcacctacccctctcttccctaatctccatcaacgcgaacaacgaccacctatttaccctcaaatcgctaaactacgaaaccctacaatctttcgaattccgcgtaaacgccacaaaccgcgactccccgacgttaaacaacgaaacgctaatacgcttactaatactaaacgccaacgacaactcgcccttcgtattatacccgctacaaaacgactccgcgccctacaccgaactaataccccgaacgaccgaaccgaactacctaataaccaaaataataacgataaacgacgactcgaaccaaaacgcctaactatcgtaccaactactcaaaaccacgaaactcgatctattcgacgtataaacgcacaataacgaaatacgcaccgccaaactactaaacgaacgaaacgcaaccaaacacaaactaataatacttatcaaaaacaataacgaacctccgcgctcgaccaccgccacgct

SEQ ID NO: 3231 - DNA, 547 bp, Artificial Sequence
  chemically treated genomic DNA (Homo sapiens) CpG-island No: 3231
tagatagagatttaggtattaacgtttaggttatttattcgttgttgtcgttttaggattcgtatttgttttttttttttttggtttttattaacgcggataacggttatttgtttgtttttaggtcgttggattacgaggttttgtagtttttcgagtttcgcgtgggcgttatagatcgcggtttttcggcgttgagtagcgaggcgttggtgcgtttgttggtgttggacgttaacgataattcgtttttcgtgttgtattcgttgtagaacggtttcgcgttttgtatcgagttggtgtttcgggcggtcgagtcgggttatttggtgattaaggtggtggcggtggacggcgattcgggttagaacgtttggttgtcgtattagttgtttaaggttacggagttcggtttgttcggcgtgtgggcgtataatggcgaggtgcgtatcgttaggttgttgagcgagcgagacgtagttaagtataggttggtggtgtttgttaaggataatggcgagttttcgcgttcggttatcgttacgtt

SEQ ID NO: 3232 - DNA, 547 bp, Artificial Sequence
  chemically treated genomic DNA (Homo sapiens) CpG-island No: 3232
aacgtaacgataaccgaacgcgaaaactcgccattatccttaacaaacaccaccaacctatacttaactacgtctcgctcgctcaacaacctaacgatacgcacctcgccattatacgcccacacgccgaacaaaccgaactccgtaaccttaaacaactaatacgacaaccaaacgttctaacccgaatcgccgtccaccgccaccaccttaatcaccaaataacccgactcgaccgcccgaaacaccaactcgatacaaaacgcgaaaccgttctacaacgaatacaacacgaaaaacgaattatcgttaacgtccaacaccaacaaacgcaccaacgcctcgctactcaacgccgaaaaaccgcgatctataacgcccacgcgaaactcgaaaaactacaaaacctcgtaatccaacgacctaaaaacaaacaaataaccgttatccgcgttaataaaaaccaaaaaaaaaaaaaacaaatacgaatcctaaaacgacaacaacgaataaataacctaaacgttaatacctaaatctctatcta

SEQ ID NO: 3233 - DNA, 749 bp, Artificial Sequence
  chemically treated genomic DNA (Homo sapiens) CpG-island No: 3233
acgtgtagcgtggcggtggtcgagcgcggaggttcgttattgtttttgattagtattattagtttgtgtttggtcgcgtcgcgttcgtttagtagtttggcggtgcgtatttcgttattgtgcgtttatatgttgaatagttcgggtttcgtggttttgagtagttggtacgatagttaggcgttttggttcgagtcgtcgtttatcgttattattttggttattaggtagttcggttcggtcgttcggggtattagttcggtgtaaggcgtcgagtcgttttgtagcggatatagtacgaagggcgagttgtcgttggcgtttagtattagtacgcgtattagcgtttcgttgtttagcgtcggggagtcgcggtttgtggtttttacgcggaattcgaacgtttgtagggtttcgtagtttagcgatttgagggtaaataggtggtcgttgttcgcgttgatggagattagggaggcgaggcgtaggtgtgggttttggggcggtagtagcgagtaggtgatttgggcgttggtgtttgagtttttgtttgtggcgttgatattgtcgatgtgtagggcggggttgttgttttttcggacgaatagggtgtaggaggtttgggtgaaggcgggggcgttgttattgacgtcggagattaggatcgttatgttgtgttcggtttttagtttgggtgtttttatgtcggtgatagtgatggtgatgttgtattcggtttggtttttttt

SEQ ID NO: 3234 - DNA, 749 bp, Artificial Sequence
  chemically treated genomic DNA (Homo sapiens) CpG-island No: 3234
aaaaaaaaccaaaccgaatacaacatcaccatcactatcaccgacataaaaacacccaaactaaaaaccgaacacaacataacgatcctaatctccgacgtcaataacaacgcccccgccttcacccaaacctcctacaccctattcgtccgaaaaaacaacaaccccgccctacacatcgacaatatcaacgccacaaacaaaaactcaaacaccaacgcccaaatcacctactcgctactaccgccccaaaacccacacctacgcctcgcctccctaatctccatcaacgcgaacaacgaccacctatttaccctcaaatcgctaaactacgaaaccctacaaacgttcgaattccgcgtaaaaaccacaaaccgcgactccccgacgctaaacaacgaaacgctaatacgcgtactaatactaaacgccaacgacaactcgcccttcgtactatatccgctacaaaacgactcgacgccttacaccgaactaataccccgaacgaccgaaccgaactacctaataaccaaaataataacgataaacgacgactcgaaccaaaacgcctaactatcgtaccaactactcaaaaccacgaaacccgaactattcaacatataaacgcacaataacgaaatacgcaccgccaaactactaaacgaacgcgacgcgaccaaacacaaactaataatactaatcaaaaacaataacgaacctccgcgctcgaccaccgccacgctacacgt

SEQ ID NO: 3235 - DNA, 749 bp, Artificial Sequence
  chemically treated genomic DNA (Homo sapiens) CpG-island No: 3235
agagagagttaagtcgagtataatattattattattgttatcgatatggggatatttaggttgaaaatcgagtataatataacggttttggttttcgacgttaatgataacgttttcgtttttatttaaattttttatattttgttcgttcgagagaataatagtttcgttttgtatatcggtagtgttagcgttatagatagagatttaggtattaacgtttaggttatttattcgttgttgtcgttttagaatttatatttgcgtttcgtttttttggtttttattaacgcggataacggttatttgtttgtttttaggtcgttggattacgaggttttgtaggcgttcgagtttcgcgtgggagttatagatcgcggtttttcggcgttgagtagcgaggcgttggtgcgcgtgttggtgttggacgttaacgataattcgtttttcgtgttgtattcgttgtagaacggttcggcgttttgtatcgagttggtgtttcgggcggtcgagtcgggttatttggtgattaaggtggtggcggtggacggcgattcgggttagaacgtttggttgtcgtattagttgtttaaggttacggagttcgggttgtttagtatgtgggcgtataatggcgaggtgcgtatcgttaggttgttgagcgagcgcgacgcggttaagtataggttggtggtgttggttaaggataatggcgagttttcgcgttcggttatcgttacgttgtacgt

SEQ ID NO: 3236 - DNA, 749 bp, Artificial Sequence
  chemically treated genomic DNA (Homo sapiens) CpG-island No: 3236
acgtacaacgtaacgataaccgaacgcgaaaactcgccattatccttaaccaacaccaccaacctatacttaaccgcgtcgcgctcgctcaacaacctaacgatacgcacctcgccattatacgcccacatactaaacaacccgaactccgtaaccttaaacaactaatacgacaaccaaacgttctaacccgaatcgccgtccaccgccaccaccttaatcaccaaataacccgactcgaccgcccgaaacaccaactcgatacaaaacgccgaaccgttctacaacgaatacaacacgaaaaacgaattatcgttaacgtccaacaccaacacgcgcaccaacgcctcgctactcaacgccgaaaaaccgcgatctataactcccacgcgaaactcgaacgcctacaaaacctcgtaatccaacgacctaaaaacaaacaaataaccgttatccgcgttaataaaaaccaaaaaaacgaaacgcaaatataaattctaaaacgacaacaacgaataaataacctaaacgttaatacctaaatctctatctataacgctaacactaccgatatacaaaacgaaactattattctctcgaacgaacaaaatataaaaaatttaaataaaaacgaaaacgttatcattaacgtcgaaaaccaaaaccgttatattatactcgattttcaacctaaatatccccatatcgataacaataataataatattatactcgacttaactctctct

SEQ ID NO: 3237 - DNA, 738 bp, Artificial Sequence
  chemically treated genomic DNA (Homo sapiens) CpG-island No: 3237
cgagcgcggaggttcgttattgtttttgataagtattacgagtttgtgtttggttgcgtcgcgttcgtttagtagtttggcggtgcgtatttcgttattgtgcgtttatacgtcgaatagtttaggtttcgtggttttgagtagttggtacgatagttaggcgttttggttcgagtcgtcgtttatcgttattattttggttattaggtagttcggttcggtcgttcggggtattagttcggtgtagggcgcggagttattttgtagcgggtatagtacgaagggcgagttgtcgttggtgtttagtattagtacgcgtattagcgtttcgttgtttaaagtcggagaatcgcggtttgaggcgtttacgcggaattcgaacgtttgtagggtttcgtagtttagcgatttgagggcgaataggtggtcgttgtttgcgttgatggagattagggaggcgaggggtaggtgcgggttttggggcggtagtagcgagtaggtgatttgggcgttggtgttcgagtttttgtttgtggcgttgatattgtcgatgtgtagggcggggttgttgttttcgcggacgaatagggtgtaggaggtttgggtgaaggcgggggcgttgttattgacgtcggagatttgtacggttatgttttgttgggtttttagtttgggtgtttttaagttagtgacggcgatggtgatgttgtatttagcgttggtttttcggtttagtgg

SEQ ID NO: 3238 - DNA, 738 bp, Artificial Sequence
  chemically treated genomic DNA (Homo sapiens) CpG-island No: 3238
ccactaaaccgaaaaaccaacgctaaatacaacatcaccatcgccgtcactaacttaaaaacacccaaactaaaaacccaacaaaacataaccgtacaaatctccgacgtcaataacaacgcccccgccttcacccaaacctcctacaccctattcgtccgcgaaaacaacaaccccgccctacacatcgacaatatcaacgccacaaacaaaaactcgaacaccaacgcccaaatcacctactcgctactaccgccccaaaacccgcacctacccctcgcctccctaatctccatcaacgcaaacaacgaccacctattcgccctcaaatcgctaaactacgaaaccctacaaacgttcgaattccgcgtaaacgcctcaaaccgcgattctccgactttaaacaacgaaacgctaatacgcgtactaatactaaacaccaacgacaactcgcccttcgtactatacccgctacaaaataactccgcgccctacaccgaactaataccccgaacgaccgaaccgaactacctaataaccaaaataataacgataaacgacgactcgaaccaaaacgcctaactatcgtaccaactactcaaaaccacgaaacctaaactattcgacgtataaacgcacaataacgaaatacgcaccgccaaactactaaacgaacgcgacgcaaccaaacacaaactcgtaatacttatcaaaaacaataacgaacctccgcgctcg

SEQ ID NO: 3239 - DNA, 738 bp, Artificial Sequence
  chemically treated genomic DNA (Homo sapiens) CpG-island No: 3239
ttattggatcgagagattagcgttgagtataatattattatcgtcgttattgatttggggatatttaggttgaaaatttagtagaatataatcgtgtaggttttcgacgttaatgataacgttttcgtttttatttaaattttttatattttgttcgttcgcgagaataatagtttcgttttgtatatcggtagtgttagcgttatagatagagattcgggtattaacgtttaggttatttattcgttgttgtcgttttaggattcgtatttgtttttcgtttttttggtttttattaacgtagataacggttatttgttcgtttttaggtcgttggattacgaggttttgtaggcgttcgagtttcgcgtgggcgttttagatcgcggtttttcggttttgagtagcgaggcgttggtgcgcgtgttggtgttggatattaacgataattcgtttttcgtgttgtattcgttgtagaatggtttcgcgttttgtatcgagttggtgtttcgggcggtcgagtcgggttatttggtgattaaggtggtggcggtggacggcgattcgggttagaacgtttggttgtcgtattagttgtttaaggttacggagtttgggttgttcggcgtgtgggcgtataatggcgaggtgcgtatcgttaggttgttgagcgagcgcgacgtagttaagtataggttcgtggtgtttgttaaggataatggcgagttttcgcgttcg

SEQ ID NO: 3240 - DNA, 738 bp, Artificial Sequence
  chemically treated genomic DNA (Homo sapiens) CpG-island No: 3240
cgaacgcgaaaactcgccattatccttaacaaacaccacgaacctatacttaactacgtcgcgctcgctcaacaacctaacgatacgcacctcgccattatacgcccacacgccgaacaacccaaactccgtaaccttaaacaactaatacgacaaccaaacgttctaacccgaatcgccgtccaccgccaccaccttaatcaccaaataacccgactcgaccgcccgaaacaccaactcgatacaaaacgcgaaaccattctacaacgaatacaacacgaaaaacgaattatcgttaatatccaacaccaacacgcgcaccaacgcctcgctactcaaaaccgaaaaaccgcgatctaaaacgcccacgcgaaactcgaacgcctacaaaacctcgtaatccaacgacctaaaaacgaacaaataaccgttatctacgttaataaaaaccaaaaaaacgaaaaacaaatacgaatcctaaaacgacaacaacgaataaataacctaaacgttaatacccgaatctctatctataacgctaacactaccgatatacaaaacgaaactattattctcgcgaacgaacaaaatataaaaaatttaaataaaaacgaaaacgttatcattaacgtcgaaaacctacacgattatattctactaaattttcaacctaaatatccccaaatcaataacgacgataataatattatactcaacgctaatctctcgatccaataa

SEQ ID NO: 3241 - DNA, 546 bp, Artificial Sequence
  chemically treated genomic DNA (Homo sapiens) CpG-island No: 3241
gcgtggcggtggtcgagcgcggaggttcgttattgtttttgattagtattattagtttgtgtttggtcgcgtcgcgttcgtttagtagtttggcggtgcgtatttcgttattgtgcgtttatacgtcgaatagttcgggtttcgtggttttgagtagttggtacgatagttaggcgttttggttcgagtcgtcgtttatcgttattattttggttattaggtagttcggtttagtcgttcggggtattagttcggtgtagggcgcggagtcgttttgtagcgggtatagtacgaagggcgagttgtcgttggcgtttagtattagtacgcgtattagcgtttcgttgtttaaagtcggggagttacggtttgtggcgtttacgcggaattcgaacgtttgtagggtttcgtagtttagcgatttgagggtaaataggtggtcgttgttcgcgttgatggagattagggaagagaggggtaggtgcgggttttggggcggtagtagcgagtaggttatttgggcgttggtgtttgagtttttgtttg

SEQ ID NO: 3242 - DNA, 546 bp, Artificial Sequence
  chemically treated genomic DNA (Homo sapiens) CpG-island No: 3242
caaacaaaaactcaaacaccaacgcccaaataacctactcgctactaccgccccaaaacccgcacctacccctctcttccctaatctccatcaacgcgaacaacgaccacctatttaccctcaaatcgctaaactacgaaaccctacaaacgttcgaattccgcgtaaacgccacaaaccgtaactccccgactttaaacaacgaaacgctaatacgcgtactaatactaaacgccaacgacaactcgcccttcgtactatacccgctacaaaacgactccgcgccctacaccgaactaataccccgaacgactaaaccgaactacctaataaccaaaataataacgataaacgacgactcgaaccaaaacgcctaactatcgtaccaactactcaaaaccacgaaacccgaactattcgacgtataaacgcacaataacgaaatacgcaccgccaaactactaaacgaacgcgacgcgaccaaacacaaactaataatactaatcaaaaacaataacgaacctccgcgctcgaccaccgccacgc

SEQ ID NO: 3243 - DNA, 546 bp, Artificial Sequence
  chemically treated genomic DNA (Homo sapiens) CpG-island No: 3243
tagatagagatttaggtattaacgtttaggtaatttattcgttgttgtcgttttaggattcgtatttgttttttttttttttggtttttattaacgcggataacggttatttgtttgtttttaggtcgttggattacgaggttttgtaggcgttcgagtttcgcgtgggcgttatagatcgtggtttttcggttttgagtagcgaggcgttggtgcgcgtgttggtgttggacgttaacgataattcgtttttcgtgttgtattcgttgtagaacggtttcgcgttttgtatcgagttggtgtttcgggcggttgagtcgggttatttggtgattaaggtggtggcggtggacggcgattcgggttagaacgtttggttgtcgtattagttgtttaaggttacggagttcgggttgttcggcgtgtgggcgtataatggcgaagtgcgtatcgttaggttgttgagcgagcgcgacgcggttaagtataggttggtggtgttggttaaggataatggcgagttttcgcgttcggttatcgttacgt

SEQ ID NO: 3244 - DNA, 546 bp, Artificial Sequence
  chemically treated genomic DNA (Homo sapiens) CpG-island No: 3244
acgtaacgataaccgaacgcgaaaactcgccattatccttaaccaacaccaccaacctatacttaaccgcgtcgcgctcgctcaacaacctaacgatacgcacttcgccattatacgcccacacgccgaacaacccgaactccgtaaccttaaacaactaatacgacaaccaaacgttctaacccgaatcgccgtccaccgccaccaccttaatcaccaaataacccgactcaaccgcccgaaacaccaactcgatacaaaacgcgaaaccgttctacaacgaatacaacacgaaaaacgaattatcgttaacgtccaacaccaacacgcgcaccaacgcctcgctactcaaaaccgaaaaaccacgatctataacgcccacgcgaaactcgaacgcctacaaaacctcgtaatccaacgacctaaaaacaaacaaataaccgttatccgcgttaataaaaaccaaaaaaaaaaaaaacaaatacgaatcctaaaacgacaacaacgaataaattacctaaacgttaatacctaaatctctatcta

SEQ ID NO: 3245 - DNA, 797 bp, Artificial Sequence
  chemically treated genomic DNA (Homo sapiens) CpG-island No: 3245
tgtagcgtggcggtggtcgagcgcggaggttcgttattgtttttgattagtattattagtttttgtttggtagcgtcgcgtttttttagtagtttggcggtgcgtatttcgttattgtgcgtttatacgtcgaatagttcgggtttcgtggttttgagtagttggtacgatagttaggcgttttggttcgagtcgtcgtttatcgttattattttggttattaggtagttcggttcggtcgttcggggtattagttcggtgtagggcgcggagtcgttttgtagcgggtatagtacgaagggcgagttgtcgttggcgtttagtattagtacgcgtattagcgtttcgttgtttaacgtcggggagtcgcggtttgcggcgtttacgcggaattcgaacgtttgtagggtttcgtagtttagcgattggagagcgaataggtggtcgttgttcgcgttgatggagattagggaggcgaggggtaggtgcgggttttggggcggtagtagcgagtaggtgatttgggcgttggtgttcgagtttttgtttgtggcgttgacgttgtcgatgtgtagggcggggttgttgttttcgcggacgaatagggtgtaggaggtttgggtgaaggcgggggcgttgttattgacgtcggagattagtacggttatgttgtgttcggtttttagtttgggtgtttcgaagtcggtgacggtgatggtgatgttgtattcggatttggtttttcggtttagggtcgtgtttattattagagtgtaaaagtttttaatagaaggttt

SEQ ID NO: 3246 - DNA, 797 bp, Artificial Sequence
  chemically treated genomic DNA (Homo sapiens) CpG-island No: 3246
aaaccttctattaaaaacttttacactctaataataaacacgaccctaaaccgaaaaaccaaatccgaatacaacatcaccatcaccgtcaccgacttcgaaacacccaaactaaaaaccgaacacaacataaccgtactaatctccgacgtcaataacaacgcccccgccttcacccaaacctcctacaccctattcgtccgcgaaaacaacaaccccgccctacacatcgacaacgtcaacgccacaaacaaaaactcgaacaccaacgcccaaatcacctactcgctactaccgccccaaaacccgcacctacccctcgcctccctaatctccatcaacgcgaacaacgaccacctattcgctctccaatcgctaaactacgaaaccctacaaacgttcgaattccgcgtaaacgccgcaaaccgcgactccccgacgttaaacaacgaaacgctaatacgcgtactaatactaaacgccaacgacaactcgcccttcgtactatacccgctacaaaacgactccgcgccctacaccgaactaataccccgaacgaccgaaccgaactacctaataaccaaaataataacgataaacgacgactcgaaccaaaacgcctaactatcgtaccaactactcaaaaccacgaaacccgaactattcgacgtataaacgcacaataacgaaatacgcaccgccaaactactaaaaaaacgcgacgctaccaaacaaaaactaataatactaatcaaaaacaataacgaacctccgcgctcgaccaccgccacgctaca

SEQ ID NO: 3247 - DNA, 797 bp, Artificial Sequence
  chemically treated genomic DNA (Homo sapiens) CpG-island No: 3247
aaattttttgttgagaatttttatattttggtgataagtacggttttggatcgggagattagattcgaatataatattattattatcgttatcgatttcgggatatttaggttgaaaatcgagtataatataatcgtgttggttttcgacgttaatgataacgttttcgtttttatttaaattttttatattttgttcgttcgcgagaataatagtttcgttttgtatatcggtagcgttagcgttatagatagagattcgggtattaacgtttaggttatttattcgttgttgtcgttttaggattcgtatttgtttttcgtttttttggtttttattaacgcggataacggttatttgttcgttttttagtcgttggattacgaggttttgtaggcgttcgagtttcgcgtgggcgtcgtagatcgcggtttttcggcgttgagtagcgaggcgttggtgcgcgtgttggtgttggacgttaacgataattcgtttttcgtgttgtattcgttgtagaacggtttcgcgttttgtatcgagttggtgtttcgggcggtcgagtcgggttatttggtgattaaggtggtggcggtggacggcgattcgggttagaacgtttggttgtcgtattagttgtttaaggttacggagttcgggttgttcggcgtgtgggcgtataatggcgaggtgcgtatcgttaggttgttgagggagcgcgacgttgttaagtagaggttggtggtgttggttaaggataatggcgagttttcgcgttcggttatcgttacgttgta

SEQ ID NO: 3248 - DNA, 797 bp, Artificial Sequence
  chemically treated genomic DNA (Homo sapiens) CpG-island No: 3248
tacaacgtaacgataaccgaacgcgaaaactcgccattatccttaaccaacaccaccaacctctacttaacaacgtcgcgctccctcaacaacctaacgatacgcacctcgccattatacgcccacacgccgaacaacccgaactccgtaaccttaaacaactaatacgacaaccaaacgttctaacccgaatcgccgtccaccgccaccaccttaatcaccaaataacccgactcgaccgcccgaaacaccaactcgatacaaaacgcgaaaccgttctacaacgaatacaacacgaaaaacgaattatcgttaacgtccaacaccaacacgcgcaccaacgcctcgctactcaacgccgaaaaaccgcgatctacgacgcccacgcgaaactcgaacgcctacaaaacctcgtaatccaacgactaaaaaacgaacaaataaccgttatccgcgttaataaaaaccaaaaaaacgaaaaacaaatacgaatcctaaaacgacaacaacgaataaataacctaaacgttaatacccgaatctctatctataacgctaacgctaccgatatacaaaacgaaactattattctcgcgaacgaacaaaatataaaaaatttaaataaaaacgaaaacgttatcattaacgtcgaaaaccaacacgattatattatactcgattttcaacctaaatatcccgaaatcgataacgataataataatattatattcgaatctaatctcccgatccaaaaccgtacttatcaccaaaatataaaaattctcaacaaaaaattt

SEQ ID NO: 3249 - DNA, 602 bp, Artificial Sequence
  chemically treated genomic DNA (Homo sapiens) CpG-island No: 3249
cgcgaaatatttttacgggtcggcgaggttgacgcgttgcgttttatcgtattaattagtcgggcgtggtgcgggcgtcgggaagattgggcggggcgaaggtattatttttcgatggggtcggcgttgtgcgttttttagtcgaggtggggcgttgtggaagagcggtagttttcggtcggttttttttttttttcggttgtcggcgttagtacgttttgttttcgttggtcgcgttgggatggtcgttatagttgtaggtgttgttagtgtttagcgttggtttttgtcgggcgttgagggtagtttagtttttttgtttgttcggttcgtttgtgcgtggtatttaagggtattagtattttcgcggtcggtagtatgggtcgggagttacggtgaggtagagcgtcgagcgggttagcgggcgagcggttttttggggtcgtgagaagaggcgggagttgaggtggtcgtcgggttaggtttggcgcggttttacgtgcggttagcgttgtttcgcgagtattggaagggttgggggatttcggttgagggaatggttgtgtttgggttagcgacggttttttttgtattattattag

SEQ ID NO: 3250 - DNA, 602 bp, Artificial Sequence
  chemically treated genomic DNA (Homo sapiens) CpG-island No: 3250
ctaataataatacaaaaaaaaccgtcgctaacccaaacacaaccattccctcaaccgaaatcccccaacccttccaatactcgcgaaacaacgctaaccgcacgtaaaaccgcgccaaacctaacccgacgaccacctcaactcccgcctcttctcacgaccccaaaaaaccgctcgcccgctaacccgctcgacgctctacctcaccgtaactcccgacccatactaccgaccgcgaaaatactaatacccttaaataccacgcacaaacgaaccgaacaaacaaaaaaactaaactaccctcaacgcccgacaaaaaccaacgctaaacactaacaacacctacaactataacgaccatcccaacgcgaccaacgaaaacaaaacgtactaacgccgacaaccgaaaaaaaaaaaaaaccgaccgaaaactaccgctcttccacaacgccccacctcgactaaaaaacgcacaacgccgaccccatcgaaaaataataccttcgccccgcccaatcttcccgacgcccgcaccacgcccgactaattaatacgataaaacgcaacgcgtcaacctcgccgacccgtaaaaatatttcgcg

SEQ ID NO: 3251 - DNA, 602 bp, Artificial Sequence
  chemically treated genomic DNA (Homo sapiens) CpG-island No: 3251
ttgatggtagtgtaggggaagtcgtcgttggtttaaatataattatttttttagtcgaggttttttagtttttttaatgttcgcggggtagcgttgatcgtacgtggggtcgcgttaggtttggttcggcggttattttaattttcgtttttttttacgattttaagaagtcgttcgttcgttagttcgttcggcgttttgttttatcgtgattttcgatttatgttgtcgatcgcgggaatattggtgtttttgagtattacgtataggcgaatcggataaataaggaggttgagttgtttttaacgttcggtaaagattagcgttaaatattagtagtatttatagttgtggcggttattttagcgcggttaacgaaaataggacgtgttggcgtcggtagtcgaaggaagagaaaagtcgatcggaagttgtcgtttttttatagcgttttatttcgattggaggacgtatagcgtcggttttatcgaaaggtgatgttttcgtttcgtttagttttttcggcgttcgtattacgttcggttgattagtgcgatggagcgtagcgcgttagtttcgtcggttcgtgagggtgtttcgcg

SEQ ID NO: 3252 - DNA, 602 bp, Artificial Sequence
  chemically treated genomic DNA (Homo sapiens) CpG-island No: 3252
cgcgaaacaccctcacgaaccgacgaaactaacgcgctacgctccatcgcactaatcaaccgaacgtaatacgaacgccgaaaaaactaaacgaaacgaaaacatcacctttcgataaaaccgacgctatacgtcctccaatcgaaataaaacgctataaaaaaacgacaacttccgatcgacttttctcttccttcgactaccgacgccaacacgtcctattttcgttaaccgcgctaaaataaccgccacaactataaatactactaatatttaacgctaatctttaccgaacgttaaaaacaactcaacctccttatttatccgattcgcctatacgtaatactcaaaaacaccaatattcccgcgatcgacaacataaatcgaaaatcacgataaaacaaaacgccgaacgaactaacgaacgaacgacttcttaaaatcgtaaaaaaaaacgaaaattaaaataaccgccgaaccaaacctaacgcgaccccacgtacgatcaacgctaccccgcgaacattaaaaaaactaaaaaacctcgactaaaaaaataattatatttaaaccaacgacgacttcccctacactaccatcaa

SEQ ID NO: 3253 - DNA, 648 bp, Artificial Sequence
  chemically treated genomic DNA (Homo sapiens) CpG-island No: 3253
agtaggcgtacggtgatgggtacggtgttgacgatgcgtcgtatggatattacgttgtcgggtacgtattcgtagaggtagtcgcgttcgtcgtgaaggtagaagagcgttttttggattcgtcgcgtcgtttcgtcgtcgatgcggttttgttcgcgtttcgttttcgtttgcgtttgtatcgttagtagttgcgcgttttcgttttcggcgtttttcggtagttacggtttgcgcgttatttcgcggtataataggtcgtcgcggttttgtatcgtatcgtgtaggaattgtagtttggtgcggcggtttataatgggtatagagaagggtagcgtgatagtgcggttgaggaagaggtagtcgttatcggtcgtgttttttatgttgttcgcgttttttaggtacgcggttaggatgttggggtttacgattaggatgaagatgaagggcgcgtggttgtcggatagtagcgtgttgatggcgttgagtacgtttattacgcgtttcgggtagtacgtgtttagttcggtgatttttagtattacgcgtagtttgcgtcgttggtagatttttaggaagtataggaagtcggtgagtagttttatttttttttttatttcgtatatgaaatttagttggttgtcg

SEQ ID NO: 3254 - DNA, 648 bp, Artificial Sequence
  chemically treated genomic DNA (Homo sapiens) CpG-island No: 3254
cgacaaccaactaaatttcatatacgaaataaaaaaaaaaataaaactactcaccgacttcctatacttcctaaaaatctaccaacgacgcaaactacgcgtaatactaaaaatcaccgaactaaacacgtactacccgaaacgcgtaataaacgtactcaacgccatcaacacgctactatccgacaaccacgcgcccttcatcttcatcctaatcgtaaaccccaacatcctaaccgcgtacctaaaaaacgcgaacaacataaaaaacacgaccgataacgactacctcttcctcaaccgcactatcacgctacccttctctatacccattataaaccgccgcaccaaactacaattcctacacgatacgatacaaaaccgcgacgacctattataccgcgaaataacgcgcaaaccgtaactaccgaaaaacgccgaaaacgaaaacgcgcaactactaacgatacaaacgcaaacgaaaacgaaacgcgaacaaaaccgcatcgacgacgaaacgacgcgacgaatccaaaaaacgctcttctaccttcacgacgaacgcgactacctctacgaatacgtacccgacaacgtaatatccatacgacgcatcgtcaacaccgtacccatcaccgtacgcctact

SEQ ID NO: 3255 - DNA, 648 bp, Artificial Sequence
  chemically treated genomic DNA (Homo sapiens) CpG-island No: 3255
cggtagttagttgggttttatgtgcgaggtgaagaaggaggtggagttgtttatcgattttttgtgttttttggagatttattagcggcgtaggttgcgcgtggtgttggaggttatcgggttggatacgtgttattcggagcgcgtggtgggcgtgtttaacgttattaatacgttgttgttcgatagttacgcgttttttatttttattttggtcgtggattttagtattttggtcgcgtgtttagagagcgcgggtaatatgaagggtacggtcgataacggttattttttttttaatcgtattgttacgttgtttttttttgtgtttattatgggtcgtcgtattaagttgtagtttttgtacgatgcggtgtagagtcgcgacgatttgttgtatcgcgagatgacgcgtaagtcgtggttgtcgggggacgtcgggggcgagagcgcgtagttgttggcggtgtaggcgtaggcggggacggagcgcgggtagggtcgtatcgacgacgaggcggcgcggcgaatttaggaggcgtttttttgtttttacgacgagcgcgattgtttttacgagtacgtgttcgataacgtggtgtttatgcggcgtatcgttaatatcgtgtttattatcgtgcgtttgtt

SEQ ID NO: 3256 - DNA, 648 bp, Artificial Sequence
  chemically treated genomic DNA (Homo sapiens) CpG-island No: 3256
aacaaacgcacgataataaacacgatattaacgatacgccgcataaacaccacgttatcgaacacgtactcgtaaaaacaatcgcgctcgtcgtaaaaacaaaaaaacgcctcctaaattcgccgcgccgcctcgtcgtcgatacgaccctacccgcgctccgtccccgcctacgcctacaccgccaacaactacgcgctctcgcccccgacgtcccccgacaaccacgacttacgcgtcatctcgcgatacaacaaatcgtcgcgactctacaccgcatcgtacaaaaactacaacttaatacgacgacccataataaacacaaaaaaaaacaacgtaacaatacgattaaaaaaaaaataaccgttatcgaccgtacccttcatattacccgcgctctctaaacacgcgaccaaaatactaaaatccacgaccaaaataaaaataaaaaacgcgtaactatcgaacaacaacgtattaataacgttaaacacgcccaccacgcgctccgaataacacgtatccaacccgataacctccaacaccacgcgcaacctacgccgctaataaatctccaaaaaacacaaaaaatcgataaacaactccacctccttcttcacctcgcacataaaacccaactaactaccg

SEQ ID NO: 3257 - DNA, 871 bp, Artificial Sequence
  chemically treated genomic DNA (Homo sapiens) CpG-island No: 3257
attttttacgcgatattagtcgttcgatttttttgcgttggtttacgaataggtgtttgtttatcgagtatacggttatgagtagtttcgagttcgatagtgtggtggtcgcgtcgttaaatattttgagtaggttgtcgttcgggttgtcgtggtttagcgcgtggtcgtttagtgataagtagagtagttttatatttaggtttagcgtcgttagtagcgttagtagttttaggtatacgcggcgtcgataatgttattcgttttggtagtagttttgtttggtggtcggtttgttgtttagtatcgagtatacgttgaagggtagtgcgttatagtggcggcggatgttttcgtataacgtggttattaggtcggtttatagtttgtcggtgttcgcgtattgttaggcgttaaagcggatgaaaaggaattgtacgtttttgcgtcgtaggtgtatttcggtgatgatgggttgtaggaatattaggtattatagtagttgcgggacgttttagtcgtttacggtacgcggtcgttattgtacgtgttgtagtttttcgttttcgcgttgcgcggttttttgttgtattagcgttgcgggaagggagttcgggagtcgcgtgagtcgtagattcgtcggggtgggcggggtttagtacgggtagggcggagcgtttttggagaggcgaggggcgtttagtagaggcgaggggttggaagcgagtcgcggtcgttttttaaagagttggaagtcggtgtagaagcgggggcgtggagaggtttggagtcgggtttggatcggaagcggtttgaaggttaggttgtggggtcgggatgggtagaggtagagtcggtagaggagagatgg

SEQ ID NO: 3258 - DNA, 871 bp, Artificial Sequence
  chemically treated genomic DNA (Homo sapiens) CpG-island No: 3258
ccatctctcctctaccgactctacctctacccatcccgaccccacaacctaaccttcaaaccgcttccgatccaaacccgactccaaacctctccacgcccccgcttctacaccgacttccaactctttaaaaaacgaccgcgactcgcttccaacccctcgcctctactaaacgcccctcgcctctccaaaaacgctccgccctacccgtactaaaccccgcccaccccgacgaatctacgactcacgcgactcccgaactcccttcccgcaacgctaatacaacaaaaaaccgcgcaacgcgaaaacgaaaaactacaacacgtacaataacgaccgcgtaccgtaaacgactaaaacgtcccgcaactactataatacctaatattcctacaacccatcatcaccgaaatacacctacgacgcaaaaacgtacaattccttttcatccgctttaacgcctaacaatacgcgaacaccgacaaactataaaccgacctaataaccacgttatacgaaaacatccgccgccactataacgcactacccttcaacgtatactcgatactaaacaacaaaccgaccaccaaacaaaactactaccaaaacgaataacattatcgacgccgcgtatacctaaaactactaacgctactaacgacgctaaacctaaatataaaactactctacttatcactaaacgaccacgcgctaaaccacgacaacccgaacgacaacctactcaaaatatttaacgacgcgaccaccacactatcgaactcgaaactactcataaccgtatactcgataaacaaacacctattcgtaaaccaacgcaaaaaaatcgaacgactaatatcgcgtaaaaaat

SEQ ID NO: 3259 - DNA, 871 bp, Artificial Sequence
  chemically treated genomic DNA (Homo sapiens) CpG-island No: 3259
ttattttttttttgtcggttttatttttgtttatttcgattttatagtttggtttttagatcgttttcggtttaagttcggttttaggtttttttacgttttcgtttttgtatcggtttttagttttttaaggagcggtcgcggttcgtttttagtttttcgtttttgttgggcgtttttcgtttttttaggagcgtttcgttttgttcgtattaggtttcgtttatttcggcgggtttgcggtttacgcggttttcgggtttttttttcgtagcgttgatgtagtaggaggtcgcgtagcgcgagagcgaggagttgtagtacgtgtagtggcggtcgcgtgtcgtgagcggttggggcgtttcgtagttattgtggtatttggtgtttttgtagtttattattatcgaggtgtatttgcggcgtaggaacgtgtagtttttttttattcgttttagcgtttggtagtacgcgggtatcgataagttgtgggtcggtttggtgattacgttgtgcgagggtattcgtcgttattatggcgtattgttttttagcgtgtattcggtgttgggtaataagtcggttattaggtaggattgttgttagagcgagtggtattgtcggcgtcgcgtgtgtttggggttgttggcgttgttggcggcgttgggtttgggtgtggggttgttttatttgttattgggcggttacgcgttgggttacggtagttcgagcggtagtttgtttaaggtgtttggcggcgcggttattatattgtcgggttcggggttgtttatggtcgtgtattcggtgggtaagtatttgttcgtaagttagcgtaagaagatcgagcggttggtgtcgcgtgaaaagt

SEQ ID NO: 3260 - DNA, 871 bp, Artificial Sequence
  chemically treated genomic DNA (Homo sapiens) CpG-island No: 3260
acttttcacgcgacaccaaccgctcgatcttcttacgctaacttacgaacaaatacttacccaccgaatacacgaccataaacaaccccgaacccgacaatataataaccgcgccgccaaacaccttaaacaaactaccgctcgaactaccgtaacccaacgcgtaaccgcccaataacaaataaaacaaccccacacccaaacccaacgccgccaacaacgccaacaaccccaaacacacgcgacgccgacaataccactcgctctaacaacaatcctacctaataaccgacttattacccaacaccgaatacacgctaaaaaacaatacgccataataacgacgaataccctcgcacaacgtaatcaccaaaccgacccacaacttatcgatacccgcgtactaccaaacgctaaaacgaataaaaaaaaactacacgttcctacgccgcaaatacacctcgataataataaactacaaaaacaccaaataccacaataactacgaaacgccccaaccgctcacgacacgcgaccgccactacacgtactacaactcctcgctctcgcgctacgcgacctcctactacatcaacgctacgaaaaaaaaacccgaaaaccgcgtaaaccgcaaacccgccgaaataaacgaaacctaatacgaacaaaacgaaacgctcctaaaaaaacgaaaaacgcccaacaaaaacgaaaaactaaaaacgaaccgcgaccgctccttaaaaaactaaaaaccgatacaaaaacgaaaacgtaaaaaaacctaaaaccgaacttaaaccgaaaacgatctaaaaaccaaactataaaatcgaaataaacaaaaataaaaccgacaaaaaaaaaataa

SEQ ID NO: 3261 - DNA, 759 bp, Artificial Sequence
  chemically treated genomic DNA (Homo sapiens) CpG-island No: 3261
cggaagcggtatcgataggaagataatcgggatcgtttgagattcggagttttcggtcgagggttagtgttcggttggtttcggttaagatttttgggttaaaggttatcgtattttcgtttacgagttgggtcggtatttcgcgtaggtttagatttgggtagaggtgggggatttggtagtattcggtttaagtatgatcgggtttgagttgggtttgattacgtcgaattggatttggttacgaagagtttgttcgatgagttcgggagaattcggttacgttcgattgagttcgggagatttcggataagttcgagtttgttcgtttaagttcggttacgttcggtttgtttcgaataagttcgggtgacgttcgggtcgggtcgggtatgttcggttacgttcggttatatgagggttagttcgggtattttcgattaagatcggtcgcgttcggtttgtttcgttcgattttagcgggtttagtagtatcgggatgaattttacggttagtcgaaggggcggggttttttaatttttttttggttcgtttggggtgcgtcgtgggcgttgtggtgtaatgggagacgtttttaggggcggattggaggcggcggataatttagatttgtttttcgagggggaggtatgcggatcgcgattttttatttttttttcggttttttttaagggttttagaaaagcgcgtttgtggataaatagggaaattgaggttaggagcggttatagggcgtg

SEQ ID NO: 3262 - DNA, 759 bp, Artificial Sequence
  chemically treated genomic DNA (Homo sapiens) CpG-island No: 3262
cacgccctataaccgctcctaacctcaatttccctatttatccacaaacgcgcttttctaaaacccttaaaaaaaaccgaaaaaaaaataaaaaatcgcgatccgcatacctccccctcgaaaaacaaatctaaattatccgccgcctccaatccgcccctaaaaacgtctcccattacaccacaacgcccacgacgcaccccaaacgaaccaaaaaaaaattaaaaaaccccgccccttcgactaaccgtaaaattcatcccgatactactaaacccgctaaaatcgaacgaaacaaaccgaacgcgaccgatcttaatcgaaaatacccgaactaaccctcatataaccgaacgtaaccgaacatacccgacccgacccgaacgtcacccgaacttattcgaaacaaaccgaacgtaaccgaacttaaacgaacaaactcgaacttatccgaaatctcccgaactcaatcgaacgtaaccgaattctcccgaactcatcgaacaaactcttcgtaaccaaatccaattcgacgtaatcaaacccaactcaaacccgatcatacttaaaccgaatactaccaaatcccccacctctacccaaatctaaacctacgcgaaataccgacccaactcgtaaacgaaaatacgataacctttaacccaaaaatcttaaccgaaaccaaccgaacactaaccctcgaccgaaaactccgaatctcaaacgatcccgattatcttcctatcgataccgcttccg

SEQ ID NO: 3263 - DNA, 759 bp, Artificial Sequence
  chemically treated genomic DNA (Homo sapiens) CpG-island No: 3263
tacgttttgtggtcgtttttggttttagtttttttatttgtttatagacgcgtttttttggaatttttggggagagtcgagagaggggtagggggtcgcgattcgtatgtttttttttcgaggggtagatttgggttattcgtcgtttttagttcgtttttaagagcgttttttattgtattatagcgtttacggcgtattttagacgggttagggaagggttaagaagtttcgttttttcggttggtcgtggggtttatttcggtgttgttaaattcgttggagtcggacggaataggtcgagcgcggtcggttttagtcggagatgttcgaattagtttttatgtagtcggacgtgatcgaatatgttcgattcggttcgagcgttattcggatttgttcgaagtagatcgagcgtaatcggatttaggcgaataagttcgaatttattcgaagtttttcgagtttaatcggacgtagtcgaattttttcgaatttatcgaataaatttttcgtgattaagtttaattcgacgtgattagatttaatttagattcggttatatttggatcgaatgttgttaaattttttatttttatttagatttgagtttacgcggggtgtcgatttagttcgtggacggggatacggtgatttttgatttaaaagttttggtcgggattagtcggatattggttttcggtcgggagtttcgagttttaggcggtttcggttgtttttttgtcggtgtcgttttcg

SEQ ID NO: 3264 - DNA, 759 bp, Artificial Sequence
  chemically treated genomic DNA (Homo sapiens) CpG-island No: 3264
cgaaaacgacaccgacaaaaaaacaaccgaaaccgcctaaaactcgaaactcccgaccgaaaaccaatatccgactaatcccgaccaaaacttttaaatcaaaaatcaccgtatccccgtccacgaactaaatcgacaccccgcgtaaactcaaatctaaataaaaataaaaaatttaacaacattcgatccaaatataaccgaatctaaattaaatctaatcacgtcgaattaaacttaatcacgaaaaatttattcgataaattcgaaaaaattcgactacgtccgattaaactcgaaaaacttcgaataaattcgaacttattcgcctaaatccgattacgctcgatctacttcgaacaaatccgaataacgctcgaaccgaatcgaacatattcgatcacgtccgactacataaaaactaattcgaacatctccgactaaaaccgaccgcgctcgacctattccgtccgactccaacgaatttaacaacaccgaaataaaccccacgaccaaccgaaaaaacgaaacttcttaacccttccctaacccgtctaaaatacgccgtaaacgctataatacaataaaaaacgctcttaaaaacgaactaaaaacgacgaataacccaaatctacccctcgaaaaaaaaacatacgaatcgcgaccccctacccctctctcgactctccccaaaaattccaaaaaaacgcgtctataaacaaataaaaaaactaaaaccaaaaacgaccacaaaacgta

SEQ ID NO: 3265 - DNA, 925 bp, Artificial Sequence
  chemically treated genomic DNA (Homo sapiens) CpG-island No: 3265
gcggggcggggggcggcggcggcgtagtcggtaggaggcgtagcgttcgttcgtagcgcggggaggtgggaggggagcggggcggggagcggggcgggcgggagggagaggggagcgcgtcggagacgcgcgcgtttagtttatttttcgcgttcgtcgtcgttcggataataaatagtagttttgcgcggggcgatgttcgagtcggtgtcgtcgttttcgcgtcgcgtagtttcggtcgttaggttttagttcgtttcggttttcgttaggtcgcgtttttttttttttttttttttcgcgcgttattcgcgttcgttttcgttcggtatcgcggatttattcggatttcggcggggagatggagtgagtaggcgcgttcgggtcgcggggttgggggttcggagtttcgggagtcggggaggggggaggttttttttttcgcgttttattgggggcgtcgttgttttcgcgaggagtaggaggcggcgcggggttgttggggtcgtagcgtagtcgggaagagattcgggttgggtcgcgtttgtcgggaggttttttcgttttcggatttcggttgtttatttatcggcgcgtggggattcgggtagcggcggttcgggttagtttaggacgcggggagggggaggttcgcgttttcgttcgcgtttcgttcgcgtttttagggcgagtttcggttttcggttatttgtgggtggtttcggggagatggagcgatttttttttagattgtatcggttcggtttcgcgtttacgtatttttttttcgttttagtttgagcgtacggtttttggcgttttggacgcgcgcgcgggtcggtgttttttattttcgttttttttaagggtttttaggggtgttttgagtttttcgttattgcgtaggtttcgagttatcgttgga

SEQ ID NO: 3266 - DNA, 925 bp, Artificial Sequence
  chemically treated genomic DNA (Homo sapiens) CpG-island No: 3266
tccaacgataactcgaaacctacgcaataacgaaaaactcaaaacacccctaaaaacccttaaaaaaaacgaaaataaaaaacaccgacccgcgcgcgcgtccaaaacgccaaaaaccgtacgctcaaactaaaacgaaaaaaaaatacgtaaacgcgaaaccgaaccgatacaatctaaaaaaaaatcgctccatctccccgaaaccacccacaaataaccgaaaaccgaaactcgccctaaaaacgcgaacgaaacgcgaacgaaaacgcgaacctccccctccccgcgtcctaaactaacccgaaccgccgctacccgaatccccacgcgccgataaataaacaaccgaaatccgaaaacgaaaaaacctcccgacaaacgcgacccaacccgaatctcttcccgactacgctacgaccccaacaaccccgcgccgcctcctactcctcgcgaaaacaacgacgcccccaataaaacgcgaaaaaaaaaacctcccccctccccgactcccgaaactccgaacccccaaccccgcgacccgaacgcgcctactcactccatctccccgccgaaatccgaataaatccgcgataccgaacgaaaacgaacgcgaataacgcgcgaaaaaaaaaaaaaaaaaaaaacgcgacctaacgaaaaccgaaacgaactaaaacctaacgaccgaaactacgcgacgcgaaaacgacgacaccgactcgaacatcgccccgcgcaaaactactatttattatccgaacgacgacgaacgcgaaaaataaactaaacgcgcgcgtctccgacgcgctcccctctccctcccgcccgccccgctccccgccccgctcccctcccacctccccgcgctacgaacgaacgctacgcctcctaccgactacgccgccgccgccccccgccccgc

SEQ ID NO: 3267 - DNA, 925 bp, Artificial Sequence
  chemically treated genomic DNA (Homo sapiens) CpG-island No: 3267
tttagcggtaattcgggatttgcgtagtggcggggggtttaggatatttttggaggtttttgggaagggcgggggtggggggtatcggttcgcgcgcgcgtttagggcgttaggagtcgtgcgtttagattggggcgggggaagggtgcgtgagcgcgaggtcggatcggtgtaatttggggaggggtcgttttattttttcggggttatttataggtggtcgagagtcgaggttcgttttggagacgcgggcggggcgcgggcggagacgcgagttttttttttttcgcgttttggattggttcgagtcgtcgttgttcgggtttttacgcgtcggtgggtgggtagtcggggttcgggagcggggaggtttttcggtaggcgcggtttagttcgagttttttttcggttgcgttgcggttttagtagtttcgcgtcgttttttgtttttcgcgggggtagcgacgtttttaatggggcgcgagagagggggtttttttttttttcggttttcggagtttcgggtttttagtttcgcggttcgagcgcgtttatttattttattttttcgtcgaggttcgggtgggttcgcggtgtcgggcgggggcgggcgcgggtggcgcgcgggggaggggaggggagggggacgcggtttggcgggggtcggggcgggttaaggtttggcggtcggggttgcgcggcgcgggggcggcggtatcggttcgggtatcgtttcgcgtaaagttgttgtttattgttcgggcggcggcgggcgcggggggtgggttgggcgcgcgcgttttcggcgcgtttttttttttttttcgttcgtttcgtttttcgtttcgttttttttttattttttcgcgttgcgagcgggcgttgcgttttttgtcggttgcgtcgtcgtcgtttttcgtttcgt

SEQ ID NO: 3268 - DNA, 925 bp, Artificial Sequence
  chemically treated genomic DNA (Homo sapiens) CpG-island No: 3268
acgaaacgaaaaacgacgacgacgcaaccgacaaaaaacgcaacgcccgctcgcaacgcgaaaaaataaaaaaaaaacgaaacgaaaaacgaaacgaacgaaaaaaaaaaaaaaacgcgccgaaaacgcgcgcgcccaacccaccccccgcgcccgccgccgcccgaacaataaacaacaactttacgcgaaacgatacccgaaccgataccgccgcccccgcgccgcgcaaccccgaccgccaaaccttaacccgccccgacccccgccaaaccgcgtccccctcccctcccctcccccgcgcgccacccgcgcccgcccccgcccgacaccgcgaacccacccgaacctcgacgaaaaaataaaataaataaacgcgctcgaaccgcgaaactaaaaacccgaaactccgaaaaccgaaaaaaaaaaaaaccccctctctcgcgccccattaaaaacgtcgctacccccgcgaaaaacaaaaaacgacgcgaaactactaaaaccgcaacgcaaccgaaaaaaaactcgaactaaaccgcgcctaccgaaaaacctccccgctcccgaaccccgactacccacccaccgacgcgtaaaaacccgaacaacgacgactcgaaccaatccaaaacgcgaaaaaaaaaaaactcgcgtctccgcccgcgccccgcccgcgtctccaaaacgaacctcgactctcgaccacctataaataaccccgaaaaaataaaacgacccctccccaaattacaccgatccgacctcgcgctcacgcacccttcccccgccccaatctaaacgcacgactcctaacgccctaaacgcgcgcgcgaaccgataccccccacccccgcccttcccaaaaacctccaaaaatatcctaaaccccccgccactacgcaaatcccgaattaccgctaaa

SEQ ID NO: 3269 - DNA, 839 bp, Artificial Sequence
  chemically treated genomic DNA (Homo sapiens) CpG-island No: 3269
cgtggttatatttcgtttaatttttttaatttgtgacgtggagcgttttgtcggtttgattttggttattcggcgtcgggggcgggtttatatttttttcggatggaagtttttttttgggcgggcgtttttcggacgtttagacggggatttttttttttttttttagtcgtagcgcgggggagaaattttcgatttttttcgttcgtttaggtcgttttaggttcgaagtttcggttttttttaatttttttaagtataggtcgggggcgggagatgttgcgtcggttttattttcgcgcgtcgggtttcggcgttgttatggggacggcgcggttgttacggcgatcgtttttcgcgggtttttttatttattatcggggcggcggcgttcgggtttggggaggggcgaggggggcgtattttgcgtgttttggggaaaggcgagggggcgtttaggttcggggaggggcgaggggggcgtcgggtttggggaggggcgaggggggcgtcgggtttggggaggggtaaggggggcgtattttgcgtgttttggggaaaggcgagggggcgttcgggtttggggagaggtgaggggggcgtcgggtttggggaggggcgagaggggcgttcgggtttggggagagtgaagggggcgtcgggtttggggaggggcgaggggggcgtcgggtttggggaggggcgaggggggcgttcgtgattgcgggggttaggggggcgcgttttggggaggggtttgcgttttggggttgtttttcgcgcgttttttgttcgttcgtttgatattttttcgttttggtcggtcgggtagggatagg

SEQ ID NO: 3270 - DNA, 839 bp, Artificial Sequence
  chemically treated genomic DNA (Homo sapiens) CpG-island No: 3270
cctatccctacccgaccgaccaaaacgaaaaaatatcaaacgaacgaacaaaaaacgcgcgaaaaacaaccccaaaacgcaaacccctccccaaaacgcgcccccctaacccccgcaatcacgaacgcccccctcgcccctccccaaacccgacgcccccctcgcccctccccaaacccgacgcccccttcactctccccaaacccgaacgcccctctcgcccctccccaaacccgacgcccccctcacctctccccaaacccgaacgccccctcgcctttccccaaaacacgcaaaatacgccccccttacccctccccaaacccgacgcccccctcgcccctccccaaacccgacgcccccctcgcccctccccgaacctaaacgccccctcgcctttccccaaaacacgcaaaatacgcccccctcgcccctccccaaacccgaacgccgccgccccgataataaataaaaaaacccgcgaaaaacgatcgccgtaacaaccgcgccgtccccataacaacgccgaaacccgacgcgcgaaaataaaaccgacgcaacatctcccgcccccgacctatacttaaaaaaattaaaaaaaaccgaaacttcgaacctaaaacgacctaaacgaacgaaaaaaatcgaaaatttctcccccgcgctacgactaaaaaaaaaaaaaaaaatccccgtctaaacgtccgaaaaacgcccgcccaaaaaaaaacttccatccgaaaaaaatataaacccgcccccgacgccgaataaccaaaatcaaaccgacaaaacgctccacgtcacaaattaaaaaaattaaacgaaatataaccacg

SEQ ID NO: 3271 - DNA, 839 bp, Artificial Sequence
  chemically treated genomic DNA (Homo sapiens) CpG-island No: 3271
tttgtttttgttcggtcggttagggcgggggaatgttaggcgggcgggtagggaacgcgcgggaagtagttttagggcgtaggtttttttttaggacgcgtttttttggttttcgtagttacgggcgtttttttcgtttttttttagattcggcgtttttttcgtttttttttagattcggcgttttttttattttttttaggttcgggcgtttttttcgtttttttttagattcggcgttttttttatttttttttaggttcgggcgttttttcgtttttttttaggatacgtaggatgcgttttttttgtttttttttagattcggcgtttttttcgtttttttttagattcggcgtttttttcgttttttttcgggtttggacgttttttcgtttttttttaggatacgtaggatgcgtttttttcgtttttttttagattcgggcgtcgtcgtttcggtgatggatggaggggttcgcgggaggcggtcgtcgtggtaatcgcgtcgtttttatggtaacgtcgaggttcggcgcgcgggggtggggtcggcgtagtatttttcgttttcggtttgtgtttggggggattggggggggtcgaggtttcgggtttggggcggtttagacgggcgggaggggtcgggaatttttttttcgcgttgcggttgggggaggggaggggggttttcgtttgggcgttcggggggcgttcgtttaggaaggggtttttattcgggaggggtgtggattcgttttcgacgtcgggtagttaaggttaggtcgatagaacgttttacgttatagattggaaaaattaagcgaaatatgattacg

SEQ ID NO: 3272 - DNA, 839 bp, Artificial Sequence
  chemically treated genomic DNA (Homo sapiens) CpG-island No: 3272
cgtaatcatatttcgcttaatttttccaatctataacgtaaaacgttctatcgacctaaccttaactacccgacgtcgaaaacgaatccacacccctcccgaataaaaaccccttcctaaacgaacgccccccgaacgcccaaacgaaaacccccctcccctcccccaaccgcaacgcgaaaaaaaaattcccgacccctcccgcccgtctaaaccgccccaaacccgaaacctcgaccccccccaatccccccaaacacaaaccgaaaacgaaaaatactacgccgaccccacccccgcgcgccgaacctcgacgttaccataaaaacgacgcgattaccacgacgaccgcctcccgcgaacccctccatccatcaccgaaacgacgacgcccgaatctaaaaaaaaacgaaaaaaacgcatcctacgtatcctaaaaaaaaacgaaaaaacgtccaaacccgaaaaaaaacgaaaaaaacgccgaatctaaaaaaaaacgaaaaaaacgccgaatctaaaaaaaaacaaaaaaaacgcatcctacgtatcctaaaaaaaaacgaaaaaacgcccgaacctaaaaaaaaataaaaaaaacgccgaatctaaaaaaaaacgaaaaaaacgcccgaacctaaaaaaaataaaaaaaacgccgaatctaaaaaaaaacgaaaaaaacgccgaatctaaaaaaaaacgaaaaaaacgcccgtaactacgaaaaccaaaaaaacgcgtcctaaaaaaaaacctacgccctaaaactacttcccgcgcgttccctacccgcccgcctaacattcccccgccctaaccgaccgaacaaaaacaaa

SEQ ID NO: 3273 - DNA, 544 bp, Artificial Sequence
  chemically treated genomic DNA (Homo sapiens) CpG-island No: 3273
tgtcgttgttttaggtgttcgcgtaggtagtggtacgggtcgtgttggaagataattcgagttcggtggattttgcggatttgtcggcgttgttcggcgtttttttggttttcgagggtatacggggttatttgatggaggttaagttagttaacgcgtgttattttatcgaggtttcgcgattgggtaatcgttttttgggcgttatcgtgttgattcgtcgttacgattgtattttcgattttaaggtgttgaacgtttagcgcgtcggtttcgaggcggttatcgtgtataacgtttatttcgacgatttcgtgagtatgatttacgtttacgaggatttgaggggttagatcgttatttttttagtgttcgtgagcgaggtcgtttcgtaggatttgcgggttattttgggttgtaataagtcggtttacgcgttgtttttgttcgacgatttatcgtgttacgatttgggttgttatttcgtgttgatcgtgttttgggtgttgggttgtattttggttttggtcgtattagttttttt

SEQ ID NO: 3274 - DNA, 544 bp, Artificial Sequence
  chemically treated genomic DNA (Homo sapiens) CpG-island No: 3274
aaaaaaactaatacgaccaaaaccaaaatacaacccaacacccaaaacacgatcaacacgaaataacaacccaaatcgtaacacgataaatcgtcgaacaaaaacaacgcgtaaaccgacttattacaacccaaaataacccgcaaatcctacgaaacgacctcgctcacgaacactaaaaaaataacgatctaacccctcaaatcctcgtaaacgtaaatcatactcacgaaatcgtcgaaataaacgttatacacgataaccgcctcgaaaccgacgcgctaaacgttcaacaccttaaaatcgaaaatacaatcgtaacgacgaatcaacacgataacgcccaaaaaacgattacccaatcgcgaaacctcgataaaataacacgcgttaactaacttaacctccatcaaataaccccgtataccctcgaaaaccaaaaaaacgccgaacaacgccgacaaatccgcaaaatccaccgaactcgaattatcttccaacacgacccgtaccactacctacgcgaacacctaaaacaacgaca

SEQ ID NO: 3275 - DNA, 544 bp, Artificial Sequence
  chemically treated genomic DNA (Homo sapiens) CpG-island No: 3275
aagaaggttgatacgattagggttagggtatagtttagtatttaggatacggttagtacggggtgatagtttaggtcgtggtacggtgggtcgtcgggtaggagtagcgcgtgggtcgatttgttgtagtttaggatgattcgtaggttttgcgaggcggtttcgtttacgaatattgaggggatggcgatttggttttttaagttttcgtagacgtgggttatgtttacgaggtcgtcggagtggacgttgtgtacgatggtcgtttcgaagtcggcgcgttgggcgtttagtattttgaggtcgaaggtgtagtcgtagcggcggattagtacgatggcgtttagagagcggttgtttagtcgcggggtttcgatgggatggtacgcgttggttggtttgatttttattaggtagtttcgtatgttttcgggggttagggggacgtcgaatagcgtcggtagattcgtaaagtttatcgagttcgagttgttttttagtacggttcgtattattgtttgcgcgggtatttggagtagcgata

SEQ ID NO: 3276 - DNA, 544 bp, Artificial Sequence
  chemically treated genomic DNA (Homo sapiens) CpG-island No: 3276
tatcgctactccaaatacccgcgcaaacaataatacgaaccgtactaaaaaacaactcgaactcgataaactttacgaatctaccgacgctattcgacgtccccctaacccccgaaaacatacgaaactacctaataaaaatcaaaccaaccaacgcgtaccatcccatcgaaaccccgcgactaaacaaccgctctctaaacgccatcgtactaatccgccgctacgactacaccttcgacctcaaaatactaaacgcccaacgcgccgacttcgaaacgaccatcgtacacaacgtccactccgacgacctcgtaaacataacccacgtctacgaaaacttaaaaaaccaaatcgccatcccctcaatattcgtaaacgaaaccgcctcgcaaaacctacgaatcatcctaaactacaacaaatcgacccacgcgctactcctacccgacgacccaccgtaccacgacctaaactatcaccccgtactaaccgtatcctaaatactaaactataccctaaccctaatcgtatcaaccttctt

SEQ ID NO: 3277 - DNA, 1045 bp, Artificial Sequence
  chemically treated genomic DNA (Homo sapiens) CpG-island No: 3277
gcgaagcgggtcggaagtttcgtagtttttattttagaattcgcgtttcggaatttggattttcgatcgggttttgcggtttcgattttcgtagcgagtttagcgtcggggaataggattcggttttttagttttcgttcggggatattaggttttttgggcgaacggttaggtttttcgggattagcgcgttggaagattcgcggcggggacgttttttcggtcgtttcgtgtcgggttttacgtaagggtagtcggggcgtttcgtagtgggaacgcgaggagatcgattacggggcgagatagtcgttagggcgttcgcgtcgttcgttttaagttcgtattagttcgttacgaattcggaggatcgcgggttagagcggtttcgttagcgcgtaaagttttgtgggttatacgtttcggcgtttcgcgtttcgcggtatggcgggagttgtggtttagttgcgggggtcgcgcgggagttgtcgggagttgtgggcggggtgggtgcgcgcgtagtggtagggttagtgagttgtattcgcggaaaaggagggggagcggttggttagttgcgttttgcgggtcgagaatgttattagtagggatggcggcgttttgagtgttgagcgcggtttcgatcgggattttttatttttgatttattttcgtaggtcgagtttcgattttcgattcgtcgtcgtagttcgcggtttcgatttttgattcgttttcgtagttcgcggtttcgatttttgattcgtttttttagttagattttttacgttcgattcgttttcgtagtttatggtttatcggttcggtagtggacgtagagtttcggtttcgtttttttttcggatttttcggattcgtttttcgttttttttgtagagtcgagggttttggtttagtttcgtatttttttcgatcgtgttcgatttagttcgggtgtgttgtattcgaaataggttttcgggggtcgtcgggtttgtgggtgatcgtgtaggttaggatttttttttttttagtcgtgataattata

SEQ ID NO: 3278 - DNA, 1045 bp, Artificial Sequence
  chemically treated genomic DNA (Homo sapiens) CpG-island No: 3278
tataattatcacgactaaaaaaaaaaaaatcctaacctacacgatcacccacaaacccgacgacccccgaaaacctatttcgaatacaacacacccgaactaaatcgaacacgatcgaaaaaaatacgaaactaaaccaaaaccctcgactctacaaaaaaaacgaaaaacgaatccgaaaaatccgaaaaaaaaacgaaaccgaaactctacgtccactaccgaaccgataaaccataaactacgaaaacgaatcgaacgtaaaaaatctaactaaaaaaacgaatcaaaaatcgaaaccgcgaactacgaaaacgaatcaaaaatcgaaaccgcgaactacgacgacgaatcgaaaatcgaaactcgacctacgaaaataaatcaaaaataaaaaatcccgatcgaaaccgcgctcaacactcaaaacgccgccatccctactaataacattctcgacccgcaaaacgcaactaaccaaccgctccccctccttttccgcgaatacaactcactaaccctaccactacgcgcgcacccaccccgcccacaactcccgacaactcccgcgcgacccccgcaactaaaccacaactcccgccataccgcgaaacgcgaaacgccgaaacgtataacccacaaaactttacgcgctaacgaaaccgctctaacccgcgatcctccgaattcgtaacgaactaatacgaacttaaaacgaacgacgcgaacgccctaacgactatctcgccccgtaatcgatctcctcgcgttcccactacgaaacgccccgactacccttacgtaaaacccgacacgaaacgaccgaaaaaacgtccccgccgcgaatcttccaacgcgctaatcccgaaaaacctaaccgttcgcccaaaaaacctaatatccccgaacgaaaactaaaaaaccgaatcctattccccgacgctaaactcgctacgaaaatcgaaaccgcaaaacccgatcgaaaatccaaattccgaaacgcgaattctaaaataaaaactacgaaacttccgacccgcttcgc

SEQ ID NO: 3279 - DNA, 1045 bp, Artificial Sequence
  chemically treated genomic DNA (Homo sapiens) CpG-island No: 3279
tgtggttgttacgattgggaagggggagattttggtttgtacggttatttataggttcgacggttttcgggagtttgtttcgggtgtagtatattcgggttggatcgagtacggtcggggaggatgcggggttgggttaaggttttcggttttgtagggaggacggagagcgggttcggggggttcggggagggaacggggtcgaggttttgcgtttattgtcgggtcgatgggttatgggttgcgagggcgggtcgggcgtagagggtttggttgggagggcgggttagaggtcggggtcgcgggttgcgagggcgggttagaggtcggggtcgcgggttgcgacggcgggtcgggagtcggggttcggtttgcgagggtgggttaagggtagggggtttcggtcggggtcgcgtttagtatttaaagcgtcgttatttttgttgatgatattttcgattcgtagggcgtagttgattagtcgtttttttttttttttcgcgggtgtagtttattggttttgttattgcgcgcgtatttatttcgtttatagttttcggtagttttcgcgcggttttcgtagttgaattataattttcgttatgtcgcggagcgcggggcgtcggggcgtgtggtttataaggttttgcgcgttggcggggtcgttttagttcgcggtttttcgagttcgtggcgggttgatgcgggtttggggcgggcggcgcggacgttttggcggttgtttcgtttcgtggtcggttttttcgcgtttttattgcggggcgtttcggttgtttttgcgtggggttcggtacggggcggtcgagggggcgttttcgtcgcgagttttttagcgcgttggtttcgggaggtttggtcgttcgtttaaggagtttggtgttttcgggcggagattgggaagtcgggttttgtttttcggcgttgggttcgttgcgggggtcggggtcgtagggttcggtcggggatttaggtttcgggacgcggattttggagtaggggttgcggggttttcggttcgtttcgt

SEQ ID NO: 3280 - DNA, 1045 bp, Artificial Sequence
  chemically treated genomic DNA (Homo sapiens) CpG-island No: 3280
acgaaacgaaccgaaaaccccgcaacccctactccaaaatccgcgtcccgaaacctaaatccccgaccgaaccctacgaccccgacccccgcaacgaacccaacgccgaaaaacaaaacccgacttcccaatctccgcccgaaaacaccaaactccttaaacgaacgaccaaacctcccgaaaccaacgcgctaaaaaactcgcgacgaaaacgccccctcgaccgccccgtaccgaaccccacgcaaaaacaaccgaaacgccccgcaataaaaacgcgaaaaaaccgaccacgaaacgaaacaaccgccaaaacgtccgcgccgcccgccccaaacccgcatcaacccgccacgaactcgaaaaaccgcgaactaaaacgaccccgccaacgcgcaaaaccttataaaccacacgccccgacgccccgcgctccgcgacataacgaaaattataattcaactacgaaaaccgcgcgaaaactaccgaaaactataaacgaaataaatacgcgcgcaataacaaaaccaataaactacacccgcgaaaaaaaaaaaaaaacgactaatcaactacgccctacgaatcgaaaatatcatcaacaaaaataacgacgctttaaatactaaacgcgaccccgaccgaaaccccctacccttaacccaccctcgcaaaccgaaccccgactcccgacccgccgtcgcaacccgcgaccccgacctctaacccgccctcgcaacccgcgaccccgacctctaacccgccctcccaaccaaaccctctacgcccgacccgccctcgcaacccataacccatcgacccgacaataaacgcaaaacctcgaccccgttccctccccgaaccccccgaacccgctctccgtcctccctacaaaaccgaaaaccttaacccaaccccgcatcctccccgaccgtactcgatccaacccgaatatactacacccgaaacaaactcccgaaaaccgtcgaacctataaataaccgtacaaaccaaaatctcccccttcccaatcgtaacaaccaca

SEQ ID NO: 3281 - DNA, 1088 bp, Artificial Sequence
  chemically treated genomic DNA (Homo sapiens) CpG-island No: 3281
gtaaaacgatttgggtgttagaaggagagcgcgtcggtttcggtttacgtgagcgtcgcggtcgagttcgtttagaggatcgcggatcgggatagttgcgttcgcggttttcgcgttaggtcgggatttattcgggtcgggcgcgtcgcggatttcgcggcggtcgtttttttttttttttttttttttttatttaataaaatggcggcggtaggaagtgtcgggcgtttcggttcgtttttcgttcgttttcgatcgtcggtttcgtcgcggcgttcgcgttttttattcgcgtttcgtcggttagtttaagttcgggttcgacggtattaaaggtaggatagtcgcgagcgatttcgtcgtttcgatattaacggcgtaggtcgtttcggttcggaacgaacggcgcgggaggttcgtaggttcgagttcgcgtagtttcggttttttcgttttcgcgtcgcgcggatggcgtaggtggcggcgtttcggttttattacgtaatgtaggttacgcggatcgcgtcgcgagttttcgttagtcgtttagtgtcgttcgtcgttttaaagggtattagtttttatttgagacgttaggtcgtacgtcgttttcgtcggtcgttcgttcgttgtcgtcgtttttttttcgagttgtttgcgcggcgtcggggttcgttcgtcgttttgtcgagtttataggtcgcgttcgttcgcgggtatcgtcggtagtcgtcgtagtcgttgtcgtcgttattgtttcggtttttcggttgcgggagattagaataaatagtttagtcgtcgtcgtcgtcgtcgtcgtcgtcgttagcgtattgacgttatcgcgtacgttgcgcgcgcggtttcgcgtcgtcgtcgttcggtgtgcgcgtttcgttttcgcgtttagcgcgaacgagttttggagagatagtggttgcgaggtgagtgggggatatcgcggattgagggaggagatttcgtagagcgaaggagcgggttgggggaaacgggcggattgtaggttgggtttgcgggaaaagatttgaaggttgagagagatatttaaaatattaagaaaggtttga

SEQ ID NO: 3282 - DNA, 1088 bp, Artificial Sequence
  chemically treated genomic DNA (Homo sapiens) CpG-island No: 3282
tcaaacctttcttaatattttaaatatctctctcaaccttcaaatcttttcccgcaaacccaacctacaatccgcccgtttcccccaacccgctccttcgctctacgaaatctcctccctcaatccgcgatatcccccactcacctcgcaaccactatctctccaaaactcgttcgcgctaaacgcgaaaacgaaacgcgcacaccgaacgacgacgacgcgaaaccgcgcgcgcaacgtacgcgataacgtcaatacgctaacgacgacgacgacgacgacgacgacgactaaactatttattctaatctcccgcaaccgaaaaaccgaaacaataacgacgacaacgactacgacgactaccgacgatacccgcgaacgaacgcgacctataaactcgacaaaacgacgaacgaaccccgacgccgcgcaaacaactcgaaaaaaaaacgacgacaacgaacgaacgaccgacgaaaacgacgtacgacctaacgtctcaaataaaaactaataccctttaaaacgacgaacgacactaaacgactaacgaaaactcgcgacgcgatccgcgtaacctacattacgtaataaaaccgaaacgccgccacctacgccatccgcgcgacgcgaaaacgaaaaaaccgaaactacgcgaactcgaacctacgaacctcccgcgccgttcgttccgaaccgaaacgacctacgccgttaatatcgaaacgacgaaatcgctcgcgactatcctacctttaataccgtcgaacccgaacttaaactaaccgacgaaacgcgaataaaaaacgcgaacgccgcgacgaaaccgacgatcgaaaacgaacgaaaaacgaaccgaaacgcccgacacttcctaccgccgccattttattaaataaaaaaaaaaaaaaaaaaaaaaaaacgaccgccgcgaaatccgcgacgcgcccgacccgaataaatcccgacctaacgcgaaaaccgcgaacgcaactatcccgatccgcgatcctctaaacgaactcgaccgcgacgctcacgtaaaccgaaaccgacgcgctctccttctaacacccaaatcgttttac

SEQ ID NO: 3283 - DNA, 1088 bp, Artificial Sequence
  chemically treated genomic DNA (Homo sapiens) CpG-island No: 3283
ttagattttttttagtattttggatgttttttttagtttttagattttttttcgtaggtttagtttgtagttcgttcgttttttttagttcgttttttcgttttgcggggtttttttttttagttcgcggtattttttatttatttcgtagttattgtttttttagagttcgttcgcgttgggcgcgggggcggggcgcgtatatcgggcggcggcggcgcggggtcgcgcgcgtagcgtgcgcggtgacgttagtgcgttggcggcggcggcggcggcggcggcggcggttgggttgtttgttttggtttttcgtagtcgaggagtcgaagtagtggcggcggtagcggttgcggcggttgtcggcggtgttcgcgggcgagcgcggtttgtgagttcggtagagcggcgggcgggtttcggcgtcgcgtaggtagttcggggagggggcggcggtagcgggcggacggtcggcgggggcggcgtgcggtttagcgttttaggtgaggattggtgttttttggggcggcggacgatattgggcggttggcggaggttcgcggcgcggttcgcgtaatttgtattgcgtaatggggtcggggcgtcgttatttacgttattcgcgcggcgcgggggcggggaggtcggggttacgcgggttcgggtttgcgggtttttcgcgtcgttcgtttcgggtcggggcggtttgcgtcgttggtgtcggggcggcggggtcgttcgcggttgttttgtttttggtgtcgtcggattcgggtttgggttggtcggcggggcgcgggtggggggcgcgggcgtcgcggcggggtcggcggtcgggggcgggcggggggcgggtcgaggcgttcggtattttttgtcgtcgttattttgttaagtgaggaggaggaggaggaggaggaagcggtcgtcgcggggttcgcggcgcgttcggttcgggtaagtttcggtttggcgcgggggtcgcgagcgtagttgtttcggttcgcggttttttaggcgggttcggtcgcggcgtttacgtgggtcggggtcggcgcgttttttttttggtatttaggtcgttttgt

SEQ ID NO: 3284 - DNA, 1088 bp, Artificial Sequence
  chemically treated genomic DNA (Homo sapiens) CpG-island No: 3284
acaaaacgacctaaataccaaaaaaaaaacgcgccgaccccgacccacgtaaacgccgcgaccgaacccgcctaaaaaaccgcgaaccgaaacaactacgctcgcgacccccgcgccaaaccgaaacttacccgaaccgaacgcgccgcgaaccccgcgacgaccgcttcctcctcctcctcctcctcctcacttaacaaaataacgacgacaaaaaataccgaacgcctcgacccgccccccgcccgcccccgaccgccgaccccgccgcgacgcccgcgccccccacccgcgccccgccgaccaacccaaacccgaatccgacgacaccaaaaacaaaacaaccgcgaacgaccccgccgccccgacaccaacgacgcaaaccgccccgacccgaaacgaacgacgcgaaaaacccgcaaacccgaacccgcgtaaccccgacctccccgcccccgcgccgcgcgaataacgtaaataacgacgccccgaccccattacgcaatacaaattacgcgaaccgcgccgcgaacctccgccaaccgcccaatatcgtccgccgccccaaaaaacaccaatcctcacctaaaacgctaaaccgcacgccgcccccgccgaccgtccgcccgctaccgccgccccctccccgaactacctacgcgacgccgaaacccgcccgccgctctaccgaactcacaaaccgcgctcgcccgcgaacaccgccgacaaccgccgcaaccgctaccgccgccactacttcgactcctcgactacgaaaaaccaaaacaaacaacccaaccgccgccgccgccgccgccgccgccgccaacgcactaacgtcaccgcgcacgctacgcgcgcgaccccgcgccgccgccgcccgatatacgcgccccgcccccgcgcccaacgcgaacgaactctaaaaaaacaataactacgaaataaataaaaaataccgcgaactaaaaaaaaaaaccccgcaaaacgaaaaaacgaactaaaaaaaacgaacgaactacaaactaaacctacgaaaaaaaatctaaaaactaaaaaaaacatccaaaatactaaaaaaaatctaa

SEQ ID NO: 3285 - DNA, 1072 bp, Artificial Sequence
  chemically treated genomic DNA (Homo sapiens) CpG-island No: 3285
cggatgtatgtatacgtatagaaatatatagggttcggatatagttgcgcgtagataagtaaaggattacgtttacgtggaaataggtgtgcgtatacgttttcgcgtattcgcgcgtataagcgttttatatttgggaacgtgcgtatttgtttttcgttttcggtatatatatagtcgttttatattggaatatttgggcgttagcgtcgggttattcgggtacgtagggcgttacgtagggtcgcgtatacgtttttcggttatacgcgtatagttttttacgtggacgcgcgggtatatacgttcggggttcgtagtcgcgtatattcgtatttaggaaattttagttattattacgcggggttcgatcgtttttgagtatttttcgttttagtcgcgtattcgttgcgcgttcgggacgcgtatattcgcgtatatatcggttttttttgcgtacgtttcgggtttattttcgtttagagttttcggggtttttttttatttcggtttcggggtttttttacgttttttcgtcgacgtgtttatttgtttagggggcgttttcgagtcgcgtttcgcgttcgtttttaggagggttttcgcgagtcggttgtatatttcgaggcggtttcggttgtataatttggagcgagttgtttcgtttttttattttgggggcgaagaagggtcggggagtgggggaaagcgggaggcgtcgcggtttgggaggttttcgcgggttttagcgtcggtcgtattgcggtttttttcgcgcgtcgtcgtcgtcgtcggttttttttcgtttcgttttcgcggttttcggcgtttttcgcgcgtttcgggcggggtttcggggcgtacgcgggttttacgtttggttttgatttggttttgtcgggcgtgtattttttatttattttgggaagcggggtttttggagcgtggaacgggcgtcgttagtgcgcgcggcggggatcgggggtgagggagagtgagttgttcgttcggggagataagtaaggcgttaagttcggatttttagaggatatttcgtattttgtaattttaa

SEQ ID NO: 3286 - DNA, 1072 bp, Artificial Sequence
  chemically treated genomic DNA (Homo sapiens) CpG-island No: 3286
ttaaaattacaaaatacgaaatatcctctaaaaatccgaacttaacgccttacttatctccccgaacgaacaactcactctccctcacccccgatccccgccgcgcgcactaacgacgcccgttccacgctccaaaaaccccgcttcccaaaataaataaaaaatacacgcccgacaaaaccaaatcaaaaccaaacgtaaaacccgcgtacgccccgaaaccccgcccgaaacgcgcgaaaaacgccgaaaaccgcgaaaacgaaacgaaaaaaaaccgacgacgacgacgacgcgcgaaaaaaaccgcaatacgaccgacgctaaaacccgcgaaaacctcccaaaccgcgacgcctcccgctttcccccactccccgacccttcttcgcccccaaaataaaaaaacgaaacaactcgctccaaattatacaaccgaaaccgcctcgaaatatacaaccgactcgcgaaaaccctcctaaaaacgaacgcgaaacgcgactcgaaaacgccccctaaacaaataaacacgtcgacgaaaaaacgtaaaaaaaccccgaaaccgaaataaaaaaaaaccccgaaaactctaaacgaaaataaacccgaaacgtacgcaaaaaaaaccgatatatacgcgaatatacgcgtcccgaacgcgcaacgaatacgcgactaaaacgaaaaatactcaaaaacgatcgaaccccgcgtaataataactaaaatttcctaaatacgaatatacgcgactacgaaccccgaacgtatatacccgcgcgtccacgtaaaaaactatacgcgtataaccgaaaaacgtatacgcgaccctacgtaacgccctacgtacccgaataacccgacgctaacgcccaaatattccaatataaaacgactatatatataccgaaaacgaaaaacaaatacgcacgttcccaaatataaaacgcttatacgcgcgaatacgcgaaaacgtatacgcacacctatttccacgtaaacgtaatcctttacttatctacgcgcaactatatccgaaccctatatatttctatacgtatacatacatccg

SEQ ID NO: 3287 - DNA, 1072 bp, Artificial Sequence
  chemically treated genomic DNA (Homo sapiens) CpG-island No: 3287
ttggaattgtagagtacgaagtgttttttgggagttcgggtttggcgttttgtttattttttcggacgggtagtttatttttttttattttcggttttcgtcgcgcgtattggcggcgttcgttttacgttttaagaatttcgttttttagggtgggtggggggtgtacgttcgatagggttaggttagggttaggcgtggagttcgcgtgcgtttcgggatttcgttcggggcgcgcgggaggcgtcgggggtcgcggaggcggggcggggaggggtcggcggcggcggcggcgcgcggaggagatcgtagtgcggtcggcgttaggattcgcgggggttttttaggtcgcggcgtttttcgtttttttttatttttcgattttttttcgtttttaaaatgaggaaacggagtaattcgttttaagttgtgtagtcgggatcgtttcggggtgtgtagtcggttcgcggaggtttttttgggggcgggcgcggggcgcggttcgggggcgttttttgagtaggtgagtacgtcggcggggagacgtggagagatttcgaggtcggggtggggggaaatttcgagggttttaggcgggggtgggttcgggacgtgcgtaggaagggtcggtgtgtgcgcgagtgtgcgcgtttcgggcgcgtagcgggtgcgcggttggggcggagggtgtttagaggcgatcggatttcgcgtggtggtggttggggttttttgggtgcgggtgtgcgcggttacgagtttcgggcgtgtgtattcgcgcgtttacgtggagggttgtgcgcgtgtggtcgaaaagcgtgtgcgcggttttgcgtagcgttttgcgtgttcgagtggttcggcgttggcgtttaggtgttttagtgtggggcggttgtgtgtgtgtcgggggcgggggataggtgcgtacgtttttaggtgtggagcgtttgtgcgcgcggatgcgcggggacgtgtgcgtatatttgtttttacgtggacgtggttttttgtttgtttgcgcgtagttgtgttcgagttttgtgtgtttttgtgcgtgtgtatgtattcg

SEQ ID NO: 3288 - DNA, 1072 bp, Artificial Sequence
  chemically treated genomic DNA (Homo sapiens) CpG-island No: 3288
cgaatacatacacacgcacaaaaacacacaaaactcgaacacaactacgcgcaaacaaacaaaaaaccacgtccacgtaaaaacaaatatacgcacacgtccccgcgcatccgcgcgcacaaacgctccacacctaaaaacgtacgcacctatcccccgcccccgacacacacacaaccgccccacactaaaacacctaaacgccaacgccgaaccactcgaacacgcaaaacgctacgcaaaaccgcgcacacgcttttcgaccacacgcgcacaaccctccacgtaaacgcgcgaatacacacgcccgaaactcgtaaccgcgcacacccgcacccaaaaaaccccaaccaccaccacgcgaaatccgatcgcctctaaacaccctccgccccaaccgcgcacccgctacgcgcccgaaacgcgcacactcgcgcacacaccgacccttcctacgcacgtcccgaacccacccccgcctaaaaccctcgaaatttccccccaccccgacctcgaaatctctccacgtctccccgccgacgtactcacctactcaaaaaacgcccccgaaccgcgccccgcgcccgcccccaaaaaaacctccgcgaaccgactacacaccccgaaacgatcccgactacacaacttaaaacgaattactccgtttcctcattttaaaaacgaaaaaaaatcgaaaaataaaaaaaaacgaaaaacgccgcgacctaaaaaacccccgcgaatcctaacgccgaccgcactacgatctcctccgcgcgccgccgccgccgccgacccctccccgccccgcctccgcgacccccgacgcctcccgcgcgccccgaacgaaatcccgaaacgcacgcgaactccacgcctaaccctaacctaaccctatcgaacgtacaccccccacccaccctaaaaaacgaaattcttaaaacgtaaaacgaacgccgccaatacgcgcgacgaaaaccgaaaataaaaaaaaataaactacccgtccgaaaaaataaacaaaacgccaaacccgaactcccaaaaaacacttcgtactctacaattccaa

SEQ ID NO: 3289 - DNA, 551 bp, Artificial Sequence
  chemically treated genomic DNA (Homo sapiens) CpG-island No: 3289
gaacgttcgcggttttcgcgatgtttcgcgatattatttttttcgttttcgtttatttaaggatcggaagtagtaaagttcgtcgtcgcgtttttcgtttcgcgtttttttggtaattagtttttttttttttttcgtttataaggagtaagcggtataaatcgggttcgatggaggaagacgtggatacgagttttggcggcgattattatatttcgtttagttcgtttacgagtagtagtcgtaattggacggaggatatggaaggaggtagggttggtggcgggggcggagtcggtttttcggtttgagttatcgtggcgggaattacgtttttcggtagttattgcgcgggcgtcgcggggtaggaagtcggtttggagtcgcggggttttttgggaattgtagtcgtttcgagttgcgtttggttggaagtacggttcgggttcgcgttttcggatttttttggtttcgttgcggcgaaggagggtagagattgttttttgtttgatttttttgtttttcggtcgtgaatgttatatttttgtggg

SEQ ID NO: 3290 - DNA, 551 bp, Artificial Sequence
  chemically treated genomic DNA (Homo sapiens) CpG-island No: 3290
cccacaaaaatataacattcacgaccgaaaaacaaaaaaatcaaacaaaaaacaatctctaccctccttcgccgcaacgaaaccaaaaaaatccgaaaacgcgaacccgaaccgtacttccaaccaaacgcaactcgaaacgactacaattcccaaaaaaccccgcgactccaaaccgacttcctaccccgcgacgcccgcgcaataactaccgaaaaacgtaattcccgccacgataactcaaaccgaaaaaccgactccgcccccgccaccaaccctacctccttccatatcctccgtccaattacgactactactcgtaaacgaactaaacgaaatataataatcgccgccaaaactcgtatccacgtcttcctccatcgaacccgatttataccgcttactccttataaacgaaaaaaaaaaaaaaactaattaccaaaaaaacgcgaaacgaaaaacgcgacgacgaactttactacttccgatccttaaataaacgaaaacgaaaaaaataatatcgcgaaacatcgcgaaaaccgcgaacgttc

SEQ ID NO: 3291 - DNA, 551 bp, Artificial Sequence
  chemically treated genomic DNA (Homo sapiens) CpG-island No: 3291
tttatagagatgtggtatttacggtcggagggtaggagagttaggtaggggatagtttttgttttttttcgtcgtagcggaattaaagagattcgagaacgcgaattcggatcgtatttttagttaagcgtagttcgggacgattataatttttaggaggtttcgcggttttaggtcggttttttgtttcgcggcgttcgcgtagtggttgtcggaagacgtagttttcgttacggtgatttagatcggaaggtcggtttcgttttcgttattagttttatttttttttatgtttttcgtttagttgcggttgttattcgtgggcgagttgggcgaagtgtagtaatcgtcgttagggttcgtgtttacgtttttttttatcgagttcgatttgtgtcgtttgttttttatgggcgagggaaggggagaggttggttattagggagacgcggggcggggggcgcgacggcgggttttgttattttcggtttttaagtgagcgggggcgagggaggtagtatcgcgagatatcgcgggagtcgcgggcgttt

SEQ ID NO: 3292 - DNA, 551 bp, Artificial Sequence
  chemically treated genomic DNA (Homo sapiens) CpG-island No: 3292
aaacgcccgcgactcccgcgatatctcgcgatactacctccctcgcccccgctcacttaaaaaccgaaaataacaaaacccgccgtcgcgccccccgccccgcgtctccctaataaccaacctctccccttccctcgcccataaaaaacaaacgacacaaatcgaactcgataaaaaaaaacgtaaacacgaaccctaacgacgattactacacttcgcccaactcgcccacgaataacaaccgcaactaaacgaaaaacataaaaaaaaataaaactaataacgaaaacgaaaccgaccttccgatctaaatcaccgtaacgaaaactacgtcttccgacaaccactacgcgaacgccgcgaaacaaaaaaccgacctaaaaccgcgaaacctcctaaaaattataatcgtcccgaactacgcttaactaaaaatacgatccgaattcgcgttctcgaatctctttaattccgctacgacgaaaaaaaacaaaaactatcccctacctaactctcctaccctccgaccgtaaataccacatctctataaa

SEQ ID NO: 3293 - DNA, 1014 bp, Artificial Sequence
  chemically treated genomic DNA (Homo sapiens) CpG-island No: 3293
tttttttcgtagtttattatcgttttcgtttttttttcgcgtagtttattatcgtttttatttttttttcgcgtagtttattatcgttttcgtttttttttcgcgtagtttattatcgttttcgtttttttttcgtagtttattatcgttttcgtttttttttcgtagtttattatcgttttcgttttttttttgtagtttattattgttttcgtttttttttcgcgtagtttattatcgttttcgtttttttttcgcgtagtttattatcgttttcgtttttttttcgcgtagtttattatcgtttttatttttttttcgtagtttattatcgtttttatttttatttcgcgtagttcgtagtttattatcgtttttattttttttttacgtagtttattatcgtttttattttttttttgtagtttattatcgtttttatttttttttcgcgtagtttattatcgtttttatatttttttcgcgtagtttattatcgtttttatttttatttcgcgtagttcgtagtttattatcgtttttattttttttttacgtagtttattatcgtttttattttttttttgtagtttattatcgttttcgtttttttttcgtagtttatcgtttttattttttttttgtagtttattatcgtttttatttttttttcgtagtttattatcgttttcgtttttttttcgcgtagtttattatcgtttttatatttttttcgcgtagtttattatcgtttttatttttatttcgtatagttcgtagtttattatcgttttcgttttttttttacgtagtttattatcgtttttatttttttttcgcgtagtttattatcgttttcgtttttttttcgcgtagtttattatcgtttttatttttttttcgtagtttattatcgttttcgtttttttttcgcgtagtttattatcgtttttatatttttgtattgggagggttttttatttttgtttttttagtaaatttttagtgttgtag

SEQ ID NO: 3294 - DNA, 1014 bp, Artificial Sequence
  chemically treated genomic DNA (Homo sapiens) CpG-island No: 3294
ctacaacactaaaaatttactaaaaaaacaaaaataaaaaaccctcccaatacaaaaatataaaaacgataataaactacgcgaaaaaaaaacgaaaacgataataaactacgaaaaaaaaataaaaacgataataaactacgcgaaaaaaaaacgaaaacgataataaactacgcgaaaaaaaaataaaaacgataataaactacgtaaaaaaaaaacgaaaacgataataaactacgaactatacgaaataaaaataaaaacgataataaactacgcgaaaaaaatataaaaacgataataaactacgcgaaaaaaaaacgaaaacgataataaactacgaaaaaaaaataaaaacgataataaactacaaaaaaaaaataaaaacgataaactacgaaaaaaaaacgaaaacgataataaactacaaaaaaaaaataaaaacgataataaactacgtaaaaaaaaaataaaaacgataataaactacgaactacgcgaaataaaaataaaaacgataataaactacgcgaaaaaaatataaaaacgataataaactacgcgaaaaaaaaataaaaacgataataaactacaaaaaaaaaataaaaacgataataaactacgtaaaaaaaaaataaaaacgataataaactacgaactacgcgaaataaaaataaaaacgataataaactacgaaaaaaaaataaaaacgataataaactacgcgaaaaaaaaacgaaaacgataataaactacgcgaaaaaaaaacgaaaacgataataaactacgcgaaaaaaaaacgaaaacaataataaactacaaaaaaaaaacgaaaacgataataaactacgaaaaaaaaacgaaaacgataataaactacgaaaaaaaaacgaaaacgataataaactacgcgaaaaaaaaacgaaaacgataataaactacgcgaaaaaaaaataaaaacgataataaactacgcgaaaaaaaaacgaaaacgataataaactacgaaaaaaa

SEQ ID NO: 3295 - DNA, 1014 bp, Artificial Sequence
  chemically treated genomic DNA (Homo sapiens) CpG-island No: 3295
ttatagtattaagagtttgttagaagggtaggaatgaagggtttttttagtataaaggtgtgaagacggtggtgaattgcgcggggaaggggcgaagacggtggtgaattgcggggaaggggtgaagacggtggtgaattgcgcggggaaggggcgaagacggtggtgaattgcgcggggaaggggtgaagacggtggtgaattgcgtggggaaggggcgaagacggtggtgaattgcgaattgtgcggggtaggggtgaagacggtggtgaattgcgcggggaaggtgtgaagacggtggtgaattgcgcggagaaggggcgaagacggtggtgaattgcggggaaggggtgaagacggtggtgaattgtagggaaggggtgaagacggtgaattgcggggaaggggcgaagacggtggtgaattgtagggaaggggtgaagacggtggtgaattgcgtggggaaggggtgaagacggtggtgaattgcgaattgcgcggggtaggggtgaagacggtggtgaattgcgcggggaaggtgtgaagacggtggtgaattgcgcggagaaggggtgaagacggtggtgaattgtagggaaggggtgaagacggtggtgaattgcgtggggaaggggtgaagacggtggtgaattgcgaattgcgcggggtaggggtgaagacggtggtgaattgcggggaaggggtgaagacggtggtgaattgcgcggagaaggggcgaagacggtggtgaattgcgcggggaaggggcgaagacggtggtgaattgcgcggggaaggggcgaagatagtggtgaattgtagggaaggggcgaagacggtggtgaattgcggggaaggggcgaagacggtggtgaattgcggggaaggggcgaagacggtggtgaattgcgcggggaaggggcgaagacggtggtgaattgcgcggggaaggggtgaagacggtggtgaattgcgcggggaaggggcgaagacggtggtgaattgcggggaagg

SEQ ID NO: 3296 - DNA, 1014 bp, Artificial Sequence
  chemically treated genomic DNA (Homo sapiens) CpG-island No: 3296
ccttccccgcaattcaccaccgtcttcgccccttccccgcgcaattcaccaccgtcttcaccccttccccgcgcaattcaccaccgtcttcgccccttccccgcgcaattcaccaccgtcttcgccccttccccgcaattcaccaccgtcttcgccccttccccgcaattcaccaccgtcttcgccccttccctacaattcaccactatcttcgccccttccccgcgcaattcaccaccgtcttcgccccttccccgcgcaattcaccaccgtcttcgccccttctccgcgcaattcaccaccgtcttcaccccttccccgcaattcaccaccgtcttcacccctaccccgcgcaattcgcaattcaccaccgtcttcaccccttccccacgcaattcaccaccgtcttcaccccttccctacaattcaccaccgtcttcaccccttctccgcgcaattcaccaccgtcttcacaccttccccgcgcaattcaccaccgtcttcacccctaccccgcgcaattcgcaattcaccaccgtcttcaccccttccccacgcaattcaccaccgtcttcaccccttccctacaattcaccaccgtcttcgccccttccccgcaattcaccgtcttcaccccttccctacaattcaccaccgtcttcaccccttccccgcaattcaccaccgtcttcgccccttctccgcgcaattcaccaccgtcttcacaccttccccgcgcaattcaccaccgtcttcacccctaccccgcacaattcgcaattcaccaccgtcttcgccccttccccacgcaattcaccaccgtcttcaccccttccccgcgcaattcaccaccgtcttcgccccttccccgcgcaattcaccaccgtcttcaccccttccccgcaattcaccaccgtcttcgccccttccccgcgcaattcaccaccgtcttcacacctttatactaaaaaaacccttcattcctacccttctaacaaactcttaatactataa

SEQ ID NO: 3297 - DNA, 861 bp, Artificial Sequence
  chemically treated genomic DNA (Homo sapiens) CpG-island No: 3297
ttcggtttgaggggacgtaatagggggcggttgtaaggttcgttacggcgttagtttggagcggacgaaatttttgtattttgcggtgttttttttaagggtttgtggtttttagttttttcgtcgttcgtttttcggtcgttagtcggtttttaacggcgttttttttattttcgttcgttaggttcgttattttatttttttaagtttttttataaggtttcgcgtcggtttaggttcgtttgttttttgttagaaattttcgcgcgtgcgtatttaataagtcgatttcgtgtgaggcggttagttcgcgtttgcgcgttgaatgtcgcgcggaggcgagtttcggatcgtttgttttgtagagtagtttgttttgacgagtcgcgtttttagtacgtatttgcgtacgagttatttttcgtttttttttttcgtcgattgagagggcggggaaagggtcgggaagggcgtatgcgtagtggtagcgattaaggtttagtgaggcggtatcgcgcggttcgaggcgggttttgaagtattcgtttttttattcgtttttcggggttttttcgcggtgggatagtgagtagtttagggcgtcgtagtcgaggtttttttttaggtaaatcgtcgggtttgcgggggttttttatacgcgcgggcgggagacgcgttgttttttattttagtttattcgttttaggagtcggtattttcggtaaacgtttttttgaaattacgggggaagtggcgagagggcgcggggtgtttgggattggggggtaaattagagtttatcggcgggggcgggggtcgtggttaggttttaggagggggcgtagttttgggatttaggtg

SEQ ID NO: 3298 - DNA, 861 bp, Artificial Sequence
  chemically treated genomic DNA (Homo sapiens) CpG-island No: 3298
cacctaaatcccaaaactacgccccctcctaaaacctaaccacgacccccgcccccgccgataaactctaatttaccccccaatcccaaacaccccgcgccctctcgccacttcccccgtaatttcaaaaaaacgtttaccgaaaataccgactcctaaaacgaataaactaaaataaaaaacaacgcgtctcccgcccgcgcgtataaaaaacccccgcaaacccgacgatttacctaaaaaaaaacctcgactacgacgccctaaactactcactatcccaccgcgaaaaaaccccgaaaaacgaataaaaaaacgaatacttcaaaacccgcctcgaaccgcgcgataccgcctcactaaaccttaatcgctaccactacgcatacgcccttcccgaccctttccccgccctctcaatcgacgaaaaaaaaaaacgaaaaataactcgtacgcaaatacgtactaaaaacgcgactcgtcaaaacaaactactctacaaaacaaacgatccgaaactcgcctccgcgcgacattcaacgcgcaaacgcgaactaaccgcctcacacgaaatcgacttattaaatacgcacgcgcgaaaatttctaacaaaaaacaaacgaacctaaaccgacgcgaaaccttataaaaaaacttaaaaaaataaaataacgaacctaacgaacgaaaataaaaaaaacgccgttaaaaaccgactaacgaccgaaaaacgaacgacgaaaaaactaaaaaccacaaacccttaaaaaaaacaccgcaaaatacaaaaatttcgtccgctccaaactaacgccgtaacgaaccttacaaccgccccctattacgtcccctcaaaccgaa

SEQ ID NO: 3299 - DNA, 861 bp, Artificial Sequence
  chemically treated genomic DNA (Homo sapiens) CpG-island No: 3299
tatttgggttttagggttgcgtttttttttagagtttgattacgattttcgttttcgtcgatgagttttgatttattttttaattttaagtatttcgcgttttttcgttatttttttcgtggttttaggaaagcgtttgtcgaaggtatcggtttttaaggcgggtaaattgaggtaggaggtaacgcgtttttcgttcgcgcgtgtgggaagttttcgtaggttcggcgatttatttggaggaaggtttcggttgcggcgttttgaattgtttattgttttatcgcgggggaatttcggaaaacgagtgggaaaacgagtgttttaagattcgtttcgggtcgcgcggtgtcgttttattaaattttagtcgttgttattgcgtatgcgtttttttcggtttttttttcgtttttttagtcggcgggaaaaggaggcgggagatggttcgtgcgtaggtgcgtgttaggagcgcggttcgttagggtaggttgttttgtagggtaggcgattcggggttcgttttcgcgcggtatttagcgcgtaggcgcgagttggtcgttttatacggagtcggtttgttaagtgcgtacgcgcgggagtttttggtagaaagtaggcgagtttgggtcggcgcggggttttgtgggagggtttaaggaagtaaaatggcggatttggcgaacgaaggtaggggaggcgtcgttggggatcggttggcggtcggggaacgggcggcgggaggattaggggttataagtttttggggggagtatcgtagagtgtaagggtttcgttcgttttaggttagcgtcgtggcgggttttgtagtcgttttttattgcgtttttttaggtcggg

SEQ ID NO: 3300 - DNA, 861 bp, Artificial Sequence
  chemically treated genomic DNA (Homo sapiens) CpG-island No: 3300
cccgacctaaaaaaacgcaataaaaaacgactacaaaacccgccacgacgctaacctaaaacgaacgaaacccttacactctacgatactccccccaaaaacttataacccctaatcctcccgccgcccgttccccgaccgccaaccgatccccaacgacgcctcccctaccttcgttcgccaaatccgccattttacttccttaaaccctcccacaaaaccccgcgccgacccaaactcgcctactttctaccaaaaactcccgcgcgtacgcacttaacaaaccgactccgtataaaacgaccaactcgcgcctacgcgctaaataccgcgcgaaaacgaaccccgaatcgcctaccctacaaaacaacctaccctaacgaaccgcgctcctaacacgcacctacgcacgaaccatctcccgcctccttttcccgccgactaaaaaaacgaaaaaaaaaccgaaaaaaacgcatacgcaataacaacgactaaaatttaataaaacgacaccgcgcgacccgaaacgaatcttaaaacactcgttttcccactcgttttccgaaattcccccgcgataaaacaataaacaattcaaaacgccgcaaccgaaaccttcctccaaataaatcgccgaacctacgaaaacttcccacacgcgcgaacgaaaaacgcgttacctcctacctcaatttacccgccttaaaaaccgataccttcgacaaacgctttcctaaaaccacgaaaaaaataacgaaaaaacgcgaaatacttaaaattaaaaaataaatcaaaactcatcgacgaaaacgaaaatcgtaatcaaactctaaaaaaaaacgcaaccctaaaacccaaata

SEQ ID NO: 3301 - DNA, 1366 bp, Artificial Sequence
  chemically treated genomic DNA (Homo sapiens) CpG-island No: 3301
cggcgaggttgattttcgcgtcggtagtattcggttttatcgcgttgtatcggggattaaaggttcgatttcgcgtagttcgacggttttcgggataggcgttttgggttacgtgagtttagcggagattttatacggtttcgcgggtttagggtaggtcgggagagaggcggttttcgcggttcgttcgcggttttagatttagtttttcgggttcgattttataattttacgttgtagtttcgtttttttagcgtcgttattttgtggcgttttcggaagaggaagtcgggagtgtaaatttcggggtcgttgggggtcggaaggatttcgtcgaaggtgaggggtaaaaacggtttatattgtttaagacgtttttacgaagtttatcgcggcgtttgttttaatttcgagtttcgttcgttttttcggggtttggcggttaattcgtacgtagagtttcgggagcgacggcgttaaagtttaatgagcggcgcgcgcgcgttttggtcgttttttcggagggtttagttggggtaattacgttcgggacgaaggttcggtcggcggtagtttgcgtagcggttgcgtcgttcgtatagagtttttttttttcgtttcgtatttagtagttaatataaattttcgtagttttggtttatgttttcgacgcggtttattagtagtttcgtttattaggcgattatagtacgtatgcgtttagcgtattttcgttatcgattattggaagattaggcgtatacgttattattttcgcgcgtttttattggttggtttttacgagggttcgttttcgtcgttttagttggtttttcgggttgttacgatttagtttcgtggtttaatgggagttgtggttttatcgcggtgttcgacggttcggttcgcgcgtatgcgtatttcgtttttttgtttatttcgtttcgttcgcgcggtatagtaatagagaaattcggaggtgggatgggaaaattttattaggtttggtttttagtttcggttacgcgggtttcgttcgtttcgagttcgggttacggggcgttttcgtcgtttttttcgtcgttttttacgtcgaggttcgggatgtcgcggatttggcgttgtagcgttttttttagtaagggtacggcgttttttttttttttttttgggggcggcggcggtggcggcgatacggtttcgggggttggttttgggggtacgggaggttgcgtcggtacgttttttgcgtttttcgagatttttgtcgtttcgttttgcgttttttcgtttagggtatcgtttttagtttttttttgttttttttttttttcggggttgtcggtgaaagggttttcgttttgtg

SEQ ID NO: 3302 - DNA, 1366 bp, Artificial Sequence
  chemically treated genomic DNA (Homo sapiens) CpG-island No: 3302
cacaaaacgaaaaccctttcaccgacaaccccgaaaaaaaaaaaaaacaaaaaaaaactaaaaacgataccctaaacgaaaaaacgcaaaacgaaacgacaaaaatctcgaaaaacgcaaaaaacgtaccgacgcaacctcccgtacccccaaaaccaacccccgaaaccgtatcgccgccaccgccgccgcccccaaaaaaaaaaaaaaaaaacgccgtacccttactaaaaaaaacgctacaacgccaaatccgcgacatcccgaacctcgacgtaaaaaacgacgaaaaaaacgacgaaaacgccccgtaacccgaactcgaaacgaacgaaacccgcgtaaccgaaactaaaaaccaaacctaataaaattttcccatcccacctccgaatttctctattactataccgcgcgaacgaaacgaaataaacaaaaaaacgaaatacgcatacgcgcgaaccgaaccgtcgaacaccgcgataaaaccacaactcccattaaaccacgaaactaaatcgtaacaacccgaaaaaccaactaaaacgacgaaaacgaaccctcgtaaaaaccaaccaataaaaacgcgcgaaaataataacgtatacgcctaatcttccaataatcgataacgaaaatacgctaaacgcatacgtactataatcgcctaataaacgaaactactaataaaccgcgtcgaaaacataaaccaaaactacgaaaatttatattaactactaaatacgaaacgaaaaaaaaaaactctatacgaacgacgcaaccgctacgcaaactaccgccgaccgaaccttcgtcccgaacgtaattaccccaactaaaccctccgaaaaaacgaccaaaacgcgcgcgcgccgctcattaaactttaacgccgtcgctcccgaaactctacgtacgaattaaccgccaaaccccgaaaaaacgaacgaaactcgaaattaaaacaaacgccgcgataaacttcgtaaaaacgtcttaaacaatataaaccgtttttacccctcaccttcgacgaaatccttccgacccccaacgaccccgaaatttacactcccgacttcctcttccgaaaacgccacaaaataacgacgctaaaaaaacgaaactacaacgtaaaattataaaatcgaacccgaaaaactaaatctaaaaccgcgaacgaaccgcgaaaaccgcctctctcccgacctaccctaaacccgcgaaaccgtataaaatctccgctaaactcacgtaacccaaaacgcctatcccgaaaaccgtcgaactacgcgaaatcgaacctttaatccccgatacaacgcgataaaaccgaatactaccgacgcgaaaatcaacctcgccg

SEQ ID NO: 3303 - DNA, 1366 bp, Artificial Sequence
  chemically treated genomic DNA (Homo sapiens) CpG-island No: 3303
tatagggcgagaatttttttatcgatagtttcgaggaggagaaggagtaggaggaggttgagggcggtgttttggacgagggggcgtagggcgaagcggtagggatttcggagggcgtagagggcgtgtcggcgtagtttttcgtgtttttagagttagttttcggggtcgtgtcgtcgttatcgtcgtcgtttttagaggaggaggaggagggcgtcgtgtttttgttgggaggggcgttgtaacgttagattcgcggtatttcgggtttcgacgtggaggacgacgaggagggcggcgggggcgtttcgtgattcgagttcggggcgggcggagttcgcgtggtcgaagttggaaattaaatttaataaagtttttttattttattttcgggtttttttgttattgtgtcgcgcgggcggggcggggtgggtagaggggcggggtgcgtatgcgcgcgggtcgggtcgtcgggtatcgcggtgggattataatttttattaggttacggagttggatcgtagtagttcgaaaggttagttgggacggcgagggcgggttttcgtgaagattagttaatgggggcgcgcggaagtagtgacgtgtgcgtttggttttttagtagtcgatggcggaggtgcgttgaacgtatgcgtgttgtggtcgtttagtaaacggggttgttggtgggtcgcgtcgaagatatggattagggttacggaggtttgtgttggttgttgggtgcggagcggggagggaaggttttgtgcgggcgacgtagtcgttgcgtagattgtcgtcggtcgggttttcgtttcgagcgtggttgttttagttgggtttttcggagaggcggttagggcgcgcgcgcgtcgtttattgggttttggcgtcgtcgttttcggggttttgcgtgcggattggtcgttaggtttcgaggaggcgggcgggattcggggttggggtagacgtcgcggtgggtttcgtgggggcgttttagatagtgtgggtcgtttttgttttttattttcggcggagttttttcggtttttagcgatttcggggtttgtattttcggttttttttttcgaagacgttataaaatggcggcgttaggggggcggagttatagcgtggggttgtgaggtcggattcggggagttgggtttggggtcgcgggcggatcgcgggggtcgtttttttttcgatttgttttaggttcgcggggtcgtgtagggttttcgttgggtttacgtggtttagggcgtttgtttcggaagtcgtcgggttgcgcggggtcgggtttttagttttcggtgtagcgcggtggggtcgagtgttgtcggcgcgagagttagtttcgtcg

SEQ ID NO: 3304 - DNA, 1366 bp, Artificial Sequence
  chemically treated genomic DNA (Homo sapiens) CpG-island No: 3304
cgacgaaactaactctcgcgccgacaacactcgaccccaccgcgctacaccgaaaactaaaaacccgaccccgcgcaacccgacgacttccgaaacaaacgccctaaaccacgtaaacccaacgaaaaccctacacgaccccgcgaacctaaaacaaatcgaaaaaaaaacgacccccgcgatccgcccgcgaccccaaacccaactccccgaatccgacctcacaaccccacgctataactccgcccccctaacgccgccattttataacgtcttcgaaaaaaaaaaccgaaaatacaaaccccgaaatcgctaaaaaccgaaaaaactccgccgaaaataaaaaacaaaaacgacccacactatctaaaacgcccccacgaaacccaccgcgacgtctaccccaaccccgaatcccgcccgcctcctcgaaacctaacgaccaatccgcacgcaaaaccccgaaaacgacgacgccaaaacccaataaacgacgcgcgcgcgccctaaccgcctctccgaaaaacccaactaaaacaaccacgctcgaaacgaaaacccgaccgacgacaatctacgcaacgactacgtcgcccgcacaaaaccttccctccccgctccgcacccaacaaccaacacaaacctccgtaaccctaatccatatcttcgacgcgacccaccaacaaccccgtttactaaacgaccacaacacgcatacgttcaacgcacctccgccatcgactactaaaaaaccaaacgcacacgtcactacttccgcgcgcccccattaactaatcttcacgaaaacccgccctcgccgtcccaactaacctttcgaactactacgatccaactccgtaacctaataaaaattataatcccaccgcgatacccgacgacccgacccgcgcgcatacgcaccccgcccctctacccaccccgccccgcccgcgcgacacaataacaaaaaaacccgaaaataaaataaaaaaactttattaaatttaatttccaacttcgaccacgcgaactccgcccgccccgaactcgaatcacgaaacgcccccgccgccctcctcgtcgtcctccacgtcgaaacccgaaataccgcgaatctaacgttacaacgcccctcccaacaaaaacacgacgccctcctcctcctcctctaaaaacgacgacgataacgacgacacgaccccgaaaactaactctaaaaacacgaaaaactacgccgacacgccctctacgccctccgaaatccctaccgcttcgccctacgccccctcgtccaaaacaccgccctcaacctcctcctactccttctcctcctcgaaactatcgataaaaaaattctcgccctata

SEQ ID NO: 3305 - DNA, 876 bp, Artificial Sequence
  chemically treated genomic DNA (Homo sapiens) CpG-island No: 3305
gtagacggcgggtggtgagttagagggaggaggcgttcgggtcgcggagtttcggaggggttgttcgataggtggcggggtcgggacgtttatcgattaggtgttaggttttgcgcgggtcgtagcgggcgtagtagttggcggcgcggtcggtttcgtagtttacgagcggtgtgtatagttcgtcggttatttggtttagtagtagtagtagtttcgcgtcgcgggagttgtaggcgcgtatcgagtgtaggtagagtagtaggtaggtgaattatatggacgcgtataggtcgttgaggaagtggtttacggcgtagtttagtcgcgttattagggatagcggtcgcggggacggcgtcgtttcggtcgttgggggtttcgggtttatcgcggcgtcgggttcgcgttttttattttcgggtttcgcggagggtattttggttaggtttttttgggtgtcgtgggggtaggcgtcggggatttttattacgcgtcgggtatttcgcgtttcgtttttttacggtcgcgtttttatttacgttcgtcgcgttcgttttacgttcgattttgtagtcgtcgggttttagagtcgggcgattgcgtcgggcggggtagggcggggaggtttcggtgtttgagttaatcggagtcgcgtttcggggaatcgtagttaatcgttaaggagagaggagaggggcgtggtcgtagggttcgtttcgtttttacgacgggcgtttacgcggttttagcgttcgtcgggtatgagggcgaatttcgagcgcgtcgtaggagtggtcggtatttttatagattggggaaggaaatggattagagggtatcgtcggtttttatttagattcggtttttaggttt

SEQ ID NO: 3306 - DNA, 876 bp, Artificial Sequence
  chemically treated genomic DNA (Homo sapiens) CpG-island No: 3306
aaacctaaaaaccgaatctaaataaaaaccgacgataccctctaatccatttccttccccaatctataaaaataccgaccactcctacgacgcgctcgaaattcgccctcatacccgacgaacgctaaaaccgcgtaaacgcccgtcgtaaaaacgaaacgaaccctacgaccacgcccctctcctctctccttaacgattaactacgattccccgaaacgcgactccgattaactcaaacaccgaaacctccccgccctaccccgcccgacgcaatcgcccgactctaaaacccgacgactacaaaatcgaacgtaaaacgaacgcgacgaacgtaaataaaaacgcgaccgtaaaaaaacgaaacgcgaaatacccgacgcgtaataaaaatccccgacgcctacccccacgacacccaaaaaaacctaaccaaaataccctccgcgaaacccgaaaataaaaaacgcgaacccgacgccgcgataaacccgaaacccccaacgaccgaaacgacgccgtccccgcgaccgctatccctaataacgcgactaaactacgccgtaaaccacttcctcaacgacctatacgcgtccatataattcacctacctactactctacctacactcgatacgcgcctacaactcccgcgacgcgaaactactactactactaaaccaaataaccgacgaactatacacaccgctcgtaaactacgaaaccgaccgcgccgccaactactacgcccgctacgacccgcgcaaaacctaacacctaatcgataaacgtcccgaccccgccacctatcgaacaacccctccgaaactccgcgacccgaacgcctcctccctctaactcaccacccgccgtctac

SEQ ID NO: 3307 - DNA, 876 bp, Artificial Sequence
  chemically treated genomic DNA (Homo sapiens) CpG-island No: 3307
gggtttggaggtcgggtttgggtgggagtcggcggtgttttttggtttatttttttttttagtttatgggggtgtcggttatttttgcggcgcgttcggggttcgtttttatattcggcgggcgttaggatcgcgtgggcgttcgtcgtagaggcggaacgagttttgcggttacgttttttttttttttttttggcgattggttgcggtttttcggggcgcggtttcgattggtttaggtatcggaattttttcgttttgtttcgttcggcgtagtcgttcggttttggggttcggcggttgtagagtcgagcgtggggcggacgcggcggacgtgggtgagggcgcggtcgtaagagagcgggacgcggggtgttcggcgcgtggtgggggttttcggcgtttgtttttacggtatttaagaaggtttggttagggtatttttcgcggagttcgggggtggggggcgcgggttcggcgtcgcgatgggttcgggatttttagcggtcggagcggcgtcgttttcgcggtcgttgtttttggtggcgcggttgagttacgtcgtgggttatttttttaacgatttgtgcgcgtttatgtggtttatttatttgttgttttatttgtattcggtgcgcgtttatagttttcgcggcgcggggttgttgttgttgttgggttaggtggtcgacgggttgtgtatatcgttcgtgggttacgaggtcgatcgcgtcgttagttgttgcgttcgttacggttcgcgtaaggtttggtatttggtcggtaagcgtttcggtttcgttatttgtcgggtagttttttcgagatttcgcgattcgggcgttttttttttttgatttattattcgtcgtttgt

SEQ ID NO: 3308 - DNA, 876 bp, Artificial Sequence
  chemically treated genomic DNA (Homo sapiens) CpG-island No: 3308
acaaacgacgaataataaatcaaaaaaaaaaaacgcccgaatcgcgaaatctcgaaaaaactacccgacaaataacgaaaccgaaacgcttaccgaccaaataccaaaccttacgcgaaccgtaacgaacgcaacaactaacgacgcgatcgacctcgtaacccacgaacgatatacacaacccgtcgaccacctaacccaacaacaacaacaaccccgcgccgcgaaaactataaacgcgcaccgaatacaaataaaacaacaaataaataaaccacataaacgcgcacaaatcgttaaaaaaataacccacgacgtaactcaaccgcgccaccaaaaacaacgaccgcgaaaacgacgccgctccgaccgctaaaaatcccgaacccatcgcgacgccgaacccgcgccccccacccccgaactccgcgaaaaataccctaaccaaaccttcttaaataccgtaaaaacaaacgccgaaaacccccaccacgcgccgaacaccccgcgtcccgctctcttacgaccgcgccctcacccacgtccgccgcgtccgccccacgctcgactctacaaccgccgaaccccaaaaccgaacgactacgccgaacgaaacaaaacgaaaaaattccgatacctaaaccaatcgaaaccgcgccccgaaaaaccgcaaccaatcgccaaaaaaaaaaaaaaaaaacgtaaccgcaaaactcgttccgcctctacgacgaacgcccacgcgatcctaacgcccgccgaatataaaaacgaaccccgaacgcgccgcaaaaataaccgacacccccataaactaaaaaaaaaaataaaccaaaaaacaccgccgactcccacccaaacccgacctccaaaccc

SEQ ID NO: 3309 - DNA, 1344 bp, Artificial Sequence
  chemically treated genomic DNA (Homo sapiens) CpG-island No: 3309
cggcgtagcgcgtgaggcggagtttcggcgtttgcggaagatgaatgtggttttcgaggagtagaacgcggtattgtagaggtatacgtagagtatgagtagcgcgcgcgagcgtttggagtaggagttggcgttggaggagcggaggacgttggcgttgtagtagtagttttaggtcgtgcgttaggcgtttatcgttagtttcgttttattgtcggtgtcgggtgcgggttacgtttattttttagtttcgtttcggttattcggtttcgttcgttttttttttttttttttttttttttttttttttgtcgttcggcgtcgtttatcgtttcgtttttttttttttagttattcggtttcgtttatcgtttcgtttttattatttttagtttcgtttttttttcgattttcgtatttttattttatagtttcgtttggttttttttagattatattcgagtttcgtttcgcgtttcgttattcggtcggttttttgatttcgtttttatcgatcgcgtttttcggttacgatttttttcgacgcgttttcgtttattcgttttttttcgtagtttttttgtgtttttatttttcgcgtttttatcgttttttatcggttttatcgtcgttggtttttttttttcgttagttttcgattagtttgagtattgatttagttttttcgttcgttacgttacgtttttatttattttatttttttacgttttcgttatttatttttttttacgtttcgttgacgtttgagttttttttattattttagttacgttttacgcgattttagtttttcggtgttatttttattttttcgatttcgtttttttcgttcgtgattgtttttagcggattttggacgttcgtcgttttagtttcgcgtttttattttgttttcgttttcgttatttttttgtttcggtttattttagtttattttgcgtcgtttttgcgttggcggtgttcggatttttgagcgttcgcgcgattcgttttgagttattttttatcgttgtttttggagttttcgtttcgcgatttttcggtattttcgtttgattttttcgtttgttttttaggtacgggcgaaacgtttacgttgggtattttggatttttatatggttcggttttacggagttatcgagcgcgatttcgtttagtacgagaagtttatcgttcgtattaaggaaattttggtttaggtcgttaggtgtgtgtcgggcgaggcggggcggggtcggggtttaaggttcggatgtgttcgttttggggttttttaggttcgcgagggttgttgggtgggatttcgtagtttattagagat

SEQ ID NO: 3310 - DNA, 1344 bp, Artificial Sequence
  chemically treated genomic DNA (Homo sapiens) CpG-island No: 3310
atctctaataaactacgaaatcccacccaacaaccctcgcgaacctaaaaaaccccaaaacgaacacatccgaaccttaaaccccgaccccgccccgcctcgcccgacacacacctaacgacctaaaccaaaatttccttaatacgaacgataaacttctcgtactaaacgaaatcgcgctcgataactccgtaaaaccgaaccatataaaaatccaaaatacccaacgtaaacgtttcgcccgtacctaaaaaacaaacgaaaaaatcaaacgaaaataccgaaaaatcgcgaaacgaaaactccaaaaacaacgataaaaaataactcaaaacgaatcgcgcgaacgctcaaaaatccgaacaccgccaacgcaaaaacgacgcaaaataaactaaaataaaccgaaacaaaaaaataacgaaaacgaaaacaaaataaaaacgcgaaactaaaacgacgaacgtccaaaatccgctaaaaacaatcacgaacgaaaaaaacgaaatcgaaaaaataaaaataacaccgaaaaactaaaatcgcgtaaaacgtaactaaaataataaaaaaaactcaaacgtcaacgaaacgtaaaaaaaaataaataacgaaaacgtaaaaaaataaaataaataaaaacgtaacgtaacgaacgaaaaaactaaatcaatactcaaactaatcgaaaactaacgaaaaaaaaaaaccaacgacgataaaaccgataaaaaacgataaaaacgcgaaaaataaaaacacaaaaaaactacgaaaaaaaacgaataaacgaaaacgcgtcgaaaaaaatcgtaaccgaaaaacgcgatcgataaaaacgaaatcaaaaaaccgaccgaataacgaaacgcgaaacgaaactcgaatataatctaaaaaaaaccaaacgaaactataaaataaaaatacgaaaatcgaaaaaaaaacgaaactaaaaataataaaaacgaaacgataaacgaaaccgaataactaaaaaaaaaaaaacgaaacgataaacgacgccgaacgacaaaaaaaaaaaaaaaaaaaaaaaaaaaaaaaaaacgaacgaaaccgaataaccgaaacgaaactaaaaaataaacgtaacccgcacccgacaccgacaataaaacgaaactaacgataaacgcctaacgcacgacctaaaactactactacaacgccaacgtcctccgctcctccaacgccaactcctactccaaacgctcgcgcgcgctactcatactctacgtatacctctacaataccgcgttctactcctcgaaaaccacattcatcttccgcaaacgccgaaactccgcctcacgcgctacgccg

SEQ ID NO: 3311 - DNA, 1344 bp, Artificial Sequence
  chemically treated genomic DNA (Homo sapiens) CpG-island No: 3311
atttttagtaagttgcggagttttatttagtagttttcgcggatttggggaattttagggcgggtatattcgggttttgaatttcggtttcgtttcgtttcgttcggtatatatttggcgatttgggttaggatttttttgatgcggacgatgagtttttcgtgttgggcggggtcgcgttcgatggtttcgtgaagtcgggttatgtagaagtttagagtgtttagcgtgggcgtttcgttcgtgtttgggggataggcgggaaggttaggcgagggtgtcggggagtcgcggggcgggggttttaggggtagcggtagggggtgatttagggcgggtcgcgcgggcgtttagaggttcggatatcgttagcgtaggagcggcgtagggtgggttaaggtaagtcggggtaggaggatggcgaggacggggatagggtggggacgcggggttagagcggcgggcgtttagggttcgttgaggatagttacggacggagggaacgaggtcggggaggtggggatgatatcggggggttggggtcgcgtgggacgtgattggggtggtggagggggtttaggcgttagcggggcgtggggagggatgggtgacgggggcgtggggaggtggggtgaatgggaacgtggcgtggcgagcggggaggttgggttagtgtttaggttggtcgggggttggcgagggagaggggttagcgacggtggggtcggtagggagcggtgggggcgcgaagggtgggggtataaaggggttgcgggaggaagcgagtaagcggggacgcgtcgggagaggtcgtggtcgggaggcgcggtcggtgggggcgaggttagggagtcggtcgagtaacggggcgcggagcggagttcgggtgtggtttgggaagaattagacggagttatggggtaggggtgcgggggtcggggaggaggcggagttgggggtgatgagggcggggcgataggcggggtcgggtgattggggaagaggggacggggcgatgggcggcgtcgggcgataggggaaggggggaagggaggagggggggggaggcgggcggggtcgggtgatcggggcgggattgggagatgggcgtggttcgtattcggtatcggtagtgaggcgaagttggcggtgagcgtttggcgtacggtttggagttgttgttgtagcgttagcgtttttcgtttttttagcgttagtttttgttttagacgttcgcgcgcgttgtttatgttttgcgtgtgtttttgtagtatcgcgttttgtttttcgaaggttatatttatttttcgtaagcgtcgaagtttcgttttacgcgttgcgtcg

SEQ ID NO: 3312 - DNA, 1344 bp, Artificial Sequence
  chemically treated genomic DNA (Homo sapiens) CpG-island No: 3312
cgacgcaacgcgtaaaacgaaacttcgacgcttacgaaaaataaatataaccttcgaaaaacaaaacgcgatactacaaaaacacacgcaaaacataaacaacgcgcgcgaacgtctaaaacaaaaactaacgctaaaaaaacgaaaaacgctaacgctacaacaacaactccaaaccgtacgccaaacgctcaccgccaacttcgcctcactaccgataccgaatacgaaccacgcccatctcccaatcccgccccgatcacccgaccccgcccgcctccccccccctcctcccttccccccttcccctatcgcccgacgccgcccatcgccccgtcccctcttccccaatcacccgaccccgcctatcgccccgccctcatcacccccaactccgcctcctccccgacccccgcacccctaccccataactccgtctaattcttcccaaaccacacccgaactccgctccgcgccccgttactcgaccgactccctaacctcgcccccaccgaccgcgcctcccgaccacgacctctcccgacgcgtccccgcttactcgcttcctcccgcaacccctttatacccccacccttcgcgcccccaccgctccctaccgaccccaccgtcgctaacccctctccctcgccaacccccgaccaacctaaacactaacccaacctccccgctcgccacgccacgttcccattcaccccacctccccacgcccccgtcacccatccctccccacgccccgctaacgcctaaaccccctccaccaccccaatcacgtcccacgcgaccccaaccccccgatatcatccccacctccccgacctcgttccctccgtccgtaactatcctcaacgaaccctaaacgcccgccgctctaaccccgcgtccccaccctatccccgtcctcgccatcctcctaccccgacttaccttaacccaccctacgccgctcctacgctaacgatatccgaacctctaaacgcccgcgcgacccgccctaaatcaccccctaccgctacccctaaaacccccgccccgcgactccccgacaccctcgcctaaccttcccgcctatcccccaaacacgaacgaaacgcccacgctaaacactctaaacttctacataacccgacttcacgaaaccatcgaacgcgaccccgcccaacacgaaaaactcatcgtccgcatcaaaaaaatcctaacccaaatcgccaaatatataccgaacgaaacgaaacgaaaccgaaattcaaaacccgaatatacccgccctaaaattccccaaatccgcgaaaactactaaataaaactccgcaacttactaaaaat

SEQ ID NO: 3313 - DNA, 581 bp, Artificial Sequence
  chemically treated genomic DNA (Homo sapiens) CpG-island No: 3313
tttcgcgggttttttttcggtcgcggttgttttgggtaacgcgtggagtcgcgttttttgtattgatttgaatcgcgggagacgttacgttttttcgagatgtttaacgcgcgtaggcgtagttattcggagtgggtagggtttggttgggtgttgggtagggtttggcggtgtgtggggtaggcggggggcgtggtcgcgattagtcgcgcgcggcgtgggggcgtggtcgggttgcgggggtgcgcgcggtcggtcgggcgcgcgcggcggagggagggagtcgggaggtagcggaggagcgatcgtcgttatattagggatcgcggagttcgggatttcgttagcggcggtcgcggtcgggtttgcgggagttgcggaggtcggaggcgggcgttgtgcggtgttaggagaggcggggtcggcgggagttagcgagttacgggagcgagttaggtgaggcggtcggggtcggggattcgtttttcgggttttaggcggcggagtttgattgcgattttttaaaatcgggacggcggggcgggttgcgatttttattttagtttaggtttttttaggag

SEQ ID NO: 3314 - DNA, 581 bp, Artificial Sequence
  chemically treated genomic DNA (Homo sapiens) CpG-island No: 3314
ctcctaaaaaaacctaaactaaaataaaaatcgcaacccgccccgccgtcccgattttaaaaaatcgcaatcaaactccgccgcctaaaacccgaaaaacgaatccccgaccccgaccgcctcacctaactcgctcccgtaactcgctaactcccgccgaccccgcctctcctaacaccgcacaacgcccgcctccgacctccgcaactcccgcaaacccgaccgcgaccgccgctaacgaaatcccgaactccgcgatccctaatataacgacgatcgctcctccgctacctcccgactccctccctccgccgcgcgcgcccgaccgaccgcgcgcacccccgcaacccgaccacgcccccacgccgcgcgcgactaatcgcgaccacgccccccgcctaccccacacaccgccaaaccctacccaacacccaaccaaaccctacccactccgaataactacgcctacgcgcgttaaacatctcgaaaaaacgtaacgtctcccgcgattcaaatcaatacaaaaaacgcgactccacgcgttacccaaaacaaccgcgaccgaaaaaaaacccgcgaaa

SEQ ID NO: 3315 - DNA, 581 bp, Artificial Sequence
  chemically treated genomic DNA (Homo sapiens) CpG-island No: 3315
tttttggaggggtttgagttggggtgggggtcgtagttcgtttcgtcgtttcggttttggggggtcgtagttaagtttcgtcgtttagggttcggggggcgggttttcgatttcggtcgttttatttggttcgttttcgtggttcgttggttttcgtcgatttcgttttttttggtatcgtatagcgttcgttttcggttttcgtagttttcgtaggttcggtcgcggtcgtcgttgacgggatttcgggtttcgcggtttttaatatggcggcggtcgttttttcgttgtttttcggtttttttttttcgtcgcgcgcgttcggtcggtcgcgcgtattttcgtaattcgattacgtttttacgtcgcgcgcggttaatcgcggttacgtttttcgtttattttatatatcgttaggttttgtttaatatttagttaggttttgtttatttcgagtggttgcgtttgcgcgcgttgggtatttcgggaggacgtgacgtttttcgcgatttaaattaatataggaagcgcggttttacgcgttgtttagggtaatcgcggtcggaagaggattcgcgggg

SEQ ID NO: 3316 - DNA, 581 bp, Artificial Sequence
  chemically treated genomic DNA (Homo sapiens) CpG-island No: 3316
ccccgcgaatcctcttccgaccgcgattaccctaaacaacgcgtaaaaccgcgcttcctatattaatttaaatcgcgaaaaacgtcacgtcctcccgaaatacccaacgcgcgcaaacgcaaccactcgaaataaacaaaacctaactaaatattaaacaaaacctaacgatatataaaataaacgaaaaacgtaaccgcgattaaccgcgcgcgacgtaaaaacgtaatcgaattacgaaaatacgcgcgaccgaccgaacgcgcgcgacgaaaaaaaaaaaccgaaaaacaacgaaaaaacgaccgccgccatattaaaaaccgcgaaacccgaaatcccgtcaacgacgaccgcgaccgaacctacgaaaactacgaaaaccgaaaacgaacgctatacgataccaaaaaaaacgaaatcgacgaaaaccaacgaaccacgaaaacgaaccaaataaaacgaccgaaatcgaaaacccgccccccgaaccctaaacgacgaaacttaactacgaccccccaaaaccgaaacgacgaaacgaactacgacccccaccccaactcaaacccctccaaaaa

SEQ ID NO: 3317 - DNA, 509 bp, Artificial Sequence
  chemically treated genomic DNA (Homo sapiens) CpG-island No: 3317
gagagcggatgggtgagtggatgggagagtagatggttgagcggatggatgagtagatgggagagtggatgagagtagttgaggaagtggatgggtgagaggatgggagtgcggatgtttgagcggatgggagagcggatgggagagtagacggttgagcggatgggagagcggatgggagagcggatgggagagcggatgggagagcggatgggagagcggttgggagagcggttgggagagcggatgggagagcggatgagagagtggatggttgagcggatgggagagcggatgagagtggttgagggagtggatgggagagtggatgagagtggttgaggaagtggatggttgagtggatgggagagcggatgggagagtggatgagagtggttgagggagtggatgggagagcggatgggagagtagatgggagagtagatgggtgagcggatgggagagtagatgggagagtggatgagagtggttgagggagtggttggttg

SEQ ID NO: 3318 - DNA, 509 bp, Artificial Sequence
  chemically treated genomic DNA (Homo sapiens) CpG-island No: 3318
caaccaaccactccctcaaccactctcatccactctcccatctactctcccatccgctcacccatctactctcccatctactctcccatccgctctcccatccactccctcaaccactctcatccactctcccatccgctctcccatccactcaaccatccacttcctcaaccactctcatccactctcccatccactccctcaaccactctcatccgctctcccatccgctcaaccatccactctctcatccgctctcccatccgctctcccaaccgctctcccaaccgctctcccatccgctctcccatccgctctcccatccgctctcccatccgctctcccatccgctcaaccgtctactctcccatccgctctcccatccgctcaaacatccgcactcccatcctctcacccatccacttcctcaactactctcatccactctcccatctactcatccatccgctcaaccatctactctcccatccactcacccatccgctctc

SEQ ID NO: 3319 - DNA, 509 bp, Artificial Sequence
  chemically treated genomic DNA (Homo sapiens) CpG-island No: 3319
taattagttatttttttaattatttttatttatttttttatttgtttttttattcgtttatttatttgtttttttatttgtttttttattcgtttttttatttatttttttaattatttttatttatttttttattcgtttttttatttatttaattatttatttttttaattatttttatttatttttttatttatttttttaattatttttattcgtttttttattcgtttaattatttatttttttattcgtttttttattcgtttttttaatcgtttttttaatcgtttttttattcgtttttttattcgtttttttattcgtttttttattcgtttttttattcgtttaatcgtttgtttttttattcgtttttttattcgtttaagtattcgtatttttatttttttatttatttatttttttaattatttttatttatttttttatttgtttatttattcgtttaattatttgtttttttatttatttatttattcgttttt

SEQ ID NO: 3320 - DNA, 509 bp, Artificial Sequence
  chemically treated genomic DNA (Homo sapiens) CpG-island No: 3320
aaaaacgaataaataaataaataaaaaaacaaataattaaacgaataaataaacaaataaaaaaataaataaaaataattaaaaaaataaataaataaaaaaataaaaatacgaatacttaaacgaataaaaaaacgaataaaaaaacaaacgattaaacgaataaaaaaacgaataaaaaaacgaataaaaaaacgaataaaaaaacgaataaaaaaacgattaaaaaaacgattaaaaaaacgaataaaaaaacgaataaaaaaataaataattaaacgaataaaaaaacgaataaaaataattaaaaaaataaataaaaaaataaataaaaataattaaaaaaataaataattaaataaataaaaaaacgaataaaaaaataaataaaaataattaaaaaaataaataaaaaaacgaataaaaaaacaaataaaaaaacaaataaataaacgaataaaaaaacaaataaaaaaataaataaaaataattaaaaaaataactaatta

SEQ ID NO: 3321 - DNA, 628 bp, Artificial Sequence
  chemically treated genomic DNA (Homo sapiens) CpG-island No: 3321
ggagagtagatgggtgagcggatgggagagcggatgggagagtggatgagagtggttgagggagcggatgggtgagcggatgggagagcgtatgggtgagtagatgtaagagtggatgagagtggttgagggagtggatggttgagcggatgggagagtagatgggagagtggatgggtgagcggatgggagagtagatgggtgagcggatgggagagcggatgggagagcggatgggagagcgtaggggagagcggaggagagagcggaggagagtggttgagggagtggatggttgagtagaagggagagcggatgggagagcggatgggtgagtagatgggtgagcggatgggagagcgtatgggagagcgtatgggagagcggatgggagagcgtatgggagagcgtatggatgagcgtatgggagagcgtatgggtgagcggatgtaagagtggatgagagtggttgagggagtggatggttgagtagatgggagagtagatgggagagtggatgagagtggatgggaaagcggatgagagtggttgagggagtggatgggagagtagatgggtgagtggatggaaaagtggatgggattgtggatgggagagtggatgagat

SEQ ID NO: 3322 - DNA, 628 bp, Artificial Sequence
  chemically treated genomic DNA (Homo sapiens) CpG-island No: 3322
atctcatccactctcccatccacaatcccatccacttttccatccactcacccatctactctcccatccactccctcaaccactctcatccgctttcccatccactctcatccactctcccatctactctcccatctactcaaccatccactccctcaaccactctcatccactcttacatccgctcacccatacgctctcccatacgctcatccatacgctctcccatacgctctcccatccgctctcccatacgctctcccatacgctctcccatccgctcacccatctactcacccatccgctctcccatccgctctcccttctactcaaccatccactccctcaaccactctcctccgctctctcctccgctctcccctacgctctcccatccgctctcccatccgctctcccatccgctcacccatctactctcccatccgctcacccatccactctcccatctactctcccatccgctcaaccatccactccctcaaccactctcatccactcttacatctactcacccatacgctctcccatccgctcacccatccgctccctcaaccactctcatccactctcccatccgctctcccatccgctcacccatctactctcc

SEQ ID NO: 3323 - DNA, 628 bp, Artificial Sequence
  chemically treated genomic DNA (Homo sapiens) CpG-island No: 3323
attttatttatttttttatttatagttttatttatttttttatttatttatttatttgtttttttatttatttttttaattatttttattcgtttttttatttatttttatttatttttttatttgtttttttatttatttaattatttatttttttaattatttttatttatttttgtattcgtttatttatgcgtttttttatgcgtttatttatgcgtttttttatgcgtttttttattcgtttttttatgcgtttttttatgcgtttttttattcgtttatttatttgtttatttattcgtttttttattcgtttttttttttgtttaattatttatttttttaattattttttttcgttttttttttcgtttttttttgcgtttttttattcgtttttttattcgtttttttattcgtttatttatttgtttttttattcgtttatttatttatttttttatttgtttttttattcgtttaattatttatttttttaattatttttatttatttttgtatttgtttatttatgcgtttttttattcgtttatttattcgtttttttaattatttttatttatttttttattcgtttttttattcgtttatttatttgtttttt

SEQ ID NO: 3324 - DNA, 628 bp, Artificial Sequence
  chemically treated genomic DNA (Homo sapiens) CpG-island No: 3324
aaaaaacaaataaataaacgaataaaaaaacgaataaaaaaataaataaaaataattaaaaaaacgaataaataaacgaataaaaaaacgcataaataaacaaatacaaaaataaataaaaataattaaaaaaataaataattaaacgaataaaaaaacaaataaaaaaataaataaataaacgaataaaaaaacaaataaataaacgaataaaaaaacgaataaaaaaacgaataaaaaaacgcaaaaaaaaacgaaaaaaaaaacgaaaaaaaataattaaaaaaataaataattaaacaaaaaaaaaaacgaataaaaaaacgaataaataaacaaataaataaacgaataaaaaaacgcataaaaaaacgcataaaaaaacgaataaaaaaacgcataaaaaaacgcataaataaacgcataaaaaaacgcataaataaacgaatacaaaaataaataaaaataattaaaaaaataaataattaaataaataaaaaaacaaataaaaaaataaataaaaataaataaaaaaacgaataaaaataattaaaaaaataaataaaaaaacaaataaataaataaataaaaaaataaataaaactataaataaaaaaataaataaaat

SEQ ID NO: 3325 - DNA, 537 bp, Artificial Sequence
  chemically treated genomic DNA (Homo sapiens) CpG-island No: 3325
cgtaggaacgttcggtagcggacgggggggttgaaggggttagggtttcggcgcgtgtgggttcgtatttggaggttataggtcgtgtcgggttttaggttttgtagcgtgagcgcgtttttcgcgttcggtttagtcgttgtcggtagtttagtttttcgggtagggtttagggtatcggtttttcgtacggttatcgtgtatttgacgatggtttcgttgcgttcggcgggtacgggtggtagttagcggagaaggacggtttcggtcgaggcgttgtcggtcgtttttagaatttgcgggtggttacggggcgtgtttttcgggatgtttaggatttcggttgttttttcgtttaggtcgtcgcggtttcgggtcgtaagtcggaatatatacgtggtttttttgtgtacgtttgatgtcgtgtagcggttttcggagggcgggaattttagggtggttaggggcgtcgagtttttacggttaaattgtaggcggtagtttagtatttggtttttcgcggtgttagtcgggggt

SEQ ID NO: 3326 - DNA, 537 bp, Artificial Sequence
  chemically treated genomic DNA (Homo sapiens) CpG-island No: 3326
acccccgactaacaccgcgaaaaaccaaatactaaactaccgcctacaatttaaccgtaaaaactcgacgcccctaaccaccctaaaattcccgccctccgaaaaccgctacacgacatcaaacgtacacaaaaaaaccacgtatatattccgacttacgacccgaaaccgcgacgacctaaacgaaaaaacaaccgaaatcctaaacatcccgaaaaacacgccccgtaaccacccgcaaattctaaaaacgaccgacaacgcctcgaccgaaaccgtccttctccgctaactaccacccgtacccgccgaacgcaacgaaaccatcgtcaaatacacgataaccgtacgaaaaaccgataccctaaaccctacccgaaaaactaaactaccgacaacgactaaaccgaacgcgaaaaacgcgctcacgctacaaaacctaaaacccgacacgacctataacctccaaatacgaacccacacgcgccgaaaccctaaccccttcaacccccccgtccgctaccgaacgttcctacg

SEQ ID NO: 3327 - DNA, 537 bp, Artificial Sequence
  chemically treated genomic DNA (Homo sapiens) CpG-island No: 3327
gttttcggttggtatcgcggaggattaggtgttgggttatcgtttgtagtttggtcgtgaggattcgacgtttttggttattttggagttttcgtttttcgaggatcgttatacggtattaggcgtgtataagggggttacgtatgtgtttcggtttgcggttcggagtcgcggcggtttgggcgaggaggtagtcgaggttttgagtatttcggaggatacgtttcgtggttattcgtagattttggaggcggtcggtaacgtttcggtcgggatcgttttttttcgttggttgttattcgtgttcgtcgagcgtaacggggttatcgttaaatatacggtggtcgtgcgggaggtcggtgttttgggttttgttcgagagattgagttgtcggtagcggttgagtcgggcgcggagaacgcgtttacgttgtagggtttgaagttcgatacggtttatgatttttaagtgcgagtttatacgcgtcggggttttggtttttttagttttttcgttcgttatcggacgtttttgcg

SEQ ID NO: 3328 - DNA, 537 bp, Artificial Sequence
  chemically treated genomic DNA (Homo sapiens) CpG-island No: 3328
cgcaaaaacgtccgataacgaacgaaaaaactaaaaaaaccaaaaccccgacgcgtataaactcgcacttaaaaatcataaaccgtatcgaacttcaaaccctacaacgtaaacgcgttctccgcgcccgactcaaccgctaccgacaactcaatctctcgaacaaaacccaaaacaccgacctcccgcacgaccaccgtatatttaacgataaccccgttacgctcgacgaacacgaataacaaccaacgaaaaaaaacgatcccgaccgaaacgttaccgaccgcctccaaaatctacgaataaccacgaaacgtatcctccgaaatactcaaaacctcgactacctcctcgcccaaaccgccgcgactccgaaccgcaaaccgaaacacatacgtaacccccttatacacgcctaataccgtataacgatcctcgaaaaacgaaaactccaaaataaccaaaaacgtcgaatcctcacgaccaaactacaaacgataacccaacacctaatcctccgcgataccaaccgaaaac

SEQ ID NO: 3329 - DNA, 557 bp, Artificial Sequence
  chemically treated genomic DNA (Homo sapiens) CpG-island No: 3329
gagggcgttatttcgagagcgacggcgggttattcggggcgggttgaggtaggttgtagtttcgtttcgggttttgggttttatttttcggttttattttcgtcgggtaagcgtttgtaggcggcgttgtcgtaaattaggcggtttgtttgtcgtattacgtaagatggcggtcgcggcggtgaacggggcggtaggtttttcgagtttcgggttcgcggtaatttcgggcgttgttttgtaggtcgcgatcggtatgtacgagtaatttaagggcgagtggaatcgtaaaagttttaattttagtaagtgcggggaagagttgggtcgatttaaggtaaagtcggtaggtttaggaaatcgagtgttgcgggcgtgggaggcgttacgaggtgtttggatttaattaagtttcgggtcgcggaagttatttcggtgttagcgagattgaggcgggttgggggattcgatggggtgaaagatttggaatagttaaagtgggggttcggagggcgttaagaagcgagagagggatagggagcgttgatggttacgtt

SEQ ID NO: 3330 - DNA, 557 bp, Artificial Sequence
  chemically treated genomic DNA (Homo sapiens) CpG-island No: 3330
aacgtaaccatcaacgctccctatccctctctcgcttcttaacgccctccgaacccccactttaactattccaaatctttcaccccatcgaatcccccaacccgcctcaatctcgctaacaccgaaataacttccgcgacccgaaacttaattaaatccaaacacctcgtaacgcctcccacgcccgcaacactcgatttcctaaacctaccgactttaccttaaatcgacccaactcttccccgcacttactaaaattaaaacttttacgattccactcgcccttaaattactcgtacataccgatcgcgacctacaaaacaacgcccgaaattaccgcgaacccgaaactcgaaaaacctaccgccccgttcaccgccgcgaccgccatcttacgtaatacgacaaacaaaccgcctaatttacgacaacgccgcctacaaacgcttacccgacgaaaataaaaccgaaaaataaaacccaaaacccgaaacgaaactacaacctacctcaacccgccccgaataacccgccgtcgctctcgaaataacgccctc

SEQ ID NO: 3331 - DNA, 557 bp, Artificial Sequence
  chemically treated genomic DNA (Homo sapiens) CpG-island No: 3331
ggcgtgattattaacgttttttgtttttttttcgttttttgacgtttttcgagtttttattttggttgttttaaattttttattttatcggattttttagttcgttttagtttcgttggtatcgaggtggttttcgcggttcgggatttggttgggtttagatatttcgtagcgttttttacgttcgtaatattcggttttttgggtttgtcgattttattttgagtcgatttagttttttttcgtatttgttaagattggggtttttacggttttattcgtttttgagttgttcgtatatgtcggtcgcggtttgtagaatagcgttcgaggttgtcgcgggttcggagttcgagaagtttgtcgtttcgtttatcgtcgcggtcgttattttgcgtgatgcggtaagtagatcgtttgatttacggtagcgtcgtttataaacgtttgttcggcggaagtggggtcgagaggtggagtttaaggttcggggcggggttataatttgttttagttcgtttcgggtagttcgtcgtcgttttcgaggtggcgttttt

SEQ ID NO: 3332 - DNA, 557 bp, Artificial Sequence
  chemically treated genomic DNA (Homo sapiens) CpG-island No: 3332
aaaaacgccacctcgaaaacgacgacgaactacccgaaacgaactaaaacaaattataaccccgccccgaaccttaaactccacctctcgaccccacttccgccgaacaaacgtttataaacgacgctaccgtaaatcaaacgatctacttaccgcatcacgcaaaataacgaccgcgacgataaacgaaacgacaaacttctcgaactccgaacccgcgacaacctcgaacgctattctacaaaccgcgaccgacatatacgaacaactcaaaaacgaataaaaccgtaaaaaccccaatcttaacaaatacgaaaaaaaactaaatcgactcaaaataaaatcgacaaacccaaaaaaccgaatattacgaacgtaaaaaacgctacgaaatatctaaacccaaccaaatcccgaaccgcgaaaaccacctcgataccaacgaaactaaaacgaactaaaaaatccgataaaataaaaaatttaaaacaaccaaaataaaaactcgaaaaacgtcaaaaaacgaaaaaaaaacaaaaaacgttaataatcacgcc

SEQ ID NO: 3333 - DNA, 715 bp, Artificial Sequence
  chemically treated genomic DNA (Homo sapiens) CpG-island No: 3333
gcggtcgcggttacgaggattatcggcgtttcgggttattcgcgtttttcgttttgtttatttgcgtcgtgcgtttcgttaagatcggcgcgttgaggggcgttgttttgggttttttagcggtattatttgtttttttgatcgaggttgcgtttttagcgtttttcgttcgtttatttttcggttcgggtttattttttgcgtttgttaaggttttttcggaagcggaggaggtagcgcgttgcgtgtattgtcgcgcgttttttcgtcgtagagtagacgggcgtggcggtcgttgcgtagaggtttcggattcgggtcgttttttggtgcgtcgtttaagttgtttgtggtgcgtcgagagtttgttttattattgtttgtcggacgtcgagggcgatttttcggattcgtgcgtttgcgagtcgggttattcgcgtttcgtcgcgcgttgggtcgcgttggtcgcgttttttttggtagtgttttgtttttgttgttacgcgtttttgcgcgcgtgttattgggtcgtagcgcgatgcggttgcgtcggttgcgggggtcgttacgaggaggttgcgcggtgaggacggtttggtgggttttttagtcggttcgaggatttaaaattgagggtttaggatttcggatttcgttcggatttaaaatttaaatttaggtatattcggaatttggagtttgagtttggattgag

SEQ ID NO: 3334 - DNA, 715 bp, Artificial Sequence
  chemically treated genomic DNA (Homo sapiens) CpG-island No: 3334
ctcaatccaaactcaaactccaaattccgaatatacctaaatttaaattttaaatccgaacgaaatccgaaatcctaaaccctcaattttaaatcctcgaaccgactaaaaaacccaccaaaccgtcctcaccgcgcaacctcctcgtaacgacccccgcaaccgacgcaaccgcatcgcgctacgacccaataacacgcgcgcaaaaacgcgtaacaacaaaaacaaaacactaccaaaaaaaacgcgaccaacgcgacccaacgcgcgacgaaacgcgaataacccgactcgcaaacgcacgaatccgaaaaatcgccctcgacgtccgacaaacaataataaaacaaactctcgacgcaccacaaacaacttaaacgacgcaccaaaaaacgacccgaatccgaaacctctacgcaacgaccgccacgcccgtctactctacgacgaaaaaacgcgcgacaatacacgcaacgcgctacctcctccgcttccgaaaaaaccttaacaaacgcaaaaaataaacccgaaccgaaaaataaacgaacgaaaaacgctaaaaacgcaacctcgatcaaaaaaacaaataataccgctaaaaaacccaaaacaacgcccctcaacgcgccgatcttaacgaaacgcacgacgcaaataaacaaaacgaaaaacgcgaataacccgaaacgccgataatcctcgtaaccgcgaccgc

SEQ ID NO: 3335 - DNA, 715 bp, Artificial Sequence
  chemically treated genomic DNA (Homo sapiens) CpG-island No: 3335
tttaatttaaatttaagttttaagtttcggatgtgtttaggtttgggttttaggttcgaacggagttcggggttttggatttttaattttgggttttcgggtcggttaggggatttattaggtcgtttttatcgcgtagttttttcgtggcgattttcgtagtcggcgtagtcgtatcgcgttgcgatttagtggtacgcgcgtaggggcgcgtagtagtagaggtagggtattgttagggagagcgcggttagcgcggtttagcgcgcggcggggcgcgggtggttcggttcgtaggcgtacgggttcgagaagtcgttttcggcgttcgataggtagtggtagagtaagttttcggcgtattataggtagtttagacggcgtattaggaggcgattcgggttcggggtttttgcgtagcggtcgttacgttcgtttgttttgcgacggaagagcgcgcggtaatgtacgtagcgcgttgtttttttcgttttcggggaggttttggtaggcgtagaggatgggttcgggtcggggggtgggcgagcggggggcgttgggggcgtagtttcggttaaaggggtaggtagtgtcgttgggggatttagggtagcgttttttaacgcgtcggttttggcgaagcgtacgacgtaggtggatagggcgaggggcgcgggtggttcggagcgtcggtaattttcgtagtcgcggtcgt

SEQ ID NO: 3336 - DNA, 715 bp, Artificial Sequence
  chemically treated genomic DNA (Homo sapiens) CpG-island No: 3336
acgaccgcgactacgaaaattaccgacgctccgaaccacccgcgcccctcgccctatccacctacgtcgtacgcttcgccaaaaccgacgcgttaaaaaacgctaccctaaatcccccaacgacactacctacccctttaaccgaaactacgcccccaacgccccccgctcgcccaccccccgacccgaacccatcctctacgcctaccaaaacctccccgaaaacgaaaaaaacaacgcgctacgtacattaccgcgcgctcttccgtcgcaaaacaaacgaacgtaacgaccgctacgcaaaaaccccgaacccgaatcgcctcctaatacgccgtctaaactacctataatacgccgaaaacttactctaccactacctatcgaacgccgaaaacgacttctcgaacccgtacgcctacgaaccgaaccacccgcgccccgccgcgcgctaaaccgcgctaaccgcgctctccctaacaataccctacctctactactacgcgcccctacgcgcgtaccactaaatcgcaacgcgatacgactacgccgactacgaaaatcgccacgaaaaaactacgcgataaaaacgacctaataaatcccctaaccgacccgaaaacccaaaattaaaaatccaaaaccccgaactccgttcgaacctaaaacccaaacctaaacacatccgaaacttaaaacttaaatttaaattaaa

SEQ ID NO: 3337 - DNA, 507 bp, Artificial Sequence
  chemically treated genomic DNA (Homo sapiens) CpG-island No: 3337
gtcgggtcggggcggggagaggcggggttaggttatggagtaatcgcgcggatcgcggagttagtgatcgtttttttttttcggggcgtagttcgggggtttttaagtcggcggtttcggcgtttttgcggtagatagggcggtattcgcggtttttttttttcgttgcgcgattttcgttgtcgggtcgggtttgcgcgtaggtgcggagttgcgattttcgtttcgaggcggagttagttcggtttttagcggtttagttttcgcgtttagtttgtcgtattagttaggcgtttgtttttgcgttcgtgtgttcgttcgtcggttcgttcgcgttacgattagggttttcgggggttaataagggggcgtcggtatttcgtcgtatagaggcggtttttgtttcggtatgaagtttcgtagggataagttgtatatttcggcgttgattttcgagtgagtgttgggtagggcgggggtatgcggggtgtagggaggataggatga

SEQ ID NO: 3338 - DNA, 507 bp, Artificial Sequence
  chemically treated genomic DNA (Homo sapiens) CpG-island No: 3338
tcatcctatcctccctacaccccgcatacccccgccctacccaacactcactcgaaaatcaacgccgaaatatacaacttatccctacgaaacttcataccgaaacaaaaaccgcctctatacgacgaaataccgacgcccccttattaacccccgaaaaccctaatcgtaacgcgaacgaaccgacgaacgaacacacgaacgcaaaaacaaacgcctaactaatacgacaaactaaacgcgaaaactaaaccgctaaaaaccgaactaactccgcctcgaaacgaaaatcgcaactccgcacctacgcgcaaacccgacccgacaacgaaaatcgcgcaacgaaaaaaaaaaaccgcgaataccgccctatctaccgcaaaaacgccgaaaccgccgacttaaaaacccccgaactacgccccgaaaaaaaaaaacgatcactaactccgcgatccgcgcgattactccataacctaaccccgcctctccccgccccgacccgac

SEQ ID NO: 3339 - DNA, 507 bp, Artificial Sequence
  chemically treated genomic DNA (Homo sapiens) CpG-island No: 3339
ttattttgttttttttgtatttcgtatattttcgttttgtttaatatttattcgagggttagcgtcgggatgtgtagtttgtttttgcgggattttatgtcgaggtagaggtcgtttttgtgcggcggggtatcgacgtttttttgttggttttcggaagttttgatcgtggcgcgagcggatcgacggacggatatacggacgtagggatagacgtttggttggtgcggtagattagacgcgggggttgggtcgttgggggtcgggttggtttcgtttcggggcggggatcgtagtttcgtatttgcgcgtaggttcggttcggtagcgagggtcgcgtagcgggaaaggggagtcgcgggtgtcgttttgtttgtcgtagggacgtcgaggtcgtcggtttgggagttttcgagttgcgtttcggaagggaagggcggttattggtttcgcggttcgcgcgattgttttatggtttgatttcgttttttttcgtttcggttcggt

SEQ ID NO: 3340 - DNA, 507 bp, Artificial Sequence
  chemically treated genomic DNA (Homo sapiens) CpG-island No: 3340
accgaaccgaaacgaaaaaaaacgaaatcaaaccataaaacaatcgcgcgaaccgcgaaaccaataaccgcccttcccttccgaaacgcaactcgaaaactcccaaaccgacgacctcgacgtccctacgacaaacaaaacgacacccgcgactcccctttcccgctacgcgaccctcgctaccgaaccgaacctacgcgcaaatacgaaactacgatccccgccccgaaacgaaaccaacccgacccccaacgacccaacccccgcgtctaatctaccgcaccaaccaaacgtctatccctacgtccgtatatccgtccgtcgatccgctcgcgccacgatcaaaacttccgaaaaccaacaaaaaaacgtcgataccccgccgcacaaaaacgacctctacctcgacataaaatcccgcaaaaacaaactacacatcccgacgctaaccctcgaataaatattaaacaaaacgaaaatatacgaaatacaaaaaaaacaaaataa

SEQ ID NO: 3341 - DNA, 638 bp, Artificial Sequence
  chemically treated genomic DNA (Homo sapiens) CpG-island No: 3341
tcgttttcgtcgttcgcggtcgtagtaacgttcggttttagtcgttcgcggttttagtaacgtttcgttttttcgttcgcggttatggtagcgtttcgtttattcgtcggtacgcgggttcgtcggtttcgttttcgcgtcgttcgtttcgtttttcgataggtttcgtttttaacggtttcgttttcgtattcgtttgggcggagttttagtcgcgttcgggggcgcgcgtttttttttcgtcgtttttttattttcgtagtttcgtgcgtttttttttttgttcggtttcgcggggtttttggggtcgattttatcgtcgaggttttttttttcggtttcgggcggttgcggcggtataaagggaagtagtatgttcgattttagttattggacggcggtggcggttttcggttatcggagtcgtttggtaaaaggcgcgttgttgtagcgttttaagaggtagggggtacggcgtcggcgaaggttcggcggttagtcgagtaaataggagttgttagaagtgtgttttggtcgcgtggcgcggattacggcgagcgtttgtttgtggtagtagtgggaaggggggaggacgtttgtggatcgaggtgttttttggggtttttggtatttttttt

SEQ ID NO: 3342 - DNA, 638 bp, Artificial Sequence
  chemically treated genomic DNA (Homo sapiens) CpG-island No: 3342
aaaaaaaataccaaaaaccccaaaaaacacctcgatccacaaacgtcctccccccttcccactactaccacaaacaaacgctcgccgtaatccgcgccacgcgaccaaaacacacttctaacaactcctatttactcgactaaccgccgaaccttcgccgacgccgtaccccctacctcttaaaacgctacaacaacgcgccttttaccaaacgactccgataaccgaaaaccgccaccgccgtccaataactaaaatcgaacatactacttccctttataccgccgcaaccgcccgaaaccgaaaaaaaaaacctcgacgataaaatcgaccccaaaaaccccgcgaaaccgaacaaaaaaaaaaacgcacgaaactacgaaaataaaaaaacgacgaaaaaaaaacgcgcgcccccgaacgcgactaaaactccgcccaaacgaatacgaaaacgaaaccgttaaaaacgaaacctatcgaaaaacgaaacgaacgacgcgaaaacgaaaccgacgaacccgcgtaccgacgaataaacgaaacgctaccataaccgcgaacgaaaaaacgaaacgttactaaaaccgcgaacgactaaaaccgaacgttactacgaccgcgaacgacgaaaacga

SEQ ID NO: 3343 - DNA, 638 bp, Artificial Sequence
  chemically treated genomic DNA (Homo sapiens) CpG-island No: 3343
aaggagggtgttagggattttaggggatatttcgatttataggcgtttttttttttttttattgttgttatagatagacgttcgtcgtggttcgcgttacgcggttaggatatatttttggtaatttttgtttgttcggttggtcgtcgagttttcgtcggcgtcgtgttttttattttttggagcgttgtagtagcgcgttttttgttaggcggtttcgatggtcgggagtcgttatcgtcgtttagtagttggggtcggatatgttgtttttttttgtgtcgtcgtagtcgttcgaggtcgggaagggaggtttcggcggtgggatcggttttaggagtttcgcggagtcggatagggaggggggcgtacggggttgcggggatgggggggcggcgagaaggaagcgcgcgttttcgagcgcgattggaatttcgtttaggcgagtgcgggggcggggtcgttgggggcggggtttgtcgggaggcggagcgagcgacgcggaagcgaggtcggcggattcgcgtgtcggcgagtgggcggggcgttgttatggtcgcgggcggagaggcggagcgttgttagggtcgcgggcggttgaggtcgggcgttgttacgatcgcgggcggcgggggcgg

SEQ ID NO: 3344 - DNA, 638 bp, Artificial Sequence
  chemically treated genomic DNA (Homo sapiens) CpG-island No: 3344
ccgcccccgccgcccgcgatcgtaacaacgcccgacctcaaccgcccgcgaccctaacaacgctccgcctctccgcccgcgaccataacaacgccccgcccactcgccgacacgcgaatccgccgacctcgcttccgcgtcgctcgctccgcctcccgacaaaccccgcccccaacgaccccgcccccgcactcgcctaaacgaaattccaatcgcgctcgaaaacgcgcgcttccttctcgccgcccccccatccccgcaaccccgtacgcccccctccctatccgactccgcgaaactcctaaaaccgatcccaccgccgaaacctcccttcccgacctcgaacgactacgacgacacaaaaaaaaacaacatatccgaccccaactactaaacgacgataacgactcccgaccatcgaaaccgcctaacaaaaaacgcgctactacaacgctccaaaaaataaaaaacacgacgccgacgaaaactcgacgaccaaccgaacaaacaaaaattaccaaaaatatatcctaaccgcgtaacgcgaaccacgacgaacgtctatctataacaacaataaaaaaaaaaaaaaacgcctataaatcgaaatatcccctaaaatccctaacaccctcctt

SEQ ID NO: 3345 - DNA, 532 bp, Artificial Sequence
  chemically treated genomic DNA (Homo sapiens) CpG-island No: 3345
ttttacggtaaatatcgtagttattcgaggtagtttaggtttaatgtttaggtattttgtaggcggcgcgcgtcgtcgtttttagttgtagtcgggattggcggagtgtttataattttcgacgtgtcgcgcgcgtagacgtttcgttgcggtcgtggtggaataggtggagtttgtttcgttgttttttgggaaacgaagtttcgttgaagagaggcggaattttgagtagtaggtggatttatagttaatgaagacgcgggtcgttttgagtgcggggtagagaagttaatggacgtgcggtattgagagggcgggtttttcggtagtgaaggtttggtgaacggttgcgcgatagaggatatttttttttgcgggtggcggcgaacgcggagagtacgttatgaaggtttcgggtacggtaaggcgggcgcggcgcggtagggggttaagggatggggtacgggttttattaggggtttgtataagtggcgtgggtcgggttggtgtcgcgcgtttttgtttgggtttt

SEQ ID NO: 3346 - DNA, 532 bp, Artificial Sequence
  chemically treated genomic DNA (Homo sapiens) CpG-island No: 3346
aaaacccaaacaaaaacgcgcgacaccaacccgacccacgccacttatacaaacccctaataaaacccgtaccccatcccttaaccccctaccgcgccgcgcccgccttaccgtacccgaaaccttcataacgtactctccgcgttcgccgccacccgcaaaaaaaaatatcctctatcgcgcaaccgttcaccaaaccttcactaccgaaaaacccgccctctcaataccgcacgtccattaacttctctaccccgcactcaaaacgacccgcgtcttcattaactataaatccacctactactcaaaattccgcctctcttcaacgaaacttcgtttcccaaaaaacaacgaaacaaactccacctattccaccacgaccgcaacgaaacgtctacgcgcgcgacacgtcgaaaattataaacactccgccaatcccgactacaactaaaaacgacgacgcgcgccgcctacaaaatacctaaacattaaacctaaactacctcgaataactacgatatttaccgtaaaa

SEQ ID NO: 3347 - DNA, 532 bp, Artificial Sequence
  chemically treated genomic DNA (Homo sapiens) CpG-island No: 3347
ggggtttaaatagaagcgcgcggtattaattcggtttacgttatttatgtaggtttttgatggggttcgtgttttattttttggttttttgtcgcgtcgcgttcgttttatcgtgttcgaggtttttatggcgtgtttttcgcgttcgtcgttattcgtaaaaggaagtgttttttgtcgcgtagtcgtttattaggtttttattatcggaagattcgtttttttaatgtcgtacgtttattggtttttttgtttcgtatttaaagcgattcgcgtttttattggttatggatttatttgttatttaaagtttcgtttttttttagcgagatttcgttttttagaaggtaacgaggtaagttttatttgttttattacgatcgtaacggagcgtttgcgcgcgcggtacgtcgggagttgtaggtatttcgttagtttcggttgtaattaggggcggcggcgcgcgtcgtttgtaggatgtttaagtattgaatttaagttatttcgggtggttgcggtgtttatcgtgaga

SEQ ID NO: 3348 - DNA, 532 bp, Artificial Sequence
  chemically treated genomic DNA (Homo sapiens) CpG-island No: 3348
tctcacgataaacaccgcaaccacccgaaataacttaaattcaatacttaaacatcctacaaacgacgcgcgccgccgcccctaattacaaccgaaactaacgaaatacctacaactcccgacgtaccgcgcgcgcaaacgctccgttacgatcgtaataaaacaaataaaacttacctcgttaccttctaaaaaacgaaatctcgctaaaaaaaaacgaaactttaaataacaaataaatccataaccaataaaaacgcgaatcgctttaaatacgaaacaaaaaaaccaataaacgtacgacattaaaaaaacgaatcttccgataataaaaacctaataaacgactacgcgacaaaaaacacttccttttacgaataacgacgaacgcgaaaaacacgccataaaaacctcgaacacgataaaacgaacgcgacgcgacaaaaaaccaaaaaataaaacacgaaccccatcaaaaacctacataaataacgtaaaccgaattaataccgcgcgcttctatttaaacccc

SEQ ID NO: 3349 - DNA, 501 bp, Artificial Sequence
  chemically treated genomic DNA (Homo sapiens) CpG-island No: 3349
attttgttagcggtttacgtttttttttttgaaagcggtttagatatagtatattgttttttttatattttcggtcgtatttcggtatcggtcgcggtttcgatatcggtcgtttttatggtcgtcgtcgaggacgtgtaggttgaggttaacgaatattttgtttttgagtttgagttttagttttagttcgtttaggatttttttgagttcgacgtcggtatcgatttcgttttaggtttcggtcgcggtttcggtttcggtttcggtttggaattcgggtttacggtttgttttttttttttttttcgttttcgtttttaatataagtttattttcgggcgcgggcgtgcgcgggcgcgtgcgttgtttatgtattggtattagatttagtcgttttcgtaatcgttaacgttatcgttatttttattttttgtttcggattttgattgagatcgtgatcgggagagggagagggagagggagagggagagggagagg

SEQ ID NO: 3350 - DNA, 501 bp, Artificial Sequence
  chemically treated genomic DNA (Homo sapiens) CpG-island No: 3350
cctctccctctccctctccctctccctctccctctcccgatcacgatctcaatcaaaatccgaaacaaaaaataaaaataacgataacgttaacgattacgaaaacgactaaatctaataccaatacataaacaacgcacgcgcccgcgcacgcccgcgcccgaaaataaacttatattaaaaacgaaaacgaaaaaaaaaaaaaaaacaaaccgtaaacccgaattccaaaccgaaaccgaaaccgaaaccgcgaccgaaacctaaaacgaaatcgataccgacgtcgaactcaaaaaaatcctaaacgaactaaaactaaaactcaaactcaaaaacaaaatattcgttaacctcaacctacacgtcctcgacgacgaccataaaaacgaccgatatcgaaaccgcgaccgataccgaaatacgaccgaaaatataaaaaaaacaatatactatatctaaaccgctttcaaaaaaaaaaacgtaaaccgctaacaaaat

SEQ ID NO: 3351 - DNA, 501 bp, Artificial Sequence
  chemically treated genomic DNA (Homo sapiens) CpG-island No: 3351
tttttttttttttttttttttttttttttttttttttcggttacggttttagttagagttcgaggtagagggtgagggtgacggtgacgttaacggttacgggggcggttgggtttaatgttagtgtatgggtagcgtacgcgttcgcgtacgttcgcgttcgggagtgagtttgtgttggagacggaggcggagagggggagggggataggtcgtggattcgaattttagatcgagatcgagatcgaaatcgcggtcggggtttgggacggggtcggtgtcggcgtcgggtttagggggattttgagcgagttggagttggagtttaagtttaagggtaaggtgttcgttaattttaatttgtacgttttcggcgacggttatggaaacggtcggtgtcggggtcgcgatcggtgtcggaatgcgatcggaaatgtgggagggatagtgtattgtgtttgggtcgtttttaaaaggaagggcgtgagtcgttggtagagt

SEQ ID NO: 3352 - DNA, 501 bp, Artificial Sequence
  chemically treated genomic DNA (Homo sapiens) CpG-island No: 3352
actctaccaacgactcacgcccttccttttaaaaacgacccaaacacaatacactatccctcccacatttccgatcgcattccgacaccgatcgcgaccccgacaccgaccgtttccataaccgtcgccgaaaacgtacaaattaaaattaacgaacaccttacccttaaacttaaactccaactccaactcgctcaaaatccccctaaacccgacgccgacaccgaccccgtcccaaaccccgaccgcgatttcgatctcgatctcgatctaaaattcgaatccacgacctatccccctccccctctccgcctccgtctccaacacaaactcactcccgaacgcgaacgtacgcgaacgcgtacgctacccatacactaacattaaacccaaccgcccccgtaaccgttaacgtcaccgtcaccctcaccctctacctcgaactctaactaaaaccgtaaccgaaaaaaaaaaaaaaaaaaaaaaaaaaaaaaaaaaaaa

SEQ ID NO: 3353 - DNA, 1117 bp, Artificial Sequence
  chemically treated genomic DNA (Homo sapiens) CpG-island No: 3353
tggggcgcggggaggtttcggttagagcgttcgttttttcgcgtttcgggcggggtttttatttgttttagcgggttattttttttcggtaatatcgtagcgttttttggttggttaggagcgagttttcggtttttaggagaggcggttttttcgggacgttgtatagcgggtgggcgaagagggtttgtaatttggagttcgattcgttgtggttgtcgttagtcggtttagttcggggttcggttcgggaaaagttgtgtacgatcgtgtcggggttcgaggtagttgcggtcgagtttcgcgttagggaggaggcgcggtcggtgtacgggtattttcgcgggcgttttcgaggtcgtagttggcgttgtatttggggttagaggtggaagtagaggtcggcggagagtagcgcgtttagtagtagtagagttagtaggcggtttcggcgtagtttcggtatggcgtgttggttaagggggacgtcgggggtaggtcggttgttttcggggtttcgggaggggtcgcggggtgcgggtagaagaggtgtttggagtttcgcgggtgggtcggggttagtgagatcggaatgtttttcgcgcgggttagttttttgtggaggggtgtcgttttttaatttggggattaggtgtacggagtatcggggttttcggagttagcgggcgtcgttttttcgcgtcgagtgagtcgagggaatggggttttcggggtgttcgttttttgcgttttttttttcgtgcgttcgttcgttcggacgttcgcggtaggtgaagggtttcggggcgtcggcgtcggttgttatcgcgggcggacgggcgacggggcggggggcgatcgcggagggcggacggaggtcgtcggttgtaaagttcggggcgttttttttgaggatgttgtcgttcggcggcggttgttagtgttttcgcgattttttttgcgggcggcggagacgttagttcggcggttggtacgggcggcgcgagtggggagttggcgaagtaggagcggtttcggggagtttgtttgtgcgtttggatttttagaggtagaggtagcgcggggttttttcgagtttggtttggcgtcggtattt

SEQ ID NO: 3354 - DNA, 1117 bp, Artificial Sequence
  chemically treated genomic DNA (Homo sapiens) CpG-island No: 3354
aaataccgacgccaaaccaaactcgaaaaaaccccgcgctacctctacctctaaaaatccaaacgcacaaacaaactccccgaaaccgctcctacttcgccaactccccactcgcgccgcccgtaccaaccgccgaactaacgtctccgccgcccgcaaaaaaaatcgcgaaaacactaacaaccgccgccgaacgacaacatcctcaaaaaaaacgccccgaactttacaaccgacgacctccgtccgccctccgcgatcgccccccgccccgtcgcccgtccgcccgcgataacaaccgacgccgacgccccgaaacccttcacctaccgcgaacgtccgaacgaacgaacgcacgaaaaaaaaaacgcaaaaaacgaacaccccgaaaaccccattccctcgactcactcgacgcgaaaaaacgacgcccgctaactccgaaaaccccgatactccgtacacctaatccccaaattaaaaaacgacacccctccacaaaaaactaacccgcgcgaaaaacattccgatctcactaaccccgacccacccgcgaaactccaaacacctcttctacccgcaccccgcgacccctcccgaaaccccgaaaacaaccgacctacccccgacgtcccccttaaccaacacgccataccgaaactacgccgaaaccgcctactaactctactactactaaacgcgctactctccgccgacctctacttccacctctaaccccaaatacaacgccaactacgacctcgaaaacgcccgcgaaaatacccgtacaccgaccgcgcctcctccctaacgcgaaactcgaccgcaactacctcgaaccccgacacgatcgtacacaacttttcccgaaccgaaccccgaactaaaccgactaacgacaaccacaacgaatcgaactccaaattacaaaccctcttcgcccacccgctatacaacgtcccgaaaaaaccgcctctcctaaaaaccgaaaactcgctcctaaccaaccaaaaaacgctacgatattaccgaaaaaaaataacccgctaaaacaaataaaaaccccgcccgaaacgcgaaaaaacgaacgctctaaccgaaacctccccgcgcccca

SEQ ID NO: 3355 - DNA, 1117 bp, Artificial Sequence
  chemically treated genomic DNA (Homo sapiens) CpG-island No: 3355
gggtgtcggcgttaggttaggttcggggaggtttcgcgttatttttgtttttaggagtttaggcgtatagataagtttttcggagtcgtttttgtttcgttaattttttattcgcgtcgttcgtgttagtcgtcggattggcgttttcgtcgttcgtaggaggagtcgcgggagtattagtagtcgtcgtcgagcgatagtatttttaggagagacgtttcgggttttgtagtcggcggttttcgttcgtttttcgcggtcgtttttcgtttcgtcgttcgttcgttcgcggtggtagtcggcgtcggcgtttcggggttttttatttgtcgcgagcgttcgggcgggcgggcgtacgggagaaaaggcgtaagaagcgggtatttcgggaattttattttttcggtttattcggcgcggagaagcgacgttcgttgatttcgagagtttcggtgtttcgtgtatttggtttttaagttgaggagcgatatttttttataggggattagttcgcgcggggagtatttcggttttattgatttcggtttattcgcgggattttaggtattttttttgttcgtatttcgcgatttttttcgggatttcggagatagtcggtttgttttcggcgttttttttggttagtacgttatgtcggggttgcgtcgggatcgtttattgattttgttattgttgggcgcgttgtttttcgtcgatttttatttttatttttggttttaagtatagcgttagttgcggtttcgggagcgttcgcgggggtgttcgtgtatcggtcgcgttttttttttggcgcgggattcggtcgtagttgtttcggatttcggtacgatcgtgtataatttttttcgaatcgagtttcggattgaatcggttggcggtagttatagcgggtcgagttttaagttgtaggtttttttcgtttattcgttgtataacgtttcggaggagtcgttttttttgggagtcgaggattcgtttttggttagttaggaggcgttgcggtattatcggaggaaggtggttcgttggaataggtgaggatttcgttcgggacgcgggagagcgggcgttttggtcggggttttttcgcgtttta

SEQ ID NO: 3356 - DNA, 1117 bp, Artificial Sequence
  chemically treated genomic DNA (Homo sapiens) CpG-island No: 3356
taaaacgcgaaaaaaccccgaccaaaacgcccgctctcccgcgtcccgaacgaaatcctcacctattccaacgaaccaccttcctccgataataccgcaacgcctcctaactaaccaaaaacgaatcctcgactcccaaaaaaaacgactcctccgaaacgttatacaacgaataaacgaaaaaaacctacaacttaaaactcgacccgctataactaccgccaaccgattcaatccgaaactcgattcgaaaaaaattatacacgatcgtaccgaaatccgaaacaactacgaccgaatcccgcgccaaaaaaaaaacgcgaccgatacacgaacacccccgcgaacgctcccgaaaccgcaactaacgctatacttaaaaccaaaaataaaaataaaaatcgacgaaaaacaacgcgcccaacaataacaaaatcaataaacgatcccgacgcaaccccgacataacgtactaaccaaaaaaaacgccgaaaacaaaccgactatctccgaaatcccgaaaaaaatcgcgaaatacgaacaaaaaaaatacctaaaatcccgcgaataaaccgaaatcaataaaaccgaaatactccccgcgcgaactaatcccctataaaaaaatatcgctcctcaacttaaaaaccaaatacacgaaacaccgaaactctcgaaatcaacgaacgtcgcttctccgcgccgaataaaccgaaaaaataaaattcccgaaatacccgcttcttacgccttttctcccgtacgcccgcccgcccgaacgctcgcgacaaataaaaaaccccgaaacgccgacgccgactaccaccgcgaacgaacgaacgacgaaacgaaaaacgaccgcgaaaaacgaacgaaaaccgccgactacaaaacccgaaacgtctctcctaaaaatactatcgctcgacgacgactactaatactcccgcgactcctcctacgaacgacgaaaacgccaatccgacgactaacacgaacgacgcgaataaaaaattaacgaaacaaaaacgactccgaaaaacttatctatacgcctaaactcctaaaaacaaaaataacgcgaaacctccccgaacctaacctaacgccgacaccc

SEQ ID NO: 3357 - DNA, 678 bp, Artificial Sequence
  chemically treated genomic DNA (Homo sapiens) CpG-island No: 3357
tgcgtttcgtcgatttcggatttttttatcgtttatatattttttcgcgcgtacgtgtattatatttggtgttatacggtttttgatatacgttattcgtggagcgtatattttgcgttttttgtgcgatttttttttcgtggcgagttttatcgcgttacgcggtttttttgcggtcgttttgtagattttttttacgtagggtttttttgtgcgttttattggtttcgcgcgttgtttttcgacgatgtttttttttttgcgtcgatatatcgcgatgttatattcgttatataatttttttcgatttttcgcgtttttaagcgtttttcgttttttcgcgatttttgtttttttatgaagtttttcgtaacgggttatatttggggaggtttttattttcggtaggcgttttttgggtgggtcgtcgtttttcggcgtaaataaaatgttgtttatcggcgttggtattacgtgtttatacgttgtaatttttatttttattggcgtgtgcgtttttacgtgtgcgcggtttattttcgttttaggttttttatttgcgtaaggttatttttttcgcgatattatagtttttttaagtagttttgtttttttatagattatttgttttacgagtttatatggattatggttatttcggatatcgggcgttttggg

SEQ ID NO: 3358 - DNA, 678 bp, Artificial Sequence
  chemically treated genomic DNA (Homo sapiens) CpG-island No: 3358
cccaaaacgcccgatatccgaaataaccataatccatataaactcgtaaaacaaataatctataaaaaaacaaaactacttaaaaaaactataatatcgcgaaaaaaataaccttacgcaaataaaaaacctaaaacgaaaataaaccgcgcacacgtaaaaacgcacacgccaataaaaataaaaattacaacgtataaacacgtaataccaacgccgataaacaacattttatttacgccgaaaaacgacgacccacccaaaaaacgcctaccgaaaataaaaacctccccaaatataacccgttacgaaaaacttcataaaaaaacaaaaatcgcgaaaaaacgaaaaacgcttaaaaacgcgaaaaatcgaaaaaaattatataacgaatataacatcgcgatatatcgacgcaaaaaaaaaaacatcgtcgaaaaacaacgcgcgaaaccaataaaacgcacaaaaaaaccctacgtaaaaaaaatctacaaaacgaccgcaaaaaaaccgcgtaacgcgataaaactcgccacgaaaaaaaaatcgcacaaaaaacgcaaaatatacgctccacgaataacgtatatcaaaaaccgtataacaccaaatataatacacgtacgcgcgaaaaaatatataaacgataaaaaaatccgaaatcgacgaaacgca

SEQ ID NO: 3359 - DNA, 678 bp, Artificial Sequence
  chemically treated genomic DNA (Homo sapiens) CpG-island No: 3359
tttagagcgttcggtgttcgagatagttatagtttatgtaaattcgtgggataagtgatttgtgaaagagtaagattgtttgagagggttgtgatgtcgcgagagaggtggttttgcgtaaatggggggtttggggcgagaatgggtcgcgtatacgtaaaagcgtatacgttagtaaagatgggggttataacgtgtgaatacgtggtgttagcgtcggtgaataatattttgtttgcgtcgagaaacgacggtttatttaagaagcgtttgtcggagatgagaatttttttaagtgtaattcgttgcgggaagttttatggaaaggtagaagtcgcgagagggcgggagacgtttgggggcgcgggaaatcggagagggttgtgtagcgagtgtggtatcgcggtgtgtcggcgtaaaaaagagagtatcgtcgaggagtagcgcgcgaaattagtggggcgtatagagagattttgcgtggggggggtttgtagaacggtcgtaaaaaaatcgcgtgacgcggtggagttcgttacggggggggggtcgtataagaggcgtagaatgtgcgttttacgggtggcgtatgttagagatcgtgtgatattaagtgtagtgtacgtgcgcgcgggagggtgtgtagacggtggaggagttcgagatcggcgagacgta

SEQ ID NO: 3360 - DNA, 678 bp, Artificial Sequence
  chemically treated genomic DNA (Homo sapiens) CpG-island No: 3360
tacgtctcgccgatctcgaactcctccaccgtctacacaccctcccgcgcgcacgtacactacacttaatatcacacgatctctaacatacgccacccgtaaaacgcacattctacgcctcttatacgaccccccccccgtaacgaactccaccgcgtcacgcgatttttttacgaccgttctacaaaccccccccacgcaaaatctctctatacgccccactaatttcgcgcgctactcctcgacgatactctcttttttacgccgacacaccgcgataccacactcgctacacaaccctctccgatttcccgcgcccccaaacgtctcccgccctctcgcgacttctacctttccataaaacttcccgcaacgaattacacttaaaaaaattctcatctccgacaaacgcttcttaaataaaccgtcgtttctcgacgcaaacaaaatattattcaccgacgctaacaccacgtattcacacgttataacccccatctttactaacgtatacgcttttacgtatacgcgacccattctcgccccaaaccccccatttacgcaaaaccacctctctcgcgacatcacaaccctctcaaacaatcttactctttcacaaatcacttatcccacgaatttacataaactataactatctcgaacaccgaacgctctaaa

SEQ ID NO: 3361 - DNA, 569 bp, Artificial Sequence
  chemically treated genomic DNA (Homo sapiens) CpG-island No: 3361
tttttttcggtttttttcgacgtttttattttatttttagtttagtcgttagggtgagcgcggggtttcgcgtagggaacgggattcgtagtcgttcgttttttttttttttttttttttttttttcgggtttagtcgtttcgtcgagtatcgtaggtttcgggtcgggagcgggcggaggaagggtcgggcgttcggcgtaagttcgcgtcgttttagtttcggtttcggttcggttcgtatacgtcgtttatttggaagtcggcgacgttgtcgtttatttttttgttgcgtgtcgtaaatcgaatagcgggcgttggtttttttgtcggatatttttttgttagcgtcgttttggtcgagtcgcgggggtcgaatgtgcgacggggtagagcggggggatggtttttttttgcggggggggggagaattcgtttgattgtttagggaggacgggttgttttcgggttggggcgggttagatgttgtatttttcgggggggaaaaggtatcgggaaatgaggttagttgttgtattaaggatagaggggggtagagatagtgggaga

SEQ ID NO: 3362 - DNA, 569 bp, Artificial Sequence
  chemically treated genomic DNA (Homo sapiens) CpG-island No: 3362
tctcccactatctctacccccctctatccttaatacaacaactaacctcatttcccgataccttttcccccccgaaaaatacaacatctaacccgccccaacccgaaaacaacccgtcctccctaaacaatcaaacgaattctccccccccccgcaaaaaaaaaccatccccccgctctaccccgtcgcacattcgacccccgcgactcgaccaaaacgacgctaacaaaaaaatatccgacaaaaaaaccaacgcccgctattcgatttacgacacgcaacaaaaaaataaacgacaacgtcgccgacttccaaataaacgacgtatacgaaccgaaccgaaaccgaaactaaaacgacgcgaacttacgccgaacgcccgacccttcctccgcccgctcccgacccgaaacctacgatactcgacgaaacgactaaacccgaaaaaaaaaaaaaaaaaaaaaaaaaaaacgaacgactacgaatcccgttccctacgcgaaaccccgcgctcaccctaacgactaaactaaaaataaaataaaaacgtcgaaaaaaaccgaaaaaaa

SEQ ID NO: 3363 - DNA, 569 bp, Artificial Sequence
  chemically treated genomic DNA (Homo sapiens) CpG-island No: 3363
ttttttattatttttgtttttttttatttttgatataatagttgattttatttttcgatattttttttttttcgaaaagtataatatttggttcgttttagttcgaagatagttcgttttttttggataattagacgaatttttttttttttcgtaaaaaaaagttattttttcgttttgtttcgtcgtatattcggttttcgcgattcggttagagcggcgttggtagaggagtgttcggtaggagggttaacgttcgttgttcggtttgcgatacgtagtagggaggtgggcggtagcgtcgtcggtttttaggtaagcggcgtgtgcgggtcgggtcggggtcggggttggggcggcgcgggtttgcgtcggacgttcggtttttttttcgttcgttttcggttcggggtttgcggtgttcggcggggcggttgagttcgggggggaggaggaggaggaggaggaggacggacggttgcgggtttcgttttttgcgcggagtttcgcgtttattttggcggttgagttgggggtggggtgggggcgtcgggaagggtcgagggagg

SEQ ID NO: 3364 - DNA, 569 bp, Artificial Sequence
  chemically treated genomic DNA (Homo sapiens) CpG-island No: 3364
cctccctcgacccttcccgacgcccccaccccacccccaactcaaccgccaaaataaacgcgaaactccgcgcaaaaaacgaaacccgcaaccgtccgtcctcctcctcctcctcctcctcccccccgaactcaaccgccccgccgaacaccgcaaaccccgaaccgaaaacgaacgaaaaaaaaaccgaacgtccgacgcaaacccgcgccgccccaaccccgaccccgacccgacccgcacacgccgcttacctaaaaaccgacgacgctaccgcccacctccctactacgtatcgcaaaccgaacaacgaacgttaaccctcctaccgaacactcctctaccaacgccgctctaaccgaatcgcgaaaaccgaatatacgacgaaacaaaacgaaaaaataacttttttttacgaaaaaaaaaaaaattcgtctaattatccaaaaaaaacgaactatcttcgaactaaaacgaaccaaatattatacttttcgaaaaaaaaaaaatatcgaaaaataaaatcaactattatatcaaaaataaaaaaaaacaaaaataataaaaaa

SEQ ID NO: 3365 - DNA, 1134 bp, Artificial Sequence
  chemically treated genomic DNA (Homo sapiens) CpG-island No: 3365
cgtgaaaggggggggtcgaagagagggcgagggggagagaggatagcgagaggcgggtaggcgtatagcgggagagaatagtacggagagaaatagaaagcgtgtaattaatttattttggttcggcgaaggcgagagggcgggcgtgagggggggagggagtcggaggttaggagttgggggggacgggagggagcgaagggaaggttgcgggagaaagagcgggggtcggggttagacgttaagaggggcgcggggagtatagagaagcggagggaagggcgttacgtcgaggggtcgggggaggcggtgattggggggcggagtggaggttgtattcggatcgcgggcgtttagttcggtttgggtcgacggagttttttgtcgtcgcgagttcgggtttcgggagggggataggcggtggcggtatcggggtcgtttcgggacgtagcgcggaaaggggagcggttcgaggttgcgcgtcggggggagggttggagggggagcgttttggggggttataacgtcggcggtttgcgagtcggattgtttgcggggggaatcgttttttcgggcgaagcggggatggggggagttgaggtagatgaagaggaggcggcggggaattcgtaggttcggcggagcgcgatttcgcggacggcgttcgggacgggagttagtagcgaggtagcgggcggcgtcgacgcggggtcgttttgttcgatggaggcgttggtgggtagagcgcgggtaggcgtgggttaggaggcgggggcggtcggaaggggggggtcggggtcggtcgggttttacgtagtttcgtcggagagtaggcgaattgcgggcgtttacgttcggtttttatagtcgcgttagttcgcggtttagggttcgcgcgggtttcgttggtttcgcgttcgcgttaatgggtgttcgcggattttcgtttcgttttcggttcgttttcgtaattcgagttaagagcggggcggggggtgcgggttgggggttttggggttcgggggggggggcggcggtcgtaggggttggggggtgcgcgggggcgaggttgggtggggggtagggagtcgtagagcgttaaggttatgttgaatgttcgttttagagaattta

SEQ ID NO: 3366 - DNA, 1134 bp, Artificial Sequence
  chemically treated genomic DNA (Homo sapiens) CpG-island No: 3366
taaattctctaaaacgaacattcaacataaccttaacgctctacgactccctaccccccacccaacctcgcccccgcgcaccccccaacccctacgaccgccgcccccccccccgaaccccaaaacccccaacccgcaccccccgccccgctcttaactcgaattacgaaaacgaaccgaaaacgaaacgaaaatccgcgaacacccattaacgcgaacgcgaaaccaacgaaacccgcgcgaaccctaaaccgcgaactaacgcgactataaaaaccgaacgtaaacgcccgcaattcgcctactctccgacgaaactacgtaaaacccgaccgaccccgaccccccccttccgaccgcccccgcctcctaacccacgcctacccgcgctctacccaccaacgcctccatcgaacaaaacgaccccgcgtcgacgccgcccgctacctcgctactaactcccgtcccgaacgccgtccgcgaaatcgcgctccgccgaacctacgaattccccgccgcctcctcttcatctacctcaactccccccatccccgcttcgcccgaaaaaacgattccccccgcaaacaatccgactcgcaaaccgccgacgttataaccccccaaaacgctccccctccaaccctccccccgacgcgcaacctcgaaccgctcccctttccgcgctacgtcccgaaacgaccccgataccgccaccgcctatccccctcccgaaacccgaactcgcgacgacaaaaaactccgtcgacccaaaccgaactaaacgcccgcgatccgaatacaacctccactccgccccccaatcaccgcctcccccgacccctcgacgtaacgcccttccctccgcttctctatactccccgcgcccctcttaacgtctaaccccgacccccgctctttctcccgcaaccttcccttcgctccctcccgtcccccccaactcctaacctccgactccctccccccctcacgcccgccctctcgccttcgccgaaccaaaataaattaattacacgctttctatttctctccgtactattctctcccgctatacgcctacccgcctctcgctatcctctctccccctcgccctctcttcgacccccccctttcacg

SEQ ID NO: 3367 - DNA, 1134 bp, Artificial Sequence
  chemically treated genomic DNA (Homo sapiens) CpG-island No: 3367
tgaattttttagaacgggtatttagtatggttttggcgttttgcggttttttgttttttatttagtttcgttttcgcgtattttttagtttttgcgatcgtcgttttttttttcgggttttagggtttttagttcgtatttttcgtttcgtttttggttcgggttgcgggggcgggtcgggggcggggcgagggttcgcgggtatttattggcgcgggcgcgaggttagcgaggttcgcgcgggttttgggtcgcgggttggcgcgattataagagtcgggcgtgggcgttcgtagttcgtttgtttttcggcggagttgcgtgaggttcggtcggtttcggtttttttttttcggtcgttttcgttttttggtttacgtttgttcgcgttttgtttattagcgtttttatcgggtaaggcggtttcgcgtcgacgtcgttcgttgtttcgttgttgattttcgtttcgggcgtcgttcgcggggtcgcgtttcgtcgggtttgcggatttttcgtcgttttttttttatttattttaattttttttattttcgtttcgttcgaggaggcggtttttttcgtaggtagttcggttcgtaggtcgtcggcgttgtaattttttaaagcgttttttttttagtttttttttcggcgcgtagtttcgggtcgttttttttttcgcgttgcgtttcggagcggtttcggtgtcgttatcgtttgtttttttttcgaggttcgggttcgcgacggtagagggtttcgtcggtttaaatcgagttgggcgttcgcggttcgggtgtagtttttatttcgttttttagttatcgtttttttcggtttttcgacgtggcgttttttttttcgtttttttgtgtttttcgcgttttttttggcgtttggtttcggttttcgttttttttttcgtaatttttttttcgttttttttcgttttttttagtttttagttttcgatttttttttttttttacgttcgttttttcgttttcgtcgaattaaagtggattaattatacgttttttgttttttttcgtgttgttttttttcgttgtgcgtttgttcgtttttcgttgttttttttttttttcgtttttttttcggttttttttttttacg

SEQ ID NO: 3368 - DNA, 1134 bp, Artificial Sequence
  chemically treated genomic DNA (Homo sapiens) CpG-island No: 3368
cgtaaaaaaaaaaaaccgaaaaaaaaacgaaaaaaaaaaaaaacaacgaaaaacgaacaaacgcacaacgaaaaaaaacaacacgaaaaaaaacaaaaaacgtataattaatccactttaattcgacgaaaacgaaaaaacgaacgtaaaaaaaaaaaaaaatcgaaaactaaaaactaaaaaaaacgaaaaaaaacgaaaaaaaaattacgaaaaaaaaaacgaaaaccgaaaccaaacgccaaaaaaaacgcgaaaaacacaaaaaaacgaaaaaaaaaacgccacgtcgaaaaaccgaaaaaaacgataactaaaaaacgaaataaaaactacacccgaaccgcgaacgcccaactcgatttaaaccgacgaaaccctctaccgtcgcgaacccgaacctcgaaaaaaaaacaaacgataacgacaccgaaaccgctccgaaacgcaacgcgaaaaaaaaaacgacccgaaactacgcgccgaaaaaaaaactaaaaaaaaaacgctttaaaaaattacaacgccgacgacctacgaaccgaactacctacgaaaaaaaccgcctcctcgaacgaaacgaaaataaaaaaaattaaaataaataaaaaaaaaacgacgaaaaatccgcaaacccgacgaaacgcgaccccgcgaacgacgcccgaaacgaaaatcaacaacgaaacaacgaacgacgtcgacgcgaaaccgccttacccgataaaaacgctaataaacaaaacgcgaacaaacgtaaaccaaaaaacgaaaacgaccgaaaaaaaaaaaccgaaaccgaccgaacctcacgcaactccgccgaaaaacaaacgaactacgaacgcccacgcccgactcttataatcgcgccaacccgcgacccaaaacccgcgcgaacctcgctaacctcgcgcccgcgccaataaatacccgcgaaccctcgccccgcccccgacccgcccccgcaacccgaaccaaaaacgaaacgaaaaatacgaactaaaaaccctaaaacccgaaaaaaaaaacgacgatcgcaaaaactaaaaaatacgcgaaaacgaaactaaataaaaaacaaaaaaccgcaaaacgccaaaaccatactaaatacccgttctaaaaaattca

SEQ ID NO: 3369 - DNA, 656 bp, Artificial Sequence
  chemically treated genomic DNA (Homo sapiens) CpG-island No: 3369
tttttcgtcgtttaagtttagttaaggggaaggggtcgtcggcggaatttcgcgtttttttggtttttttcgtttttttcgtttcgttattaattatttcgttcgcgtttcgcgcgcgtttttcggcggagttttaggttcgcgggttagaggtattttatcgttcggcgggagcgtttttttttcgcgtttttcgttttagttttttgttcgttttattttgggattttttagtcgttttttttacgaatgagatttttgtaatgagtaaacgaaagtggcgcggatttcggggcgtttagtaggagcgagcgtagtcgttagtcgtaagttcgtagtcgtgtttcgcgttttacgtcggttttttcggcggtagtcggagacgagcgttagtatcggcgggatagtagtagatgcgggtcgagagtcggttaggggcgtagaggcggaggggatcggcgcggcggggagtttatcgcgaagttggaggttgcgttcgcgggcgtattaggagtttaggtagcgagcgatcgaacgttttgtggtaggcggtggacgttgttgaaggtgagcgagatttcggggttagtttttagtgttcgggagtaacgtttagttcgttggaagattcggggataatgtttaaatttggggga

SEQ ID NO: 3370 - DNA, 656 bp, Artificial Sequence
  chemically treated genomic DNA (Homo sapiens) CpG-island No: 3370
tcccccaaatttaaacattatccccgaatcttccaacgaactaaacgttactcccgaacactaaaaactaaccccgaaatctcgctcaccttcaacaacgtccaccgcctaccacaaaacgttcgatcgctcgctacctaaactcctaatacgcccgcgaacgcaacctccaacttcgcgataaactccccgccgcgccgatcccctccgcctctacgcccctaaccgactctcgacccgcatctactactatcccgccgatactaacgctcgtctccgactaccgccgaaaaaaccgacgtaaaacgcgaaacacgactacgaacttacgactaacgactacgctcgctcctactaaacgccccgaaatccgcgccactttcgtttactcattacaaaaatctcattcgtaaaaaaaacgactaaaaaatcccaaaataaaacgaacaaaaaactaaaacgaaaaacgcgaaaaaaaaacgctcccgccgaacgataaaatacctctaacccgcgaacctaaaactccgccgaaaaacgcgcgcgaaacgcgaacgaaataattaataacgaaacgaaaaaaacgaaaaaaaccaaaaaaacgcgaaattccgccgacgaccccttccccttaactaaacttaaacgacgaaaaa

SEQ ID NO: 3371 - DNA, 656 bp, Artificial Sequence
  chemically treated genomic DNA (Homo sapiens) CpG-island No: 3371
ttttttaaatttgggtattgttttcgggttttttaacggattgggcgttgttttcggatattgaggattggtttcggggtttcgtttatttttagtagcgtttatcgtttgttatagagcgttcgatcgttcgttgtttgagtttttggtgcgttcgcggacgtagtttttagtttcgcggtgagtttttcgtcgcgtcgatttttttcgtttttgcgtttttgatcggttttcggttcgtatttgttgttgtttcgtcggtgttggcgttcgttttcggttgtcgtcggggaggtcggcgtggggcgcgggatacggttgcggatttgcggttggcggttgcgttcgtttttgttgggcgtttcgaaattcgcgttattttcgtttgtttattgtaaagattttattcgtggggaaagcggttggagggttttaaagtggggcgggtagggggttggggcgagggacgcggaggagaggcgttttcgtcgggcggtaaagtgtttttagttcgcgggtttaggatttcgtcgggaggcgcgcgcggagcgcgggcgaagtgattgatggcggagcgaggggggcgaggggggttaggggggcgcgagatttcgtcggcggttttttttttttggttaggtttaggcggcgggggg

SEQ ID NO: 3372 - DNA, 656 bp, Artificial Sequence
  chemically treated genomic DNA (Homo sapiens) CpG-island No: 3372
ccccccgccgcctaaacctaaccaaaaaaaaaaaaccgccgacgaaatctcgcgcccccctaacccccctcgcccccctcgctccgccatcaatcacttcgcccgcgctccgcgcgcgcctcccgacgaaatcctaaacccgcgaactaaaaacactttaccgcccgacgaaaacgcctctcctccgcgtccctcgccccaaccccctacccgccccactttaaaaccctccaaccgctttccccacgaataaaatctttacaataaacaaacgaaaataacgcgaatttcgaaacgcccaacaaaaacgaacgcaaccgccaaccgcaaatccgcaaccgtatcccgcgccccacgccgacctccccgacgacaaccgaaaacgaacgccaacaccgacgaaacaacaacaaatacgaaccgaaaaccgatcaaaaacgcaaaaacgaaaaaaatcgacgcgacgaaaaactcaccgcgaaactaaaaactacgtccgcgaacgcaccaaaaactcaaacaacgaacgatcgaacgctctataacaaacgataaacgctactaaaaataaacgaaaccccgaaaccaatcctcaatatccgaaaacaacgcccaatccgttaaaaaacccgaaaacaatacccaaatttaaaaaa

SEQ ID NO: 3373 - DNA, 721 bp, Artificial Sequence
  chemically treated genomic DNA (Homo sapiens) CpG-island No: 3373
acgtagtattttatagtagcgtatgttatttcgtacggcgggtgttttattatttttttttatcgttttatattttttatttattatatttcgtttttatattttaacgtattttttttttttattatttatttttatattatattaattttatttttcgtatacgtattatttttatttattttttaattttacggtattcgttattttatttttattattatatatcgcgttttttattttatcgtttcgttttaattttattatcgatattttttttaatttaatgttttttatttttatttttttattcgtataaattttttaatttttatttttatttttttacgtttatttttttattatgtatttcgtgtgtagtatattttttagtcgtattatttttttttttttatttattataaaaaattttttcgtattttttttaaaatatttttttcgcgtttttttttattataatttaattttttttataaatttttttaatttttaattaattaattaaatttagttttttttaattttttttttttaaattcgttttttttaaattttttatatttaatttaattttaaattaattaatttttaaatttttttttttataaaattttttaaacgttttaaattttttattttaattttttaaatttaattttaaaattttttaatttttaattaaatttaatcgttttttatt

SEQ ID NO: 3374 - DNA, 721 bp, Artificial Sequence
  chemically treated genomic DNA (Homo sapiens) CpG-island No: 3374
aataaaaaacgattaaatttaattaaaaattaaaaaattttaaaattaaatttaaaaaattaaaataaaaaatttaaaacgtttaaaaaattttataaaaaaaaaaatttaaaaattaattaatttaaaattaaattaaatataaaaaatttaaaaaaaacgaatttaaaaaaaaaaaattaaaaaaaactaaatttaattaattaattaaaaattaaaaaaatttataaaaaaaattaaattataataaaaaaaaacgcgaaaaaaatattttaaaaaaaatacgaaaaaattttttataataaataaaaaaaaaaaaataatacgactaaaaaatatactacacacgaaatacataataaaaaaataaacgtaaaaaaataaaaataaaaattaaaaaatttatacgaataaaaaaataaaaataaaaaacattaaattaaaaaaaatatcgataataaaattaaaacgaaacgataaaataaaaaacgcgatatataataataaaaataaaataacgaataccgtaaaattaaaaaataaataaaaataatacgtatacgaaaaataaaattaatataatataaaaataaataataaaaaaaaaaaatacgttaaaatataaaaacgaaatataataaataaaaaatataaaacgataaaaaaaaataataaaacacccgccgtacgaaataacatacgctactataaaatactacgt

SEQ ID NO: 3375 - DNA, 721 bp, Artificial Sequence
  chemically treated genomic DNA (Homo sapiens) CpG-island No: 3375
gatggggggcggttgggtttggttggggattggggagttttggggttgggtttggggggttagagtgggaggtttggggcgtttggggggttttgtggaggggggggtttgggggttggttggtttggggttgggttgggtatggggggtttggggagagcgggtttgggggggaaaggttggggggggttgggtttggttggttggttgagggttgggggggtttataggggaggttgggttgtggtggggaggagcgcggggagggtgttttgaggagggtgcgagggggttttttgtggtgggtgaggaagggggggtgatgcggttggagggtatgttgtatacggagtgtatggtggggaggtgggcgtgaggaggtggggatgagggttggggggtttgtgcgggtgggagggtgggggtgggaagtattaggttggggggagtgtcggtggtgggattggagcggagcggtggggtggagagcgcggtgtgtggtggtgggagtggggtggcgggtgtcgtgaggttggaggatgggtgaaggtggtgcgtatacgaggagtgaggttggtgtggtgtggaggtggatggtggggggaaggagtgcgttggggtgtggggacgaagtgtagtgggtgggaggtgtggagcggtgggagaaggtggtggagtattcgtcgtgcggagtgatatgcgttgttgtggggtgttgcgt

SEQ ID NO: 3376 - DNA, 721 bp, Artificial Sequence
  chemically treated genomic DNA (Homo sapiens) CpG-island No: 3376
acgcaacaccccacaacaacgcatatcactccgcacgacgaatactccaccaccttctcccaccgctccacacctcccacccactacacttcgtccccacaccccaacgcactccttccccccaccatccacctccacaccacaccaacctcactcctcgtatacgcaccaccttcacccatcctccaacctcacgacacccgccaccccactcccaccaccacacaccgcgctctccaccccaccgctccgctccaatcccaccaccgacactccccccaacctaatacttcccacccccaccctcccacccgcacaaaccccccaaccctcatccccacctcctcacgcccacctccccaccatacactccgtatacaacataccctccaaccgcatcacccccccttcctcacccaccacaaaaaaccccctcgcaccctcctcaaaacaccctccccgcgctcctccccaccacaacccaacctcccctataaacccccccaaccctcaaccaaccaaccaaacccaaccccccccaacctttcccccccaaacccgctctccccaaaccccccatacccaacccaaccccaaaccaaccaacccccaaacccccccctccacaaaaccccccaaacgccccaaacctcccactctaaccccccaaacccaaccccaaaactccccaatccccaaccaaacccaaccgccccccatc

SEQ ID NO: 3377 - DNA, 703 bp, Artificial Sequence
  chemically treated genomic DNA (Homo sapiens) CpG-island No: 3377
gggcgtcgtaggtagttttatttttcgttagggtaaatcgggaaggggtttcgcggtggggtcgcgattttcggttttcgttttaatcgtgggagttttgcgcgcgacgcgttttaggtggtttcgttattgttttattttgtagggtgtttatatttcgttgattggaaagaaaagaaatcggggaagaagggagttcggagtttcgtttttagttgtcggagcgcgttcgtagcgcgttcgtttagttaggggaggggtttcgggttcgattcggagtttagtcggcgcgggttcgttttttttttttcgtttttcgtttttcgttttacgttttttcgttttttttttcggggtttttttcgggcgtcgttcgcgttttcgtcgagtttgatttcgtttttggtttttttttttcgcgcgcgtcggatcgttttttagtttatttaggcgtacgttttaggggacgcgtcgtttttttttttttcgtaacggtattagtagtcgcgttgcggtttttttcgagttttcgtttttttagttttagttcggttcgtcgtattcggcgaggcgagcgcggggttagggcggcggtttcgaagagaggttcggtttcgttttcggtttcgtttttggagacgcgagtttcggtttcgggtttggcgggggtatgagggtggttcggggtatcggaggatttggg

SEQ ID NO: 3378 - DNA, 703 bp, Artificial Sequence
  chemically treated genomic DNA (Homo sapiens) CpG-island No: 3378
cccaaatcctccgataccccgaaccaccctcatacccccgccaaacccgaaaccgaaactcgcgtctccaaaaacgaaaccgaaaacgaaaccgaacctctcttcgaaaccgccgccctaaccccgcgctcgcctcgccgaatacgacgaaccgaactaaaactaaaaaaacgaaaactcgaaaaaaaccgcaacgcgactactaataccgttacgaaaaaaaaaaaaacgacgcgtcccctaaaacgtacgcctaaataaactaaaaaacgatccgacgcgcgcgaaaaaaaaaaaccaaaaacgaaatcaaactcgacgaaaacgcgaacgacgcccgaaaaaaaccccgaaaaaaaaaacgaaaaaacgtaaaacgaaaaacgaaaaacgaaaaaaaaaaaacgaacccgcgccgactaaactccgaatcgaacccgaaacccctcccctaactaaacgaacgcgctacgaacgcgctccgacaactaaaaacgaaactccgaactcccttcttccccgatttcttttctttccaatcaacgaaatataaacaccctacaaaataaaacaataacgaaaccacctaaaacgcgtcgcgcgcaaaactcccacgattaaaacgaaaaccgaaaatcgcgaccccaccgcgaaaccccttcccgatttaccctaacgaaaaataaaactacctacgacgccc

SEQ ID NO: 3379 - DNA, 703 bp, Artificial Sequence
  chemically treated genomic DNA (Homo sapiens) CpG-island No: 3379
tttaggtttttcggtgtttcgggttatttttatgttttcgttaggttcggggtcgggattcgcgtttttaggggcggggtcgggggcggggtcgggttttttttcgaggtcgtcgttttggtttcgcgttcgtttcgtcgagtgcggcgggtcgggttggagttggaggggcggggattcgggaggggtcgtagcgcggttgttggtgtcgttgcgggagaagaggaagcggcgcgttttttgaggcgtgcgtttggatggattgaaggacggttcgacgcgcgcggagggagagggttaggggcgaggttaggttcggcgggggcgcgggcggcgttcggagggggtttcggggagggaggcggggaggcgtggagcggggagcggggagcggggaggggggagcgggttcgcgtcggttgagtttcgggtcgggttcgagattttttttttggttgggcgggcgcgttgcgagcgcgtttcggtagttgaaagcggagtttcggatttttttttttttcggttttttttttttttaattagcgagatataaatattttgtaaggtaaaataatagcggggttatttgggacgcgtcgcgcgtagagtttttacggttggggcgggggtcgggagtcgcggttttatcgcggagttttttttcgatttgttttggcggagggtggggttatttgcggcgttt

SEQ ID NO: 3380 - DNA, 703 bp, Artificial Sequence
  chemically treated genomic DNA (Homo sapiens) CpG-island No: 3380
aaacgccgcaaataaccccaccctccgccaaaacaaatcgaaaaaaaactccgcgataaaaccgcgactcccgacccccgccccaaccgtaaaaactctacgcgcgacgcgtcccaaataaccccgctattattttaccttacaaaatatttatatctcgctaattaaaaaaaaaaaaaaccgaaaaaaaaaaaaatccgaaactccgctttcaactaccgaaacgcgctcgcaacgcgcccgcccaaccaaaaaaaaaatctcgaacccgacccgaaactcaaccgacgcgaacccgctcccccctccccgctccccgctccccgctccacgcctccccgcctccctccccgaaaccccctccgaacgccgcccgcgcccccgccgaacctaacctcgcccctaaccctctccctccgcgcgcgtcgaaccgtccttcaatccatccaaacgcacgcctcaaaaaacgcgccgcttcctcttctcccgcaacgacaccaacaaccgcgctacgacccctcccgaatccccgcccctccaactccaacccgacccgccgcactcgacgaaacgaacgcgaaaccaaaacgacgacctcgaaaaaaaacccgaccccgcccccgaccccgcccctaaaaacgcgaatcccgaccccgaacctaacgaaaacataaaaataacccgaaacaccgaaaaacctaaa

SEQ ID NO: 3381 - DNA, 638 bp, Artificial Sequence
  chemically treated genomic DNA (Homo sapiens) CpG-island No: 3381
ttattatttcgggtacgtagttttgcgaagtcgaattgattatttttagagattcggagagggttttgtttttcgtttttttttataaaaggagttcgggagttttagttcgggcgtaatcgcggggtttggtcgattttagcgttttttcgcgcggttattttcgatttcggtttcgttttttcgggtttttagttttcgtagtcgggaagggcgttgcgaggtttttaaaagatttttgtgtcgcgggcgtacgtcgtattttcggggaaaacgttttgcgtttcggtttcgcggtttttcgtcgtcgttcgtttcgcgcgttttagttttcgtttcggcgagggtttttcgtttcggaaggggcgcgacggggagttcggtttggttgttgcggtttcgcgtttcgtttagtcgcggtcgggaggatagggtagtagggtttcggcgtcgcgtttaggcgttttttttttagtttcgtttcggagacgtttcgtttttttcggttcggggaaatttgcggcgatcgggcgcgttcgcgtggttttcgttgggtaggggcgatttttagtgtttagggcgagtcgcgtcgagtaggatcgagttttttttcgtatattttggagtttgggtttggg

SEQ ID NO: 3382 - DNA, 638 bp, Artificial Sequence
  chemically treated genomic DNA (Homo sapiens) CpG-island No: 3382
cccaaacccaaactccaaaatatacgaaaaaaaactcgatcctactcgacgcgactcgccctaaacactaaaaatcgcccctacccaacgaaaaccacgcgaacgcgcccgatcgccgcaaatttccccgaaccgaaaaaaacgaaacgtctccgaaacgaaactaaaaaaaaaacgcctaaacgcgacgccgaaaccctactaccctatcctcccgaccgcgactaaacgaaacgcgaaaccgcaacaaccaaaccgaactccccgtcgcgccccttccgaaacgaaaaaccctcgccgaaacgaaaactaaaacgcgcgaaacgaacgacgacgaaaaaccgcgaaaccgaaacgcaaaacgttttccccgaaaatacgacgtacgcccgcgacacaaaaatcttttaaaaacctcgcaacgcccttcccgactacgaaaactaaaaacccgaaaaaacgaaaccgaaatcgaaaataaccgcgcgaaaaaacgctaaaatcgaccaaaccccgcgattacgcccgaactaaaactcccgaactccttttataaaaaaaaacgaaaaacaaaaccctctccgaatctctaaaaataatcaattcgacttcgcaaaactacgtacccgaaataataa

SEQ ID NO: 3383 - DNA, 638 bp, Artificial Sequence
  chemically treated genomic DNA (Homo sapiens) CpG-island No: 3383
tttaagtttaggttttagggtgtgcggggaaaggttcggttttgttcggcgcggttcgttttgggtattaggggtcgtttttgtttagcggaagttacgcgggcgcgttcggtcgtcgtaggttttttcggatcgggaaaagcgaggcgttttcggggcggggttggggagggggcgtttgggcgcggcgtcgggattttgttgttttgttttttcggtcgcggttggacggagcgcggggtcgtagtaattaggtcgggtttttcgtcgcgtttttttcggagcgggaggttttcgtcgaggcggaggttgggacgcgcggggcgggcggcggcggggagtcgcggggtcgaggcgtagggcgtttttttcggaggtgcggcgtgcgttcgcgatataaaggttttttaaagatttcgtagcgtttttttcggttgcggaggttggaggttcgggggggcgaggtcggggtcgggggtggtcgcgcgagggggcgttgggatcggttagatttcgcggttgcgttcgggttggggttttcgggttttttttgtggaaaagagcggaaagtagggtttttttcgggtttttgaaaatggttagttcggtttcgtagggttgcgtgttcggaataataa

SEQ ID NO: 3384 - DNA, 638 bp, Artificial Sequence
  chemically treated genomic DNA (Homo sapiens) CpG-island No: 3384
ttattattccgaacacgcaaccctacgaaaccgaactaaccattttcaaaaacccgaaaaaaaccctactttccgctcttttccacaaaaaaaacccgaaaaccccaacccgaacgcaaccgcgaaatctaaccgatcccaacgccccctcgcgcgaccacccccgaccccgacctcgcccccccgaacctccaacctccgcaaccgaaaaaaacgctacgaaatctttaaaaaacctttatatcgcgaacgcacgccgcacctccgaaaaaaacgccctacgcctcgaccccgcgactccccgccgccgcccgccccgcgcgtcccaacctccgcctcgacgaaaacctcccgctccgaaaaaaacgcgacgaaaaacccgacctaattactacgaccccgcgctccgtccaaccgcgaccgaaaaaacaaaacaacaaaatcccgacgccgcgcccaaacgccccctccccaaccccgccccgaaaacgcctcgcttttcccgatccgaaaaaacctacgacgaccgaacgcgcccgcgtaacttccgctaaacaaaaacgacccctaatacccaaaacgaaccgcgccgaacaaaaccgaacctttccccgcacaccctaaaacctaaacttaaa

SEQ ID NO: 3385 - DNA, 666 bp, Artificial Sequence
  chemically treated genomic DNA (Homo sapiens) CpG-island No: 3385
atcgttcgtttttaatttgcggtacgttttttttttcgttatcgtgtgtttttttttttatcgagtatttttttttttgttatcgtgtatttttttaagcggcgttattttttttgttatcgtgagttttttttttattgggcgtttttttttttatcgtcgtgcgttttttaatttgtggtatttttcgtttcgtcgtttttcgtttagttagataaatgttcggtttgcgtggtcgttgtttttggcgtcgtttgttagttcgtagttaaaataaatagtttaagagttattttttttttcgtggggggaatttttataacgacggttggttttagtcgcggtaggaagtggttttttgggttaacgatttaattttattgattaggtcgttgagggtagaattcgggaatgggattcggagcgcgggggcggaggtagagtttcgtcgtggttacgcgattatttgtgttttcgcggggattttatcgtcgatagcggttattattttataacgtaggtgcggaaggtttttgtcgagttatatttgtttattttttcgtgcgggggtgttgtgcgtttgtttttttttaaaattatggataggttaggattttacgtttggttgattgaggacgaattagtgagtgattgcgtgattttatt

SEQ ID NO: 3386 - DNA, 666 bp, Artificial Sequence
  chemically treated genomic DNA (Homo sapiens) CpG-island No: 3386
aataaaatcacgcaatcactcactaattcgtcctcaatcaaccaaacgtaaaatcctaacctatccataattttaaaaaaaaacaaacgcacaacacccccgcacgaaaaaataaacaaatataactcgacaaaaaccttccgcacctacgttataaaataataaccgctatcgacgataaaatccccgcgaaaacacaaataatcgcgtaaccacgacgaaactctacctccgcccccgcgctccgaatcccattcccgaattctaccctcaacgacctaatcaataaaattaaatcgttaacccaaaaaaccacttcctaccgcgactaaaaccaaccgtcgttataaaaattccccccacgaaaaaaaaaataactcttaaactatttattttaactacgaactaacaaacgacgccaaaaacaacgaccacgcaaaccgaacatttatctaactaaacgaaaaacgacgaaacgaaaaataccacaaattaaaaaacgcacgacgataaaaaaaaaaacgcccaataaaaaaaaaactcacgataacaaaaaaaataacgccgcttaaaaaaatacacgataacaaaaaaaaaaatactcgataaaaaaaaaaacacacgataacgaaaaaaaaaacgtaccgcaaattaaaaacgaacgat

SEQ ID NO: 3387 - DNA, 666 bp, Artificial Sequence
  chemically treated genomic DNA (Homo sapiens) CpG-island No: 3387
aataaagttacgtagttatttattggttcgtttttaattaattaggcgtggagttttaatttgtttatgattttaagaaagggtaggcgtataatattttcgtacggagaaatgaataggtgtggttcggtagaggtttttcgtatttgcgttatggagtggtggtcgttgtcggcgatggggttttcgcgagggtataagtgatcgcgtggttacggcgaggttttgttttcgttttcgcgtttcgggttttattttcgaattttgtttttagcggtttggttaatgaggttggatcgttggtttagaaagttattttttgtcgcgattggagttagtcgtcgttgtgaaaattttttttacggggaaggaagtggtttttgggttgtttattttggttgcgggttagtagacggcgttaggggtagcggttacgtagatcgggtatttgtttagttgggcgggaggcggcggagcgggaagtgttatagattgaggggcgtacggcggtggagggaggggcgtttagtggagagggggtttacggtgatagaggaagtggcgtcgtttgggggggtgtacgatggtagggggaggggtgttcggtggagggaggggtatacggtggcggggggaggggcgtgtcgtagattgagggcgaacggt

SEQ ID NO: 3388 - DNA, 666 bp, Artificial Sequence
  chemically treated genomic DNA (Homo sapiens) CpG-island No: 3388
accgttcgccctcaatctacgacacgcccctccccccgccaccgtatacccctccctccaccgaacacccctccccctaccatcgtacacccccccaaacgacgccacttcctctatcaccgtaaaccccctctccactaaacgcccctccctccaccgccgtacgcccctcaatctataacacttcccgctccgccgcctcccgcccaactaaacaaatacccgatctacgtaaccgctacccctaacgccgtctactaacccgcaaccaaaataaacaacccaaaaaccacttccttccccgtaaaaaaaattttcacaacgacgactaactccaatcgcgacaaaaaataactttctaaaccaacgatccaacctcattaaccaaaccgctaaaaacaaaattcgaaaataaaacccgaaacgcgaaaacgaaaacaaaacctcgccgtaaccacgcgatcacttataccctcgcgaaaaccccatcgccgacaacgaccaccactccataacgcaaatacgaaaaacctctaccgaaccacacctattcatttctccgtacgaaaatattatacgcctaccctttcttaaaatcataaacaaattaaaactccacgcctaattaattaaaaacgaaccaataaataactacgtaactttatt

SEQ ID NO: 3389 - DNA, 906 bp, Artificial Sequence
  chemically treated genomic DNA (Homo sapiens) CpG-island No: 3389
ggttcggcgcgtttttcgcgtttttttttcgcgtttatttggcgtaggtgttgtagtagcgttttcgttttttttcgtcggttttggcgtattattcgtagtagtttttggattatgtcgattcgtcggtggtaggggggtattttcgcgttcgcgcgtttcgttttgttttcggcgcgtagtagtagcgacgtttagaagttcggtcgttcgcgtcgggggttcggcgcggcgtcggggttggtttttttcgttaggttgtttttggtttgtcgggtgtttatgtcgtcgtcgttcgtcgggatttttcgttttgggtcgcgaggtcgcgttttcgttaatcgttcgtttttcggtcgttcgtgcgcgttcgtttttcgggttgtaattttgggggaattgttgcgcgcgggcgtcgcgggggcgggcgggcgggcggttgtcggcgtttttcgcgttttttttttttggttattcgggcgcgtttttcgggcgttcgtcgtcggttcgttcgtcggtttcgtttcggttcggttcggttcgtttcgtttttcgttttcgcgtcggagtttcgcggcgtcgcgcgttttttttttttcgggttttcgttttttttcgtttcgcggtttcgggttggggattattattaggcgttttttgtttgcgttttttcggtagtcgcgttttttgcgggcggtagtgttgcgtttttcggggtcgtggcgcgggggcgaggggaataggtaggttttatgggtcgtcgttttcggtttttatcgggtttttcgacgtttttattatcgcgcgttcggtgcgtcgggcgagatggggaaagtttggagtatgggggtgtgtgtgttggggggtttttttaggtttagagtcgggttttttaaggtgggtttt

SEQ ID NO: 3390 - DNA, 906 bp, Artificial Sequence
  chemically treated genomic DNA (Homo sapiens) CpG-island No: 3390
aaaacccaccttaaaaaacccgactctaaacctaaaaaaaccccccaacacacacacccccatactccaaactttccccatctcgcccgacgcaccgaacgcgcgataataaaaacgtcgaaaaacccgataaaaaccgaaaacgacgacccataaaacctacctattcccctcgcccccgcgccacgaccccgaaaaacgcaacactaccgcccgcaaaaaacgcgactaccgaaaaaacgcaaacaaaaaacgcctaataataatccccaacccgaaaccgcgaaacgaaaaaaaacgaaaacccgaaaaaaaaaaaacgcgcgacgccgcgaaactccgacgcgaaaacgaaaaacgaaacgaaccgaaccgaaccgaaacgaaaccgacgaacgaaccgacgacgaacgcccgaaaaacgcgcccgaataaccaaaaaaaaaaaacgcgaaaaacgccgacaaccgcccgcccgcccgcccccgcgacgcccgcgcgcaacaattcccccaaaattacaacccgaaaaacgaacgcgcacgaacgaccgaaaaacgaacgattaacgaaaacgcgacctcgcgacccaaaacgaaaaatcccgacgaacgacgacgacataaacacccgacaaaccaaaaacaacctaacgaaaaaaaccaaccccgacgccgcgccgaacccccgacgcgaacgaccgaacttctaaacgtcgctactactacgcgccgaaaacaaaacgaaacgcgcgaacgcgaaaatacccccctaccaccgacgaatcgacataatccaaaaactactacgaataatacgccaaaaccgacgaaaaaaaacgaaaacgctactacaacacctacgccaaataaacgcgaaaaaaaaacgcgaaaaacgcgccgaacc

SEQ ID NO: 3391 - DNA, 906 bp, Artificial Sequence
  chemically treated genomic DNA (Homo sapiens) CpG-island No: 3391
ggaatttattttgagaaattcgattttgggtttaagagagttttttaatatatatatttttatgttttaaattttttttatttcgttcgacgtatcgggcgcgcggtggtggaagcgtcggggagttcggtggggatcgagagcgacggtttatggggtttgtttgtttttttcgttttcgcgttacggtttcgggaagcgtagtattgtcgttcgtaggaggcgcgattgtcgagaggacgtaggtagggggcgtttggtggtggtttttagttcggagtcgcggggcgggaaggagcgggagttcgagaagagggaggcgcgcgacgtcgcggagtttcggcgcggaggcggggggcggggcgggtcgagtcgggtcggggcggggtcggcgggcgggtcggcggcgagcgttcggggagcgcgttcgggtagttaagagggaggagcgcggggagcgtcgatagtcgttcgttcgttcgttttcgcgacgttcgcgcgtaatagtttttttaaagttgtagttcgggaggcgagcgcgtacgggcggtcgaggggcgggcggttggcggggacgcggtttcgcggtttagagcggagagtttcggcgggcggcggcggtatgggtattcggtagattaagggtagtttggcggagagagttagtttcggcgtcgcgtcgggttttcgacgcgaacggtcggatttttgggcgtcgttgttgttgcgcgtcggggataaggcggggcgcgcgggcgcggggatgtttttttattatcggcgagtcggtatggtttaggagttgttgcggatggtgcgttagggtcggcgggaggaggcggggacgttgttgtagtatttgcgttaggtgagcgcggggagggggcgcggggggcgcgtcgggtt

SEQ ID NO: 3392 - DNA, 906 bp, Artificial Sequence
  chemically treated genomic DNA (Homo sapiens) CpG-island No: 3392
aacccgacgcgccccccgcgccccctccccgcgctcacctaacgcaaatactacaacaacgtccccgcctcctcccgccgaccctaacgcaccatccgcaacaactcctaaaccataccgactcgccgataataaaaaaacatccccgcgcccgcgcgccccgccttatccccgacgcgcaacaacaacgacgcccaaaaatccgaccgttcgcgtcgaaaacccgacgcgacgccgaaactaactctctccgccaaactacccttaatctaccgaatacccataccgccgccgcccgccgaaactctccgctctaaaccgcgaaaccgcgtccccgccaaccgcccgcccctcgaccgcccgtacgcgctcgcctcccgaactacaactttaaaaaaactattacgcgcgaacgtcgcgaaaacgaacgaacgaacgactatcgacgctccccgcgctcctccctcttaactacccgaacgcgctccccgaacgctcgccgccgacccgcccgccgaccccgccccgacccgactcgacccgccccgccccccgcctccgcgccgaaactccgcgacgtcgcgcgcctccctcttctcgaactcccgctccttcccgccccgcgactccgaactaaaaaccaccaccaaacgccccctacctacgtcctctcgacaatcgcgcctcctacgaacgacaatactacgcttcccgaaaccgtaacgcgaaaacgaaaaaaacaaacaaaccccataaaccgtcgctctcgatccccaccgaactccccgacgcttccaccaccgcgcgcccgatacgtcgaacgaaataaaaaaaatttaaaacataaaaatatatatattaaaaaactctcttaaacccaaaatcgaatttctcaaaataaattcc

SEQ ID NO: 3393 - DNA, 539 bp, Artificial Sequence
  chemically treated genomic DNA (Homo sapiens) CpG-island No: 3393
tcggggatcgtgcgacgcgtaacgttgggattgggtttatagtagtttttatttcgtttttgttttttcgtaagttacgagtacgggagttcgcgcgtggacgggttcgggttgttattgatcgcgcggatattcgcgcgttgcgttcggatattaatatttgtcgttgggattcggtcgacgggtagtcggagcggttttaaggttataggtaataatggcgacgttggtataggcgtttgcgtggcgggtttagtttcgagcggtagcggattttcgggtttcgttatttttttttttcgtaaagtatagagtgtttcggttaggagttgtacgttttagttcggttttgagaagttcggtttagaaatttcggcgtttttgtttagtcgcgatttcgtttcggcgttattgcgtatgtgcgttagaggaacgttgcgcgttcgtagagttaatcggagtttaagttgtcgtttttttttttcgcgtttttggttttggatttgtttttatggtaattttttttatttatcgttttg

SEQ ID NO: 3394 - DNA, 539 bp, Artificial Sequence
  chemically treated genomic DNA (Homo sapiens) CpG-island No: 3394
caaaacgataaataaaaaaaattaccataaaaacaaatccaaaaccaaaaacgcgaaaaaaaaaaacgacaacttaaactccgattaactctacgaacgcgcaacgttcctctaacgcacatacgcaataacgccgaaacgaaatcgcgactaaacaaaaacgccgaaatttctaaaccgaacttctcaaaaccgaactaaaacgtacaactcctaaccgaaacactctatactttacgaaaaaaaaaaataacgaaacccgaaaatccgctaccgctcgaaactaaacccgccacgcaaacgcctataccaacgtcgccattattacctataaccttaaaaccgctccgactacccgtcgaccgaatcccaacgacaaatattaatatccgaacgcaacgcgcgaatatccgcgcgatcaataacaacccgaacccgtccacgcgcgaactcccgtactcgtaacttacgaaaaaacaaaaacgaaataaaaactactataaacccaatcccaacgttacgcgtcgcacgatccccga

SEQ ID NO: 3395 - DNA, 539 bp, Artificial Sequence
  chemically treated genomic DNA (Homo sapiens) CpG-island No: 3395
tagagcgatgggtggaggaggttgttatggagataggtttagggttagaggcgcgggagggggaggcggtagtttgggtttcgattggttttgcgggcgcgtagcgtttttttggcgtatatgcgtagtgacgtcgaggcgaggtcgcggttaagtagaggcgtcggggtttttgggtcgggttttttaggatcgggttggaacgtgtagtttttggtcgggatattttgtgttttgcggggaagggaagtggcggagttcgaggattcgttgtcgttcgggattgagttcgttacgtaggcgtttgtgttagcgtcgttattgttgtttgtggttttagggtcgtttcggttgttcgtcggtcgggttttagcgataggtattgatgttcgggcgtagcgcgcgagtgttcgcgcgattagtgatagttcgagttcgtttacgcgcgggttttcgtgttcgtggtttgcgggagggtaaagacggggtggaggttgttgtgggtttagttttagcgttgcgcgtcgtacggttttcga

SEQ ID NO: 3396 - DNA, 539 bp, Artificial Sequence
  chemically treated genomic DNA (Homo sapiens) CpG-island No: 3396
tcgaaaaccgtacgacgcgcaacgctaaaactaaacccacaacaacctccaccccgtctttaccctcccgcaaaccacgaacacgaaaacccgcgcgtaaacgaactcgaactatcactaatcgcgcgaacactcgcgcgctacgcccgaacatcaatacctatcgctaaaacccgaccgacgaacaaccgaaacgaccctaaaaccacaaacaacaataacgacgctaacacaaacgcctacgtaacgaactcaatcccgaacgacaacgaatcctcgaactccgccacttcccttccccgcaaaacacaaaatatcccgaccaaaaactacacgttccaacccgatcctaaaaaacccgacccaaaaaccccgacgcctctacttaaccgcgacctcgcctcgacgtcactacgcatatacgccaaaaaaacgctacgcgcccgcaaaaccaatcgaaacccaaactaccgcctccccctcccgcgcctctaaccctaaacctatctccataacaacctcctccacccatcgctcta

SEQ ID NO: 3397 - DNA, 807 bp, Artificial Sequence
  chemically treated genomic DNA (Homo sapiens) CpG-island No: 3397
tgaggtataggcggtttattttgtatagttcgtttcgatttattagtagggttattagttagatgttcgcgtttagtacgtttacgttatgtattatttcgtttatcgttgtttttaaaaaatagtttgggaattttagttttttttttagtttttgggcgttggtttttagtaatagcgaaacggttcgtatgggtcgggcgttttgggatttcgcgtgtaggatttttcgggattcggaaaggttcgcggggcggcggcgcggcggtcgggtttatcgatttcgcgtttgtagaacgtttttcgttcgtttatgttcgttcggtaagcgtaagcgtagagttcggcgtcgggtttcgcgtttttgcgcggttgattgaggtcgaatttgaagttgaggcgcggcggcggcgcgggcggcgagtcgggggtcggtataacggcgcgcggtcggttggggtgggtagggtcggcggggttttcggcggcgcgcgcgcgcggtcgggcggcggggaagcgtagggttcgtgagcgcgcgcgtttcggggtttttttcgtcgcgggttcgcggcgcggcgacgcgcggttttcggtttgcgttaggcgcgggtttgtgggagcgtgtgcggttttacggaaggtggttcggttgtcggtcggcggttgaggtttgggcgttttttttttagattttcgtttcgtttttagggtttcgtattatatcgattttattttttttttttatcggagtttcgggggatgattcgacgattaaatagaggagttagaaagttttagttgttattt

SEQ ID NO: 3398 - DNA, 807 bp, Artificial Sequence
  chemically treated genomic DNA (Homo sapiens) CpG-island No: 3398
aaataacaactaaaactttctaactcctctatttaatcgtcgaatcatcccccgaaactccgataaaaaaaaaaaataaaatcgatataatacgaaaccctaaaaacgaaacgaaaatctaaaaaaaaaacgcccaaacctcaaccgccgaccgacaaccgaaccaccttccgtaaaaccgcacacgctcccacaaacccgcgcctaacgcaaaccgaaaaccgcgcgtcgccgcgccgcgaacccgcgacgaaaaaaaccccgaaacgcgcgcgctcacgaaccctacgcttccccgccgcccgaccgcgcgcgcgcgccgccgaaaaccccgccgaccctacccaccccaaccgaccgcgcgccgttataccgacccccgactcgccgcccgcgccgccgccgcgcctcaacttcaaattcgacctcaatcaaccgcgcaaaaacgcgaaacccgacgccgaactctacgcttacgcttaccgaacgaacataaacgaacgaaaaacgttctacaaacgcgaaatcgataaacccgaccgccgcgccgccgccccgcgaacctttccgaatcccgaaaaatcctacacgcgaaatcccaaaacgcccgacccatacgaaccgtttcgctattactaaaaaccaacgcccaaaaactaaaaaaaaaactaaaattcccaaactattttttaaaaacaacgataaacgaaataatacataacgtaaacgtactaaacgcgaacatctaactaataaccctactaataaatcgaaacgaactatacaaaataaaccgcctatacctca

SEQ ID NO: 3399 - DNA, 807 bp, Artificial Sequence
  chemically treated genomic DNA (Homo sapiens) CpG-island No: 3399
aaatgatagttagagttttttggtttttttgtttaatcgtcggattatttttcgaagtttcggtggagagaaaaagtaagatcggtgtagtgcggagttttgggagcggagcggggatttggggagggggcgtttaggttttagtcgtcggtcgataatcgggttatttttcgtgaggtcgtatacgtttttataggttcgcgtttggcgtaagtcgagaatcgcgcgtcgtcgcgtcgcgggttcgcgacggaggaagtttcgagacgcgcgcgtttacgggttttacgttttttcgtcgttcggtcgcgcgcgcgcgtcgtcgagggtttcgtcggttttgtttattttaatcggtcgcgcgtcgttgtgtcggttttcggttcgtcgttcgcgtcgtcgtcgcgttttagttttagattcggttttagttagtcgcgtagggacgcggagttcggcgtcgagttttgcgtttgcgtttgtcgggcgggtatggacgggcgagaggcgttttgtaagcgcgaaatcggtgagttcggtcgtcgcgtcgtcgtttcgcgagttttttcgagtttcggagaattttgtacgcgagattttagggcgttcgatttatgcgggtcgtttcgttgttgttaaaaattaacgtttagggattgggagaggaattggggtttttaaattgttttttggaagtagcgatgaacgggatagtgtatgacgtggacgtgttgggcgcgggtatttggttggtgattttgttggtggatcgggacgggttgtataagatgaatcgtttgtatttta

SEQ ID NO: 3400 - DNA, 807 bp, Artificial Sequence
  chemically treated genomic DNA (Homo sapiens) CpG-island No: 3400
taaaatacaaacgattcatcttatacaacccgtcccgatccaccaacaaaatcaccaaccaaatacccgcgcccaacacgtccacgtcatacactatcccgttcatcgctacttccaaaaaacaatttaaaaaccccaattcctctcccaatccctaaacgttaatttttaacaacaacgaaacgacccgcataaatcgaacgccctaaaatctcgcgtacaaaattctccgaaactcgaaaaaactcgcgaaacgacgacgcgacgaccgaactcaccgatttcgcgcttacaaaacgcctctcgcccgtccatacccgcccgacaaacgcaaacgcaaaactcgacgccgaactccgcgtccctacgcgactaactaaaaccgaatctaaaactaaaacgcgacgacgacgcgaacgacgaaccgaaaaccgacacaacgacgcgcgaccgattaaaataaacaaaaccgacgaaaccctcgacgacgcgcgcgcgcgaccgaacgacgaaaaaacgtaaaacccgtaaacgcgcgcgtctcgaaacttcctccgtcgcgaacccgcgacgcgacgacgcgcgattctcgacttacgccaaacgcgaacctataaaaacgtatacgacctcacgaaaaataacccgattatcgaccgacgactaaaacctaaacgccccctccccaaatccccgctccgctcccaaaactccgcactacaccgatcttactttttctctccaccgaaacttcgaaaaataatccgacgattaaacaaaaaaaccaaaaaactctaactatcattt

SEQ ID NO: 3401 - DNA, 1040 bp, Artificial Sequence
  chemically treated genomic DNA (Homo sapiens) CpG-island No: 3401
ttttcgtttcgcggcgtcggttcgttttgttttttaattggcgagtcgtatcgtcggttttagtacggagggtatgtgacggcgttagtgttttaggttagatttatttcggtcgtagcgagggttggtttttttttgtcgtagtgttgcgtgtcgtcgtcgtacgttcggggtagttggggtcgggcgtcgcggttttcgtagatggaggtataaaaatatcggttacggcgaggagttatgattgaggcggcggcggtcgcgttttttggcggttcgcgggggcggcgcggcgggcgttttttggcggcgcgtcggggtggagcggtttttcgtcgtcgtagtcgtagtcggcggaggcgttgttgtttttttttttcgtgttttcggcgttcgttcgtttgttcgttcgttttatttttttttcgttttagattaaagggggggagggaaaaggagttcggtcgttatttttttagtgtcgtcgttatcgtcgttatcgttcgtcgagtcggcgggagaatcgagtatcgtagcgaagtcgattcgtttcgtcgcggcggcgcggggggcggttgaagcgcgtttttcggttggaaagaggcggtcgggggtggcggtttgggtgcgggttcgggttgtagacggcggtgtttgtttgtgcggggcgggggggcggttttattttttgttttcgttcgttcgttttttcggtcgggttgcggtttttagtcgtgttcgggtttcgtcggtgcggagtaaggtcgggaaagggttcgaaagagaagaaaaagtagtcgtttttcgtcgtcgtttttttttttttttttgtttcgttttttcgttcggaaagttagggcggtttcgggcgtcggggggaggagagcggcgggttcgggtcggagtcgtcgtcgcgcgttttcgttcgtcgttggttttcggcgtttaggtcggggggttgtttgtaaattgcgtttattttgtggggttgaattcgttcgggttacgtttttttattacgtggtaggtgttgttgttgt

SEQ ID NO: 3402 - DNA, 1040 bp, Artificial Sequence
  chemically treated genomic DNA (Homo sapiens) CpG-island No: 3402
acaacaacaacacctaccacgtaataaaaaaacgtaacccgaacgaattcaaccccacaaaataaacgcaatttacaaacaaccccccgacctaaacgccgaaaaccaacgacgaacgaaaacgcgcgacgacgactccgacccgaacccgccgctctcctccccccgacgcccgaaaccgccctaactttccgaacgaaaaaacgaaacaaaaaaaaaaaaaaaaacgacgacgaaaaacgactactttttcttctctttcgaaccctttcccgaccttactccgcaccgacgaaacccgaacacgactaaaaaccgcaacccgaccgaaaaaacgaacgaacgaaaacaaaaaataaaaccgcccccccgccccgcacaaacaaacaccgccgtctacaacccgaacccgcacccaaaccgccacccccgaccgcctctttccaaccgaaaaacgcgcttcaaccgccccccgcgccgccgcgacgaaacgaatcgacttcgctacgatactcgattctcccgccgactcgacgaacgataacgacgataacgacgacactaaaaaaataacgaccgaactccttttccctccccccctttaatctaaaacgaaaaaaaaataaaacgaacgaacaaacgaacgaacgccgaaaacacgaaaaaaaaaaacaacaacgcctccgccgactacgactacgacgacgaaaaaccgctccaccccgacgcgccgccaaaaaacgcccgccgcgccgcccccgcgaaccgccaaaaaacgcgaccgccgccgcctcaatcataactcctcgccgtaaccgatatttttatacctccatctacgaaaaccgcgacgcccgaccccaactaccccgaacgtacgacgacgacacgcaacactacgacaaaaaaaaaccaaccctcgctacgaccgaaataaatctaacctaaaacactaacgccgtcacataccctccgtactaaaaccgacgatacgactcgccaattaaaaaacaaaacgaaccgacgccgcgaaacgaaaa

SEQ ID NO: 3403 - DNA, 1040 bp, Artificial Sequence
  chemically treated genomic DNA (Homo sapiens) CpG-island No: 3403
gtagtagtagtatttattacgtgatggaggagcgtagttcgggcggatttagttttataaaatgggcgtagtttgtaaatagtttttcggtttgggcgtcgagggttagcggcgggcgggggcgcgcgacggcggtttcggttcgggttcgtcgttttttttttttcgacgttcggagtcgttttgatttttcgggcgggggggcgaggtagagggggaggggaaggcggcggcggggagcggttgtttttttttttttttcgggttttttttcggttttgtttcgtatcgacggggttcgagtacggttggagatcgtagttcggtcgggagggcgggcgggcgggggtagagagtgaaatcgttttttcgtttcgtataaataagtatcgtcgtttgtagttcgaattcgtatttaggtcgttattttcggtcgtttttttttagtcggggagcgcgttttagtcgtttttcgcgtcgtcgcggcgagacgagtcggtttcgttacggtgttcggttttttcgtcggttcggcgagcggtggcggcggtggcggcggtattgggaaaatggcggtcgagttttttttttttttttttttttaatttgaagcggagggagaatggagcgagcgagtaagcgggcgagcgtcggggatacggggaggagggatagtagcgttttcgtcggttgcggttgcggcggcgaagggtcgttttatttcggcgcgtcgttagggggcgttcgtcgcgtcgttttcgcgggtcgttaggaggcgcggtcgtcgtcgttttagttatggtttttcgtcgtggtcgatgtttttgtatttttatttgcggaggtcgcggcgttcggttttagttgtttcggacgtgcggcgacggtacgtagtattgcggtagggggaagttagttttcgttgcggtcgaggtgagtttaatttgaggtattgacgtcgttatatgtttttcgtgttggggtcggcggtgcggttcgttagttgaggggtagggcgggtcggcgtcgcggagcgagag

SEQ ID NO: 3404 - DNA, 1040 bp, Artificial Sequence
  chemically treated genomic DNA (Homo sapiens) CpG-island No: 3404
ctctcgctccgcgacgccgacccgccctacccctcaactaacgaaccgcaccgccgaccccaacacgaaaaacatataacgacgtcaatacctcaaattaaactcacctcgaccgcaacgaaaactaacttccccctaccgcaatactacgtaccgtcgccgcacgtccgaaacaactaaaaccgaacgccgcgacctccgcaaataaaaatacaaaaacatcgaccacgacgaaaaaccataactaaaacgacgacgaccgcgcctcctaacgacccgcgaaaacgacgcgacgaacgccccctaacgacgcgccgaaataaaacgacccttcgccgccgcaaccgcaaccgacgaaaacgctactatccctcctccccgtatccccgacgctcgcccgcttactcgctcgctccattctccctccgcttcaaattaaaaaaaaaaaaaaaaaaaaaactcgaccgccattttcccaataccgccgccaccgccgccaccgctcgccgaaccgacgaaaaaaccgaacaccgtaacgaaaccgactcgtctcgccgcgacgacgcgaaaaacgactaaaacgcgctccccgactaaaaaaaaacgaccgaaaataacgacctaaatacgaattcgaactacaaacgacgatacttatttatacgaaacgaaaaaacgatttcactctctacccccgcccgcccgccctcccgaccgaactacgatctccaaccgtactcgaaccccgtcgatacgaaacaaaaccgaaaaaaaacccgaaaaaaaaaaaaaaacaaccgctccccgccgccgccttcccctccccctctacctcgcccccccgcccgaaaaatcaaaacgactccgaacgtcgaaaaaaaaaaaacgacgaacccgaaccgaaaccgccgtcgcgcgcccccgcccgccgctaaccctcgacgcccaaaccgaaaaactatttacaaactacgcccattttataaaactaaatccgcccgaactacgctcctccatcacgtaataaatactactactac

SEQ ID NO: 3405 - DNA, 508 bp, Artificial Sequence
  chemically treated genomic DNA (Homo sapiens) CpG-island No: 3405
tgcggcggcggtagcgaagttttgagtcgtggggaggtgggttttcgcgttcgggcgtcggggtagtttcgggttttttgcgaggtttgcggcgcggtttttagggaggaggtggcggttgtggcggtcggaatcgcgattttggtcggatttagtttcgcggtggacgtagggcggaggtcgagtttcgttaggagtttttgtcgagtcggagggaggcgtatttggcgtttcggtattagcggtagtcgggggttcggagcggttggaggagcgtagtgggaattgggaagagttagttcggttggagggcggatttttgcgttcgggagtcgggttttaggtatcgttgggggcgaagttacgcgttttttcgggtagttaattttatacgcgtttgtgtgcggtttcgggtattttagtaagttttagtattcgggcgcgggtaacgggaagcgtagaattaaatttttagcgtttaggttatttttttagatttagttttgta

SEQ ID NO: 3406 - DNA, 508 bp, Artificial Sequence
  chemically treated genomic DNA (Homo sapiens) CpG-island No: 3406
tacaaaactaaatctaaaaaaataacctaaacgctaaaaatttaattctacgcttcccgttacccgcgcccgaatactaaaacttactaaaatacccgaaaccgcacacaaacgcgtataaaattaactacccgaaaaaacgcgtaacttcgcccccaacgatacctaaaacccgactcccgaacgcaaaaatccgccctccaaccgaactaactcttcccaattcccactacgctcctccaaccgctccgaacccccgactaccgctaataccgaaacgccaaatacgcctccctccgactcgacaaaaactcctaacgaaactcgacctccgccctacgtccaccgcgaaactaaatccgaccaaaatcgcgattccgaccgccacaaccgccacctcctccctaaaaaccgcgccgcaaacctcgcaaaaaacccgaaactaccccgacgcccgaacgcgaaaacccacctccccacgactcaaaacttcgctaccgccgccgca

SEQ ID NO: 3407 - DNA, 508 bp, Artificial Sequence
  chemically treated genomic DNA (Homo sapiens) CpG-island No: 3407
tgtaaggttgggtttggggaggtgatttgggcgttggggatttggttttgcgtttttcgttattcgcgttcgggtgttagagtttattgggatgttcggaatcgtatataggcgcgtgtgaaattggttgttcgaaaagacgcgtggtttcgtttttagcggtgtttgagattcggttttcggacgtagaggttcgttttttagtcgggttagttttttttagtttttattgcgtttttttagtcgtttcggattttcggttgtcgttggtatcgaagcgttagatgcgttttttttcggttcggtaaagatttttggcggggttcggttttcgttttgcgtttatcgcggggttgggttcggttaaggtcgcggtttcggtcgttatagtcgttattttttttttaggagtcgcgtcgtaggtttcgtagagggttcggggttgtttcggcgttcgagcgcggggatttatttttttacggtttaaggtttcgttgtcgtcgtcgta

SEQ ID NO: 3408 - DNA, 508 bp, Artificial Sequence
  chemically treated genomic DNA (Homo sapiens) CpG-island No: 3408
tacgacgacgacaacgaaaccttaaaccgtaaaaaaataaatccccgcgctcgaacgccgaaacaaccccgaaccctctacgaaacctacgacgcgactcctaaaaaaaaaataacgactataacgaccgaaaccgcgaccttaaccgaacccaaccccgcgataaacgcaaaacgaaaaccgaaccccgccaaaaatctttaccgaaccgaaaaaaaacgcatctaacgcttcgataccaacgacaaccgaaaatccgaaacgactaaaaaaacgcaataaaaactaaaaaaaactaacccgactaaaaaacgaacctctacgtccgaaaaccgaatctcaaacaccgctaaaaacgaaaccacgcgtcttttcgaacaaccaatttcacacgcgcctatatacgattccgaacatcccaataaactctaacacccgaacgcgaataacgaaaaacgcaaaaccaaatccccaacgcccaaatcacctccccaaacccaaccttaca

SEQ ID NO: 3409 - DNA, 508 bp, Artificial Sequence
  chemically treated genomic DNA (Homo sapiens) CpG-island No: 3409
ttcgagtacggaagagtataattttcggagaagcgttaagaatttattcgttttaggttgaggggtttacgaaggggattaaagggttaagtgttagtcgtagtagtcggcgcggtttcgtttttttagtttgatttattgcggttaggcgatcgggttatttgatcgtagtcgcggcgtcggtcgttcggttcgttgggaaacgtagtttcgggtggtttggtacgcgtaagcgtttcgcggggagtttttatcgttaggacgtagagtcgacggagttttcgggttttggcgaaagggggttgggaagcggatttcggcgaagagtagttaggaacggttggacggggtcgagagacgacgtagcggagtttgagggggtcggggttatagggagaggtaaatgagggtagaagtattttttagacggagacggggttgacggttgagtaaaaaaggggcgtgaatttggagtattggtatgaaaaaaaggtgggggtttagatgg

SEQ ID NO: 3410 - DNA, 508 bp, Artificial Sequence
  chemically treated genomic DNA (Homo sapiens) CpG-island No: 3410
ccatctaaacccccacctttttttcataccaatactccaaattcacgccccttttttactcaaccgtcaaccccgtctccgtctaaaaaatacttctaccctcatttacctctccctataaccccgaccccctcaaactccgctacgtcgtctctcgaccccgtccaaccgttcctaactactcttcgccgaaatccgcttcccaaccccctttcgccaaaacccgaaaactccgtcgactctacgtcctaacgataaaaactccccgcgaaacgcttacgcgtaccaaaccacccgaaactacgtttcccaacgaaccgaacgaccgacgccgcgactacgatcaaataacccgatcgcctaaccgcaataaatcaaactaaaaaaacgaaaccgcgccgactactacgactaacacttaaccctttaatccccttcgtaaacccctcaacctaaaacgaataaattcttaacgcttctccgaaaattatactcttccgtactcgaa

SEQ ID NO: 3411 - DNA, 508 bp, Artificial Sequence
  chemically treated genomic DNA (Homo sapiens) CpG-island No: 3411
ttatttgggtttttattttttttttatgttaatattttaagtttacgttttttttttgtttagtcgttagtttcgttttcgtttgaagagtgtttttgtttttatttgtttttttttgtgatttcggtttttttagatttcgttgcgtcgtttttcggtttcgtttagtcgtttttgattgtttttcgtcggagttcgttttttaattttttttcgttagagttcgagagtttcgtcggttttgcgttttggcggtggggatttttcgcggagcgtttgcgcgtgttaggttattcgggattacgttttttagcgggtcgagcggtcggcgtcgcggttgcggttaggtgattcggtcgtttggtcgtagtgagttaggttgggagggcggggtcgcgtcggttgttgcggttggtatttggttttttaatttttttcgtgggttttttaatttggagcggataaatttttggcgttttttcgggggttgtgttttttcgtattcgga

SEQ ID NO: 3412 - DNA, 508 bp, Artificial Sequence
  chemically treated genomic DNA (Homo sapiens) CpG-island No: 3412
tccgaatacgaaaaaacacaacccccgaaaaaacgccaaaaatttatccgctccaaattaaaaaacccacgaaaaaaattaaaaaaccaaataccaaccgcaacaaccgacgcgaccccgccctcccaacctaactcactacgaccaaacgaccgaatcacctaaccgcaaccgcgacgccgaccgctcgacccgctaaaaaacgtaatcccgaataacctaacacgcgcaaacgctccgcgaaaaatccccaccgccaaaacgcaaaaccgacgaaactctcgaactctaacgaaaaaaaattaaaaaacgaactccgacgaaaaacaatcaaaaacgactaaacgaaaccgaaaaacgacgcaacgaaatctaaaaaaaccgaaatcacaaaaaaaaacaaataaaaacaaaaacactcttcaaacgaaaacgaaactaacgactaaacaaaaaaaaaacgtaaacttaaaatattaacataaaaaaaaaataaaaacccaaataa

SEQ ID NO: 3413 - DNA, 1393 bp, Artificial Sequence
  chemically treated genomic DNA (Homo sapiens) CpG-island No: 3413
ggaaaaagcgtttcgcgggttttttaattgttcgttaatttcgttttttttttttttagtcgtgatttcgcgttttttggttcgttcgtcgggttgtgcgtaggcgtttcgggtaggggcggggcgcgcggtagggtcgttacgaagcggggcgcggtgggttaattagaaggttttattttcgggtggcgcgggcgttattttgtgaggagcgatataaacgggcgtagaggtcggttgttcgtttagttgttatttaggtgcgttagtttgcggagttcgttcgtgttgttttgcggtaaggttttttttagtgtttttacgcggaaggtaattgtttgagaggcgcggcgtcgtatcgtttagagttgaggaagtcggcgttagttcgcggggtttcgggtcgttatttagagttatgagttacggtcgtttttttttcgatgtggagggtatgattttttttaaggtggataatttgatttatcgtatttcgttcgatacgttgaggcgcgttttcgagaagtacgggcgcgtcggcgacgtgtatatttcgcgggatcgttatattaaggagtttcgcggtttcgttttcgttcgtttttacgataagcgcgacgttgaggacgttatggatgttatggacggggtcgtgttggacggtcgcgagttgcgggtgtaaatggcgcgttacggtcgtttttcggatttatattatagtcgtcggggatcgttatttcgtaggtacgggggcggtggttacggacgtcggagtcgtaggtaaacggggttgaggggatcgcgggaggcggggcggggcgcgcgggaggttcgggcgattttataaaggttcgcggcgaagtacgtggtgcgggttcggacggggcgggggtgtacgtcgcgtttcgcgatttttcggttatttcgcgagttttcgtcgtttgcgattcgggagtggtcggggtgtgggcggcgcggggcggaggatttcgtttcgcgattggggaaatggcgtttggcggcgagataatggcggtttgggcgggagcgcgcgggcggggtcggtttcgttgtttggaattaatttcgttgtgtttgttcgtttcgttcgtagttttaggcggcgtcgtcgtagtcgatttcggagtcggagtcgttttaggtttcgtagtcgatttcgttatagtcgttcgaagtttcggtttcgtattcgttttcgatttcggtcgatttttaagtttagattcgtacgaaggtttaagtttaagttttcgtcggtttttagatttcgttcgcggtttaggtttcggtttcggtttaggagtttttttttagtgtttaagagggaatttaaatttaggtcgcgatcgaagagtttttttaagttttttga

SEQ ID NO: 3414 - DNA, 1393 bp, Artificial Sequence
  chemically treated genomic DNA (Homo sapiens) CpG-island No: 3414
tcaaaaaacttaaaaaaactcttcgatcgcgacctaaatttaaattccctcttaaacactaaaaaaaaactcctaaaccgaaaccgaaacctaaaccgcgaacgaaatctaaaaaccgacgaaaacttaaacttaaaccttcgtacgaatctaaacttaaaaatcgaccgaaatcgaaaacgaatacgaaaccgaaacttcgaacgactataacgaaatcgactacgaaacctaaaacgactccgactccgaaatcgactacgacgacgccgcctaaaactacgaacgaaacgaacaaacacaacgaaattaattccaaacaacgaaaccgaccccgcccgcgcgctcccgcccaaaccgccattatctcgccgccaaacgccatttccccaatcgcgaaacgaaatcctccgccccgcgccgcccacaccccgaccactcccgaatcgcaaacgacgaaaactcgcgaaataaccgaaaaatcgcgaaacgcgacgtacacccccgccccgtccgaacccgcaccacgtacttcgccgcgaacctttataaaatcgcccgaacctcccgcgcgccccgccccgcctcccgcgatcccctcaaccccgtttacctacgactccgacgtccgtaaccaccgcccccgtacctacgaaataacgatccccgacgactataatataaatccgaaaaacgaccgtaacgcgccatttacacccgcaactcgcgaccgtccaacacgaccccgtccataacatccataacgtcctcaacgtcgcgcttatcgtaaaaacgaacgaaaacgaaaccgcgaaactccttaatataacgatcccgcgaaatatacacgtcgccgacgcgcccgtacttctcgaaaacgcgcctcaacgtatcgaacgaaatacgataaatcaaattatccaccttaaaaaaaatcataccctccacatcgaaaaaaaaacgaccgtaactcataactctaaataacgacccgaaaccccgcgaactaacgccgacttcctcaactctaaacgatacgacgccgcgcctctcaaacaattaccttccgcgtaaaaacactaaaaaaaaccttaccgcaaaacaacacgaacgaactccgcaaactaacgcacctaaataacaactaaacgaacaaccgacctctacgcccgtttatatcgctcctcacaaaataacgcccgcgccacccgaaaataaaaccttctaattaacccaccgcgccccgcttcgtaacgaccctaccgcgcgccccgcccctacccgaaacgcctacgcacaacccgacgaacgaaccaaaaaacgcgaaatcacgactaaaaaaaaaaaaaacgaaattaacgaacaattaaaaaacccgcgaaacgctttttcc

SEQ ID NO: 3415 - DNA, 1393 bp, Artificial Sequence
  chemically treated genomic DNA (Homo sapiens) CpG-island No: 3415
ttaggagatttggggggatttttcgatcgcgatttggatttggatttttttttggatattgggggaggatttttggatcgagatcgggatttggatcgcgaacgagatttggagatcgacgaggatttggatttggattttcgtgcggatttggatttggaggtcgatcgagatcgagaacgagtgcgggatcgagatttcgagcggttgtagcgagatcggttgcgagatttggaacgatttcgatttcgggatcggttgcggcgacgtcgtttagggttgcgggcgggacgagtaagtatagcggggttaattttaggtagcggggtcggtttcgttcgcgcgttttcgtttaggtcgttattatttcgtcgttagacgttatttttttagtcgcgaggcggggtttttcgtttcgcgtcgtttatatttcggttattttcgggtcgtagacggcggaagttcgcggggtggtcggagggtcgcgagacgcggcgtgtattttcgtttcgttcgggttcgtattacgtgtttcgtcgcggatttttgtgaggtcgttcgggtttttcgcgcgtttcgtttcgtttttcgcggtttttttagtttcgtttatttgcggtttcggcgttcgtagttatcgttttcgtatttgcggggtggcggttttcggcggttgtggtgtgagttcggggggcggtcgtagcgcgttatttgtattcgtagttcgcggtcgtttagtacggtttcgtttatggtatttatagcgtttttagcgtcgcgtttgtcgtgaaagcgaacgaaggcgaagtcgcgggattttttggtgtagcggtttcgcgggatgtatacgtcgtcgacgcgttcgtatttttcgaagacgcgttttagcgtgtcgggcgaggtgcggtaggttaggttgtttattttgagggaggttatattttttatatcgggaggggggcggtcgtagtttatagttttgagtggcggttcggagtttcgcgaattggcgtcggtttttttagttttgggcggtgcgacgtcgcgttttttaggtagttgtttttcgcgtggggatattgggaaaggttttgtcgtagaatagtacggacgggtttcgtaggttagcgtatttgagtaataattgggcgggtagtcggtttttgcgttcgtttatatcgttttttataaaatggcgttcgcgttattcggaaatgaaattttttgattggtttatcgcgtttcgtttcgtaacgattttgtcgcgcgtttcgtttttattcgaagcgtttgcgtatagttcggcgggcgggttaaaaagcgcggagttacggttggagggagggggagcggaattagcgggtagttggaaagttcgcgaaacgtttttttt

SEQ ID NO: 3416 - DNA, 1393 bp, Artificial Sequence
  chemically treated genomic DNA (Homo sapiens) CpG-island No: 3416
aaaaaaaacgtttcgcgaactttccaactacccgctaattccgctccccctccctccaaccgtaactccgcgctttttaacccgcccgccgaactatacgcaaacgcttcgaataaaaacgaaacgcgcgacaaaatcgttacgaaacgaaacgcgataaaccaatcaaaaaatttcatttccgaataacgcgaacgccattttataaaaaacgatataaacgaacgcaaaaaccgactacccgcccaattattactcaaatacgctaacctacgaaacccgtccgtactattctacgacaaaacctttcccaatatccccacgcgaaaaacaactacctaaaaaacgcgacgtcgcaccgcccaaaactaaaaaaaccgacgccaattcgcgaaactccgaaccgccactcaaaactataaactacgaccgcccccctcccgatataaaaaatataacctccctcaaaataaacaacctaacctaccgcacctcgcccgacacgctaaaacgcgtcttcgaaaaatacgaacgcgtcgacgacgtatacatcccgcgaaaccgctacaccaaaaaatcccgcgacttcgccttcgttcgctttcacgacaaacgcgacgctaaaaacgctataaataccataaacgaaaccgtactaaacgaccgcgaactacgaatacaaataacgcgctacgaccgccccccgaactcacaccacaaccgccgaaaaccgccaccccgcaaatacgaaaacgataactacgaacgccgaaaccgcaaataaacgaaactaaaaaaaccgcgaaaaacgaaacgaaacgcgcgaaaaacccgaacgacctcacaaaaatccgcgacgaaacacgtaatacgaacccgaacgaaacgaaaatacacgccgcgtctcgcgaccctccgaccaccccgcgaacttccgccgtctacgacccgaaaataaccgaaatataaacgacgcgaaacgaaaaaccccgcctcgcgactaaaaaaataacgtctaacgacgaaataataacgacctaaacgaaaacgcgcgaacgaaaccgaccccgctacctaaaattaaccccgctatacttactcgtcccgcccgcaaccctaaacgacgtcgccgcaaccgatcccgaaatcgaaatcgttccaaatctcgcaaccgatctcgctacaaccgctcgaaatctcgatcccgcactcgttctcgatctcgatcgacctccaaatccaaatccgcacgaaaatccaaatccaaatcctcgtcgatctccaaatctcgttcgcgatccaaatcccgatctcgatccaaaaatcctcccccaatatccaaaaaaaaatccaaatccaaatcgcgatcgaaaaatccccccaaatctcctaa

SEQ ID NO: 3417 - DNA, 1236 bp, Artificial Sequence
  chemically treated genomic DNA (Homo sapiens) CpG-island No: 3417
agcgttcgtattttcggttttttaggaatttagttaagttagtcgatattcgtttttgattttaggcgttttttggcgggtgttgttgtacgtatttgcgggacgtggatttttaggatagtttcgtcggttttcggattcggttttttcgagaatcgaaagcgttgggttcggattttttgttttcggaaatcgtgttcgtttagtagggcgtcgttgggtttcgggcgggcgggggatcgcggaaggtttcgggttgttagattgcgcgagcgggaagtcgcgggttacgtggtcgtagtatttgacggtaagaaggggaaagtttagatttggtgataattttgtcgcgttgcgagcgaagaaagttcggagtaaggcgaaagagatttatacgcgtagaattggtaacgggcggttggcgcgatcggaagtgatgggtatagcggtagcgcgggaggggaggggcggggcggggcggggcggtgacgtagtcgacgtgatttttttaatatggcggaggttcgtcgtatgtgaaggagtattttaggggagttaaagttaatggaaaatcgcgagaggcgtcggggcggggaagacggcggtcgtttgtttaattcgaggttcgggaggtggttggggagtgaattttttggaaggcgattttaaaggcgtcgggattgagcgaagggcgtttgggtattgtcgtcgtcgtcgtttaggtcggggaggggtgcgttagtgttaggaagcgggttgcgtcgaggtcgtagcggaattagttggcgatttcgtagaatgaattataagagtaagaagcgtattcgcgaggttaagcggagtgcgcggtcggagtttaaggattcgttggattggattcggtataattattacgagagtttttcgttgagttcggcggtcgtggcggtgagcgggtcgggcgggggtggttaggtcgggtatcggtatttttagtcgttacgtatttttttttgggttcgaggttgttttcgtttcgagcgttcgggatttcgtagaggtttattcgtatttcgcggagtttggggttttcgaggcgcggatttcggggcgggtttgttttttttcgtgttgtggtcgttcgtttgttttggcggacgacgggagttttacgtttgtggcgtttttaattagaaggttcgtcgtttttgatttttttgggcggcgggttttttaggggatttggttgttaaggtt

SEQ ID NO: 3418 - DNA, 1236 bp, Artificial Sequence
  chemically treated genomic DNA (Homo sapiens) CpG-island No: 3418
aaccttaacaaccaaatcccctaaaaaacccgccgcccaaaaaaatcaaaaacgacgaaccttctaattaaaaacgccacaaacgtaaaactcccgtcgtccgccaaaacaaacgaacgaccacaacacgaaaaaaaacaaacccgccccgaaatccgcgcctcgaaaaccccaaactccgcgaaatacgaataaacctctacgaaatcccgaacgctcgaaacgaaaacaacctcgaacccaaaaaaaaatacgtaacgactaaaaataccgatacccgacctaaccacccccgcccgacccgctcaccgccacgaccgccgaactcaacgaaaaactctcgtaataattataccgaatccaatccaacgaatccttaaactccgaccgcgcactccgcttaacctcgcgaatacgcttcttactcttataattcattctacgaaatcgccaactaattccgctacgacctcgacgcaacccgcttcctaacactaacgcacccctccccgacctaaacgacgacgacgacaatacccaaacgcccttcgctcaatcccgacgcctttaaaatcgccttccaaaaaattcactccccaaccacctcccgaacctcgaattaaacaaacgaccgccgtcttccccgccccgacgcctctcgcgattttccattaactttaactcccctaaaatactccttcacatacgacgaacctccgccatattaaaaaaatcacgtcgactacgtcaccgccccgccccgccccgcccctcccctcccgcgctaccgctatacccatcacttccgatcgcgccaaccgcccgttaccaattctacgcgtataaatctctttcgccttactccgaactttcttcgctcgcaacgcgacaaaattatcaccaaatctaaactttccccttcttaccgtcaaatactacgaccacgtaacccgcgacttcccgctcgcgcaatctaacaacccgaaaccttccgcgatcccccgcccgcccgaaacccaacgacgccctactaaacgaacacgatttccgaaaacaaaaaatccgaacccaacgctttcgattctcgaaaaaaccgaatccgaaaaccgacgaaactatcctaaaaatccacgtcccgcaaatacgtacaacaacacccgccaaaaaacgcctaaaatcaaaaacgaatatcgactaacttaactaaattcctaaaaaaccgaaaatacgaacgct

SEQ ID NO: 3419 - DNA, 1236 bp, Artificial Sequence
  chemically treated genomic DNA (Homo sapiens) CpG-island No: 3419
agttttgatagttaggttttttaggggattcgtcgtttaaaggagttagggacgacgggttttttagttgagagcgttataggcgtgggattttcgtcgttcgttagagtagacgggcggttatagtacgggaggaagtagattcgtttcggaattcgcgtttcggggattttaaatttcgcggggtgcgggtgagtttttacgaggtttcgggcgttcggggcgagggtagtttcgggtttagagaaaggtgcgtagcggttggaggtgtcgatgttcggtttggttattttcgttcgattcgtttatcgttacggtcgtcgggtttagcgagaagttttcgtagtagttgtgtcgggtttaatttagcgagtttttgagtttcggtcgcgtatttcgtttggtttcgcggatgcgttttttgtttttgtggtttattttgcggggtcgttagttggtttcgttacgatttcggcgtagttcgttttttgatattaacgtattttttttcggtttgggcggcggcgacggtagtatttaaacgtttttcgtttagtttcggcgtttttaaagtcgttttttagaaaatttattttttagttatttttcgagtttcgggttgggtaagcggtcgtcgtttttttcgtttcgacgtttttcgcggttttttattggttttggtttttttggggtatttttttatatacggcgggttttcgttatgttgggaaggttacgtcggttgcgttatcgtttcgtttcgtttcgttttttttttttcgcgttgtcgttgtgtttattattttcggtcgcgttagtcgttcgttgttagttttgcgcgtgtgagtttttttcgttttgtttcgggtttttttcgttcgtagcgcggtagggttattattagatttgggtttttttttttttgtcgttaggtgttacggttacgtggttcgcggtttttcgttcgcgtagtttggtagttcggagtttttcgcggtttttcgttcgttcggggtttaacgacgttttattgggcgagtacgattttcgaggatagggggttcgggtttagcgttttcgattttcggaggagtcgggttcgggggtcgacggggttgttttggaggtttacgtttcgtaggtgcgtgtagtagtattcgttaggaggcgtttgaggttaggagcggatgtcggttgatttggttgggtttttgagggatcgggggtgcggacgtt

SEQ ID NO: 3420 - DNA, 1236 bp, Artificial Sequence
  chemically treated genomic DNA (Homo sapiens) CpG-island No: 3420
aacgtccgcacccccgatccctcaaaaacccaaccaaatcaaccgacatccgctcctaacctcaaacgcctcctaacgaatactactacacgcacctacgaaacgtaaacctccaaaacaaccccgtcgacccccgaacccgactcctccgaaaatcgaaaacgctaaacccgaaccccctatcctcgaaaatcgtactcgcccaataaaacgtcgttaaaccccgaacgaacgaaaaaccgcgaaaaactccgaactaccaaactacgcgaacgaaaaaccgcgaaccacgtaaccgtaacacctaacgacaaaaaaaaaaaaacccaaatctaataataaccctaccgcgctacgaacgaaaaaaacccgaaacaaaacgaaaaaaactcacacgcgcaaaactaacaacgaacgactaacgcgaccgaaaataataaacacaacgacaacgcgaaaaaaaaaaaacgaaacgaaacgaaacgataacgcaaccgacgtaaccttcccaacataacgaaaacccgccgtatataaaaaaataccccaaaaaaaccaaaaccaataaaaaaccgcgaaaaacgtcgaaacgaaaaaaacgacgaccgcttacccaacccgaaactcgaaaaataactaaaaaataaattttctaaaaaacgactttaaaaacgccgaaactaaacgaaaaacgtttaaatactaccgtcgccgccgcccaaaccgaaaaaaaatacgttaatatcaaaaaacgaactacgccgaaatcgtaacgaaaccaactaacgaccccgcaaaataaaccacaaaaacaaaaaacgcatccgcgaaaccaaacgaaatacgcgaccgaaactcaaaaactcgctaaattaaacccgacacaactactacgaaaacttctcgctaaacccgacgaccgtaacgataaacgaatcgaacgaaaataaccaaaccgaacatcgacacctccaaccgctacgcacctttctctaaacccgaaactaccctcgccccgaacgcccgaaacctcgtaaaaactcacccgcaccccgcgaaatttaaaatccccgaaacgcgaattccgaaacgaatctacttcctcccgtactataaccgcccgtctactctaacgaacgacgaaaatcccacgcctataacgctctcaactaaaaaacccgtcgtccctaactcctttaaacgacgaatcccctaaaaaacctaactatcaaaact

SEQ ID NO: 3421 - DNA, 722 bp, Artificial Sequence
  chemically treated genomic DNA (Homo sapiens) CpG-island No: 3421
ggcgatgggggtttcgtttcgaggcggggcgcggcgatcgggcgcggcgacggggcgcggcgggttttttcggggttttagttggttcgtattcggcggtcgcggcgcgatggaggcgtcggtcgagttattggtcgcgttgtttgcgttggttatcgcgttggtttttttgttcgtttggttattggtgcggcgtggggcggtcgcgagttcggagtttgttcgcgcgttttcggaattcgcgttttcggtcgaggttatcggggtttcggcgtcgtttcgtttttgcgttttcgagtcggcggtttcgttcgcggggtcggaggagtttggagagttcgcggggttgggggagttcggggagtttgcgggatcgggggagttcgaagggttaggggatttcgcggcggcgttagcggaggcggaggagtaggcggtggaggcgaggtaggtacgtatcggggttttcgcggttttttttttattttcggggtttcggttgtcgttgtcgtttttcgtcgagttagggagcggggtcgcggtttttagtttaggttgtttttaggaagcgtagaattcgcggttcgtaggaaatgtaggtttcgttatgttaagtcgtagtttcgtaaattcgtcgtttttttttagaaagtgtggcgaggggcgagttcgaaggagtttgtttggaggtgttttgttttttttttttttcggtttttttt

SEQ ID NO: 3422 - DNA, 722 bp, Artificial Sequence
  chemically treated genomic DNA (Homo sapiens) CpG-island No: 3422
aaaaaaaaccgaaaaaaaaaaaaaacaaaacacctccaaacaaactccttcgaactcgcccctcgccacactttctaaaaaaaaacgacgaatttacgaaactacgacttaacataacgaaacctacatttcctacgaaccgcgaattctacgcttcctaaaaacaacctaaactaaaaaccgcgaccccgctccctaactcgacgaaaaacgacaacgacaaccgaaaccccgaaaataaaaaaaaaaccgcgaaaaccccgatacgtacctacctcgcctccaccgcctactcctccgcctccgctaacgccgccgcgaaatcccctaacccttcgaactcccccgatcccgcaaactccccgaactcccccaaccccgcgaactctccaaactcctccgaccccgcgaacgaaaccgccgactcgaaaacgcaaaaacgaaacgacgccgaaaccccgataacctcgaccgaaaacgcgaattccgaaaacgcgcgaacaaactccgaactcgcgaccgccccacgccgcaccaataaccaaacgaacaaaaaaaccaacgcgataaccaacgcaaacaacgcgaccaataactcgaccgacgcctccatcgcgccgcgaccgccgaatacgaaccaactaaaaccccgaaaaaacccgccgcgccccgtcgccgcgcccgatcgccgcgccccgcctcgaaacgaaacccccatcgcc

SEQ ID NO: 3423 - DNA, 722 bp, Artificial Sequence
  chemically treated genomic DNA (Homo sapiens) CpG-island No: 3423
gggagaggtcgaggggaggggagagtaaaatatttttaaataaattttttcgggttcgtttttcgttatattttttgggggagggcggcgagtttgcggggttgcggtttagtatggcgggatttgtattttttgcgggtcgcgggttttgcgttttttgggggtagtttgggttggaggtcgcggtttcgttttttggttcggcggggaacggtagcggtagtcggagtttcgggggtggggagggggtcgcgagggtttcggtgcgtatttgtttcgtttttatcgtttgttttttcgttttcgttggcgtcgtcgcgggattttttggtttttcgggttttttcggtttcgtaggtttttcgagtttttttagtttcgcgggttttttaggttttttcggtttcgcgggcgaggtcgtcggttcgggggcgtaggggcgggacggcgtcggggtttcggtggtttcggtcgggggcgcgggtttcgggggcgcgcgggtaggtttcgggttcgcggtcgttttacgtcgtattagtagttaggcgagtagaagggttagcgcggtggttagcgtaggtagcgcggttagtagttcggtcggcgtttttatcgcgtcgcggtcgtcgagtgcgggttagttgggatttcgagggagttcgtcgcgtttcgtcgtcgcgttcggtcgtcgcgtttcgtttcggggcggagtttttatcgtt

SEQ ID NO: 3424 - DNA, 722 bp, Artificial Sequence
  chemically treated genomic DNA (Homo sapiens) CpG-island No: 3424
aacgataaaaactccgccccgaaacgaaacgcgacgaccgaacgcgacgacgaaacgcgacgaactccctcgaaatcccaactaacccgcactcgacgaccgcgacgcgataaaaacgccgaccgaactactaaccgcgctacctacgctaaccaccgcgctaacccttctactcgcctaactactaatacgacgtaaaacgaccgcgaacccgaaacctacccgcgcgcccccgaaacccgcgcccccgaccgaaaccaccgaaaccccgacgccgtcccgcccctacgcccccgaaccgacgacctcgcccgcgaaaccgaaaaaacctaaaaaacccgcgaaactaaaaaaactcgaaaaacctacgaaaccgaaaaaacccgaaaaaccaaaaaatcccgcgacgacgccaacgaaaacgaaaaaacaaacgataaaaacgaaacaaatacgcaccgaaaccctcgcgaccccctccccacccccgaaactccgactaccgctaccgttccccgccgaaccaaaaaacgaaaccgcgacctccaacccaaactacccccaaaaaacgcaaaacccgcgacccgcaaaaaatacaaatcccgccatactaaaccgcaaccccgcaaactcgccgccctcccccaaaaaatataacgaaaaacgaacccgaaaaaatttatttaaaaatattttactctcccctcccctcgacctctccc

SEQ ID NO: 3425 - DNA, 1096 bp, Artificial Sequence
  chemically treated genomic DNA (Homo sapiens) CpG-island No: 3425
cgtgcgtagttgaatttataggacgtttaggtggagaaggaattattttttgtttttggattcgtttcgatttttgtttggcgagggcgcgtttcggttgggcgtggatattgtttttcggtcgcgtcgggtcgggcgggtggggcgtttttgcgggttgggcggttgggtttttcggggtgtggttatttcgcgtttcgttttgcgtttttttttcgtcgtcggttttcgggtgtggtggtcgtattagttttttgtttttttagcgtagcgtcgtcgttcggtttttttagtttttcggtaaggcggtgggggcgtattttttggcgatttttttcgttttttttttcgtttgcgttgtcgtaggtgggttcggtttgtgggcgtttttcgatttttcgtaggtttcgcgcggcgtcggagcgggagatttttttgtagtttgcgtttcgcgggttttcgggtttcgtagagggacgtcggttttgcgcggggcggaagcggtcgggaagttacgtgttttcgcggtcgcgcgtggtgggggaggagggatcggcggcgtttacgtggttttcgcgggtttcgttagagtttgcgttcgggttttgatcgtatttttcgtttcgtaggattatggttaatttggagcgtatttttatcgttattaagtcggacggcgtgtagcgcggtttggtgggcgagattattaagcgtttcgagtagaagggatttcgtttcgtggttatgaagttttttcgggtaattcgttttcgttttttttttttcgttgtagtcggttcgcgggtgtttttttttttcggcggcggtttgttcgcgtttgtttttcgagtttatttcgttgtcgcgaaatttttttgttttttgttttcgtttacggcggtttgggttcgtcgattttttttcggggtggtggggatagacgtttttgggaaggtgaagcgttggtagcgtgattcgtttttcgggtttgggttttttttcgcgggtcgttatttgtttattcgtcgtaggggggtagtagggagcggaaaaatttcgggttttagattttttgcgtttgtttattcgggtttat

SEQ ID NO: 3426 - DNA, 1096 bp, Artificial Sequence
  chemically treated genomic DNA (Homo sapiens) CpG-island No: 3426
ataaacccgaataaacaaacgcaaaaaatctaaaacccgaaatttttccgctccctactacccccctacgacgaataaacaaataacgacccgcgaaaaaaaacccaaacccgaaaaacgaatcacgctaccaacgcttcaccttcccaaaaacgtctatccccaccaccccgaaaaaaaatcgacgaacccaaaccgccgtaaacgaaaacaaaaaacaaaaaaatttcgcgacaacgaaataaactcgaaaaacaaacgcgaacaaaccgccgccgaaaaaaaaaaacacccgcgaaccgactacaacgaaaaaaaaaaaacgaaaacgaattacccgaaaaaacttcataaccacgaaacgaaatcccttctactcgaaacgcttaataatctcgcccaccaaaccgcgctacacgccgtccgacttaataacgataaaaatacgctccaaattaaccataatcctacgaaacgaaaaatacgatcaaaacccgaacgcaaactctaacgaaacccgcgaaaaccacgtaaacgccgccgatccctcctcccccaccacgcgcgaccgcgaaaacacgtaacttcccgaccgcttccgccccgcgcaaaaccgacgtccctctacgaaacccgaaaacccgcgaaacgcaaactacaaaaaaatctcccgctccgacgccgcgcgaaacctacgaaaaatcgaaaaacgcccacaaaccgaacccacctacgacaacgcaaacgaaaaaaaaaacgaaaaaaatcgccaaaaaatacgcccccaccgccttaccgaaaaactaaaaaaaccgaacgacgacgctacgctaaaaaaacaaaaaactaatacgaccaccacacccgaaaaccgacgacgaaaaaaaaacgcaaaacgaaacgcgaaataaccacaccccgaaaaacccaaccgcccaacccgcaaaaacgccccacccgcccgacccgacgcgaccgaaaaacaatatccacgcccaaccgaaacgcgccctcgccaaacaaaaatcgaaacgaatccaaaaacaaaaaataattccttctccacctaaacgtcctataaattcaactacgcacg

SEQ ID NO: 3427 - DNA, 1096 bp, Artificial Sequence
  chemically treated genomic DNA (Homo sapiens) CpG-island No: 3427
gtggattcgagtgggtaggcgtagggggtttggggttcggggttttttcgttttttgttgtttttttgcggcgggtgggtaggtagcggttcgcgggaaggaatttaaattcggagggcgagttacgttattagcgttttatttttttaagggcgtttgtttttattatttcgggaaagggtcggcgggtttaagtcgtcgtgggcgggggtagagggtaaagggatttcgcggtagcgaaatgaattcggaaagtagacgcggataaatcgtcgtcgggagggaaaaatattcgcgagtcggttgtagcggggaaggggagacgggggcgagttattcggaggaattttatggttacgaggcggaattttttttgttcgaagcgtttgatgatttcgtttattaggtcgcgttgtacgtcgttcggtttgatggcgatgaaggtgcgttttaggttggttatggttttgcggggcgagaggtgcggttagggttcgggcgtaggttttggcggggttcgcggaggttacgtgggcgtcgtcggtttttttttttttattacgcgcggtcgcggggatacgtggtttttcggtcgttttcgtttcgcgtagggtcggcgtttttttgcggagttcgaaggttcgcggggcgtaagttgtaagggaatttttcgtttcgacgtcgcgcgggatttgcgggaaatcggggggcgtttatagatcgggtttatttgcggtagcgtaagcggaagagggaacgggaggagtcgttaggggatgcgtttttatcgttttatcgggaagttggaggggtcgggcggcggcgttgcgttgggagagtagagagttggtgcgattattatattcgggagtcggcggcggaggaggggcgtagggcggagcgcggggtggttatatttcggagggtttagtcgtttaattcgtaggaacgttttattcgttcggttcgacgcggtcggagaatagtgtttacgtttagtcggggcgcgttttcgttaggtagagatcgagacggatttagagataggaagtgattttttttttatttggacgttttatgagtttaattacgtacg

SEQ ID NO: 3428 - DNA, 1096 bp, Artificial Sequence
  chemically treated genomic DNA (Homo sapiens) CpG-island No: 3428
cgtacgtaattaaactcataaaacgtccaaataaaaaaaaaatcacttcctatctctaaatccgtctcgatctctacctaacgaaaacgcgccccgactaaacgtaaacactattctccgaccgcgtcgaaccgaacgaataaaacgttcctacgaattaaacgactaaaccctccgaaatataaccaccccgcgctccgccctacgcccctcctccgccgccgactcccgaatataataatcgcaccaactctctactctcccaacgcaacgccgccgcccgacccctccaacttcccgataaaacgataaaaacgcatcccctaacgactcctcccgttccctcttccgcttacgctaccgcaaataaacccgatctataaacgccccccgatttcccgcaaatcccgcgcgacgtcgaaacgaaaaattcccttacaacttacgccccgcgaaccttcgaactccgcaaaaaaacgccgaccctacgcgaaacgaaaacgaccgaaaaaccacgtatccccgcgaccgcgcgtaataaaaaaaaaaaaaccgacgacgcccacgtaacctccgcgaaccccgccaaaacctacgcccgaaccctaaccgcacctctcgccccgcaaaaccataaccaacctaaaacgcaccttcatcgccatcaaaccgaacgacgtacaacgcgacctaataaacgaaatcatcaaacgcttcgaacaaaaaaaattccgcctcgtaaccataaaattcctccgaataactcgcccccgtctccccttccccgctacaaccgactcgcgaatatttttccctcccgacgacgatttatccgcgtctactttccgaattcatttcgctaccgcgaaatccctttaccctctacccccgcccacgacgacttaaacccgccgaccctttcccgaaataataaaaacaaacgcccttaaaaaaataaaacgctaataacgtaactcgccctccgaatttaaattccttcccgcgaaccgctacctacccacccgccgcaaaaaaacaacaaaaaacgaaaaaaccccgaaccccaaaccccctacgcctacccactcgaatccac

SEQ ID NO: 3429 - DNA, 1118 bp, Artificial Sequence
  chemically treated genomic DNA (Homo sapiens) CpG-island No: 3429
gcgttcggttttttcggggtcgagggagggggcgtcgcgcggcgagtggggatttcgttgggtttcggcgtcggtaggggatttcgggagggcgtcggaattttgtcgcgtttgcgtcgtataaaggtcgaagggttaggaaagtattgtggggagtcgtttttcgttttggttcgtgttttatcgttcgggtgggcgagttttggtatcgttattaacgaggcggttcgcggttggtagtttcgttggggtcgcgaggtcgggggcggcgtggcgtgggaggttcggtttggtttcgggttgcggttcgggtgttcgcggcggtcgtttcgtttcgttttttttcgtcgtttcgcgcgcgtcggggtgggtattgtaatttcgattttttgttcgggttcgggcgttgtcggttggggagtttggggtttcggttcgcgtatttaggtcgtttttttgtcgagcgtatggtcggtttcggtgttttaaacgacgtagttcggttcgggacggcgatgttatcggttttcggcgggacggtcgcgaggttgtaaaggcggtcgtttcgattcgtgttcggtcgcgggtttcgggcgcggcggaagggcggttcgcggggtttcgggtttcgacgttttcgtaggtttcgtcgttttttatttttagtacgttttcgttttgtttggggttgatgtttattttttttatgggtagcggcgtcgattgcgtttcgttttcggtcgtttttattttttcggttgttattttcgcgcggcgcgtcgtttattcgggagttggtgtcggcgcgagcgtattttgggtcgcgggcgggggcgttatttgcggggcgtgcgggaggtcgggcgcggcggtattgattgcggatcgcgaggaggtttgagtatttttgtacgcggcgcgagagttggggtaggtgggttaggagcggttcggggagcgattggtttcgtttcgtcgcgagggaggggttgggaggagcgggagcgtagatagagggggcggggtgtagaattttttagagacggcgggattgagtcggttcgggtttagtgttgcgggcgtttcggaatttttttttttttttttttttttggttt

SEQ ID NO: 3430 - DNA, 1118 bp, Artificial Sequence
  chemically treated genomic DNA (Homo sapiens) CpG-island No: 3430
aaaccaaaaaaaaaaaaaaaaaaaaaaattccgaaacgcccgcaacactaaacccgaaccgactcaatcccgccgtctctaaaaaattctacaccccgccccctctatctacgctcccgctcctcccaacccctccctcgcgacgaaacgaaaccaatcgctccccgaaccgctcctaacccacctaccccaactctcgcgccgcgtacaaaaatactcaaacctcctcgcgatccgcaatcaataccgccgcgcccgacctcccgcacgccccgcaaataacgcccccgcccgcgacccaaaatacgctcgcgccgacaccaactcccgaataaacgacgcgccgcgcgaaaataacaaccgaaaaaataaaaacgaccgaaaacgaaacgcaatcgacgccgctacccataaaaaaaataaacatcaaccccaaacaaaacgaaaacgtactaaaaataaaaaacgacgaaacctacgaaaacgtcgaaacccgaaaccccgcgaaccgcccttccgccgcgcccgaaacccgcgaccgaacacgaatcgaaacgaccgcctttacaacctcgcgaccgtcccgccgaaaaccgataacatcgccgtcccgaaccgaactacgtcgtttaaaacaccgaaaccgaccatacgctcgacaaaaaaacgacctaaatacgcgaaccgaaaccccaaactccccaaccgacaacgcccgaacccgaacaaaaaatcgaaattacaatacccaccccgacgcgcgcgaaacgacgaaaaaaaacgaaacgaaacgaccgccgcgaacacccgaaccgcaacccgaaaccaaaccgaacctcccacgccacgccgcccccgacctcgcgaccccaacgaaactaccaaccgcgaaccgcctcgttaataacgataccaaaactcgcccacccgaacgataaaacacgaaccaaaacgaaaaacgactccccacaatactttcctaacccttcgacctttatacgacgcaaacgcgacaaaattccgacgccctcccgaaatcccctaccgacgccgaaacccaacgaaatccccactcgccgcgcgacgccccctccctcgaccccgaaaaaaccgaacgc

SEQ ID NO: 3431 - DNA, 1118 bp, Artificial Sequence
  chemically treated genomic DNA (Homo sapiens) CpG-island No: 3431
gaattaaaaaaaaaaaaagaaaaaaaaatttcgaagcgttcgtagtattgagttcgaatcggtttagtttcgtcgtttttagaaagttttgtatttcgttttttttgtttgcgttttcgttttttttagtttttttttcgcggcggggcgggattaatcgtttttcgagtcgtttttgatttatttattttagttttcgcgtcgcgtgtagaggtgtttaagttttttcgcggttcgtagttagtgtcgtcgcgttcggtttttcgtacgtttcgtaggtagcgttttcgttcgcggtttagagtgcgttcgcgtcggtattagttttcggataaacggcgcgtcgcgcggagatgatagtcgaggagatgaaggcgatcgagagcggggcgtagtcggcgtcgttgtttatggagggagtggatattagttttaaataggacgaaggcgtgttgaaggtgaggggcggcggggtttgcggaggcgtcggaattcggggtttcgcgggtcgttttttcgtcgcgttcggagttcgcggtcgggtacgggtcgaggcggtcgtttttgtagtttcgcggtcgtttcgtcgggggtcggtggtatcgtcgtttcggatcgggttgcgtcgtttaaggtatcgaggtcggttatgcgttcggtaggggggcggtttaggtgcgcgggtcgaggttttaggttttttagtcggtagcgttcgggttcgggtagggggtcgggattgtagtgtttatttcggcgcgcgcggggcggcggagaggggcggggcgaggcgatcgtcgcgggtattcgagtcgtagttcggggttaggtcgggttttttacgttacgtcgttttcgatttcgcggttttagcggagttgttagtcgcgggtcgtttcgttggtggcggtgttagggttcgtttattcgggcggtggaatacgggttaggacggggagcgattttttatagtgtttttttggtttttcggtttttgtgcgacgtaggcgcgatagggtttcggcgttttttcggggttttttgtcgacgtcgggatttagcgaggtttttattcgtcgcgcggcgttttttttttcggtttcggggaggtcgggcgt

SEQ ID NO: 3432 - DNA, 1118 bp, Artificial Sequence
  chemically treated genomic DNA (Homo sapiens) CpG-island No: 3432
acgcccgacctccccgaaaccgaaaaaaaaaacgccgcgcgacgaataaaaacctcgctaaatcccgacgtcgacaaaaaaccccgaaaaaacgccgaaaccctatcgcgcctacgtcgcacaaaaaccgaaaaaccaaaaaaacactataaaaaatcgctccccgtcctaacccgtattccaccgcccgaataaacgaaccctaacaccgccaccaacgaaacgacccgcgactaacaactccgctaaaaccgcgaaatcgaaaacgacgtaacgtaaaaaacccgacctaaccccgaactacgactcgaatacccgcgacgatcgcctcgccccgcccctctccgccgccccgcgcgcgccgaaataaacactacaatcccgaccccctacccgaacccgaacgctaccgactaaaaaacctaaaacctcgacccgcgcacctaaaccgcccccctaccgaacgcataaccgacctcgataccttaaacgacgcaacccgatccgaaacgacgataccaccgacccccgacgaaacgaccgcgaaactacaaaaacgaccgcctcgacccgtacccgaccgcgaactccgaacgcgacgaaaaaacgacccgcgaaaccccgaattccgacgcctccgcaaaccccgccgcccctcaccttcaacacgccttcgtcctatttaaaactaatatccactccctccataaacaacgacgccgactacgccccgctctcgatcgccttcatctcctcgactatcatctccgcgcgacgcgccgtttatccgaaaactaataccgacgcgaacgcactctaaaccgcgaacgaaaacgctacctacgaaacgtacgaaaaaccgaacgcgacgacactaactacgaaccgcgaaaaaacttaaacacctctacacgcgacgcgaaaactaaaataaataaatcaaaaacgactcgaaaaacgattaatcccgccccgccgcgaaaaaaaaactaaaaaaaacgaaaacgcaaacaaaaaaaacgaaatacaaaactttctaaaaacgacgaaactaaaccgattcgaactcaatactacgaacgcttcgaaatttttttttctttttttttttttaattc

SEQ ID NO: 3433 - DNA, 738 bp, Artificial Sequence
  chemically treated genomic DNA (Homo sapiens) CpG-island No: 3433
gttcggaataggtacgattcgtttttggcgattagttttcgatataagtttagttttcgtagataggcgtttatgggcgtcgcgttttcgcggggtttcgcgtcgttttggttttcgtcgtcggggacgtcgacggtcgtttttatgttgttggttttgttgtaggttaggcgcgagggttagttttatatggttaggtcgtcggttgttcgacgtttcggtttggggtaggcggcggttcgggttggggttcgggtttcgcgagcggcggtaggcggtaggcggcggcggcggttcgaggtagcggttcgcgtttttcgggcgcgtaggggagttttgtttaatgtatggttgttcgtacgcggtcgttttttcggagcgaatacgcgtttacgataaacggggggagcgggattaaggaaaatttcgagagtgagtagttatttttcgacggtttcgttgttcgatttaggatttaggtcgggggtcgtcgtttttataagttttttcgtttgtatcggtgtgaagcgagaaaagtttcgttttaggcgcgtacgtcgggtcggtttaggtgaagcggggtttgcgtttttcgcgcgttttttacgtcgggagtcgaggaaattaaaaaagaaagacgcggtttttcgtttttttattacgttggagggcgtcggaggggcggggagcgggtgggggttttttttggatttttttttttttttttagttttgttaa

SEQ ID NO: 3434 - DNA, 738 bp, Artificial Sequence
  chemically treated genomic DNA (Homo sapiens) CpG-island No: 3434
ttaacaaaactaaaaaaaaaaaaaaaaatccaaaaaaaacccccacccgctccccgcccctccgacgccctccaacgtaataaaaaaacgaaaaaccgcgtctttcttttttaatttcctcgactcccgacgtaaaaaacgcgcgaaaaacgcaaaccccgcttcacctaaaccgacccgacgtacgcgcctaaaacgaaacttttctcgcttcacaccgatacaaacgaaaaaacttataaaaacgacgacccccgacctaaatcctaaatcgaacaacgaaaccgtcgaaaaataactactcactctcgaaattttccttaatcccgctccccccgtttatcgtaaacgcgtattcgctccgaaaaaacgaccgcgtacgaacaaccatacattaaacaaaactcccctacgcgcccgaaaaacgcgaaccgctacctcgaaccgccgccgccgcctaccgcctaccgccgctcgcgaaacccgaaccccaacccgaaccgccgcctaccccaaaccgaaacgtcgaacaaccgacgacctaaccatataaaactaaccctcgcgcctaacctacaacaaaaccaacaacataaaaacgaccgtcgacgtccccgacgacgaaaaccaaaacgacgcgaaaccccgcgaaaacgcgacgcccataaacgcctatctacgaaaactaaacttatatcgaaaactaatcgccaaaaacgaatcgtacctattccgaac

SEQ ID NO: 3435 - DNA, 738 bp, Artificial Sequence
  chemically treated genomic DNA (Homo sapiens) CpG-island No: 3435
ttagtaaggttaagaaaaaaagagaagatttagggggagtttttattcgtttttcgttttttcggcgttttttagcgtggtggggaaacgaaaggtcgcgttttttttttttggttttttcggttttcggcgtggggagcgcgcgggggacgtaggtttcgttttatttgagtcggttcggcgtgcgcgtttggggcggggtttttttcgttttatatcggtatagacgaggaaatttgtgggggcggcgattttcggtttgggttttgagtcgggtagcgaggtcgtcgggaagtgattatttattttcggggttttttttaatttcgtttttttcgtttgtcgtgggcgcgtgttcgtttcgaggaggcggtcgcgtacggatagttatgtattaggtagggtttttttacgcgttcggagagcgcggatcgttgtttcgggtcgtcgtcgtcgtttgtcgtttgtcgtcgttcgcggagttcgagttttagttcgagtcgtcgtttattttaggtcggggcgtcgagtagtcggcggtttggttatgtggggttagttttcgcgtttggtttgtagtaggattagtaatatggaggcggtcgtcggcgttttcgacggcgaggattagggcggcgcggggtttcgcgaggacgcgacgtttatggacgtttatttgcggaaattgggtttgtatcggaaattggtcgttaaggacgggtcgtgtttgtttcgggt

SEQ ID NO: 3436 - DNA, 738 bp, Artificial Sequence
  chemically treated genomic DNA (Homo sapiens) CpG-island No: 3436
acccgaaacaaacacgacccgtccttaacgaccaatttccgatacaaacccaatttccgcaaataaacgtccataaacgtcgcgtcctcgcgaaaccccgcgccgccctaatcctcgccgtcgaaaacgccgacgaccgcctccatattactaatcctactacaaaccaaacgcgaaaactaaccccacataaccaaaccgccgactactcgacgccccgacctaaaataaacgacgactcgaactaaaactcgaactccgcgaacgacgacaaacgacaaacgacgacgacgacccgaaacaacgatccgcgctctccgaacgcgtaaaaaaaccctacctaatacataactatccgtacgcgaccgcctcctcgaaacgaacacgcgcccacgacaaacgaaaaaaacgaaattaaaaaaaaccccgaaaataaataatcacttcccgacgacctcgctacccgactcaaaacccaaaccgaaaatcgccgcccccacaaatttcctcgtctataccgatataaaacgaaaaaaaccccgccccaaacgcgcacgccgaaccgactcaaataaaacgaaacctacgtcccccgcgcgctccccacgccgaaaaccgaaaaaaccaaaaaaaaaaaacgcgacctttcgtttccccaccacgctaaaaaacgccgaaaaaacgaaaaacgaataaaaactccccctaaatcttctctttttttcttaaccttactaa

SEQ ID NO: 3437 - DNA, 534 bp, Artificial Sequence
  chemically treated genomic DNA (Homo sapiens) CpG-island No: 3437
gtagggggcgttgcggtgtagaggcgacgttgtttttttttttttagggtcgagcggggggtttgtcgttcgtagggggcgttgcggtgtagaggcgacgttgttttttttttttcggggtcgagcggggggtttgtcgttcgtagggggcgttgcggtgtagaggcgacgttgttttttttttttcggggtcgagcggggggtttgtcgttcgtagggggcgttgcggtgtagaggcgacgttgttttttttttttcggggtcgagcggggggtttgtcgttcgtagggggcgttgcggtgtagaggcgacgttgttttttttttttcggggtcgagcggggggtttgtcgttcgtagggggcgttgcggtgtagaggcgacgttgttttttttttttcggggtcgagcggggggtttgtcgttcgtagggggcgttgcggtgtagaggcgacgttgtttttttttttttagggtcgagttaaattttagagaattatatatagtggggatttttgtttttttttttttattt

SEQ ID NO: 3438 - DNA, 534 bp, Artificial Sequence
  chemically treated genomic DNA (Homo sapiens) CpG-island No: 3438
aaataaaaaaaaaaaaacaaaaatccccactatatataattctctaaaatttaactcgaccctaaaaaaaaaaaaacaacgtcgcctctacaccgcaacgccccctacgaacgacaaaccccccgctcgaccccgaaaaaaaaaaaacaacgtcgcctctacaccgcaacgccccctacgaacgacaaaccccccgctcgaccccgaaaaaaaaaaaacaacgtcgcctctacaccgcaacgccccctacgaacgacaaaccccccgctcgaccccgaaaaaaaaaaaacaacgtcgcctctacaccgcaacgccccctacgaacgacaaaccccccgctcgaccccgaaaaaaaaaaaacaacgtcgcctctacaccgcaacgccccctacgaacgacaaaccccccgctcgaccccgaaaaaaaaaaaacaacgtcgcctctacaccgcaacgccccctacgaacgacaaaccccccgctcgaccctaaaaaaaaaaaaacaacgtcgcctctacaccgcaacgccccctac

SEQ ID NO: 3439 - DNA, 534 bp, Artificial Sequence
  chemically treated genomic DNA (Homo sapiens) CpG-island No: 3439
ggatggaagagagaaaataaaaatttttattgtatgtggttttttggaatttaattcggttttggagaggaaagagtagcgtcgtttttgtatcgtagcgttttttgcgggcggtaaatttttcgttcggtttcggagaggaaagggtaacgtcgtttttgtatcgtagcgttttttgcgggcggtaagtttttcgttcggtttcggagaggaaagggtaacgtcgtttttgtatcgtagcgttttttgcgggcggtaaatttttcgttcggtttcggagaggaaagggtaacgtcgtttttgtatcgtagcgttttttgcgggcggtaaatttttcgttcggtttcggagaggaaagggtaacgtcgtttttgtatcgtagcgttttttgcgggcggtaaatttttcgttcggtttcggagaggaaagggtaacgtcgtttttgtatcgtagcgttttttgcgggcggtaaatttttcgttcggttttggagaggaaagggtagcgtcgtttttgtatcgtagcgttttttgt

SEQ ID NO: 3440 - DNA, 534 bp, Artificial Sequence
  chemically treated genomic DNA (Homo sapiens) CpG-island No: 3440
acaaaaaacgctacgatacaaaaacgacgctaccctttcctctccaaaaccgaacgaaaaatttaccgcccgcaaaaaacgctacgatacaaaaacgacgttaccctttcctctccgaaaccgaacgaaaaatttaccgcccgcaaaaaacgctacgatacaaaaacgacgttaccctttcctctccgaaaccgaacgaaaaatttaccgcccgcaaaaaacgctacgatacaaaaacgacgttaccctttcctctccgaaaccgaacgaaaaatttaccgcccgcaaaaaacgctacgatacaaaaacgacgttaccctttcctctccgaaaccgaacgaaaaacttaccgcccgcaaaaaacgctacgatacaaaaacgacgttaccctttcctctccgaaaccgaacgaaaaatttaccgcccgcaaaaaacgctacgatacaaaaacgacgctactctttcctctccaaaaccgaattaaattccaaaaaaccacatacaataaaaatttttattttctctcttccatcc

SEQ ID NO: 3441 - DNA, 658 bp, Artificial Sequence
  chemically treated genomic DNA (Homo sapiens) CpG-island No: 3441
cggggcgggggcgggggcggggtcgggggcgggttaggtttcgcgagtaggagagtttagagttcggagttcggttcggggttggcgggggcgcgggcggaggtaggcgggcgggcgtcggggaagtttttttttgggtagcgagtgagggcgggcgcgtagggagggagggcggtagcgagtttgcgacgggagaggcgtggggaggagagttcggcgcggaatatacgcgcggaggaggagtcgggttcggttttcggagagatttgttgggcgttcgcgtagttcggagatttttcgcgttcggagtatgagttcgagtttcgtcggagagcggtcgggagagacggtttcggcgtagttttgagacgttgggtcgggacgcggggcgttttgggcgcggggttcggtcggggggcggcggttcggggggttggagttcgcgttggcggcggtcgtttcggcgtagcgttatggggagttttcgggtcgcgcggttttcgttgtttttgcgttcggtgaagttgttgcggaggcgttttcggttgttgttggcgttcgtcgtggtgtttgtggggttttggattttgtatttggaattggtggcgtcggtttaggtcggcgggaattttttgaatcggagtaagtagtatttagg

SEQ ID NO: 3442 - DNA, 658 bp, Artificial Sequence
  chemically treated genomic DNA (Homo sapiens) CpG-island No: 3442
cctaaatactacttactccgattcaaaaaattcccgccgacctaaaccgacgccaccaattccaaatacaaaatccaaaaccccacaaacaccacgacgaacgccaacaacaaccgaaaacgcctccgcaacaacttcaccgaacgcaaaaacaacgaaaaccgcgcgacccgaaaactccccataacgctacgccgaaacgaccgccgccaacgcgaactccaaccccccgaaccgccgccccccgaccgaaccccgcgcccaaaacgccccgcgtcccgacccaacgtctcaaaactacgccgaaaccgtctctcccgaccgctctccgacgaaactcgaactcatactccgaacgcgaaaaatctccgaactacgcgaacgcccaacaaatctctccgaaaaccgaacccgactcctcctccgcgcgtatattccgcgccgaactctcctccccacgcctctcccgtcgcaaactcgctaccgccctccctccctacgcgcccgccctcactcgctacccaaaaaaaaacttccccgacgcccgcccgcctacctccgcccgcgcccccgccaaccccgaaccgaactccgaactctaaactctcctactcgcgaaacctaacccgcccccgaccccgcccccgcccccgccccg

SEQ ID NO: 3443 - DNA, 658 bp, Artificial Sequence
  chemically treated genomic DNA (Homo sapiens) CpG-island No: 3443
tttgggtgttatttatttcggtttagggggttttcgtcgatttgggtcgacgttattagttttagatatagagtttagagttttatagatattacggcgagcgttagtagtagtcggaagcgttttcgtagtagttttatcgggcgtaggagtagcgggggtcgcgcggttcgggggttttttatggcgttgcgtcgaggcggtcgtcgttagcgcgggttttaatttttcgagtcgtcgtttttcggtcgggtttcgcgtttagggcgtttcgcgtttcggtttagcgttttagggttgcgtcgaggtcgtttttttcggtcgtttttcggcggggttcgggtttatgtttcgggcgcgaggggttttcgggttgcgcgggcgtttagtaggttttttcgggagtcgagttcggtttttttttcgcgcgtgtgtttcgcgtcgggtttttttttttacgtttttttcgtcgtaggttcgttgtcgttttttttttttgcgcgttcgtttttattcgttgtttagaaggaggttttttcggcgttcgttcgtttgttttcgttcgcgttttcgttagtttcggatcgggtttcgggttttgggtttttttgttcgcggaatttggttcgttttcggtttcgttttcgttttcgtttcg

SEQ ID NO: 3444 - DNA, 658 bp, Artificial Sequence
  chemically treated genomic DNA (Homo sapiens) CpG-island No: 3444
cgaaacgaaaacgaaaacgaaaccgaaaacgaaccaaattccgcgaacaaaaaaacccaaaacccgaaacccgatccgaaactaacgaaaacgcgaacgaaaacaaacgaacgaacgccgaaaaaacctccttctaaacaacgaataaaaacgaacgcgcaaaaaaaaaaaacgacaacgaacctacgacgaaaaaaacgtaaaaaaaaaaacccgacgcgaaacacacgcgcgaaaaaaaaaccgaactcgactcccgaaaaaacctactaaacgcccgcgcaacccgaaaacccctcgcgcccgaaacataaacccgaaccccgccgaaaaacgaccgaaaaaaacgacctcgacgcaaccctaaaacgctaaaccgaaacgcgaaacgccctaaacgcgaaacccgaccgaaaaacgacgactcgaaaaattaaaacccgcgctaacgacgaccgcctcgacgcaacgccataaaaaacccccgaaccgcgcgacccccgctactcctacgcccgataaaactactacgaaaacgcttccgactactactaacgctcgccgtaatatctataaaactctaaactctatatctaaaactaataacgtcgacccaaatcgacgaaaaccccctaaaccgaaataaataacacccaaa

SEQ ID NO: 3445 - DNA, 519 bp, Artificial Sequence
  chemically treated genomic DNA (Homo sapiens) CpG-island No: 3445
gaagggcgcgggggtgggcggcggcggcggtttttgcgttggggggattcgttttttattttatttttagattcgattttttatttattttttttttaggtgttcggcgtcgtttcgcgcgtattcggggagagttgcgggcgggggaagtcgcggggtcgagcgtagaattttcgagttcgggtttgttcgtcggttacgtgggttcggggtattttgggggtttttcgcgttttttttcggagagcgattcggagagaggtttttcgttcgtttcgtcgagacgttggcggagatcgggtttttttagtcgtttcgggtttgcggttttcggggaggaggttcgtggggtttacgcgcgagttagggattcgggtgcgggatgttttcggtcgtttatatttaggcgcgcgttttagttcgcgtagtttaaattttgtttatcgttttttgtttggtttatttcgtttttttttttgttgtattttttaggggggtttttttttattatatttcgga

SEQ ID NO: 3446 - DNA, 519 bp, Artificial Sequence
  chemically treated genomic DNA (Homo sapiens) CpG-island No: 3446
tccgaaatataataaaaaaaaacccccctaaaaaatacaacaaaaaaaaaaacgaaataaaccaaacaaaaaacgataaacaaaatttaaactacgcgaactaaaacgcgcgcctaaatataaacgaccgaaaacatcccgcacccgaatccctaactcgcgcgtaaaccccacgaacctcctccccgaaaaccgcaaacccgaaacgactaaaaaaacccgatctccgccaacgtctcgacgaaacgaacgaaaaacctctctccgaatcgctctccgaaaaaaaacgcgaaaaacccccaaaataccccgaacccacgtaaccgacgaacaaacccgaactcgaaaattctacgctcgaccccgcgacttcccccgcccgcaactctccccgaatacgcgcgaaacgacgccgaacacctaaaaaaaaaataaataaaaaatcgaatctaaaaataaaataaaaaacgaatccccccaacgcaaaaaccgccgccgccgcccacccccgcgcccttc

SEQ ID NO: 3447 - DNA, 519 bp, Artificial Sequence
  chemically treated genomic DNA (Homo sapiens) CpG-island No: 3447
ttcgaggtatggtaaaaaagaatttttttagaagatgtagtaggagaggaaacggagtgagttaaatagaaggcggtgggtaaagtttgggttgcgcggattggagcgcgcgtttgggtgtggacggtcgagggtatttcgtattcgaatttttagttcgcgcgtggattttacggatttttttttcgggaatcgtaagttcggagcggttggaggggttcggttttcgttagcgtttcggcgggacgggcggggagttttttttcgggtcgtttttcgaggggagacgcgaggagtttttagggtgtttcggatttacgtggtcggcgggtaggttcgggttcgggaattttgcgttcggtttcgcggtttttttcgttcgtagtttttttcgagtacgcgcggggcgacgtcgggtatttgagggagaaatgggtgggaaatcgggtttgaggatgggatgagaggcgggtttttttaacgtaggagtcgtcgtcgtcgtttattttcgcgtttttt

SEQ ID NO: 3448 - DNA, 519 bp, Artificial Sequence
  chemically treated genomic DNA (Homo sapiens) CpG-island No: 3448
aaaaaacgcgaaaataaacgacgacgacgactcctacgttaaaaaaacccgcctctcatcccatcctcaaacccgatttcccacccatttctccctcaaatacccgacgtcgccccgcgcgtactcgaaaaaaactacgaacgaaaaaaaccgcgaaaccgaacgcaaaattcccgaacccgaacctacccgccgaccacgtaaatccgaaacaccctaaaaactcctcgcgtctcccctcgaaaaacgacccgaaaaaaaactccccgcccgtcccgccgaaacgctaacgaaaaccgaacccctccaaccgctccgaacttacgattcccgaaaaaaaaatccgtaaaatccacgcgcgaactaaaaattcgaatacgaaataccctcgaccgtccacacccaaacgcgcgctccaatccgcgcaacccaaactttacccaccgccttctatttaactcactccgtttcctctcctactacatcttctaaaaaaattcttttttaccatacctcgaa

SEQ ID NO: 3449 - DNA, 654 bp, Artificial Sequence
  chemically treated genomic DNA (Homo sapiens) CpG-island No: 3449
ggaagttttgggtttttcgtttatagtcgtcggaagtggtttcgtggtttcgtttttaggtttcgggtttttttttaggcgtttgcgttaagtcgcgagttaggtttaatcgttgcgttatcgggattcgagttttcgcgatgttttgggggtcgtgtttattattaaatgttaataaagttcgcgtttgtgtcgtcgaggtttttttgtgcgtcgattggggtttcggtaggtcggggtagtgtttttacggatatttttaaaagaggtcgttgttttacgagggaaatttaggttttgtttgatatttagcgatagagacggaaggggtcgcggcggttcgcgggtttgggttgcgcggtttaggtttaagtttttagtacgcgtattgggatcgtagcgttgtcggtagttcgatttcgcgttttgtaaatcgtgtcgcggttttttagagagggttattcgtttttatttgggttagttttttttagtagttattgtgtggtcggttcggggttagcgtcgttcgggtatttcgcggggcgggagggagcggttgagttaggttggtagtagcgcggtcgttggaaattgaggttttatgcggggattcggatagagcgggggtttcgttttagaaagatttattggcgt

SEQ ID NO: 3450 - DNA, 654 bp, Artificial Sequence
  chemically treated genomic DNA (Homo sapiens) CpG-island No: 3450
acgccaataaatctttctaaaacgaaacccccgctctatccgaatccccgcataaaacctcaatttccaacgaccgcgctactaccaacctaactcaaccgctccctcccgccccgcgaaatacccgaacgacgctaaccccgaaccgaccacacaataactactaaaaaaaactaacccaaataaaaacgaataaccctctctaaaaaaccgcgacacgatttacaaaacgcgaaatcgaactaccgacaacgctacgatcccaatacgcgtactaaaaacttaaacctaaaccgcgcaacccaaacccgcgaaccgccgcgaccccttccgtctctatcgctaaatatcaaacaaaacctaaatttccctcgtaaaacaacgacctcttttaaaaatatccgtaaaaacactaccccgacctaccgaaaccccaatcgacgcacaaaaaaacctcgacgacacaaacgcgaactttattaacatttaataataaacacgacccccaaaacatcgcgaaaactcgaatcccgataacgcaacgattaaacctaactcgcgacttaacgcaaacgcctaaaaaaaaacccgaaacctaaaaacgaaaccacgaaaccacttccgacgactataaacgaaaaacccaaaacttcc

SEQ ID NO: 3451 - DNA, 654 bp, Artificial Sequence
  chemically treated genomic DNA (Homo sapiens) CpG-island No: 3451
gcgttaataaatttttttggaacggagttttcgttttgttcgggttttcgtatgaagttttagtttttagcgatcgcgttgttgttagtttggtttagtcgttttttttcgtttcgcgaggtattcgggcggcgttggtttcgggtcggttatatagtagttgttggaaagggttgatttaaataggagcgagtgattttttttggggggtcgcggtacggtttgtagagcgcgggatcgggttgtcggtagcgttgcggttttaatgcgcgtgttggggatttggatttgggtcgcgtagtttaggttcgcgagtcgtcgcgatttttttcgtttttgtcgttggatgttaggtagagtttaagtttttttcgtaagatagcggttttttttgaaagtattcgtgagagtattatttcggtttgtcggagttttagtcgacgtatagaaaagtttcggcggtatagacgcgggttttattaatatttggtagtgagtacggtttttagggtatcgcgggggttcgggtttcggtgacgtaacggttaaatttggttcgcgatttagcgtaggcgtttgggggaaagttcggagtttgagggcggggttacggagttattttcggcggttgtgggcggaaaatttaaaattttt

SEQ ID NO: 3452 - DNA, 654 bp, Artificial Sequence
  chemically treated genomic DNA (Homo sapiens) CpG-island No: 3452
aaaaattttaaattttccgcccacaaccgccgaaaataactccgtaaccccgccctcaaactccgaactttcccccaaacgcctacgctaaatcgcgaaccaaatttaaccgttacgtcaccgaaacccgaacccccgcgataccctaaaaaccgtactcactaccaaatattaataaaacccgcgtctataccgccgaaacttttctatacgtcgactaaaactccgacaaaccgaaataatactctcacgaatactttcaaaaaaaaccgctatcttacgaaaaaaacttaaactctacctaacatccaacgacaaaaacgaaaaaaatcgcgacgactcgcgaacctaaactacgcgacccaaatccaaatccccaacacgcgcattaaaaccgcaacgctaccgacaacccgatcccgcgctctacaaaccgtaccgcgaccccccaaaaaaaatcactcgctcctatttaaatcaaccctttccaacaactactatataaccgacccgaaaccaacgccgcccgaatacctcgcgaaacgaaaaaaaacgactaaaccaaactaacaacaacgcgatcgctaaaaactaaaacttcatacgaaaacccgaacaaaacgaaaactccgttccaaaaaaatttattaacgc

SEQ ID NO: 3453 - DNA, 1000 bp, Artificial Sequence
  chemically treated genomic DNA (Homo sapiens) CpG-island No: 3453
tcggggatttaagttttcggggcgtcgttagattgggatgagggtggcgttacgggtaggcgaggttggggtgggggtttttagcgtttggtcgagtttgattgaaagagtttcgggatttgggcggagtaggggttcgcgcgtttatttcgttttatttgatgaatttattttcgcgtcgtagggtttttattacggtgggcggttttaattgtagcgcgtggacgtcgggttgggcgttcgttatggttcggttaggggcgggtcggggatttacggagttttgacggggatcgacggcgtcgttgtttttatcgcgcggttcgtttcggtttcgcggcgttagtgttcgttcgttcgttattttgtttcggatcgattatattttttgcggggttcgggcggggcggggatcgggttttttttttttttttttcgcggttgttttttcgtttttttttttttttgttttttttttttttttcgtgttttttcgttttttttttttgtttcggtttcgcgggcgttttttgtttttcgttcgtggttgtttgtttttgttgtgagtggtggtttttcggtttttcggtttcggcgtgtggtgggttgtttttttgcgttgtttttttcgttcgggttgttttttttgtgttttttttttttttcggtgcggcgtcgggtcggtcgttgttgttttcgtttttgttttcggtgggttcgcgtgtgcggttattttgcgggtttttcggtttcggttcgtttgttttcgtcgtgtgcgtcgtttcgttgcgtgtgcgtttgtgtttcgtttggttcgtttttttcgttttttgtgtttttttcgcgtaatttgagtttcggttcgttttgttttttgtgttttcgtggatttttttcgtggtttcgattacgttatgcgtttttgtcggtttcgttttttttttgtttttcgttttttcggcgtttttcgtttattcgttgcggatttttattttagttt

SEQ ID NO: 3454 - DNA, 1000 bp, Artificial Sequence
  chemically treated genomic DNA (Homo sapiens) CpG-island No: 3454
aaactaaaataaaaatccgcaacgaataaacgaaaaacgccgaaaaaacgaaaaacaaaaaaaaaacgaaaccgacaaaaacgcataacgtaatcgaaaccacgaaaaaaatccacgaaaacacaaaaaacaaaacgaaccgaaactcaaattacgcgaaaaaaacacaaaaaacgaaaaaaacgaaccaaacgaaacacaaacgcacacgcaacgaaacgacgcacacgacgaaaacaaacgaaccgaaaccgaaaaacccgcaaaataaccgcacacgcgaacccaccgaaaacaaaaacgaaaacaacaacgaccgacccgacgccgcaccgaaaaaaaaaaaaaacacaaaaaaaacaacccgaacgaaaaaaacaacgcaaaaaaacaacccaccacacgccgaaaccgaaaaaccgaaaaaccaccactcacaacaaaaacaaacaaccacgaacgaaaaacaaaaaacgcccgcgaaaccgaaacaaaaaaaaaaaacgaaaaaacacgaaaaaaaaaaaaaaaacaaaaaaaaaaaaaaacgaaaaaacaaccgcgaaaaaaaaaaaaaaaaaacccgatccccgccccgcccgaaccccgcaaaaaatataatcgatccgaaacaaaataacgaacgaacgaacactaacgccgcgaaaccgaaacgaaccgcgcgataaaaacaacgacgccgtcgatccccgtcaaaactccgtaaatccccgacccgcccctaaccgaaccataacgaacgcccaacccgacgtccacgcgctacaattaaaaccgcccaccgtaataaaaaccctacgacgcgaaaataaattcatcaaataaaacgaaataaacgcgcgaacccctactccgcccaaatcccgaaactctttcaatcaaactcgaccaaacgctaaaaacccccaccccaacctcgcctacccgtaacgccaccctcatcccaatctaacgacgccccgaaaacttaaatccccga

SEQ ID NO: 3455 - DNA, 1000 bp, Artificial Sequence
  chemically treated genomic DNA (Homo sapiens) CpG-island No: 3455
agattgagatgaaaattcgtaacgagtgagcgaggaacgtcggggaagcgggagatagaaagggagcgggatcgataagggcgtatgacgtggtcggggttacggagaaaatttacgagggtatagagagtagggcggatcgaggtttaaattacgcgaaaggggtataggaggcgaggggagcggattaggcggggtataggcgtatacgtaacgaggcgacgtatacgacgagggtaagcggatcgggatcgggaagttcgtagagtaatcgtatacgcgagtttatcgggagtaggaacggagataataacgatcggttcggcgtcgtatcggaaaggaaaggaaatataaagagggtaattcgggcggaaagggtagcgtaagagggtagtttattatacgtcggaatcggaaggtcgagggattattatttataatagagatagatagttacggacggggagtagagggcgttcgcgggatcggaatagggagagagaacgggaagatacgggggggggggggaaagtaagaagagggggagacggggaagtaatcgcggggaagaaagaagagaagttcggttttcgtttcgttcgggtttcgtagaggatatggtcggttcgggatagaatggcgggcgggcgggtattgacgtcgcggggtcggagcgggtcgcgcggtgggagtagcggcgtcgtcggttttcgttagggtttcgtgggttttcgattcgtttttggtcgggttatggcgggcgtttagttcggcgtttacgcgttgtagttggagtcgtttatcgtggtggagattttgcggcgcgggagtaagtttattaaatgggacgaggtaagcgcgcgggtttttgtttcgtttaaatttcgggatttttttagttaagttcgattagacgttggggatttttattttagtttcgtttgttcgtggcgttatttttattttagtttggcggcgtttcggaaatttaagttttcga

SEQ ID NO: 3456 - DNA, 1000 bp, Artificial Sequence
  chemically treated genomic DNA (Homo sapiens) CpG-island No: 3456
tcgaaaacttaaatttccgaaacgccgccaaactaaaataaaaataacgccacgaacaaacgaaactaaaataaaaatccccaacgtctaatcgaacttaactaaaaaaatcccgaaatttaaacgaaacaaaaacccgcgcgcttacctcgtcccatttaataaacttactcccgcgccgcaaaatctccaccacgataaacgactccaactacaacgcgtaaacgccgaactaaacgcccgccataacccgaccaaaaacgaatcgaaaacccacgaaaccctaacgaaaaccgacgacgccgctactcccaccgcgcgacccgctccgaccccgcgacgtcaatacccgcccgcccgccattctatcccgaaccgaccatatcctctacgaaacccgaacgaaacgaaaaccgaacttctcttctttcttccccgcgattacttccccgtctccccctcttcttactttcccccccccccccgtatcttcccgttctctctccctattccgatcccgcgaacgccctctactccccgtccgtaactatctatctctattataaataataatccctcgaccttccgattccgacgtataataaactaccctcttacgctaccctttccgcccgaattaccctctttatatttcctttcctttccgatacgacgccgaaccgatcgttattatctccgttcctactcccgataaactcgcgtatacgattactctacgaacttcccgatcccgatccgcttaccctcgtcgtatacgtcgcctcgttacgtatacgcctataccccgcctaatccgctcccctcgcctcctatacccctttcgcgtaatttaaacctcgatccgccctactctctataccctcgtaaattttctccgtaaccccgaccacgtcatacgcccttatcgatcccgctccctttctatctcccgcttccccgacgttcctcgctcactcgttacgaattttcatctcaatct

SEQ ID NO: 3457 - DNA, 636 bp, Artificial Sequence
  chemically treated genomic DNA (Homo sapiens) CpG-island No: 3457
  unsure (556)
tatcgagcgggattttatagatggggggcgtcgcgaagtgattgtagaatataaagagatatggcgtacgttttaaaatcggttttttttagaggatagcggggggtgggttcgttcgtgcgtatgtaaagtagggggcggggttcggggtcgtatggtaattagattagcggggcgggcggcgtttgcgcgttcggacgagtcggggcggagtcggtagcgttagtgggcgggttttggtgtaggtttcgtttcgtagttcgtcgagttaatgcggcgaatatgcgtacgcggtttttgggaggggcgggatcggagatacggagggcggggataatagagtcgagagtaagtggggttagaagcgttttttcgtaacggaggaggcggggtttgttgcgcgcgagaggagtgggcgaggcggtgtaggttgtagtcgcggagttaagagattatttatagatgaaaacgtaagggcgggacgagcggagaggttggatttgttatttatgtttgaggggcggagtttagcgcgtcgtcgcgaggagggaggtgntgtttcgttttttttattttttttttttaaagcgatattaattgagtattcgaatcgtagatttagtagttttatagagt

SEQ ID NO: 3458 - DNA, 636 bp, Artificial Sequence
  chemically treated genomic DNA (Homo sapiens) CpG-island No: 3458
  unsure (81)
actctataaaactactaaatctacgattcgaatactcaattaatatcgctttaaaaaaaaaaaataaaaaaaacgaaacancacctccctcctcgcgacgacgcgctaaactccgcccctcaaacataaataacaaatccaacctctccgctcgtcccgcccttacgttttcatctataaataatctcttaactccgcgactacaacctacaccgcctcgcccactcctctcgcgcgcaacaaaccccgcctcctccgttacgaaaaaacgcttctaaccccacttactctcgactctattatccccgccctccgtatctccgatcccgcccctcccaaaaaccgcgtacgcatattcgccgcattaactcgacgaactacgaaacgaaacctacaccaaaacccgcccactaacgctaccgactccgccccgactcgtccgaacgcgcaaacgccgcccgccccgctaatctaattaccatacgaccccgaaccccgccccctactttacatacgcacgaacgaacccaccccccgctatcctctaaaaaaaaccgattttaaaacgtacgccatatctctttatattctacaatcacttcgcgacgccccccatctataaaatcccgctcgata

SEQ ID NO: 3459 - DNA, 636 bp, Artificial Sequence
  chemically treated genomic DNA (Homo sapiens) CpG-island No: 3459
  unsure (81)
gttttgtggggttattgggtttacggttcgagtgtttagttggtgtcgttttgggggaagggggtagggggaacggggtantattttttttttcgcgacggcgcgttaggtttcgttttttaagtataggtagtaggtttagttttttcgttcgtttcgtttttgcgtttttatttgtaagtggttttttggtttcgcgattgtagtttgtatcgtttcgtttatttttttcgcgcgtagtaagtttcgtttttttcgttacgaaagaacgtttttggttttatttgttttcggttttattgttttcgtttttcgtgttttcggtttcgttttttttaagggtcgcgtacgtatgttcgtcgtattggttcggcgggttgcggggcgggatttgtattaaagttcgtttattggcgttgtcggtttcgtttcgattcgttcgggcgcgtaggcgtcgttcgtttcgttggtttgattattatacgatttcgggtttcgttttttgttttgtatgcgtacggacgggtttatttttcgttgttttttggaggaaatcgattttgaagcgtgcgttatatttttttgtgttttataattatttcgcggcgttttttatttatgggatttcgttcggtg

SEQ ID NO: 3460 - DNA, 636 bp, Artificial Sequence
  chemically treated genomic DNA (Homo sapiens) CpG-island No: 3460
  unsure (556)
caccgaacgaaatcccataaataaaaaacgccgcgaaataattataaaacacaaaaaaatataacgcacgcttcaaaatcgatttcctccaaaaaacaacgaaaaataaacccgtccgtacgcatacaaaacaaaaaacgaaacccgaaatcgtataataatcaaaccaacgaaacgaacgacgcctacgcgcccgaacgaatcgaaacgaaaccgacaacgccaataaacgaactttaatacaaatcccgccccgcaacccgccgaaccaatacgacgaacatacgtacgcgacccttaaaaaaaacgaaaccgaaaacacgaaaaacgaaaacaataaaaccgaaaacaaataaaaccaaaaacgttctttcgtaacgaaaaaaacgaaacttactacgcgcgaaaaaaataaacgaaacgatacaaactacaatcgcgaaaccaaaaaaccacttacaaataaaaacgcaaaaacgaaacgaacgaaaaaactaaacctactacctatacttaaaaaacgaaacctaacgcgccgtcgcgaaaaaaaaaatantaccccgttccccctacccccttcccccaaaacgacaccaactaaacactcgaaccgtaaacccaataaccccacaaaac

SEQ ID NO: 3461 - DNA, 1081 bp, Artificial Sequence
  chemically treated genomic DNA (Homo sapiens) CpG-island No: 3461
ggttcggaggcgttcgaagggaaattcggaggagaggtcggatagcgtaaggcggggataggggaatggtgggtttttgttcgttcgttgcggttgtgatagtattttcgcggttttttcgttttttttcgtttcgttttgttttttggttggttttttagggtgttttcgcgtttcgtcgggttttcgaggaatttaggggcgggtttcggtcgtcgtatttaggcgaggaggggtgttggggacgtttagttttcggaaaaagcggggcgggggttcgtaaaggttatatcggggcggtagttttcgagatagttgttagttcgagatagcgggcggcggcgtttacgcgtatatacgtttcggtacgcgtcgttaagcgcgggtataaagattcgcgcgtttacgttttatttcgaggttgtagcgtcgcgtcgtttcgttgtacgtacgtattttatttgtatttttcgtagacgtttcggtattttcggtttttatgggcgtgtcggtcgcgttagggtatttagagtttacgtatacgtgtgtggatattagcgtgtatacgttagatagtagggttatcgcgtagcgttcgtagttcgtttttatcgtttttttcgcgttcgtatagcgacgtttcggagcgtggcgggcggcgggatcggcggttatattattttcggaggcgtttacgcgcgagaggtgggtatttcgttcggttagtcgtttttggggcgtttttgtttttgagttttgttcgcgtatcggagttcgtatcgtatttattgtcggtttcgttgcggttgcggttgaggttcgggttttagtacggtttcgtcggtgtcgattgggtcgcggaggcggtaggggcggaacgggcggtcgtcggggttgggatttttttttcgtcggtagaagttttttttttttcgcggttaattttttcggcgtcgcgttttttttcgtgtagcgttttcgtcgtcggcgtcgttttaagtcgtttatttgcggtcgtttggttttttatagtcggttagtttcgggaggtgggtggtagaggagtcggagaggggttgta

SEQ ID NO: 3462 - DNA, 1081 bp, Artificial Sequence
  chemically treated genomic DNA (Homo sapiens) CpG-island No: 3462
tacaacccctctccgactcctctaccacccacctcccgaaactaaccgactataaaaaaccaaacgaccgcaaataaacgacttaaaacgacgccgacgacgaaaacgctacacgaaaaaaaacgcgacgccgaaaaaattaaccgcgaaaaaaaaaaaacttctaccgacgaaaaaaaaatcccaaccccgacgaccgcccgttccgcccctaccgcctccgcgacccaatcgacaccgacgaaaccgtactaaaacccgaacctcaaccgcaaccgcaacgaaaccgacaataaatacgatacgaactccgatacgcgaacaaaactcaaaaacaaaaacgccccaaaaacgactaaccgaacgaaatacccacctctcgcgcgtaaacgcctccgaaaataatataaccgccgatcccgccgcccgccacgctccgaaacgtcgctatacgaacgcgaaaaaaacgataaaaacgaactacgaacgctacgcgataaccctactatctaacgtatacacgctaatatccacacacgtatacgtaaactctaaataccctaacgcgaccgacacgcccataaaaaccgaaaataccgaaacgtctacgaaaaatacaaataaaatacgtacgtacaacgaaacgacgcgacgctacaacctcgaaataaaacgtaaacgcgcgaatctttatacccgcgcttaacgacgcgtaccgaaacgtatatacgcgtaaacgccgccgcccgctatctcgaactaacaactatctcgaaaactaccgccccgatataacctttacgaacccccgccccgctttttccgaaaactaaacgtccccaacacccctcctcgcctaaatacgacgaccgaaacccgcccctaaattcctcgaaaacccgacgaaacgcgaaaacaccctaaaaaaccaaccaaaaaacaaaacgaaacgaaaaaaaacgaaaaaaccgcgaaaatactatcacaaccgcaacgaacgaacaaaaacccaccattcccctatccccgccttacgctatccgacctctcctccgaatttcccttcgaacgcctccgaacc

SEQ ID NO: 3463 - DNA, 1081 bp, Artificial Sequence
  chemically treated genomic DNA (Homo sapiens) CpG-island No: 3463
tgtaattttttttcggtttttttgttatttatttttcggggttggtcggttgtggggagttaggcggtcgtaggtaaacggtttggggcggcgtcggcggcgagggcgttgtacggagggaagcgcggcgtcggaggggttaatcgcgggaggaggggggtttttgtcggcgggaggggggttttagtttcggcggtcgttcgtttcgtttttgtcgttttcgcggtttagtcggtatcggcgaggtcgtgttggaattcgggttttagtcgtagtcgtagcggggtcgatagtaagtgcggtgcgggtttcggtgcgcgggtaggatttaggggtagggacgttttaggggcgattggtcgggcggggtgtttatttttcgcgcgtgggcgttttcgggagtggtgtggtcgtcggtttcgtcgttcgttacgtttcgaggcgtcgttgtgcggacgcgggggaggcggtgggagcgagttgcgggcgttgcgcggtggttttgttgtttggcgtgtgtacgttagtgtttatatacgtgtgcgtgggttttgggtgttttggcgcggtcggtacgtttatgggggtcggggatgtcggggcgtttgcggagagtgtaggtggggtgcgtgcgtgtagcggggcggcgcggcgttgtagtttcgggatggagcgtgggcgcgcgggtttttgtgttcgcgtttggcggcgcgtgtcggggcgtgtgtgcgcgtgggcgtcgtcgttcgttgtttcggattgatagttgtttcgggggttgtcgtttcggtgtggtttttgcggattttcgtttcgtttttttcgggaattgggcgtttttagtattttttttcgtttgggtgcggcggtcgggattcgtttttgggtttttcgaaagttcggcggggcgcgggggtattttggagggttagttaggaagtagggcgaggcgagaggggacggagaagtcgcggagatgttgttatagtcgtagcgggcgagtagggatttattatttttttgttttcgttttgcgttgttcggtttttttttcgggttttttttcggacgttttcgagtt

SEQ ID NO: 3464 - DNA, 1081 bp, Artificial Sequence
  chemically treated genomic DNA (Homo sapiens) CpG-island No: 3464
aactcgaaaacgtccgaaaaaaaacccgaaaaaaaaaccgaacaacgcaaaacgaaaacaaaaaaataataaatccctactcgcccgctacgactataacaacatctccgcgacttctccgtcccctctcgcctcgccctacttcctaactaaccctccaaaatacccccgcgccccgccgaactttcgaaaaacccaaaaacgaatcccgaccgccgcacccaaacgaaaaaaaatactaaaaacgcccaattcccgaaaaaaacgaaacgaaaatccgcaaaaaccacaccgaaacgacaacccccgaaacaactatcaatccgaaacaacgaacgacgacgcccacgcgcacacacgccccgacacgcgccgccaaacgcgaacacaaaaacccgcgcgcccacgctccatcccgaaactacaacgccgcgccgccccgctacacgcacgcaccccacctacactctccgcaaacgccccgacatccccgacccccataaacgtaccgaccgcgccaaaacacccaaaacccacgcacacgtatataaacactaacgtacacacgccaaacaacaaaaccaccgcgcaacgcccgcaactcgctcccaccgcctcccccgcgtccgcacaacgacgcctcgaaacgtaacgaacgacgaaaccgacgaccacaccactcccgaaaacgcccacgcgcgaaaaataaacaccccgcccgaccaatcgcccctaaaacgtccctacccctaaatcctacccgcgcaccgaaacccgcaccgcacttactatcgaccccgctacgactacgactaaaacccgaattccaacacgacctcgccgataccgactaaaccgcgaaaacgacaaaaacgaaacgaacgaccgccgaaactaaaacccccctcccgccgacaaaaacccccctcctcccgcgattaacccctccgacgccgcgcttccctccgtacaacgccctcgccgccgacgccgccccaaaccgtttacctacgaccgcctaactccccacaaccgaccaaccccgaaaaataaataacaaaaaaaccgaaaaaaaattaca

SEQ ID NO: 3465 - DNA, 589 bp, Artificial Sequence
  chemically treated genomic DNA (Homo sapiens) CpG-island No: 3465
cggttttcgttgtttcgttttttttttcgttcgcgtttgcgcgggcgtcgttcgttacgtaaattgcgtagcggttcggttggattcgtagtttagcgtcgtattcggcgtgaaatcgtacgagaattggcgcgagttgcgtcgttggcgggcgttcggggttacgggaggcggtaggcgggcggtcgagttgcgggggtcgtgtcgtatttagggggttttcgggtgggtcgtgtttcgtgtcgttcgtttttatttgtatgggggttcgttagtttttacgttcgttttttttatatttaaatcggggtcgtgtcgttcggtcgggggcggtaacggattttcgtttttcggtttttgaagaaaattttcgtttatagttaagatggttttcgggtttcgttttcgggtttgaattcgcggagtttcgaatttttcgcgcgggttcgtttttcgtttcggcgcgttcgcggttttgtttatttggtcggtcgtttgttaggcgtgaagtttttacgggttttacggtttttttttatcgggttttcggtttttttttcgcgttcgggtagttattttagttagggag

SEQ ID NO: 3466 - DNA, 589 bp, Artificial Sequence
  chemically treated genomic DNA (Homo sapiens) CpG-island No: 3466
ctccctaactaaaataactacccgaacgcgaaaaaaaaaccgaaaacccgataaaaaaaaaccgtaaaacccgtaaaaacttcacgcctaacaaacgaccgaccaaataaacaaaaccgcgaacgcgccgaaacgaaaaacgaacccgcgcgaaaaattcgaaactccgcgaattcaaacccgaaaacgaaacccgaaaaccatcttaactataaacgaaaattttcttcaaaaaccgaaaaacgaaaatccgttaccgcccccgaccgaacgacacgaccccgatttaaatataaaaaaaacgaacgtaaaaactaacgaacccccatacaaataaaaacgaacgacacgaaacacgacccacccgaaaaccccctaaatacgacacgacccccgcaactcgaccgcccgcctaccgcctcccgtaaccccgaacgcccgccaacgacgcaactcgcgccaattctcgtacgatttcacgccgaatacgacgctaaactacgaatccaaccgaaccgctacgcaatttacgtaacgaacgacgcccgcgcaaacgcgaacgaaaaaaaaaacgaaacaacgaaaaccg

SEQ ID NO: 3467 - DNA, 589 bp, Artificial Sequence
  chemically treated genomic DNA (Homo sapiens) CpG-island No: 3467
ttttttggttgggatggttgttcgggcgcgggaggagggtcggggattcggtgagggaggatcgtagggttcgtgggggttttacgtttggtaggcggtcggttaggtgagtagggtcgcgggcgcgtcggggcgaggggcgggttcgcgcgggggattcggggtttcgcgggtttaggttcgggggcggggttcgggggttattttggttatgggcggaagttttttttagagatcgagggacgggaattcgttgtcgttttcggtcgggcggtacgatttcgatttgggtataggagagacgagcgtgggaattggcggatttttatataagtaaaggcgggcggtacggggtacggtttattcggggattttttggatgcggtacggttttcgtaattcggtcgttcgtttgtcgtttttcgtaatttcgggcgttcgttagcggcgtagttcgcgttaattttcgtacggttttacgtcgggtgcggcgttggattgcggatttagtcgggtcgttgcgtaatttgcgtagcgaacggcgttcgcgtaggcgcggacggggaagggggcggagtagcgggagtcg

SEQ ID NO: 3468 - DNA, 589 bp, Artificial Sequence
  chemically treated genomic DNA (Homo sapiens) CpG-island No: 3468
cgactcccgctactccgcccccttccccgtccgcgcctacgcgaacgccgttcgctacgcaaattacgcaacgacccgactaaatccgcaatccaacgccgcacccgacgtaaaaccgtacgaaaattaacgcgaactacgccgctaacgaacgcccgaaattacgaaaaacgacaaacgaacgaccgaattacgaaaaccgtaccgcatccaaaaaatccccgaataaaccgtaccccgtaccgcccgcctttacttatataaaaatccgccaattcccacgctcgtctctcctatacccaaatcgaaatcgtaccgcccgaccgaaaacgacaacgaattcccgtccctcgatctctaaaaaaaacttccgcccataaccaaaataacccccgaaccccgcccccgaacctaaacccgcgaaaccccgaatcccccgcgcgaacccgcccctcgccccgacgcgcccgcgaccctactcacctaaccgaccgcctaccaaacgtaaaacccccacgaaccctacgatcctccctcaccgaatccccgaccctcctcccgcgcccgaacaaccatcccaaccaaaaaa

SEQ ID NO: 3469 - DNA, 940 bp, Artificial Sequence
  chemically treated genomic DNA (Homo sapiens) CpG-island No: 3469
ggcgtttttaagttcggttattacggagattattttcgcgaggacgttcggggttattattcgggttaggttttttatttggttttttggtatcgtttttcggaggacgcggtatcgttttcgggtttgtagtttcgttttcgatagaattagatttttttttcggagtcgtagttacgttatttatcggttgaagtttcgtttttagcgttttcgtttcgtttttttttgttttcgatttcgaggtttcgttttttattttttttagttttttttttaagagttaggtttcgtttttcgatttttttagtttcgtttttcgtcgtcgggtttcgttttttattggtattagttcggaggttttattcgtttcggttttacgtttcgtttcgagttttaggatttcgtttcgtgcggcgtgagaattttttttttgcggtattttcggatagtttcggtttttatttttaattttttcgttatttagttttcgttgatattcggagttcggttcgtttttgttcggtttgatttagtttgtttttttgtatttcggttttttttagttcgggttgtggttttcgtttattttttcgtcgcgttttcggagttaatttcggtggtgttgtcgtttttgcgtaggcgcgttttcgtcgttattaggtcgggttacgtcgtttttttttattggatcgtgcgaaattcgcggttatacgttcgttggtacgggtttttttcgagtttcgttttcgcgacgtcgttgttttgcgttattttcggcggagcggtagtttgtaaggttaggtgaaagtgattttcgaaaaggtcggagatattttcggtcgaggtgatagtaaggttaggcgggcgtgggttttcggagggggttttgaggcgttattttaagtcgtttttagttttttttatagtatttttgttt

SEQ ID NO: 3470 - DNA, 940 bp, Artificial Sequence
  chemically treated genomic DNA (Homo sapiens) CpG-island No: 3470
aaacaaaaatactataaaaaaaactaaaaacgacttaaaataacgcctcaaaaccccctccgaaaacccacgcccgcctaaccttactatcacctcgaccgaaaatatctccgaccttttcgaaaatcactttcacctaaccttacaaactaccgctccgccgaaaataacgcaaaacaacgacgtcgcgaaaacgaaactcgaaaaaaacccgtaccaacgaacgtataaccgcgaatttcgcacgatccaataaaaaaaaacgacgtaacccgacctaataacgacgaaaacgcgcctacgcaaaaacgacaacaccaccgaaattaactccgaaaacgcgacgaaaaaataaacgaaaaccacaacccgaactaaaaaaaaccgaaatacaaaaaaacaaactaaatcaaaccgaacaaaaacgaaccgaactccgaatatcaacgaaaactaaataacgaaaaaattaaaaataaaaaccgaaactatccgaaaataccgcaaaaaaaaaattctcacgccgcacgaaacgaaatcctaaaactcgaaacgaaacgtaaaaccgaaacgaataaaacctccgaactaataccaataaaaaacgaaacccgacgacgaaaaacgaaactaaaaaaatcgaaaaacgaaacctaactcttaaaaaaaaaactaaaaaaaataaaaaacgaaacctcgaaatcgaaaacaaaaaaaaacgaaacgaaaacgctaaaaacgaaacttcaaccgataaataacgtaactacgactccgaaaaaaaaatctaattctatcgaaaacgaaactacaaacccgaaaacgataccgcgtcctccgaaaaacgataccaaaaaaccaaataaaaaacctaacccgaataataaccccgaacgtcctcgcgaaaataatctccgtaataaccgaacttaaaaacgcc

SEQ ID NO: 3471 - DNA, 940 bp, Artificial Sequence
  chemically treated genomic DNA (Homo sapiens) CpG-island No: 3471
aaataggagtgttgtgggagaggttgggggcgatttgaaatggcgttttaagatttttttcgggaatttacgttcgtttgattttattattatttcggtcggaagtgttttcggttttttcggaagttatttttatttaattttatagattatcgtttcgtcggaagtgacgtagggtagcggcgtcgcgggggcggggttcgggaaagattcgtgttagcgggcgtgtggtcgcgggtttcgtacggtttaataagggagggcggcgtggttcggtttggtagcgacgaggacgcgtttgcgtagaggcggtagtattatcggggttgatttcgggggcgcggcgaggaggtgagcgggggttatagttcgggttggggggagtcggggtgtaagagggtaggttggattaggtcgggtagaagcggatcgggtttcgagtgttaacgagagttaggtgacgaggaaattgggggtgggggtcggagttgttcggagatgtcgtagggggagggtttttacgtcgtacggggcggagttttgggattcggggcgggacgtggaatcgggacgggtgggattttcgagttggtgttagtggaaggcggagttcggcggcggggggcggagttaggagggtcgggggacggagtttggtttttgaaggaggagttggaggaggtgaaaggcggagtttcggggtcggaagtagagggggacggagcggaggcgttgggggcggggttttagtcggtgagtggcgtggttacggtttcggaaaaggggtttagttttgtcgaaggcggggttgtaggttcgggggcggtatcgcgtttttcgaagggcggtgttaaggagttaagtgaggagtttggttcgagtaatggtttcgggcgttttcgcgggggtggttttcgtggtggtcgggtttggggacgtt

SEQ ID NO: 3472 - DNA, 940 bp, Artificial Sequence
  chemically treated genomic DNA (Homo sapiens) CpG-island No: 3472
aacgtccccaaacccgaccaccacgaaaaccacccccgcgaaaacgcccgaaaccattactcgaaccaaactcctcacttaactccttaacaccgcccttcgaaaaacgcgataccgcccccgaacctacaaccccgccttcgacaaaactaaaccccttttccgaaaccgtaaccacgccactcaccgactaaaaccccgcccccaacgcctccgctccgtccccctctacttccgaccccgaaactccgcctttcacctcctccaactcctccttcaaaaaccaaactccgtcccccgaccctcctaactccgccccccgccgccgaactccgccttccactaacaccaactcgaaaatcccacccgtcccgattccacgtcccgccccgaatcccaaaactccgccccgtacgacgtaaaaaccctccccctacgacatctccgaacaactccgacccccacccccaatttcctcgtcacctaactctcgttaacactcgaaacccgatccgcttctacccgacctaatccaacctaccctcttacaccccgactccccccaacccgaactataacccccgctcacctcctcgccgcgcccccgaaatcaaccccgataatactaccgcctctacgcaaacgcgtcctcgtcgctaccaaaccgaaccacgccgccctcccttattaaaccgtacgaaacccgcgaccacacgcccgctaacacgaatctttcccgaaccccgcccccgcgacgccgctaccctacgtcacttccgacgaaacgataatctataaaattaaataaaaataacttccgaaaaaaccgaaaacacttccgaccgaaataataataaaatcaaacgaacgtaaattcccgaaaaaaatcttaaaacgccatttcaaatcgcccccaacctctcccacaacactcctattt

SEQ ID NO: 3473 - DNA, 638 bp, Artificial Sequence
  chemically treated genomic DNA (Homo sapiens) CpG-island No: 3473
cgatttcgagtttagtattcggtttattgtatagggatttcgcgttttatagttgcgttttttttgattttcgtaattcggtgcgcggttcgcggaacgtttcgatttttaggggtacggaaggtcgaggcgtgtcgggggagttaggagtagttggttggcgggcgtcgcgggttttttcggttacgtgatatttcggataacgtgcgtcgttacgtgacggtagagtttgtgagcgttttttttacgtgacggaggcgtttgtacgtggattaatggggaggcgggggcggggtcggtaggggcggtgcgcgggaagggatttcggattcggaggtcgcggagagttgggtagtgttggtcgttggcggagcgttggggtagtatgaagtgtttggttacgggcggtaacgtgaagggtgagtgtaggtcggtttggtagcggcggtgtagtagtcgcggagtcgttagtttaattttttttcgttttttttttcgtagtgttcggtaaggtcgtttattttttgtttcgtatcggggacgagttttatttggaatttttggaggacggggtgaggggttacggtgtggggggcgggtgggattttattcgggatcgggttattcgggattagatt

SEQ ID NO: 3474 - DNA, 638 bp, Artificial Sequence
  chemically treated genomic DNA (Homo sapiens) CpG-island No: 3474
aatctaatcccgaataacccgatcccgaataaaatcccacccgccccccacaccgtaacccctcaccccgtcctccaaaaattccaaataaaactcgtccccgatacgaaacaaaaaataaacgaccttaccgaacactacgaaaaaaaaaacgaaaaaaaattaaactaacgactccgcgactactacaccgccgctaccaaaccgacctacactcacccttcacgttaccgcccgtaaccaaacacttcatactaccccaacgctccgccaacgaccaacactacccaactctccgcgacctccgaatccgaaatcccttcccgcgcaccgcccctaccgaccccgcccccgcctccccattaatccacgtacaaacgcctccgtcacgtaaaaaaaacgctcacaaactctaccgtcacgtaacgacgcacgttatccgaaatatcacgtaaccgaaaaaacccgcgacgcccgccaaccaactactcctaactcccccgacacgcctcgaccttccgtacccctaaaaatcgaaacgttccgcgaaccgcgcaccgaattacgaaaatcaaaaaaaacgcaactataaaacgcgaaatccctatacaataaaccgaatactaaactcgaaatcg

SEQ ID NO: 3475 - DNA, 638 bp, Artificial Sequence
  chemically treated genomic DNA (Homo sapiens) CpG-island No: 3475
agtttagtttcgggtgattcggtttcgggtggagttttattcgttttttatatcgtagttttttatttcgttttttaagggttttaggtagagttcgttttcgatgcgggatagggagtggacggttttgtcgagtattgcggggagaagagcggaagggggttaggttggcggtttcgcggttgttgtatcgtcgttgttaggtcgatttgtatttattttttacgttgtcgttcgtgattaggtattttatgttgttttagcgtttcgttagcggttaatattgtttagtttttcgcgattttcgggttcggggttttttttcgcgtatcgtttttgtcggtttcgttttcgtttttttattggtttacgtgtaggcgttttcgttacgtgagaaaaacgtttataggttttgtcgttacgtgacggcgtacgttgttcggggtgttacgtgatcggggaggttcgcggcgttcgttagttagttgtttttggttttttcggtacgtttcggtttttcgtgtttttggagatcggggcgtttcgcgggtcgcgtatcggattgcgaaggttagagaggacgtagttgtggggcgcgaggtttttgtgtagtggatcgagtgttggattcggagtcg

SEQ ID NO: 3476 - DNA, 638 bp, Artificial Sequence
  chemically treated genomic DNA (Homo sapiens) CpG-island No: 3476
cgactccgaatccaacactcgatccactacacaaaaacctcgcgccccacaactacgtcctctctaaccttcgcaatccgatacgcgacccgcgaaacgccccgatctccaaaaacacgaaaaaccgaaacgtaccgaaaaaaccaaaaacaactaactaacgaacgccgcgaacctccccgatcacgtaacaccccgaacaacgtacgccgtcacgtaacgacaaaacctataaacgtttttctcacgtaacgaaaacgcctacacgtaaaccaataaaaaaacgaaaacgaaaccgacaaaaacgatacgcgaaaaaaaaccccgaacccgaaaatcgcgaaaaactaaacaatattaaccgctaacgaaacgctaaaacaacataaaatacctaatcacgaacgacaacgtaaaaaataaatacaaatcgacctaacaacgacgatacaacaaccgcgaaaccgccaacctaacccccttccgctcttctccccgcaatactcgacaaaaccgtccactccctatcccgcatcgaaaacgaactctacctaaaacccttaaaaaacgaaataaaaaactacgatataaaaaacgaataaaactccacccgaaaccgaatcacccgaaactaaact

SEQ ID NO: 3477 - DNA, 500 bp, Artificial Sequence
  chemically treated genomic DNA (Homo sapiens) CpG-island No: 3477
ggtagcgtagtcgggattgtttgttttcgttagttatttcgaatcgggtttgacgttcgaagtgtagcggtttaaagcgcgcgatttcgttggattcgggtttagggttttcgttttttagggatagttcgaaggtattattaatgttgaattggggtcgggcggcgtttatggtttcggttcgtttaggcgtcgtgcgtcgtcgttatttgcgtttatatatttagcgtcgtcgttgtttcgttttcgtatgtttcgttttttcgattttggtttcgttttacgcgtcggtttcgttttcgttcgttttaagtaggttagagttgtcgagttttgagcgggttgatgggtgggagttttttttagacggagcgcgttcgtttcgtgacgttatttagtggtcgttatggtaagcgatagttcgtgtcgggttcggatatattttttaggcgtgtatgtgcgggggtttggaggggtttttacgttttaatttttaggtt

SEQ ID NO: 3478 - DNA, 500 bp, Artificial Sequence
  chemically treated genomic DNA (Homo sapiens) CpG-island No: 3478
aacctaaaaattaaaacgtaaaaacccctccaaacccccgcacatacacgcctaaaaaatatatccgaacccgacacgaactatcgcttaccataacgaccactaaataacgtcacgaaacgaacgcgctccgtctaaaaaaaactcccacccatcaacccgctcaaaactcgacaactctaacctacttaaaacgaacgaaaacgaaaccgacgcgtaaaacgaaaccaaaatcgaaaaaacgaaacatacgaaaacgaaacaacgacgacgctaaatatataaacgcaaataacgacgacgcacgacgcctaaacgaaccgaaaccataaacgccgcccgaccccaattcaacattaataataccttcgaactatccctaaaaaacgaaaaccctaaacccgaatccaacgaaatcgcgcgctttaaaccgctacacttcgaacgtcaaacccgattcgaaataactaacgaaaacaaacaatcccgactacgctacc

SEQ ID NO: 3479 - DNA, 500 bp, Artificial Sequence
  chemically treated genomic DNA (Homo sapiens) CpG-island No: 3479
gatttggaggttggggcgtggaagtttttttaagttttcgtatatatacgtttgggggatgtgttcgagttcggtacgggttgtcgtttgttatggcggttattgagtggcgttacggggcgggcgcgtttcgtttggaagaggtttttatttattagttcgtttagggttcggtaattttggtttgtttagggcggacgggggcgggatcggcgcgtggggcggagttagggtcggaggggcggggtatgcgggggcggggtagcggcgacgttgggtgtgtgggcgtagatggcggcggcgtacggcgtttgagcgggtcggggttatgagcgtcgttcggttttagtttagtattgatgatgttttcgagttgtttttggaggacgggggttttgggttcgagtttagcggggtcgcgcgttttgggtcgttgtatttcgagcgttaggttcggttcgaggtggttgacgaagataagtagtttcggttgcgttatt

SEQ ID NO: 3480 - DNA, 500 bp, Artificial Sequence
  chemically treated genomic DNA (Homo sapiens) CpG-island No: 3480
aataacgcaaccgaaactacttatcttcgtcaaccacctcgaaccgaacctaacgctcgaaatacaacgacccaaaacgcgcgaccccgctaaactcgaacccaaaacccccgtcctccaaaaacaactcgaaaacatcatcaatactaaactaaaaccgaacgacgctcataaccccgacccgctcaaacgccgtacgccgccgccatctacgcccacacacccaacgtcgccgctaccccgcccccgcataccccgcccctccgaccctaactccgccccacgcgccgatcccgcccccgtccgccctaaacaaaccaaaattaccgaaccctaaacgaactaataaataaaaacctcttccaaacgaaacgcgcccgccccgtaacgccactcaataaccgccataacaaacgacaacccgtaccgaactcgaacacatcccccaaacgtatatatacgaaaacttaaaaaaacttccacgccccaacctccaaatc

SEQ ID NO: 3481 - DNA, 585 bp, Artificial Sequence
  chemically treated genomic DNA (Homo sapiens) CpG-island No: 3481
gttcggttcgcggatttcggttttttttttttgataggttggggtttagtttcgagatatttttaggtttcgttttcgagtagacgcgcgcgtttagttttagcgtagagaattaattattattcgtttttacgtttagttttttttggtttttgtttttaattaaaatggcgttagttcggaagttgtcgaggtgttaggagttgtcgaagtaagttcggaagttatcgagcgagttcggaagttgtcgaaagggagtagcggggaaggaggatggcggatattatcgtaagatttcgggaggacgggatttaaaaacgtgtgatataggaaggtcgaggagagttttcggatttttaagatgggattaaggttcgtgtttattttatttttttttttttttgcggcgtggtgcgtatgcgaggcgggaggaggttttaggcgagaggttgcgtatgtttagagggtagcgtttattgtttttatcgtttatatgtagaattcgacgttgattgggttgaatttaagtagggggtgaattcgggtttgtttgtttcgttttttggttcggttttgtagtagtat

SEQ ID NO: 3482 - DNA, 585 bp, Artificial Sequence
  chemically treated genomic DNA (Homo sapiens) CpG-island No: 3482
atactactacaaaaccgaaccaaaaaacgaaacaaacaaacccgaattcaccccctacttaaattcaacccaatcaacgtcgaattctacatataaacgataaaaacaataaacgctaccctctaaacatacgcaacctctcgcctaaaacctcctcccgcctcgcatacgcaccacgccgcaaaaaaaaaaaaaaataaaataaacacgaaccttaatcccatcttaaaaatccgaaaactctcctcgaccttcctatatcacacgtttttaaatcccgtcctcccgaaatcttacgataatatccgccatcctccttccccgctactccctttcgacaacttccgaactcgctcgataacttccgaacttacttcgacaactcctaacacctcgacaacttccgaactaacgccattttaattaaaaacaaaaaccaaaaaaaactaaacgtaaaaacgaataataattaattctctacgctaaaactaaacgcgcgcgtctactcgaaaacgaaacctaaaaatatctcgaaactaaaccccaacctatcaaaaaaaaaaaaccgaaatccgcgaaccgaac

SEQ ID NO: 3483 - DNA, 585 bp, Artificial Sequence
  chemically treated genomic DNA (Homo sapiens) CpG-island No: 3483
atgttgttataaggtcgagttagggggcggggtagataggttcgaatttattttttatttaaatttagtttaattagcgtcgagttttgtatgtgagcggtaggggtagtggacgttgttttttgggtatgcgtaatttttcgtttaaggttttttttcgtttcgtatgcgtattacgtcgtagagggggagaagggtagggtagatacgaattttggttttattttgaaagttcgggagtttttttcggtttttttgtattatacgtttttggatttcgttttttcggagttttgcgatgatattcgttatttttttttttcgttgttttttttcggtaattttcggattcgttcggtagttttcggatttgtttcggtaatttttagtatttcggtagttttcgagttagcgttattttggttgagggtagaagttaaaagggattgagcgtggaaacggatggtgattggttttttgcgttggggttgagcgcgcgcgtttgttcgggggcggagtttaggaatgtttcggggttggattttagtttgttaaggaggaagggtcggggttcgcgggtcgggt

SEQ ID NO: 3484 - DNA, 585 bp, Artificial Sequence
  chemically treated genomic DNA (Homo sapiens) CpG-island No: 3484
acccgacccgcgaaccccgacccttcctccttaacaaactaaaatccaaccccgaaacattcctaaactccgcccccgaacaaacgcgcgcgctcaaccccaacgcaaaaaaccaatcaccatccgtttccacgctcaatcccttttaacttctaccctcaaccaaaataacgctaactcgaaaactaccgaaatactaaaaattaccgaaacaaatccgaaaactaccgaacgaatccgaaaattaccgaaaaaaaacaacgaaaaaaaaaaataacgaatatcatcgcaaaactccgaaaaaacgaaatccaaaaacgtataatacaaaaaaaccgaaaaaaactcccgaactttcaaaataaaaccaaaattcgtatctaccctacccttctccccctctacgacgtaatacgcatacgaaacgaaaaaaaaccttaaacgaaaaattacgcatacccaaaaaacaacgtccactacccctaccgctcacatacaaaactcgacgctaattaaactaaatttaaataaaaaataaattcgaacctatctaccccgccccctaactcgaccttataacaacat

SEQ ID NO: 3485 - DNA, 656 bp, Artificial Sequence
  chemically treated genomic DNA (Homo sapiens) CpG-island No: 3485
gaggtggcgttggtttagtgcggtttgggcgaggaggcgtaggtggcggttgtgcggtagcgcgttaaggcggcggtcgaggtcgcgttggtcgtcgtgttggttttggaggtcggtttgagtgtcgagtagcgcggcgggcgtcgggcgtatacggattttttgggtgagtgagggcggtcggggtcggggtcgggagtcgagggttaggggttggagggcggtggttgtcgtagttgagttcgcgtttttcgttcggcgtaggcgtggatttcgcgttgatagcggtcggcggcgtgttgattttagtggttttggagttgaacggcggtttgtgtttggaggcgtgcggcgcgttggaggggttgtgggtcgcgtcgcggttggggtcggcggtcgacgaggcggtggcggcgtcgttggtggagattatgtttcggcggtcggcgcgttgttttatggagggaaaatagttgttggtggtcggcgttggcggcgttagtaagaagttcgtgtgggaggcggcgcgcgattacgggttttaggtgggcggggcgcggggcggggttgggttttaggttttggttcgagtggtggaggcgggatttcggggcggggtttggagtaaaggggcgtttttggggcgggattagtcg

SEQ ID NO: 3486 - DNA, 656 bp, Artificial Sequence
  chemically treated genomic DNA (Homo sapiens) CpG-island No: 3486
cgactaatcccgccccaaaaacgcccctttactccaaaccccgccccgaaatcccgcctccaccactcgaaccaaaacctaaaacccaaccccgccccgcgccccgcccacctaaaacccgtaatcgcgcgccgcctcccacacgaacttcttactaacgccgccaacgccgaccaccaacaactattttccctccataaaacaacgcgccgaccgccgaaacataatctccaccaacgacgccgccaccgcctcgtcgaccgccgaccccaaccgcgacgcgacccacaacccctccaacgcgccgcacgcctccaaacacaaaccgccgttcaactccaaaaccactaaaatcaacacgccgccgaccgctatcaacgcgaaatccacgcctacgccgaacgaaaaacgcgaactcaactacgacaaccaccgccctccaacccctaaccctcgactcccgaccccgaccccgaccgccctcactcacccaaaaaatccgtatacgcccgacgcccgccgcgctactcgacactcaaaccgacctccaaaaccaacacgacgaccaacgcgacctcgaccgccgccttaacgcgctaccgcacaaccgccacctacgcctcctcgcccaaaccgcactaaaccaacgccacctc

SEQ ID NO: 3487 - DNA, 656 bp, Artificial Sequence
  chemically treated genomic DNA (Homo sapiens) CpG-island No: 3487
cggttggtttcgttttaaggacgtttttttgttttaggtttcgtttcggggtttcgtttttattattcgggttaggatttggggtttagtttcgtttcgcgtttcgtttatttggagttcgtagtcgcgcgtcgttttttatacgaattttttgttgacgtcgttagcgtcgattattagtagttgttttttttttatgaggtagcgcgtcgatcgtcgaagtatggtttttattagcggcgtcgttatcgtttcgtcggtcgtcggttttagtcgcggcgcggtttatagtttttttagcgcgtcgtacgtttttagatataggtcgtcgtttagttttagggttattggggttagtacgtcgtcggtcgttgttagcgcgaaatttacgtttgcgtcgggcgggaggcgcgagtttagttacggtagttatcgttttttagtttttggttttcggttttcggtttcggtttcggtcgtttttatttatttaggaagttcgtgtgcgttcggcgttcgtcgcgttgttcggtatttaggtcggtttttagagttagtacggcggttagcgcggtttcggtcgtcgttttgacgcgttgtcgtatagtcgttatttgcgttttttcgtttaggtcgtattgggttagcgttatttt

SEQ ID NO: 3488 - DNA, 656 bp, Artificial Sequence
  chemically treated genomic DNA (Homo sapiens) CpG-island No: 3488
aaaataacgctaacccaatacgacctaaacgaaaaaacgcaaataacgactatacgacaacgcgtcaaaacgacgaccgaaaccgcgctaaccgccgtactaactctaaaaaccgacctaaataccgaacaacgcgacgaacgccgaacgcacacgaacttcctaaataaataaaaacgaccgaaaccgaaaccgaaaaccgaaaaccaaaaactaaaaaacgataactaccgtaactaaactcgcgcctcccgcccgacgcaaacgtaaatttcgcgctaacaacgaccgacgacgtactaaccccaataaccctaaaactaaacgacgacctatatctaaaaacgtacgacgcgctaaaaaaactataaaccgcgccgcgactaaaaccgacgaccgacgaaacgataacgacgccgctaataaaaaccatacttcgacgatcgacgcgctacctcataaaaaaaaaacaactactaataatcgacgctaacgacgtcaacaaaaaattcgtataaaaaacgacgcgcgactacgaactccaaataaacgaaacgcgaaacgaaactaaaccccaaatcctaacccgaataataaaaacgaaaccccgaaacgaaacctaaaacaaaaaaacgtccttaaaacgaaaccaaccg

SEQ ID NO: 3489 - DNA, 510 bp, Artificial Sequence
  chemically treated genomic DNA (Homo sapiens) CpG-island No: 3489
tgcggtatcggtttcgggcggtttcggatttcggtttttgggaagtaggaagtaggatttaggaagtgatagagggattcggagcgggggcggggtaggggttcgcgggggcggggtcgaggttacgcgcggaggggttgggcgggaggttgagcggcgtcggggggtcgggagcggggtcgtcggggacggggttagagagagttttttttttaggattcggtggagcgtttttatcgtagttttttcggaagaagggggcggggcggggtagggtcgacggcggtcgtcgtagaggcgtcgtaggtgcgggtgtagttttatagcggattcgaggttttttcgcgtttttgttttttataatggtattcgtaggagtttttaggattgggtgaggtttcgttttttcggttttcgacggaacgtatatttttaaggggttttattatcgtttttaataaataaatgtagaatttatacggatagtggatatgtttacgtgattttttt

SEQ ID NO: 3490 - DNA, 510 bp, Artificial Sequence
  chemically treated genomic DNA (Homo sapiens) CpG-island No: 3490
aaaaaaatcacgtaaacatatccactatccgtataaattctacatttatttattaaaaacgataataaaaccccttaaaaatatacgttccgtcgaaaaccgaaaaaacgaaacctcacccaatcctaaaaactcctacgaataccattataaaaaacaaaaacgcgaaaaaacctcgaatccgctataaaactacacccgcacctacgacgcctctacgacgaccgccgtcgaccctaccccgccccgcccccttcttccgaaaaaactacgataaaaacgctccaccgaatcctaaaaaaaaaactctctctaaccccgtccccgacgaccccgctcccgaccccccgacgccgctcaacctcccgcccaacccctccgcgcgtaacctcgaccccgcccccgcgaacccctaccccgcccccgctccgaatccctctatcacttcctaaatcctacttcctacttcccaaaaaccgaaatccgaaaccgcccgaaaccgataccgca

SEQ ID NO: 3491 - DNA, 510 bp, Artificial Sequence
  chemically treated genomic DNA (Homo sapiens) CpG-island No: 3491
aaaagagttacgtgaatatatttattgttcgtgtagattttatatttatttgttgggggcggtaatggggttttttggaggtgtgcgtttcgtcgggggtcgggaaggcggggttttatttaattttggagatttttgcggatgttattatgaggagtaagaacgcgaaggggtttcgggttcgttgtaaggttgtattcgtatttgcggcgtttttgcggcggtcgtcgtcggttttgtttcgtttcgtttttttttttcggaggagttgcggtgggggcgttttatcgggttttaggaaaggggttttttttggtttcgttttcggcggtttcgttttcggtttttcggcgtcgtttagtttttcgtttagttttttcgcgcgtgatttcggtttcgttttcgcgagtttttgtttcgttttcgtttcgggtttttttgttattttttgaattttgttttttgttttttagaggtcgggattcggagtcgttcgaagtcggtgtcgta

SEQ ID NO: 3492 - DNA, 510 bp, Artificial Sequence
  chemically treated genomic DNA (Homo sapiens) CpG-island No: 3492
tacgacaccgacttcgaacgactccgaatcccgacctctaaaaaacaaaaaacaaaattcaaaaaataacaaaaaaacccgaaacgaaaacgaaacaaaaactcgcgaaaacgaaaccgaaatcacgcgcgaaaaaactaaacgaaaaactaaacgacgccgaaaaaccgaaaacgaaaccgccgaaaacgaaaccaaaaaaaacccctttcctaaaacccgataaaacgcccccaccgcaactcctccgaaaaaaaaaaacgaaacgaaacaaaaccgacgacgaccgccgcaaaaacgccgcaaatacgaatacaaccttacaacgaacccgaaaccccttcgcgttcttactcctcataataacatccgcaaaaatctccaaaattaaataaaaccccgccttcccgacccccgacgaaacgcacacctccaaaaaaccccattaccgcccccaacaaataaatataaaatctacacgaacaataaatatattcacgtaactctttt

SEQ ID NO: 3493 - DNA, 1260 bp, Artificial Sequence
  chemically treated genomic DNA (Homo sapiens) CpG-island No: 3493
  unsure (481)
tttttcgaggggttcggtcgggaagttgtacggcggcggttgttagttggttttttttgttggcggtgatttttcgttttgggatttttttcggcgttgcgttttttttttgtgtggtttcggcgttttcggtttcgttttttttcgttttcgttcggtcgtttttttttcgcggcgggggcgggggcgggggcgggggcggggttcggggtatcgggtttcgggttttgttcggcgttgttttttttcgcgcgttaattttttttttgttcgggttgagcggttgttttcgtcgtttcgtggttagtgatagatttttttttgtcgggttcggttcggttgcgttagtttttcgttaaataataattatttttaggttacggtggttcgggggatttcgcggtcgtcgttcgtcgtttttatttgtcgtcggtttttcggtcgtgggtattatggagggtttcggtcgcgcggcgcgtanttaggaagtcgcgagtttcgcggcgcggttcggttcgttcggttcggtttagttaggttcggcgttgtttttcgttttttttttcgtcgttcgttttttttttcgttcgtttttttatttttttcggcgggtcggggagggagagcggcgcggttcgaggtgtcggttttttttcgtttttcgtcgttcggtttcgggttttttcggttttttttttttttttttttttagtttttttttttattcgtagtttcgtttttcgtttcggattttttggtttcgattggtgcgcggggttttggggttgcggtttttacggttcgtttcgttggggttttaggttgtcgtttttttaggtttgcgatcgttcgggtttttcgtcgttttcggttattttttggtttcgtcgtgcggattttaggaatgtcgcgttttcgttcggtttttttcgagggcgtttagtcgtgtttttttcggttcgagtttagttttttggttcggtttcggcgcggggttttcgggggttagggtaggacgggaatcggatttcgtggttgtttggcggggcgggggtcggggtttcggtcgtttggtttttatttgttcggaggtttatggggttggggtcgggtcggtcgggtgcggtttttttttcggaggttggcggagtgggagggcgagtcgcggtttcggcgaagttttaataattttattcgttaggtttattcgtaggtttttttcgttcggtttcggattttttttttttttcggtgtgggat

SEQ ID NO: 3494 - DNA, 1260 bp, Artificial Sequence
  chemically treated genomic DNA (Homo sapiens) CpG-island No: 3494
  unsure (780)
atcccacaccgaaaaaaaaaaaaaatccgaaaccgaacgaaaaaaacctacgaataaacctaacgaataaaattattaaaacttcgccgaaaccgcgactcgccctcccactccgccaacctccgaaaaaaaaaccgcacccgaccgacccgaccccaaccccataaacctccgaacaaataaaaaccaaacgaccgaaaccccgacccccgccccgccaaacaaccacgaaatccgattcccgtcctaccctaacccccgaaaaccccgcgccgaaaccgaaccaaaaaactaaactcgaaccgaaaaaaacacgactaaacgccctcgaaaaaaaccgaacgaaaacgcgacattcctaaaatccgcacgacgaaaccaaaaaataaccgaaaacgacgaaaaacccgaacgatcgcaaacctaaaaaaacgacaacctaaaaccccaacgaaacgaaccgtaaaaaccgcaaccccaaaaccccgcgcaccaatcgaaaccaaaaaatccgaaacgaaaaacgaaactacgaataaaaaaaaaaactaaaaaaaaaaaaaaaaaaaaaaccgaaaaaacccgaaaccgaacgacgaaaaacgaaaaaaaaccgacacctcgaaccgcgccgctctccctccccgacccgccgaaaaaaataaaaaaacgaacgaaaaaaaaaacgaacgacgaaaaaaaaaacgaaaaacaacgccgaacctaactaaaccgaaccgaacgaaccgaaccgcgccgcgaaactcgcgacttcctaantacgcgccgcgcgaccgaaaccctccataatacccacgaccgaaaaaccgacgacaaataaaaacgacgaacgacgaccgcgaaatcccccgaaccaccgtaacctaaaaataattattatttaacgaaaaactaacgcaaccgaaccgaacccgacaaaaaaaaatctatcactaaccacgaaacgacgaaaacaaccgctcaacccgaacaaaaaaaaaattaacgcgcgaaaaaaaacaacgccgaacaaaacccgaaacccgataccccgaaccccgcccccgcccccgcccccgcccccgccgcgaaaaaaaaacgaccgaacgaaaacgaaaaaaaacgaaaccgaaaacgccgaaaccacacaaaaaaaaaacgcaacgccgaaaaaaatcccaaaacgaaaaatcaccgccaacaaaaaaaaccaactaacaaccgccgccgtacaacttcccgaccgaacccctcgaaaaa

SEQ ID NO: 3495 - DNA, 1260 bp, Artificial Sequence
  chemically treated genomic DNA (Homo sapiens) CpG-island No: 3495
  unsure (780)
gttttatatcgaaaaaaaaaaaaaattcgaaatcgagcgaaaaaaatttgcgagtgggtttggcggatgggattattaaagtttcgtcggagtcgcggttcgtttttttatttcgttagttttcgggagaggagtcgtattcggtcggttcggttttagttttatggattttcgagtaggtaggagttaggcggtcgaggtttcgattttcgtttcgttaagtagttacgagattcggttttcgttttgttttgattttcgggagtttcgcgtcggggtcgggttagggagttgggttcgggtcgggggaggtacggttgggcgttttcgagaggggtcgggcggggacgcggtatttttggagttcgtacggcggggttaggaggtggtcgggagcggcggggagttcggacgatcgtagatttggggaggcggtaatttggagttttagcgaggcgggtcgtaggagtcgtagttttagagtttcgcgtattagtcggggttagagagttcgaggcggggagcgaggttgcgggtgggaggaggggttgggagaggaagagggagggaggtcgggggagttcgaggtcgggcggcgggaggcgaggggaggtcgatatttcgggtcgcgtcgtttttttttttcggttcgtcgggaggggtaggagggcgggcgggaggaagggcgggcggcggagaggagggcggagggtagcgtcgagtttggttgggtcgggtcggacgggtcgagtcgcgtcgcgggattcgcggttttttagntacgcgtcgcgcggtcggaattttttatggtgtttacggtcggggagtcggcggtaggtaggggcggcgggcggcggtcgcgagatttttcgggttatcgtggtttgggagtgattattgtttggcggggggttggcgtagtcgggtcggattcggtaggaaaaagtttgttattggttacggagcggcgggagtagtcgtttagttcgggtaggaggggagttgacgcgcgggaaagggtagcgtcgggtagagttcggagttcggtgtttcggatttcgttttcgttttcgttttcgttttcgtcgcggggaaggagcgatcgggcgggagcgggagggggcggggtcgggggcgtcgaggttatatagggggaaggcgtagcgtcgggaggggttttagagcgagaggttatcgttagtagggagggttagttggtaatcgtcgtcgtgtagtttttcggtcgagtttttcgaagga

SEQ ID NO: 3496 - DNA, 1260 bp, Artificial Sequence
  chemically treated genomic DNA (Homo sapiens) CpG-island No: 3496
  unsure (481)
tccttcgaaaaactcgaccgaaaaactacacgacgacgattaccaactaaccctccctactaacgataacctctcgctctaaaacccctcccgacgctacgccttccccctatataacctcgacgcccccgaccccgccccctcccgctcccgcccgatcgctccttccccgcgacgaaaacgaaaacgaaaacgaaaacgaaatccgaaacaccgaactccgaactctacccgacgctaccctttcccgcgcgtcaactcccctcctacccgaactaaacgactactcccgccgctccgtaaccaataacaaactttttcctaccgaatccgacccgactacgccaaccccccgccaaacaataatcactcccaaaccacgataacccgaaaaatctcgcgaccgccgcccgccgcccctacctaccgccgactccccgaccgtaaacaccataaaaaattccgaccgcgcgacgcgtanctaaaaaaccgcgaatcccgcgacgcgactcgacccgtccgacccgacccaaccaaactcgacgctaccctccgccctcctctccgccgcccgcccttcctcccgcccgccctcctacccctcccgacgaaccgaaaaaaaaaaacgacgcgacccgaaatatcgacctcccctcgcctcccgccgcccgacctcgaactcccccgacctccctccctcttcctctcccaacccctcctcccacccgcaacctcgctccccgcctcgaactctctaaccccgactaatacgcgaaactctaaaactacgactcctacgacccgcctcgctaaaactccaaattaccgcctccccaaatctacgatcgtccgaactccccgccgctcccgaccacctcctaaccccgccgtacgaactccaaaaataccgcgtccccgcccgacccctctcgaaaacgcccaaccgtacctcccccgacccgaacccaactccctaacccgaccccgacgcgaaactcccgaaaatcaaaacaaaacgaaaaccgaatctcgtaactacttaacgaaacgaaaatcgaaacctcgaccgcctaactcctacctactcgaaaatccataaaactaaaaccgaaccgaccgaatacgactcctctcccgaaaactaacgaaataaaaaaacgaaccgcgactccgacgaaactttaataatcccatccgccaaacccactcgcaaatttttttcgctcgatttcgaattttttttttttttcgatataaaac

SEQ ID NO: 3497 - DNA, 608 bp, Artificial Sequence
  chemically treated genomic DNA (Homo sapiens) CpG-island No: 3497
ttcgggtcgtagttatttgagttttcgtgaggttgaggttgtgtgttagttgttttttttcggcgtttattacgtagtgattttttttaaaggcgtgttttagttttagaagttgggacggggagaaggcggttcggattcgtttgggttttcgggttagcgcgttgtgtaaaaggaaattttcggggttagtgtcgttttttgcggggagtatagtagaaattttattagggggggttgttttgatcggagtcgcgtatttttttcgagtcgggttggttcggtatcgtgtttagggttttcgtatagtcgcgtcgttcgatttgcgggggtcggtggtttttttaagggtttacgaagggaacgtttgtttagttgttcggttcggaacgtcgggtttttatcggtgcggtatttaattagtcgttgtcgtagaggagttagtttttaggtttttgatttcggtcggtttcgtagtcgttttggcgtcgcgggtttcgttattttttcgtcgggcgttggaggtaggggagggagtcgtagagtttggttaggggattggcgtttataattcgaagaaattatttttttttttttttaatttttcg

SEQ ID NO: 3498 - DNA, 608 bp, Artificial Sequence
  chemically treated genomic DNA (Homo sapiens) CpG-island No: 3498
cgaaaaattaaaaaaaaaaaaaaataatttcttcgaattataaacgccaatcccctaaccaaactctacgactccctcccctacctccaacgcccgacgaaaaaataacgaaacccgcgacgccaaaacgactacgaaaccgaccgaaatcaaaaacctaaaaactaactcctctacgacaacgactaattaaataccgcaccgataaaaacccgacgttccgaaccgaacaactaaacaaacgttcccttcgtaaacccttaaaaaaaccaccgacccccgcaaatcgaacgacgcgactatacgaaaaccctaaacacgataccgaaccaacccgactcgaaaaaaatacgcgactccgatcaaaacaaccccccctaataaaatttctactatactccccgcaaaaaacgacactaaccccgaaaatttccttttacacaacgcgctaacccgaaaacccaaacgaatccgaaccgccttctccccgtcccaacttctaaaactaaaacacgcctttaaaaaaaatcactacgtaataaacgccgaaaaaaaacaactaacacacaacctcaacctcacgaaaactcaaataactacgacccgaa

SEQ ID NO: 3499 - DNA, 608 bp, Artificial Sequence
  chemically treated genomic DNA (Homo sapiens) CpG-island No: 3499
cgagaggttagaaagaagagaaagtagttttttcgggttgtgggcgttaattttttggttaggttttgcggtttttttttttgtttttagcgttcggcgaggaggtggcgaggttcgcggcgttagggcggttgcggagtcggtcgaggttaggagtttggggattggtttttttgcgatagcggttggttgggtgtcgtatcggtggagattcggcgtttcgggtcgggtagttgagtaggcgtttttttcgtgagtttttgggaggattatcggttttcgtaggtcgagcggcgcggttatgcgaaggttttgagtacggtgtcgggttagttcggttcgggagaagtgcgcggtttcggttagagtagttttttttaatgggatttttgttgtgtttttcgtagggaacgatattagtttcgagagtttttttttgtataacgcgttggttcgaaagtttaagcggattcgaatcgtttttttttcgttttagtttttaaggttggaatacgtttttgagaagaattattacgtggtgggcgtcgaaaggaagtagttggtatatagttttagttttacggaaatttaggtgattgcggttcggg

SEQ ID NO: 3500 - DNA, 608 bp, Artificial Sequence
  chemically treated genomic DNA (Homo sapiens) CpG-island No: 3500
cccgaaccgcaatcacctaaatttccgtaaaactaaaactatataccaactacttcctttcgacgcccaccacgtaataattcttctcaaaaacgtattccaaccttaaaaactaaaacgaaaaaaaaacgattcgaatccgcttaaactttcgaaccaacgcgttatacaaaaaaaaactctcgaaactaatatcgttccctacgaaaaacacaacaaaaatcccattaaaaaaaactactctaaccgaaaccgcgcacttctcccgaaccgaactaacccgacaccgtactcaaaaccttcgcataaccgcgccgctcgacctacgaaaaccgataatcctcccaaaaactcacgaaaaaaacgcctactcaactacccgacccgaaacgccgaatctccaccgatacgacacccaaccaaccgctatcgcaaaaaaaccaatccccaaactcctaacctcgaccgactccgcaaccgccctaacgccgcgaacctcgccacctcctcgccgaacgctaaaaacaaaaaaaaaaaccgcaaaacctaaccaaaaaattaacgcccacaacccgaaaaaactactttctcttctttctaacctctcg

SEQ ID NO: 3501 - DNA, 1227 bp, Artificial Sequence
  chemically treated genomic DNA (Homo sapiens) CpG-island No: 3501
agcgttaagttttggagtttttttttcgtacgggttttcgtttttttttaggttttcgaaaagtaggaaagaaaaaataaattttatatttttttttcggggcgcgaggattttttcgtttttagaagagggtggaagattaagaagtcgcgggtttggattgaaggggcgtaaagtgggtggtgaatagggtcgaacgtagtcgaaagtaagtttggcggtcgagttttgttcgcgtttttcggagttaggacggttgggggtattgtcgagggtattaggagtttggggatttcgcgggttttgggtttcgcggcgtcgggtacgtatagtttagtttgttttgattcgagcgtattgggggataattttttcgttcgtatttttttttaaagggttaagcggttcgtaggttattattttaaattagtcgtagtttcggagattggggatcgatattacgttcggtttcgcgtcgtttagttttttaatagggcgcgttggttcgcgagtcggaggaattttcgtttaggttttgttaagcgtttattcggagtaggtcgggggtagtgaaggatgcggcgggagcggcgcgttgtagtttcgcgacgtggtacgtattttggaagcgatgatttagatatcggtagcggtggatgagttaggggtagaaggtggacggatttcgttgttgcgaggcgaatagggggtgtggcgagtgcgaggagggtagggggtgggcggttagggcgtgcggcggcggtatcgggtgtattggtacggcggggttgggcgggtgcgagatcgtttcggcgaatattaagttcgggttggagtagacgtttttatcggcggcggcggcggcggtcgagtggaagtcgttgaggaacggatttatggggttggagttagcgtagttgagtgtcgcgggacggatggggttttcggagcgcgaggcgggtaggggattgtttttggttattagcgattcgatggtgaagtagcgtttgggcgtcggttggaatatgttgcgtcgaggagcgggcgttttgggtttttagtttttggcgatcgtcgtacgttgttttcgtcgttcgttgttcgcggcgaggacggacgagaattggggattcgtttgtttggggtgggggtgggggtggggggaaggaaaggaagaaagaaaggaaaggaaaggaaaaaggaaaggaggggggagggagagggaga

SEQ ID NO: 3502 - DNA, 1227 bp, Artificial Sequence
  chemically treated genomic DNA (Homo sapiens) CpG-island No: 3502
tctccctctccctcccccctcctttcctttttcctttcctttcctttctttcttcctttccttccccccacccccacccccaccccaaacaaacgaatccccaattctcgtccgtcctcgccgcgaacaacgaacgacgaaaacaacgtacgacgatcgccaaaaactaaaaacccaaaacgcccgctcctcgacgcaacatattccaaccgacgcccaaacgctacttcaccatcgaatcgctaataaccaaaaacaatcccctacccgcctcgcgctccgaaaaccccatccgtcccgcgacactcaactacgctaactccaaccccataaatccgttcctcaacgacttccactcgaccgccgccgccgccgccgataaaaacgtctactccaacccgaacttaatattcgccgaaacgatctcgcacccgcccaaccccgccgtaccaatacacccgataccgccgccgcacgccctaaccgcccaccccctaccctcctcgcactcgccacaccccctattcgcctcgcaacaacgaaatccgtccaccttctacccctaactcatccaccgctaccgatatctaaatcatcgcttccaaaatacgtaccacgtcgcgaaactacaacgcgccgctcccgccgcatccttcactacccccgacctactccgaataaacgcttaacaaaacctaaacgaaaattcctccgactcgcgaaccaacgcgccctattaaaaaactaaacgacgcgaaaccgaacgtaatatcgatccccaatctccgaaactacgactaatttaaaataataacctacgaaccgcttaaccctttaaaaaaaaatacgaacgaaaaaattatcccccaatacgctcgaatcaaaacaaactaaactatacgtacccgacgccgcgaaacccaaaacccgcgaaatccccaaactcctaataccctcgacaatacccccaaccgtcctaactccgaaaaacgcgaacaaaactcgaccgccaaacttactttcgactacgttcgaccctattcaccacccactttacgccccttcaatccaaacccgcgacttcttaatcttccaccctcttctaaaaacgaaaaaatcctcgcgccccgaaaaaaaaatataaaatttattttttctttcctacttttcgaaaacctaaaaaaaaacgaaaacccgtacgaaaaaaaaactccaaaacttaacgct

SEQ ID NO: 3503 - DNA, 1227 bp, Artificial Sequence
  chemically treated genomic DNA (Homo sapiens) CpG-island No: 3503
tttttttttttttttttttttttttttttttttttttttttttttttttttttttttttttttttttttatttttatttttattttaaataaacgagtttttaattttcgttcgttttcgtcgcgggtagcgggcggcggaggtagcgtgcggcggtcgttaggagttgggagtttagggcgttcgtttttcggcgtagtatgttttagtcggcgtttaagcgttgttttattatcgagtcgttggtggttaaggatagttttttgttcgtttcgcgtttcgaggattttattcgtttcgcggtatttagttacgttaattttagttttataaattcgttttttaacggtttttattcggtcgtcgtcgtcgtcgtcggtaggggcgtttattttaattcggatttggtgttcgtcgaggcggtttcgtattcgtttaatttcgtcgtgttagtgtattcggtgtcgtcgtcgtacgttttggtcgtttattttttatttttttcgtattcgttatattttttattcgtttcgtagtagcgggattcgtttattttttatttttggtttatttatcgttatcgatatttgggttatcgtttttaaggtacgtgttacgtcgcggaattgtagcgcgtcgttttcgtcgtattttttattgttttcggtttgtttcgggtgggcgtttggtaaggtttgggcggaggttttttcggttcgcgggttagcgcgttttgttgggaaattaggcggcgcggggtcgggcgtggtgtcgatttttagttttcgaagttacgattggtttggagtgatggtttgcgggtcgtttgattttttgggaaggggtgcgaacggagaagttgttttttagtgcgttcgaattagagtaggttgggttgtgcgtgttcggcgtcgcggagtttagagttcgcgggatttttaggtttttggtattttcggtaatgtttttaatcgttttggtttcgaggggcgcggataggattcggtcgttaggtttgttttcgattgcgttcgattttgtttattatttattttgcgtttttttagtttagattcgcggttttttagttttttatttttttttggaggcgagaggattttcgcgtttcgggagaaaagtatgggatttgtttttttttttttgtttttcggaggtttggggaggggcgggaattcgtgcgggaggaaagttttagggtttggcgtt

SEQ ID NO: 3504 - DNA, 1227 bp, Artificial Sequence
  chemically treated genomic DNA (Homo sapiens) CpG-island No: 3504
aacgccaaaccctaaaactttcctcccgcacgaattcccgcccctccccaaacctccgaaaaacaaaaaaaaaaaaacaaatcccatacttttctcccgaaacgcgaaaatcctctcgcctccaaaaaaaaataaaaaactaaaaaaccgcgaatctaaactaaaaaaacgcaaaataaataataaacaaaatcgaacgcaatcgaaaacaaacctaacgaccgaatcctatccgcgcccctcgaaaccaaaacgattaaaaacattaccgaaaataccaaaaacctaaaaatcccgcgaactctaaactccgcgacgccgaacacgcacaacccaacctactctaattcgaacgcactaaaaaacaacttctccgttcgcaccccttcccaaaaaatcaaacgacccgcaaaccatcactccaaaccaatcgtaacttcgaaaactaaaaatcgacaccacgcccgaccccgcgccgcctaatttcccaacaaaacgcgctaacccgcgaaccgaaaaaacctccgcccaaaccttaccaaacgcccacccgaaacaaaccgaaaacaataaaaaatacgacgaaaacgacgcgctacaattccgcgacgtaacacgtaccttaaaaacgataacccaaatatcgataacgataaataaaccaaaaataaaaaataaacgaatcccgctactacgaaacgaataaaaaatataacgaatacgaaaaaaataaaaaataaacgaccaaaacgtacgacgacgacaccgaatacactaacacgacgaaattaaacgaatacgaaaccgcctcgacgaacaccaaatccgaattaaaataaacgcccctaccgacgacgacgacgacgaccgaataaaaaccgttaaaaaacgaatttataaaactaaaattaacgtaactaaataccgcgaaacgaataaaatcctcgaaacgcgaaacgaacaaaaaactatccttaaccaccaacgactcgataataaaacaacgcttaaacgccgactaaaacatactacgccgaaaaacgaacgccctaaactcccaactcctaacgaccgccgcacgctacctccgccgcccgctacccgcgacgaaaacgaacgaaaattaaaaactcgtttatttaaaataaaaataaaaataaaaaaaaaaaaaaaaaaaaaaaaaaaaaaaaaaaaaaaaaaaaaaaaaaaaaaaaaaaaaaaaaaaaa

SEQ ID NO: 3505 - DNA, 582 bp, Artificial Sequence
  chemically treated genomic DNA (Homo sapiens) CpG-island No: 3505
tttttttttgttggcgttttttaattttagggttcggggggcgttcgtggcgtcgggttgtatttgtcggggtacgtcgggattgcgggtcggcgcgttcgttttgggttggggtgcggaagcgttcgagatttgggtatcgggcgagagtgtgagaggagcggacgtttaggagggagtcgaggacgcgcggcgggtagggggtaggggcgtaggaatcgggttttagttttagtcgggatatcggttttttttggtttggcggtttttggagggagacgagtttcggggagaaggagggcggcgattggggttagggattggcgatcggagtggggagggtcggcggttgagcgagttcgttggttgacgcgaggagggggaggttaatttttcgggagaaggggttttttcggcgttagggttggttagggagttgtcgtcgtcgttatcgagggttcggattttaggtagttgtaggtttcgttcgcgacgttcggaaagtatcgtttatttatttatttgtttgcgtttagcgtttcgggttgaatttaatagatatttttttggattttaggaatt

SEQ ID NO: 3506 - DNA, 582 bp, Artificial Sequence
  chemically treated genomic DNA (Homo sapiens) CpG-island No: 3506
aattcctaaaatccaaaaaaatatctattaaattcaacccgaaacgctaaacgcaaacaaataaataaataaacgatactttccgaacgtcgcgaacgaaacctacaactacctaaaatccgaaccctcgataacgacgacgacaactccctaaccaaccctaacgccgaaaaaaccccttctcccgaaaaattaacctccccctcctcgcgtcaaccaacgaactcgctcaaccgccgaccctccccactccgatcgccaatccctaaccccaatcgccgccctccttctccccgaaactcgtctccctccaaaaaccgccaaaccaaaaaaaaccgatatcccgactaaaactaaaacccgattcctacgcccctaccccctacccgccgcgcgtcctcgactccctcctaaacgtccgctcctctcacactctcgcccgatacccaaatctcgaacgcttccgcaccccaacccaaaacgaacgcgccgacccgcaatcccgacgtaccccgacaaatacaacccgacgccacgaacgccccccgaaccctaaaattaaaaaacgccaacaaaaaaaaa

SEQ ID NO: 3507 - DNA, 582 bp, Artificial Sequence
  chemically treated genomic DNA (Homo sapiens) CpG-island No: 3507
ggtttttaaagtttaagggggtgtttgttgggtttaattcgagacgttgaacgtaagtaaataaataaataaacggtatttttcgagcgtcgcgagcggagtttgtagttgtttggagttcgagttttcggtggcggcggcggtagttttttagttagttttggcgtcgaaagagttttttttttcgggaagttggttttttttttttcgcgttagttagcgagttcgtttagtcgtcggttttttttatttcgatcgttaatttttagttttagtcgtcgtttttttttttttcgggattcgtttttttttagaggtcgttaagttagggggaatcgatgtttcgattggggttgaaattcggtttttgcgtttttattttttattcgtcgcgcgttttcggtttttttttgggcgttcgttttttttatattttcgttcggtgtttaggtttcgggcgttttcgtattttagtttagggcgagcgcgtcggttcgtagtttcggcgtgtttcggtaggtgtagttcggcgttacgagcgtttttcgggttttaaagttgggagacgttagtaaaaagaaa

SEQ ID NO: 3508 - DNA, 582 bp, Artificial Sequence
  chemically treated genomic DNA (Homo sapiens) CpG-island No: 3508
tttctttttactaacgtctcccaactttaaaacccgaaaaacgctcgtaacgccgaactacacctaccgaaacacgccgaaactacgaaccgacgcgctcgccctaaactaaaatacgaaaacgcccgaaacctaaacaccgaacgaaaatataaaaaaaacgaacgcccaaaaaaaaaccgaaaacgcgcgacgaataaaaaataaaaacgcaaaaaccgaatttcaaccccaatcgaaacatcgattccccctaacttaacgacctctaaaaaaaaacgaatcccgaaaaaaaaaaaaacgacgactaaaactaaaaattaacgatcgaaataaaaaaaaccgacgactaaacgaactcgctaactaacgcgaaaaaaaaaaaaccaacttcccgaaaaaaaaaactctttcgacgccaaaactaactaaaaaactaccgccgccgccaccgaaaactcgaactccaaacaactacaaactccgctcgcgacgctcgaaaaataccgtttatttatttatttacttacgttcaacgtctcgaattaaacccaacaaacacccccttaaactttaaaaacc

SEQ ID NO: 3509 - DNA, 839 bp, Artificial Sequence
  chemically treated genomic DNA (Homo sapiens) CpG-island No: 3509
tcggcgtcggtttttcggatacgtcggcggcggagaggggtttacggcggcggttcggttagagattcggcgttcggagttagcgtttcgtattcgcgttttagcgggtagattttaatttagtatgagcgtcgttatttattcgtttatgatgtaggtggcgttcggtaacggtgatcgcgattttttgtttttcggatgggagattaagatcgattcgtagatcggttggttttttttcgtggattataatagtcgtattattacgtggaacgattcgcgcgtgttttttgagggttttaaggtgagtcgggttcgcggttcgttttggtcggtggcgttatttcgacggtaggcggcggggagtgggttgggtcggggggattcgatgcggcggggttcgggggtcggcgaaggtttttcgcgggcggatatcggtttcgcgtttcgttatatattttcgttgcgttcggacgagttttcgtttcggattcgtttttgataggcgtcggggcgaaaggaggtttcgggattcggtggttcgggaagcgatttcgtagtggtttcggtgcggtttacggttcgattttagggcggaaggtcgggtgtttagcgttggtttcgcgttttagggttgggagaggggcggtcggtttggttagtttcggaggtttcggtttatcgcggtttttgttgttcgttcggttttcgggttcgggattcgcggcgtattttgttgatcgcggattcgagggggatattcgtaagtttggatggtggttttggggggaattttatcgtttaagttttttaatttggttgaggggtattttggttat

SEQ ID NO: 3510 - DNA, 839 bp, Artificial Sequence
  chemically treated genomic DNA (Homo sapiens) CpG-island No: 3510
ataaccaaaatacccctcaaccaaattaaaaaacttaaacgataaaattccccccaaaaccaccatccaaacttacgaatatccccctcgaatccgcgatcaacaaaatacgccgcgaatcccgaacccgaaaaccgaacgaacaacaaaaaccgcgataaaccgaaacctccgaaactaaccaaaccgaccgcccctctcccaaccctaaaacgcgaaaccaacgctaaacacccgaccttccgccctaaaatcgaaccgtaaaccgcaccgaaaccactacgaaatcgcttcccgaaccaccgaatcccgaaacctcctttcgccccgacgcctatcaaaaacgaatccgaaacgaaaactcgtccgaacgcaacgaaaatatataacgaaacgcgaaaccgatatccgcccgcgaaaaaccttcgccgacccccgaaccccgccgcatcgaatccccccgacccaacccactccccgccgcctaccgtcgaaataacgccaccgaccaaaacgaaccgcgaacccgactcaccttaaaaccctcaaaaaacacgcgcgaatcgttccacgtaataatacgactattataatccacgaaaaaaaaccaaccgatctacgaatcgatcttaatctcccatccgaaaaacaaaaaatcgcgatcaccgttaccgaacgccacctacatcataaacgaataaataacgacgctcatactaaattaaaatctacccgctaaaacgcgaatacgaaacgctaactccgaacgccgaatctctaaccgaaccgccgccgtaaacccctctccgccgccgacgtatccgaaaaaccgacgccga

SEQ ID NO: 3511 - DNA, 839 bp, Artificial Sequence
  chemically treated genomic DNA (Homo sapiens) CpG-island No: 3511
gtagttaagatattttttaattaagttggagaatttgagcgataaaattttttttaaaattattatttaagtttgcgagtgtttttttcgagttcgcggttagtagggtgcgtcgcgggtttcgggttcggaggtcgagcgggtagtaggggtcgcggtgggtcggggttttcggagttgattaggtcggtcgttttttttttagttttagagcgcgaggttagcgttggatattcggtttttcgttttggagtcgagtcgtggatcgtatcggagttattgcggggtcgtttttcgggttatcgaatttcggggttttttttcgtttcgacgtttgttaagggcgggttcggagcggggattcgttcgggcgtagcgggagtgtgtggcggggcgcggagtcggtgttcgttcgcgaggggttttcgtcgattttcgggtttcgtcgtatcgagttttttcggtttagtttatttttcgtcgtttgtcgtcgaggtggcgttatcgattagggcgggtcgcgggttcggtttattttggggtttttagagggtacgcgcgggtcgttttacgtagtggtgcggttgttgtggtttacgaagaagggttagtcggtttgcgggtcgattttgattttttattcggggggtaaagggtcgcggttatcgttgtcggacgttatttgtattatgggcgagtgggtggcggcgtttatgttgggttggggtttgttcgttggggcgcgggtgcggggcgttggtttcgggcgtcgagtttttggtcgggtcgtcgtcgtgggttttttttcgtcgtcgacgtgttcgggaagtcggcgtcgg

SEQ ID NO: 3512 - DNA, 839 bp, Artificial Sequence
  chemically treated genomic DNA (Homo sapiens) CpG-island No: 3512
ccgacgccgacttcccgaacacgtcgacgacgaaaaaaaacccacgacgacgacccgaccaaaaactcgacgcccgaaaccaacgccccgcacccgcgccccaacgaacaaaccccaacccaacataaacgccgccacccactcgcccataatacaaataacgtccgacaacgataaccgcgaccctttaccccccgaataaaaaatcaaaatcgacccgcaaaccgactaacccttcttcgtaaaccacaacaaccgcaccactacgtaaaacgacccgcgcgtaccctctaaaaaccccaaaataaaccgaacccgcgacccgccctaatcgataacgccacctcgacgacaaacgacgaaaaataaactaaaccgaaaaaactcgatacgacgaaacccgaaaatcgacgaaaacccctcgcgaacgaacaccgactccgcgccccgccacacactcccgctacgcccgaacgaatccccgctccgaacccgcccttaacaaacgtcgaaacgaaaaaaaaccccgaaattcgataacccgaaaaacgaccccgcaataactccgatacgatccacgactcgactccaaaacgaaaaaccgaatatccaacgctaacctcgcgctctaaaactaaaaaaaaaacgaccgacctaatcaactccgaaaaccccgacccaccgcgacccctactacccgctcgacctccgaacccgaaacccgcgacgcaccctactaaccgcgaactcgaaaaaaacactcgcaaacttaaataataattttaaaaaaaattttatcgctcaaattctccaacttaattaaaaaatatcttaactac

SEQ ID NO: 3513 - DNA, 894 bp, Artificial Sequence
  chemically treated genomic DNA (Homo sapiens) CpG-island No: 3513
gcggtcgcggtcgaggcggggatagggaggcggtagttttttttgcgtagcgacggcgcgggcgggaggaggtcggggcgttttagtttttcgttttcgtttttttcggtcgtgacgttagagtcggacggggtaaattgagcggcggcggcggggcgttggggcggagattgcgattcggagtcgttcggattgacggagtttattgcggtgcgggcgttggcgcgggtacggaggattcgggtaggtatcgtaagcgatttcgaggtaatacggtttcggttttttgttcgtagggcgcggtgtcggaggggagcgggttcgggggaggtagggaggtagggaggtttttagagttacgcgggcggggttgcggggatttcggggtagtcggggcgtagggcgtagggcgtaaggtgtacggggtcgagcgtgtagtttgggaggtggtatagttgggggcggcggggattagggtagcgttttgggggttttaggttgggtttttagattgggttttcgacggcgttcgcgggcgttttttttagggagcgcgggttttcgtggggacgcgttcgaggtaggtgagtcgaggttggggcgttcgggggtgttttcggatgtcggtgcgcgcggttttttgattcgttttttcgcggtttgggggacgggagaatggggggttttcggtcgttttgggtttttatcgcgtatcgcgttcgtagcggagtttcggagttatggttttgagcgagttggcgttggttcgttggttgtaggagagtcgtcgttcgcggaagtttattttgtttatcgtgtttttggcgttgttgttggataatatgttgtttattgtcgtgggtacgtgcggatagggtatttttgtttcggtat

SEQ ID NO: 3514 - DNA, 894 bp, Artificial Sequence
  chemically treated genomic DNA (Homo sapiens) CpG-island No: 3514
ataccgaaacaaaaataccctatccgcacgtacccacgacaataaacaacatattatccaacaacaacgccaaaaacacgataaacaaaataaacttccgcgaacgacgactctcctacaaccaacgaaccaacgccaactcgctcaaaaccataactccgaaactccgctacgaacgcgatacgcgataaaaacccaaaacgaccgaaaaccccccattctcccgtcccccaaaccgcgaaaaaacgaatcaaaaaaccgcgcgcaccgacatccgaaaacacccccgaacgccccaacctcgactcacctacctcgaacgcgtccccacgaaaacccgcgctccctaaaaaaaacgcccgcgaacgccgtcgaaaacccaatctaaaaacccaacctaaaacccccaaaacgctaccctaatccccgccgcccccaactataccacctcccaaactacacgctcgaccccgtacaccttacgccctacgccctacgccccgactaccccgaaatccccgcaaccccgcccgcgtaactctaaaaacctccctacctccctacctcccccgaacccgctcccctccgacaccgcgccctacgaacaaaaaaccgaaaccgtattacctcgaaatcgcttacgatacctacccgaatcctccgtacccgcgccaacgcccgcaccgcaataaactccgtcaatccgaacgactccgaatcgcaatctccgccccaacgccccgccgccgccgctcaatttaccccgtccgactctaacgtcacgaccgaaaaaaacgaaaacgaaaaactaaaacgccccgacctcctcccgcccgcgccgtcgctacgcaaaaaaaactaccgcctccctatccccgcctcgaccgcgaccgc

SEQ ID NO: 3515 - DNA, 894 bp, Artificial Sequence
  chemically treated genomic DNA (Homo sapiens) CpG-island No: 3515
gtgtcggggtaggggtgttttgttcgtacgtatttacgatagtgagtagtatgttgtttagtagtagcgttaggaatacgatgaataggatgagttttcgcgagcggcggtttttttgtagttagcggattagcgttagttcgtttagggttatggtttcggggtttcgttgcgggcgcggtgcgcggtgaggatttaaggcggtcggggattttttattttttcgttttttaggtcgcggaagggcgggttagggagtcgcgcgtatcggtattcggggatattttcgggcgttttagtttcggtttatttgtttcgagcgcgtttttacgagagttcgcgttttttggaaagagcgttcgcgagcgtcgtcggggatttaatttggagatttaatttagaatttttaggacgttgttttgattttcgtcgtttttaattgtgttattttttaaattgtacgttcggtttcgtgtattttgcgttttgcgttttgcgtttcggttgtttcggggttttcgtagtttcgttcgcgtagttttgggggtttttttgtttttttgtttttttcgggttcgttttttttcggtatcgcgttttgcgagtagggaatcggggtcgtgttatttcggggtcgtttgcgatgtttgttcgggtttttcgtgttcgcgttaacgttcgtatcgtagtgggtttcgttagttcgggcggtttcgggtcgtagttttcgttttagcgtttcgtcgtcgtcgtttagtttatttcgttcggttttgacgttacggtcggagggagcgggggcggggggttggggcgtttcggttttttttcgttcgcgtcgtcgttgcgtaggaggggttgtcgtttttttgttttcgtttcggtcgcggtcgt

SEQ ID NO: 3516 - DNA, 894 bp, Artificial Sequence
  chemically treated genomic DNA (Homo sapiens) CpG-island No: 3516
acgaccgcgaccgaaacgaaaacaaaaaaacgacaacccctcctacgcaacgacgacgcgaacgaaaaaaaaccgaaacgccccaaccccccgcccccgctccctccgaccgtaacgtcaaaaccgaacgaaataaactaaacgacgacgacgaaacgctaaaacgaaaactacgacccgaaaccgcccgaactaacgaaacccactacgatacgaacgttaacgcgaacacgaaaaacccgaacaaacatcgcaaacgaccccgaaataacacgaccccgattccctactcgcaaaacgcgataccgaaaaaaaacgaacccgaaaaaaacaaaaaaacaaaaaaacccccaaaactacgcgaacgaaactacgaaaaccccgaaacaaccgaaacgcaaaacgcaaaacgcaaaatacacgaaaccgaacgtacaatttaaaaaataacacaattaaaaacgacgaaaatcaaaacaacgtcctaaaaattctaaattaaatctccaaattaaatccccgacgacgctcgcgaacgctctttccaaaaaacgcgaactctcgtaaaaacgcgctcgaaacaaataaaccgaaactaaaacgcccgaaaatatccccgaataccgatacgcgcgactccctaacccgcccttccgcgacctaaaaaacgaaaaaataaaaaatccccgaccgccttaaatcctcaccgcgcaccgcgcccgcaacgaaaccccgaaaccataaccctaaacgaactaacgctaatccgctaactacaaaaaaaccgccgctcgcgaaaactcatcctattcatcgtattcctaacgctactactaaacaacatactactcactatcgtaaatacgtacgaacaaaacacccctaccccgacac

SEQ ID NO: 3517 - DNA, 1182 bp, Artificial Sequence
  chemically treated genomic DNA (Homo sapiens) CpG-island No: 3517
tcgtgttcggagttcgcgtttcgcgtcgggttttatattttggatttcgaggcgaagtcggggcggtacggttcgtttaggttcgattcgttgttcgtcgtcgtttcgtcgttgtagtcggtttagggttttagtaggcgcgcgggcggcgtggttttaataatatcgtcgtcgtcgtcgttcgaggcggtttcgggcgatggcgggggttcgggtcgggttagatagttcgaggcgcgcggtcggttttcgtgggtcgcgtggcgtaggcgggtagttttgcgcgcgtagtagagtagtttttggaaggttttgcggaagtcgggggttgcggtagtagatgatggggttgaaggtcgagttggcgtagtttagttagttgaagaagacgaagaggcggtcgggtattagatcgcggtggaaggtttttattacgttggttaggaagaagggtcgttcgtagagcgtgaagacgtttatgatgatgtttagcgttttgagcgttttttgttcgtttagggttacgaggcgcgagggttcgtcgtttattcgtacgttcgttggttagcggggcggtggcggcggcggcggcggggcgcgggggttcgggcggcggcgcgggcgcggggacgggcgagggcgagggcgaggtcggtcgcgttggttcgtcgaggaaacggcgttcgtagttgtcgattttttttatttgtttttgggtttcgcggaatattcgtaggtatacgaaggttatgatgtataggggtacgtagaaggagattacggacgaggcgatggcgtaggttcggttggtgacgaagtcgtagtatttggggtcgttgtagtagcggcgcgtttcgtcgtttttcgttcgttattagtgtatgaggatgggtaggaaggatattagggtcgagatggtttatacggtgtatacgaggtttcgcgttcgcgcgcgcgttagtaggttttggtagcggaagggcgaggtgatggcgaggtagcggtttagggtaatgatatatagggtttcgatgttggtcgttacgtatagtacgtttattgaggtttatagttcgtagaagaaggagtcgtatttttagcggttttatattacgatggtggtttcgaacggtattattagtagttttatgattaggtcggcgttggttagggatatgatga

SEQ ID NO: 3518 - DNA, 1182 bp, Artificial Sequence
  chemically treated genomic DNA (Homo sapiens) CpG-island No: 3518
tcatcatatccctaaccaacgccgacctaatcataaaactactaataataccgttcgaaaccaccatcgtaatataaaaccgctaaaaatacgactccttcttctacgaactataaacctcaataaacgtactatacgtaacgaccaacatcgaaaccctatatatcattaccctaaaccgctacctcgccatcacctcgcccttccgctaccaaaacctactaacgcgcgcgcgaacgcgaaacctcgtatacaccgtataaaccatctcgaccctaatatccttcctacccatcctcatacactaataacgaacgaaaaacgacgaaacgcgccgctactacaacgaccccaaatactacgacttcgtcaccaaccgaacctacgccatcgcctcgtccgtaatctccttctacgtacccctatacatcataaccttcgtatacctacgaatattccgcgaaacccaaaaacaaataaaaaaaatcgacaactacgaacgccgtttcctcgacgaaccaacgcgaccgacctcgccctcgccctcgcccgtccccgcgcccgcgccgccgcccgaacccccgcgccccgccgccgccgccgccaccgccccgctaaccaacgaacgtacgaataaacgacgaaccctcgcgcctcgtaaccctaaacgaacaaaaaacgctcaaaacgctaaacatcatcataaacgtcttcacgctctacgaacgacccttcttcctaaccaacgtaataaaaaccttccaccgcgatctaatacccgaccgcctcttcgtcttcttcaactaactaaactacgccaactcgaccttcaaccccatcatctactaccgcaacccccgacttccgcaaaaccttccaaaaactactctactacgcgcgcaaaactacccgcctacgccacgcgacccacgaaaaccgaccgcgcgcctcgaactatctaacccgacccgaacccccgccatcgcccgaaaccgcctcgaacgacgacgacgacgatattattaaaaccacgccgcccgcgcgcctactaaaaccctaaaccgactacaacgacgaaacgacgacgaacaacgaatcgaacctaaacgaaccgtaccgccccgacttcgcctcgaaatccaaaatataaaacccgacgcgaaacgcgaactccgaacacga

SEQ ID NO: 3519 - DNA, 1182 bp, Artificial Sequence
  chemically treated genomic DNA (Homo sapiens) CpG-island No: 3519
ttattatgtttttggttagcgtcgatttggttatggggttgttggtggtgtcgttcggggttattatcgtggtgtggggtcgttgggagtacggtttttttttttgcgagttgtggattttagtggacgtgttgtgcgtgacggttagtatcgagattttgtgtgttattgttttggatcgttatttcgttattatttcgttttttcgttattagagtttgttgacgcgcgcgcgggcgcggggtttcgtgtgtatcgtgtgggttatttcggttttggtgttttttttgtttatttttatgtattggtggcgggcggagagcgacgaggcgcgtcgttgttataacgattttaagtgttgcgatttcgttattaatcgggtttacgttatcgtttcgttcgtagtttttttttacgtgtttttgtgtattatggttttcgtgtatttgcgggtgtttcgcgaggtttaaaagtaggtgaagaagatcgatagttgcgagcgtcgttttttcggcgggttagcgcggtcgatttcgttttcgttttcgttcgttttcgcgttcgcgtcgtcgttcggattttcgcgtttcgtcgtcgtcgtcgttatcgtttcgttggttaacgggcgtgcgggtaagcggcgggttttcgcgtttcgtggttttgagcgagtagaaggcgtttaggacgttgggtattattatgggcgtttttacgttttgcgggcggtttttttttttgattaacgtggtgaaggttttttatcgcgatttggtgttcgatcgttttttcgttttttttaattggttgggttacgttaattcggtttttaattttattatttattgtcgtagttttcgattttcgtaaggttttttagggattgttttgttgcgcgcgtagggttgttcgtttgcgttacgcgatttacggagatcggtcgcgcgtttcgggttgtttggttcggttcggattttcgttatcgttcggggtcgtttcggacgacgacgacgacgatgttgttggggttacgtcgttcgcgcgtttgttggagttttgggtcggttgtaacggcggggcggcggcggatagcgaatcgagtttggacgagtcgtgtcgtttcggtttcgtttcggaatttaaggtgtagggttcggcgcggggcgcggatttcgggtacgg

SEQ ID NO: 3520 - DNA, 1182 bp, Artificial Sequence
  chemically treated genomic DNA (Homo sapiens) CpG-island No: 3520
ccgtacccgaaatccgcgccccgcgccgaaccctacaccttaaattccgaaacgaaaccgaaacgacacgactcgtccaaactcgattcgctatccgccgccgccccgccgttacaaccgacccaaaactccaacaaacgcgcgaacgacgtaaccccaacaacatcgtcgtcgtcgtcgtccgaaacgaccccgaacgataacgaaaatccgaaccgaaccaaacaacccgaaacgcgcgaccgatctccgtaaatcgcgtaacgcaaacgaacaaccctacgcgcgcaacaaaacaatccctaaaaaaccttacgaaaatcgaaaactacgacaataaataataaaattaaaaaccgaattaacgtaacccaaccaattaaaaaaaacgaaaaaacgatcgaacaccaaatcgcgataaaaaaccttcaccacgttaatcaaaaaaaaaaaccgcccgcaaaacgtaaaaacgcccataataatacccaacgtcctaaacgccttctactcgctcaaaaccacgaaacgcgaaaacccgccgcttacccgcacgcccgttaaccaacgaaacgataacgacgacgacgacgaaacgcgaaaatccgaacgacgacgcgaacgcgaaaacgaacgaaaacgaaaacgaaatcgaccgcgctaacccgccgaaaaaacgacgctcgcaactatcgatcttcttcacctacttttaaacctcgcgaaacacccgcaaatacacgaaaaccataatacacaaaaacacgtaaaaaaaaactacgaacgaaacgataacgtaaacccgattaataacgaaatcgcaacacttaaaatcgttataacaacgacgcgcctcgtcgctctccgcccgccaccaatacataaaaataaacaaaaaaaacaccaaaaccgaaataacccacacgatacacacgaaaccccgcgcccgcgcgcgcgtcaacaaactctaataacgaaaaaacgaaataataacgaaataacgatccaaaacaataacacacaaaatctcgatactaaccgtcacgcacaacacgtccactaaaatccacaactcgcaaaaaaaaaaaccgtactcccaacgaccccacaccacgataataaccccgaacgacaccaccaacaaccccataaccaaatcgacgctaaccaaaaacataataa

SEQ ID NO: 3521 - DNA, 677 bp, Artificial Sequence
  chemically treated genomic DNA (Homo sapiens) CpG-island No: 3521
gtagtcgcggcgttttggcgatggttacgattattagtatattgttcgttacgatgagtagtacgatgagcgttattagtagatttatgttcgttgtttattgttgagatagcggttcggggttttcgttggcgggaggtagtaacgaggcgggcggcgacgcgggtattagtagtcgcgtcgcggtggtcgcgtcgtcggggagcggtgcggtcgacgataggttatcgggttcggaggcgtttaggacgagtattttcgcgtttatgtcgagttgcggaggtcgggggcggggggtgtggtagggttgggtcgtggttggggaatattttagaagttcgggcggcgtggtgcgtagagggaggtcgcggtcgggttagggtagtcgcggcgcggggtcggaggtatgggcgtcgggcgtttttttcgtaggagtcgagcgttgtcgttgtcgttgtcgtcgtcgtcgtcgtcgtcgttgttgttggagtcgttgtcgttgttggaagattcgtcgggattttagtatgtttttgagcgcgtcgggttcgtagtttcggtatttagtatttattttatttcgtttttattttttaagttaattttcggggtttcgcgttaggtttttgtagttaattcgggtaaaggtacgttttcgtttggtttgtatttttatt

SEQ ID NO: 3522 - DNA, 677 bp, Artificial Sequence
  chemically treated genomic DNA (Homo sapiens) CpG-island No: 3522
aataaaaatacaaaccaaacgaaaacgtacctttacccgaattaactacaaaaacctaacgcgaaaccccgaaaattaacttaaaaaataaaaacgaaataaaataaatactaaataccgaaactacgaacccgacgcgctcaaaaacatactaaaatcccgacgaatcttccaacaacgacaacgactccaacaacaacgacgacgacgacgacgacgacaacgacaacgacaacgctcgactcctacgaaaaaaacgcccgacgcccatacctccgaccccgcgccgcgactaccctaacccgaccgcgacctccctctacgcaccacgccgcccgaacttctaaaatattccccaaccacgacccaaccctaccacaccccccgcccccgacctccgcaactcgacataaacgcgaaaatactcgtcctaaacgcctccgaacccgataacctatcgtcgaccgcaccgctccccgacgacgcgaccaccgcgacgcgactactaatacccgcgtcgccgcccgcctcgttactacctcccgccaacgaaaaccccgaaccgctatctcaacaataaacaacgaacataaatctactaataacgctcatcgtactactcatcgtaacgaacaatatactaataatcgtaaccatcgccaaaacgccgcgactac

SEQ ID NO: 3523 - DNA, 677 bp, Artificial Sequence
  chemically treated genomic DNA (Homo sapiens) CpG-island No: 3523
ggtgggggtgtagattagacgggggcgtgtttttgttcggattggttgtaggagtttgacgcgaggtttcgggggttggtttggggagtgggagcggggtggggtgggtgttgggtgtcggagttgcgggttcggcgcgtttagaaatatgttgaagtttcggcggattttttagtagcggtagcggttttagtagtagcggcggcggcggcggcggcggtagcggtagcgatagcgttcggtttttgcgggaaaggcgttcggcgtttatgttttcggtttcgcgtcgcggttgttttgattcggtcgcgatttttttttgcgtattacgtcgttcgggtttttggggtgttttttaattacggtttagttttgttatatttttcgttttcggttttcgtagttcggtatgggcgcgggggtgttcgttttgggcgttttcgagttcggtaatttgtcgtcggtcgtatcgtttttcgacggcgcggttatcgcggcgcggttgttggtgttcgcgtcgtcgttcgtttcgttgttgtttttcgttagcgaaagtttcgagtcgttgttttagtagtggatagcgggtatgggtttgttgatggcgtttatcgtgttgtttatcgtggcgggtaatgtgttggtgatcgtggttatcgttaagacgtcgcggttgt

SEQ ID NO: 3524 - DNA, 677 bp, Artificial Sequence
  chemically treated genomic DNA (Homo sapiens) CpG-island No: 3524
acaaccgcgacgtcttaacgataaccacgatcaccaacacattacccgccacgataaacaacacgataaacgccatcaacaaacccatacccgctatccactactaaaacaacgactcgaaactttcgctaacgaaaaacaacaacgaaacgaacgacgacgcgaacaccaacaaccgcgccgcgataaccgcgccgtcgaaaaacgatacgaccgacgacaaattaccgaactcgaaaacgcccaaaacgaacacccccgcgcccataccgaactacgaaaaccgaaaacgaaaaatataacaaaactaaaccgtaattaaaaaacaccccaaaaacccgaacgacgtaatacgcaaaaaaaaatcgcgaccgaatcaaaacaaccgcgacgcgaaaccgaaaacataaacgccgaacgcctttcccgcaaaaaccgaacgctatcgctaccgctaccgccgccgccgccgccgccgctactactaaaaccgctaccgctactaaaaaatccgccgaaacttcaacatatttctaaacgcgccgaacccgcaactccgacacccaacacccaccccaccccgctcccactccccaaaccaacccccgaaacctcgcgtcaaactcctacaaccaatccgaacaaaaacacgcccccgtctaatctacacccccacc

SEQ ID NO: 3525 - DNA, 1732 bp, Artificial Sequence
  chemically treated genomic DNA (Homo sapiens) CpG-island No: 3525
cgtggcgcgttttttttttgcgttttttttttttagggtttatttttcgcggacgtagagcgtttgtcggggggacggtaggttcgcgatggttgtttttgaggtagtcggttttttttcgtcgtgggtttgggaagcgttcgaaaggttcgttcggatcgtttgcggtgttgttcgtagggaaagcgtcgttgttagtcgggttgttacgggtgcgagtggaagaagtatatcgtaggatgagcgacgtcgttgtagaggtaatcgcggggattgcggttagagacgggggatgggcgtagtcgaggataacgggatggtcggtattcggaacgcgttaggttcgtttcgtcggatcgttttattttttagttcgcgtttttagtcgtttttttagatttcgatcgtagttttagaagtgacggttacgtgggtggcggcgcgcgtcgcggggattggaatgttggcgtggggggacgaggttggaagggtcgtagagaagtaaaggaggattcgcgttcgcgtgttcgggcgtcgattgttgggcgacgtcgtcgggagcgagtacgtttttgacgttacgcgttgttcgtttaatgagtggaggtttgagggaggcgtcggtttcggtttcgttgtcgtcgtcgttatatcggtttttcgggagcgtttgaggaggcgcgggtcgttgcgggttcgggcgtcgtagcgcgtcggttcgagtttttggacgaggtttacggagtcgttcgtttcgatttagtcgttcgatgtttttaaaatggaggtagcgggggcggcggcgtgaagaaagcggcgttgtgggcgcgggagtaggggttcgggcggaggcggtggcgggatggggttgttgtttatgattttggcgtcggtcgtgttgggttttttttttacgtttttcgtttagttttttttgttgtatcgtagatagttcgagtcgtcggcggacgaggtcgttcgcgcgggcgagggttttcgttatattaagttagtgtcgggtttgtttttaagggagtatttttatggcggcggtcgggatgaggagtttttcggagcggtttttgagggcggcgcgatttttatcgcggttttcgagattttcgtttcgtcgacgcgggagatttgttatttttttaacgttattattttatttttgtttcgggagttgcgggatatcgcgttgattcgtcgttgggttattaagaagattaaggtggagttcgaggagttgttgtagattaagacggtcgggcgtttgttggaggggttgagtttgcgggacgtgtttttgggcgagacggtgttttttattaagattattcggttcgtgcggttagtcgtgttttcggttatcggggagttcgatggttttgaaggggaggcgttgttcgtcgtttgtttcgaggagttggttttcgaggcggaggtggagtataacgggggtttttatttggttatcgacgtggatttggttttcggtaagttcgtttatttgtttgttaagttgtttcgcgtggtgggaaggttgcgtttggtttttacgcgcgtgttttttatttattggtttttttttttcgtggaagattcgttgatcgatttcgaggtgcgtttttagtttgaagggcggtttatgttttagtttatttttattatcgttaattagtttaagaagattattaagcgtaagtatattttatcgaattataagatt

SEQ ID NO: 3526 - DNA, 1732 bp, Artificial Sequence
  chemically treated genomic DNA (Homo sapiens) CpG-island No: 3526
aatcttataattcgataaaatatacttacgcttaataatcttcttaaactaattaacgataataaaaataaactaaaacataaaccgcccttcaaactaaaaacgcacctcgaaatcgatcaacgaatcttccacgaaaaaaaaaaaccaataaataaaaaacacgcgcgtaaaaaccaaacgcaaccttcccaccacgcgaaacaacttaacaaacaaataaacgaacttaccgaaaaccaaatccacgtcgataaccaaataaaaacccccgttatactccacctccgcctcgaaaaccaactcctcgaaacaaacgacgaacaacgcctccccttcaaaaccatcgaactccccgataaccgaaaacacgactaaccgcacgaaccgaataatcttaataaaaaacaccgtctcgcccaaaaacacgtcccgcaaactcaacccctccaacaaacgcccgaccgtcttaatctacaacaactcctcgaactccaccttaatcttcttaataacccaacgacgaatcaacgcgatatcccgcaactcccgaaacaaaaataaaataataacgttaaaaaaataacaaatctcccgcgtcgacgaaacgaaaatctcgaaaaccgcgataaaaatcgcgccgccctcaaaaaccgctccgaaaaactcctcatcccgaccgccgccataaaaatactcccttaaaaacaaacccgacactaacttaatataacgaaaaccctcgcccgcgcgaacgacctcgtccgccgacgactcgaactatctacgatacaacaaaaaaaactaaacgaaaaacgtaaaaaaaaaacccaacacgaccgacgccaaaatcataaacaacaaccccatcccgccaccgcctccgcccgaacccctactcccgcgcccacaacgccgctttcttcacgccgccgcccccgctacctccattttaaaaacatcgaacgactaaatcgaaacgaacgactccgtaaacctcgtccaaaaactcgaaccgacgcgctacgacgcccgaacccgcaacgacccgcgcctcctcaaacgctcccgaaaaaccgatataacgacgacgacaacgaaaccgaaaccgacgcctccctcaaacctccactcattaaacgaacaacgcgtaacgtcaaaaacgtactcgctcccgacgacgtcgcccaacaatcgacgcccgaacacgcgaacgcgaatcctcctttacttctctacgacccttccaacctcgtccccccacgccaacattccaatccccgcgacgcgcgccgccacccacgtaaccgtcacttctaaaactacgatcgaaatctaaaaaaacgactaaaaacgcgaactaaaaaataaaacgatccgacgaaacgaacctaacgcgttccgaataccgaccatcccgttatcctcgactacgcccatcccccgtctctaaccgcaatccccgcgattacctctacaacgacgtcgctcatcctacgatatacttcttccactcgcacccgtaacaacccgactaacaacgacgctttccctacgaacaacaccgcaaacgatccgaacgaacctttcgaacgcttcccaaacccacgacgaaaaaaaaccgactacctcaaaaacaaccatcgcgaacctaccgtccccccgacaaacgctctacgtccgcgaaaaataaaccctaaaaaaaaaaaacgcaaaaaaaaaacgcgccacg

SEQ ID NO: 3527 - DNA, 1732 bp, Artificial Sequence
  chemically treated genomic DNA (Homo sapiens) CpG-island No: 3527
gattttgtaattcggtagggtgtgtttgcgtttgatgatttttttgagttggttgacgatgatggaggtgagttggggtatgggtcgttttttaaattgggagcgtatttcgaagtcgattagcgggttttttacgaaggagaagaattagtgggtgaagggtacgcgcgtaaagattaagcgtagtttttttattacgcgggatagtttgataaataagtaggcggatttgtcgaagattaggtttacgtcgatggttaggtggaagttttcgttgtattttattttcgtttcgaaggttagtttttcggggtaggcggcgggtagcgttttttttttagggttatcgggtttttcggtggtcgagggtacgattggtcgtacgagtcggatggttttgatgaagggtatcgtttcgtttaggaatacgtttcgtaggtttagtttttttagtaggcgttcggtcgttttggtttgtagtagtttttcgaattttattttgatttttttggtgatttagcggcgggttagcgcggtgtttcgtaattttcggaataggaataggatggtggcgttgaggaagtagtaagtttttcgcgtcggcggggcgggggtttcgggggtcgcggtgggggtcgcgtcgtttttaggggtcgtttcggagggttttttatttcggtcgtcgttataaaggtatttttttaggagtaggttcggtattggtttgatgtagcggaagttttcgttcgcgcgggcggtttcgttcgtcggcggttcgggttgtttgcggtatagtaggaagaattgggcgaggagcgtgaggaaggaatttagtacggtcgacgttaggattatgagtagtagttttatttcgttatcgttttcgttcgggtttttattttcgcgtttatagcgtcgttttttttacgtcgtcgttttcgttgtttttattttgaggatatcgggcggttgggtcggggcgagcggtttcgtgggtttcgtttaggggttcgggtcggcgcgttgcggcgttcgagttcgtagcggttcgcgtttttttagacgttttcgaagggtcggtgtggcggcggcggtagcggggtcgggatcggcgttttttttaggtttttatttattggacgagtagcgcgtgacgttagaggcgtgttcgttttcggcggcgtcgtttagtagtcggcgttcgggtacgcggacgcgggtttttttttatttttttgcggtttttttaatttcgtttttttacgttaatattttaattttcgcggcgcgcgtcgttatttacgtggtcgttatttttggagttgcggtcgggatttgggaggacggttggggacgcgggttggaggataaggcggttcggcggagcgggtttgacgcgtttcggatgtcggttatttcgttattttcggttgcgtttatttttcgtttttggtcgtagttttcgcggttatttttgtagcggcgtcgtttattttgcggtgtgttttttttattcgtattcgtgatagttcggttggtagcggcgttttttttgcgggtagtatcgtagacgattcgagcgggtttttcggacgttttttaagtttacggcgagaggggatcgattgttttagaggtagttatcgcggatttgtcgttttttcggtagacgttttgcgttcgcggagggtgggttttgggaaggagggacgtagggaaagggcgcgttacg

SEQ ID NO: 3528 - DNA, 1732 bp, Artificial Sequence
  chemically treated genomic DNA (Homo sapiens) CpG-island No: 3528
cgtaacgcgccctttccctacgtccctccttcccaaaacccaccctccgcgaacgcaaaacgtctaccgaaaaaacgacaaatccgcgataactacctctaaaacaatcgatcccctctcgccgtaaacttaaaaaacgtccgaaaaacccgctcgaatcgtctacgatactacccgcaaaaaaaacgccgctaccaaccgaactatcacgaatacgaataaaaaaaacacaccgcaaaataaacgacgccgctacaaaaataaccgcgaaaactacgaccaaaaacgaaaaataaacgcaaccgaaaataacgaaataaccgacatccgaaacgcgtcaaacccgctccgccgaaccgccttatcctccaacccgcgtccccaaccgtcctcccaaatcccgaccgcaactccaaaaataacgaccacgtaaataacgacgcgcgccgcgaaaattaaaatattaacgtaaaaaaacgaaattaaaaaaaccgcaaaaaaataaaaaaaaacccgcgtccgcgtacccgaacgccgactactaaacgacgccgccgaaaacgaacacgcctctaacgtcacgcgctactcgtccaataaataaaaacctaaaaaaaacgccgatcccgaccccgctaccgccgccgccacaccgacccttcgaaaacgtctaaaaaaacgcgaaccgctacgaactcgaacgccgcaacgcgccgacccgaacccctaaacgaaacccacgaaaccgctcgccccgacccaaccgcccgatatcctcaaaataaaaacaacgaaaacgacgacgtaaaaaaaacgacgctataaacgcgaaaataaaaacccgaacgaaaacgataacgaaataaaactactactcataatcctaacgtcgaccgtactaaattccttcctcacgctcctcgcccaattcttcctactataccgcaaacaacccgaaccgccgacgaacgaaaccgcccgcgcgaacgaaaacttccgctacatcaaaccaataccgaacctactcctaaaaaaatacctttataacgacgaccgaaataaaaaaccctccgaaacgacccctaaaaacgacgcgacccccaccgcgacccccgaaacccccgccccgccgacgcgaaaaacttactacttcctcaacgccaccatcctattcctattccgaaaattacgaaacaccgcgctaacccgccgctaaatcaccaaaaaaatcaaaataaaattcgaaaaactactacaaaccaaaacgaccgaacgcctactaaaaaaactaaacctacgaaacgtattcctaaacgaaacgatacccttcatcaaaaccatccgactcgtacgaccaatcgtaccctcgaccaccgaaaaacccgataaccctaaaaaaaaaacgctacccgccgcctaccccgaaaaactaaccttcgaaacgaaaataaaatacaacgaaaacttccacctaaccatcgacgtaaacctaatcttcgacaaatccgcctacttatttatcaaactatcccgcgtaataaaaaaactacgcttaatctttacgcgcgtacccttcacccactaattcttctccttcgtaaaaaacccgctaatcgacttcgaaatacgctcccaatttaaaaaacgacccataccccaactcacctccatcatcgtcaaccaactcaaaaaaatcatcaaacgcaaacacaccctaccgaattacaaaatc

SEQ ID NO: 3529 - DNA, 571 bp, Artificial Sequence
  chemically treated genomic DNA (Homo sapiens) CpG-island No: 3529
tttaggggtgcgcgagcggggtcggaattaagaagttttttttggggtgggcggggatcgatttagagtttttattgcggggtatcgtttttttttttcgtcggtcgttcgttaggaggcgttggggagtttgtagtttatttgcgaggcggtttcgttttttttattttttagttcgcgttcggcggagagattataattttcggagtgttttgggaacggagttacgggagttataggcggagggattcgagggcgggtttttcgggtgtgtgttttcggcgtcggcggtcgcggtcggggacggtgtgagagcggtaagatggcggcggcggcggtggtggagttttagagagtttagtttttatttagtatcgatcgggaggtttttatcgatattttttattttatcggtaaaggtcgtcgcgtcgttttttcggtttcgtcggtttagttcggtttatgtcggtcggcggtagcggagaggggttcggttagtcggttttgatgttgttgatttattgtgtgaggggggtcgggtcgggggcgtaggtcgttcggagttttttag

SEQ ID NO: 3530 - DNA, 571 bp, Artificial Sequence
  chemically treated genomic DNA (Homo sapiens) CpG-island No: 3530
ctaaaaaactccgaacgacctacgcccccgacccgacccccctcacacaataaatcaacaacatcaaaaccgactaaccgaacccctctccgctaccgccgaccgacataaaccgaactaaaccgacgaaaccgaaaaaacgacgcgacgacctttaccgataaaataaaaaatatcgataaaaacctcccgatcgatactaaataaaaactaaactctctaaaactccaccaccgccgccgccgccatcttaccgctctcacaccgtccccgaccgcgaccgccgacgccgaaaacacacacccgaaaaacccgccctcgaatccctccgcctataactcccgtaactccgttcccaaaacactccgaaaattataatctctccgccgaacgcgaactaaaaaataaaaaaaacgaaaccgcctcgcaaataaactacaaactccccaacgcctcctaacgaacgaccgacgaaaaaaaaaaacgataccccgcaataaaaactctaaatcgatccccgcccaccccaaaaaaaacttcttaattccgaccccgctcgcgcacccctaaa

SEQ ID NO: 3531 - DNA, 571 bp, Artificial Sequence
  chemically treated genomic DNA (Homo sapiens) CpG-island No: 3531
ttggggagtttcgagcggtttgcgttttcggttcggttttttttatatagtgagttagtagtattagagtcggttagtcgggttttttttcgttgtcgtcgatcgatataagtcgagttgggtcggcggggtcggggaggcggcgcggcgatttttatcgatggagtggaggatgtcgatggaggtttttcggtcggtgttgagtagagattgggttttttggaattttattatcgtcgtcgtcgttattttatcgtttttatatcgttttcggtcgcggtcgtcgacgtcggaaatatatattcggaaagttcgttttcgggttttttcgtttgtagttttcgtggtttcgtttttagagtatttcgggagttgtagttttttcgtcgggcgcgggttgaggggtggggagagcgggatcgtttcgtaggtgggttgtaagttttttagcgttttttagcgggcggtcggcgaggaaaagaggcggtgtttcgtagtgggagttttagatcggttttcgtttattttaaaagaggttttttgatttcggtttcgttcgcgtatttttgag

SEQ ID NO: 3532 - DNA, 571 bp, Artificial Sequence
  chemically treated genomic DNA (Homo sapiens) CpG-island No: 3532
ctcaaaaatacgcgaacgaaaccgaaatcaaaaaacctcttttaaaataaacgaaaaccgatctaaaactcccactacgaaacaccgcctcttttcctcgccgaccgcccgctaaaaaacgctaaaaaacttacaacccacctacgaaacgatcccgctctccccacccctcaacccgcgcccgacgaaaaaactacaactcccgaaatactctaaaaacgaaaccacgaaaactacaaacgaaaaaacccgaaaacgaactttccgaatatatatttccgacgtcgacgaccgcgaccgaaaacgatataaaaacgataaaataacgacgacgacgataataaaattccaaaaaacccaatctctactcaacaccgaccgaaaaacctccatcgacatcctccactccatcgataaaaatcgccgcgccgcctccccgaccccgccgacccaactcgacttatatcgatcgacgacaacgaaaaaaaacccgactaaccgactctaatactactaactcactatataaaaaaaaccgaaccgaaaacgcaaaccgctcgaaactccccaa

SEQ ID NO: 3533 - DNA, 744 bp, Artificial Sequence
  chemically treated genomic DNA (Homo sapiens) CpG-island No: 3533
cgttgttaattagtttgcgttcgttgtttttcggggaggggggttttagggtttttcggcgtcgcggtttttaagatttcgagttttacgcgagtcgtcggtttttttatcgcgcggtttagtgttttttttttggttttcgggtttcgcgagtcgggtaggggttgggagtttcgtatggtttagattagagaggcgggaagtaagggcgagtagttcggtttttagtcgaggttcgataattaggagggttcgtttggtttcgtcgtgttcgaagattaggacgttttacgatcgggtttggttattttttgtcggcgttcgtttttaggtagcggtttttacggattttcggtcgtagagtttcgttttttaagttttgtttttagttgtgcgcgttgtttatttgggagtttcggtttcgaggtcgtaggcgtatacgcgttttataggtttacgtttcgtttttttattatgtttattacgcggttttgtatttttaggttttgggtacggtttttttgtttattcgttttttttgtttcggtttagggggtcgcgggcgttggattcggtttggcgcgtttcgaagtcggtcgcggaggttaggggtgaggattgggaggaagttcggtggtcgggtgcggggcggcggcggtagggaagtgttgggtcggtttttgagtggagtcgagttcggttcgggttttgatagagtttaggtcgggttgtaaggtgttaggt

SEQ ID NO: 3534 - DNA, 744 bp, Artificial Sequence
  chemically treated genomic DNA (Homo sapiens) CpG-island No: 3534
acctaacaccttacaacccgacctaaactctatcaaaacccgaaccgaactcgactccactcaaaaaccgacccaacacttccctaccgccgccgccccgcacccgaccaccgaacttcctcccaatcctcacccctaacctccgcgaccgacttcgaaacgcgccaaaccgaatccaacgcccgcgaccccctaaaccgaaacaaaaaaaacgaataaacaaaaaaaccgtacccaaaacctaaaaatacaaaaccgcgtaataaacataataaaaaaacgaaacgtaaacctataaaacgcgtatacgcctacgacctcgaaaccgaaactcccaaataaacaacgcgcacaactaaaaacaaaacttaaaaaacgaaactctacgaccgaaaatccgtaaaaaccgctacctaaaaacgaacgccgacaaaaaataaccaaacccgatcgtaaaacgtcctaatcttcgaacacgacgaaaccaaacgaaccctcctaattatcgaacctcgactaaaaaccgaactactcgcccttacttcccgcctctctaatctaaaccatacgaaactcccaacccctacccgactcgcgaaacccgaaaaccaaaaaaaaaacactaaaccgcgcgataaaaaaaccgacgactcgcgtaaaactcgaaatcttaaaaaccgcgacgccgaaaaaccctaaaacccccctccccgaaaaacaacgaacgcaaactaattaacaacg

SEQ ID NO: 3535 - DNA, 744 bp, Artificial Sequence
  chemically treated genomic DNA (Homo sapiens) CpG-island No: 3535
gtttggtattttgtagttcggtttgggttttgttaaggttcgagtcggattcggttttatttagaggtcggtttagtatttttttgtcgtcgtcgtttcgtattcggttatcgggtttttttttagtttttatttttgattttcgcggtcgatttcgaggcgcgttaggtcgggtttagcgttcgcggttttttgggtcgggataaggagggcgggtgagtagaagggtcgtgtttagggtttggaagtgtaaggtcgcgtggtgggtatggtagggaagcggagcgtgggtttgtgaggcgcgtgtgcgtttgcgatttcgggatcggggtttttaaatgaatagcgcgtatagttgggagtagggtttggggagcggggttttgcggtcggggattcgtagaagtcgttgtttggaagcgggcgtcggtagggggtggttagattcggtcgtggagcgttttagttttcgggtacggcggggttaggcgagtttttttggttgtcgagtttcggttgagagtcgggttgttcgtttttgtttttcgtttttttaatttaaattatgcggggtttttagtttttattcggttcgcggggttcgagggttaagaggagggtattgggtcgcgcggtggaggagtcggcggttcgcgtggggttcgggattttggggatcgcgacgtcggggaattttggagttttttttttcgggggatagcgggcgtagattgattgatagcg

SEQ ID NO: 3536 - DNA, 744 bp, Artificial Sequence
  chemically treated genomic DNA (Homo sapiens) CpG-island No: 3536
cgctatcaatcaatctacgcccgctatcccccgaaaaaaaaaactccaaaattccccgacgtcgcgatccccaaaatcccgaaccccacgcgaaccgccgactcctccaccgcgcgacccaataccctcctcttaaccctcgaaccccgcgaaccgaataaaaactaaaaaccccgcataatttaaattaaaaaaacgaaaaacaaaaacgaacaacccgactctcaaccgaaactcgacaaccaaaaaaactcgcctaaccccgccgtacccgaaaactaaaacgctccacgaccgaatctaaccaccccctaccgacgcccgcttccaaacaacgacttctacgaatccccgaccgcaaaaccccgctccccaaaccctactcccaactatacgcgctattcatttaaaaaccccgatcccgaaatcgcaaacgcacacgcgcctcacaaacccacgctccgcttccctaccatacccaccacgcgaccttacacttccaaaccctaaacacgacccttctactcacccgccctccttatcccgacccaaaaaaccgcgaacgctaaacccgacctaacgcgcctcgaaatcgaccgcgaaaatcaaaaataaaaactaaaaaaaaacccgataaccgaatacgaaacgacgacgacaaaaaaatactaaaccgacctctaaataaaaccgaatccgactcgaaccttaacaaaacccaaaccgaactacaaaataccaaac

SEQ ID NO: 3537 - DNA, 786 bp, Artificial Sequence
  chemically treated genomic DNA (Homo sapiens) CpG-island No: 3537
ttttcgtttttttttatttttcgttcgatttttttttttttagttcgttgtcgtttagttcgcggtattttgagggttacgtcgtatagtttgttttgtcgtcggattttttttatgacgtcgtagtcgcgattaggtaatttagatacggagaagtgtattagattttttagttttttcgcgtcgttttttattatttttttcggtcgttgtaattgcgtaggtttcgtcggtcggttagatattaattagggcggggcgatagcgtacgtcgatagtcgttcggagcgcggagtagtaatcggacgggttttcgcggtcgtcgtagttgaattttttcggcgtcggaagtttcgttatttcgttttttggtttatgtgcggttttcgttttttcgttatttcgattttgatttcgtatgtgtattcgtcgaagtttttttagattaatcggttttatttttcgttttttcgattcggttatgattttattcgtattttcgacgtaggatttcggattttattttcgttatttcgatattttcggaattttcggaagcgattcgttgttatggcgattatgtatatagttaggtagtttcgcgtggggagtgtaggtggtttcggttgcggtagtcgcgtttcgggagcgtcgttgtttggtgaacggtgagtaggggttgttcgtcggtgggagtggggagacgggaaaagggtgtgcgttcggattgttgaaagtggttggggtttaaaaatcgttttatttgggggtttttagttgggtcgt

SEQ ID NO: 3538 - DNA, 786 bp, Artificial Sequence
  chemically treated genomic DNA (Homo sapiens) CpG-island No: 3538
acgacccaactaaaaacccccaaataaaacgatttttaaaccccaaccactttcaacaatccgaacgcacacccttttcccgtctccccactcccaccgacgaacaacccctactcaccgttcaccaaacaacgacgctcccgaaacgcgactaccgcaaccgaaaccacctacactccccacgcgaaactacctaactatatacataatcgccataacaacgaatcgcttccgaaaattccgaaaatatcgaaataacgaaaataaaatccgaaatcctacgtcgaaaatacgaataaaatcataaccgaatcgaaaaaacgaaaaataaaaccgattaatctaaaaaaacttcgacgaatacacatacgaaatcaaaatcgaaataacgaaaaaacgaaaaccgcacataaaccaaaaaacgaaataacgaaacttccgacgccgaaaaaattcaactacgacgaccgcgaaaacccgtccgattactactccgcgctccgaacgactatcgacgtacgctatcgccccgccctaattaatatctaaccgaccgacgaaacctacgcaattacaacgaccgaaaaaaataataaaaaacgacgcgaaaaaactaaaaaatctaatacacttctccgtatctaaattacctaatcgcgactacgacgtcataaaaaaaatccgacgacaaaacaaactatacgacgtaaccctcaaaataccgcgaactaaacgacaacgaactaaaaaaaaaaaaatcgaacgaaaaataaaaaaaaacgaaaa

SEQ ID NO: 3539 - DNA, 786 bp, Artificial Sequence
  chemically treated genomic DNA (Homo sapiens) CpG-island No: 3539
gcgatttagttgggaatttttagataaagcggtttttggattttagttatttttagtagttcgggcgtatatttttttttcgtttttttatttttatcggcgagtagtttttgtttatcgtttattaggtagcgacgttttcgggacgcgattgtcgtaatcgaaattatttgtattttttacgcggggttgtttggttgtgtatatagtcgttatggtaacgggtcgttttcggggatttcggaagtgtcggggtggcggaaatgaagttcgaggttttacgtcgaggatacgggtgaggttatggtcgaatcgggaagacgagagatggggtcgattgatttagaaagatttcggcggatgtatatgcgaagttaaggtcgagatagcgagggaacgaaggtcgtatatgaattaggaagcggagtggcggggttttcggcgtcgaggagatttaattacggcggtcgcggaggttcgttcgattgttgtttcgcgtttcgagcggttgtcggcgtgcgttatcgtttcgttttggttagtgtttagtcggtcggcgaggtttgcgtagttgtagcggtcggggaagatggtggaggacggcgcggaggagttggaggatttggtgtattttttcgtgtttgagttgtttagtcgcggttacggcgttatggaggagattcggcggtagggtaagttgtgcgacgtgatttttaaggtatcgcggattgggcggtagcgggttgagggaaaaggggtcgagcggggagtaaaaaggggcggggg

SEQ ID NO: 3540 - DNA, 786 bp, Artificial Sequence
  chemically treated genomic DNA (Homo sapiens) CpG-island No: 3540
cccccgcccctttttactccccgctcgaccccttttccctcaacccgctaccgcccaatccgcgataccttaaaaatcacgtcgcacaacttaccctaccgccgaatctcctccataacgccgtaaccgcgactaaacaactcaaacacgaaaaaatacaccaaatcctccaactcctccgcgccgtcctccaccatcttccccgaccgctacaactacgcaaacctcgccgaccgactaaacactaaccaaaacgaaacgataacgcacgccgacaaccgctcgaaacgcgaaacaacaatcgaacgaacctccgcgaccgccgtaattaaatctcctcgacgccgaaaaccccgccactccgcttcctaattcatatacgaccttcgttccctcgctatctcgaccttaacttcgcatatacatccgccgaaatctttctaaatcaatcgaccccatctctcgtcttcccgattcgaccataacctcacccgtatcctcgacgtaaaacctcgaacttcatttccgccaccccgacacttccgaaatccccgaaaacgacccgttaccataacgactatatacacaaccaaacaaccccgcgtaaaaaatacaaataatttcgattacgacaatcgcgtcccgaaaacgtcgctacctaataaacgataaacaaaaactactcgccgataaaaataaaaaaacgaaaaaaaaatatacgcccgaactactaaaaataactaaaatccaaaaaccgctttatctaaaaattcccaactaaatcgc

SEQ ID NO: 3541 - DNA, 578 bp, Artificial Sequence
  chemically treated genomic DNA (Homo sapiens) CpG-island No: 3541
ggttcgggatttgtatcgcggtaggaatgttcgcggtatgtataagcgatgatggttagtaatagacggtaagtgtatcgtagtttgcggtatgtaacggttttatagttgaaattagcggggcggattcgcgtttcgaattattgaacgcgacggtaaattaggattattagcgcgacggtaaaagttataaaatcgtgtaggattcgtttcgatttagttaggcgggattggcggtaatttatgatgtcgaattcggtagtaatttgacggtttttggcgaagtatgtcgattcgatatagttgacggtagtttatttaacgttttcgattttttagttacgttagaattattaatttggttaacgggcgaatgatcgtggtgcgtattaatgatcgcggtttttacggtaacgatcgcgttattttattttttcgcgcgggaagttgatcgttttaatacgttaaataatattaaagttcggaacgaaatcgaatattggtgttttagaagggttttttttttgggttcggtaatggtttggattataaggcgttaaaaaagaatttaagttttt

SEQ ID NO: 3542 - DNA, 578 bp, Artificial Sequence
  chemically treated genomic DNA (Homo sapiens) CpG-island No: 3542
aaaaacttaaattcttttttaacgccttataatccaaaccattaccgaacccaaaaaaaaaacccttctaaaacaccaatattcgatttcgttccgaactttaatattatttaacgtattaaaacgatcaacttcccgcgcgaaaaaataaaataacgcgatcgttaccgtaaaaaccgcgatcattaatacgcaccacgatcattcgcccgttaaccaaattaataattctaacgtaactaaaaaatcgaaaacgttaaataaactaccgtcaactatatcgaatcgacatacttcgccaaaaaccgtcaaattactaccgaattcgacatcataaattaccgccaatcccgcctaactaaatcgaaacgaatcctacacgattttataacttttaccgtcgcgctaataatcctaatttaccgtcgcgttcaataattcgaaacgcgaatccgccccgctaatttcaactataaaaccgttacataccgcaaactacgatacacttaccgtctattactaaccatcatcgcttatacataccgcgaacattcctaccgcgatacaaatcccgaacc

SEQ ID NO: 3543 - DNA, 578 bp, Artificial Sequence
  chemically treated genomic DNA (Homo sapiens) CpG-island No: 3543
aggagtttaagtttttttttggcgttttgtggtttaagttattgtcgggtttagaaaggggatttttttggggtattaatattcggtttcgtttcgaattttggtgttgtttgacgtgttaagacggttagtttttcgcgcgagaaagtgaaataacgcggtcgttgtcgtaagggtcgcgattattaatgcgtattacgattattcgttcgttagttaggttagtgattttggcgtagttgggggatcggaagcgttggatgggttgtcgttagttgtgtcggatcgatatgtttcgttagaggtcgttaggttattgtcgggttcggtattatagattgtcgttagtttcgtttggttaaatcgagacggattttgtacgattttgtagtttttatcgtcgcgttggtaattttgatttgtcgtcgcgtttagtggttcgaaacgcgggttcgtttcgttaattttaattatagggtcgttatatatcgtaggttgcggtatatttatcgtttgttgttgattattatcgtttgtatatgtcgcgagtatttttgtcgcgatgtagatttcgagtt

SEQ ID NO: 3544 - DNA, 578 bp, Artificial Sequence
  chemically treated genomic DNA (Homo sapiens) CpG-island No: 3544
aactcgaaatctacatcgcgacaaaaatactcgcgacatatacaaacgataataatcaacaacaaacgataaatataccgcaacctacgatatataacgaccctataattaaaattaacgaaacgaacccgcgtttcgaaccactaaacgcgacgacaaatcaaaattaccaacgcgacgataaaaactacaaaatcgtacaaaatccgtctcgatttaaccaaacgaaactaacgacaatctataataccgaacccgacaataacctaacgacctctaacgaaacatatcgatccgacacaactaacgacaacccatccaacgcttccgatcccccaactacgccaaaatcactaacctaactaacgaacgaataatcgtaatacgcattaataatcgcgacccttacgacaacgaccgcgttatttcactttctcgcgcgaaaaactaaccgtcttaacacgtcaaacaacaccaaaattcgaaacgaaaccgaatattaataccccaaaaaaatcccctttctaaacccgacaataacttaaaccacaaaacgccaaaaaaaaacttaaactcct

SEQ ID NO: 3545 - DNA, 789 bp, Artificial Sequence
  chemically treated genomic DNA (Homo sapiens) CpG-island No: 3545
gtcgtcggggtcgttcggcgttttttttatgttcgttcgtttgttcgttcgtcgcggtgttcggtgttcgtcgtcgtcgttcgcgtcgtcgttggttcgggatcgcgggtagtcggagtttatattcggggacggaggcgttcgttcgttcgttcgtttcgcgttcgtcgcgtcgcgtcgtacgtcggtttcgttttggcgacgttgcgcgttcgtcgtcgtttttcgtttttcgttcgtttcgagtcgtttacggttcgcgtcgcgtcgcgtttcggcgggtttgtagttcggcgcgcggttttgttcggtattatttgcgcgttcggggtggtcgtcgcgtgggattcggggtgtcgttattttagtttggttcggttgatttgcgggttttaaagggttaagcgcgttttagcggcgggttgttcggttaatttttttcgcgtcgtacggtgcgtttttttttcgggattcggaggaggtaggcggcgttagtgtttttcgcggcgttggggtgcggatgaatcgttttttttcgcgtatttttgggttgggggatagttcgggttttcgcgtcggtttcgatttcgcgtcggttttttttgcgtatatttggaggaggtttcgttttttgggagtttaggtgttagcgggcggtagttgttgcggttttcgagtttattttcgttaaggttcggtcgggttttttggttgtttcggagcggggtaggcgttttttgttttttttcggttttttttggaatcgggggggttggggtagttcgggtt

SEQ ID NO: 3546 - DNA, 789 bp, Artificial Sequence
  chemically treated genomic DNA (Homo sapiens) CpG-island No: 3546
aacccgaactaccccaacccccccgattccaaaaaaaaccgaaaaaaaacaaaaaacgcctaccccgctccgaaacaaccaaaaaacccgaccgaaccttaacgaaaataaactcgaaaaccgcaacaactaccgcccgctaacacctaaactcccaaaaaacgaaacctcctccaaatatacgcaaaaaaaaccgacgcgaaatcgaaaccgacgcgaaaacccgaactatcccccaacccaaaaatacgcgaaaaaaaacgattcatccgcaccccaacgccgcgaaaaacactaacgccgcctacctcctccgaatcccgaaaaaaaaacgcaccgtacgacgcgaaaaaaattaaccgaacaacccgccgctaaaacgcgcttaaccctttaaaacccgcaaatcaaccgaaccaaactaaaataacgacaccccgaatcccacgcgacgaccaccccgaacgcgcaaataataccgaacaaaaccgcgcgccgaactacaaacccgccgaaacgcgacgcgacgcgaaccgtaaacgactcgaaacgaacgaaaaacgaaaaacgacgacgaacgcgcaacgtcgccaaaacgaaaccgacgtacgacgcgacgcgacgaacgcgaaacgaacgaacgaacgaacgcctccgtccccgaatataaactccgactacccgcgatcccgaaccaacgacgacgcgaacgacgacgacgaacaccgaacaccgcgacgaacgaacaaacgaacgaacataaaaaaaacgccgaacgaccccgacgac

SEQ ID NO: 3547 - DNA, 789 bp, Artificial Sequence
  chemically treated genomic DNA (Homo sapiens) CpG-island No: 3547
gattcgggttattttaattttttcgattttagaaagggtcggagaaaagtagggggcgtttgtttcgtttcggagtagttagggagttcggtcgagttttgacgaggatgagttcggagatcgtagtagttatcgttcgttagtatttgagtttttagggggcggggttttttttaggtgtgcgtagaggaggtcggcgcggagtcggggtcggcgcgggagttcgagttgttttttagtttagaaatgcgcggggaggagcggtttattcgtattttagcgtcgcgggagatattggcgtcgtttgtttttttcgggtttcggggggagagcgtatcgtgcggcgcggagggggttaatcgggtagttcgtcgttggagcgcgtttaattttttggagttcgtaggttagtcgggttaggttggggtggcggtatttcgagttttacgcgacggttatttcgagcgcgtaagtggtgtcgggtagaatcgcgcgtcgggttgtagattcgtcggggcgcggcgcggcgcgggtcgtgggcggttcggggcgggcggagggcgggggacggcggcgggcgcgtagcgtcgttagggcgaagtcggcgtgcggcgcggcgcggcgggcgcggagcgagcgggcgggcgagcgttttcgttttcggatgtgagtttcggttgttcgcggtttcgagttagcggcggcgcgggcggcggcggcgggtatcgggtatcgcggcgggcgggtagacgggcgggtatggggggagcgtcgagcggtttcggcggt

SEQ ID NO: 3548 - DNA, 789 bp, Artificial Sequence
  chemically treated genomic DNA (Homo sapiens) CpG-island No: 3548
accgccgaaaccgctcgacgctccccccatacccgcccgtctacccgcccgccgcgatacccgatacccgccgccgccgcccgcgccgccgctaactcgaaaccgcgaacaaccgaaactcacatccgaaaacgaaaacgctcgcccgcccgctcgctccgcgcccgccgcgccgcgccgcacgccgacttcgccctaacgacgctacgcgcccgccgccgtcccccgccctccgcccgccccgaaccgcccacgacccgcgccgcgccgcgccccgacgaatctacaacccgacgcgcgattctacccgacaccacttacgcgctcgaaataaccgtcgcgtaaaactcgaaataccgccaccccaacctaacccgactaacctacgaactccaaaaaattaaacgcgctccaacgacgaactacccgattaaccccctccgcgccgcacgatacgctctccccccgaaacccgaaaaaaacaaacgacgccaatatctcccgcgacgctaaaatacgaataaaccgctcctccccgcgcatttctaaactaaaaaacaactcgaactcccgcgccgaccccgactccgcgccgacctcctctacgcacacctaaaaaaaaccccgccccctaaaaactcaaatactaacgaacgataactactacgatctccgaactcatcctcgtcaaaactcgaccgaactccctaactactccgaaacgaaacaaacgccccctacttttctccgaccctttctaaaatcgaaaaaattaaaataacccgaatc

SEQ ID NO: 3549 - DNA, 701 bp, Artificial Sequence
  chemically treated genomic DNA (Homo sapiens) CpG-island No: 3549
cgagacgatggcgatggttcgcgcggatttagagtttttcggatattcgaagataagttatatttggcgttggaattcgttgcggggtaggggtttttttttttttttaatgaagtttttattttcgcggaagcgttttatggtttcgttttttagttggtagaagcgtatttcgttcgcgaatacgtttagggagacgttgatcggttttcgtaggcggttttcggattggtagtagtagaggatatcgtcgaagttgggtcggttgcggtcgaagaagtattcgttttttagggggtcgaagtagcgtaggcgtttggcggggttttttaggagtgtgttggggaattgcgttagggtgtttagttgcgttttaaagcgtagttcggagatgttgatgtggacgcgttggtggtgtagggacgtcgtgtttagagtttggttttttatcgtgtttaggtcgggatcgtttttttttttttcgttttcgggaggcggtcgtcgaggtcgtggtagtttttttggtagcggaggtaagggtcgtattttcgggttcggtagcggaggtaagggtcgtattttcgagttcgcgtttttttgcgcgtcgcgtttttttggcgtcggttttttgggtttatcgttgagtttagtcgtcgggggatattggagttttttttttgtggtttggtcgtagtttgttt

SEQ ID NO: 3550 - DNA, 701 bp, Artificial Sequence
  chemically treated genomic DNA (Homo sapiens) CpG-island No: 3550
aaacaaactacgaccaaaccacaaaaaaaaaactccaatatcccccgacgactaaactcaacgataaacccaaaaaaccgacgccaaaaaaacgcgacgcgcaaaaaaacgcgaactcgaaaatacgacccttacctccgctaccgaacccgaaaatacgacccttacctccgctaccaaaaaaactaccacgacctcgacgaccgcctcccgaaaacgaaaaaaaaaaaaacgatcccgacctaaacacgataaaaaaccaaactctaaacacgacgtccctacaccaccaacgcgtccacatcaacatctccgaactacgctttaaaacgcaactaaacaccctaacgcaattccccaacacactcctaaaaaaccccgccaaacgcctacgctacttcgaccccctaaaaaacgaatacttcttcgaccgcaaccgacccaacttcgacgatatcctctactactaccaatccgaaaaccgcctacgaaaaccgatcaacgtctccctaaacgtattcgcgaacgaaatacgcttctaccaactaaaaaacgaaaccataaaacgcttccgcgaaaataaaaacttcattaaaaaaaaaaaaaaacccctaccccgcaacgaattccaacgccaaatataacttatcttcgaatatccgaaaaactctaaatccgcgcgaaccatcgccatcgtctcg

SEQ ID NO: 3551 - DNA, 701 bp, Artificial Sequence
  chemically treated genomic DNA (Homo sapiens) CpG-island No: 3551
gggtaggttgcggttaggttatagggggagagttttagtgtttttcgacggttgggtttagcgatgggtttaaggagtcggcgttaaaggggcgcggcgcgtagagagacgcggattcgggagtgcggtttttgttttcgttgtcggattcgggagtgcggtttttgttttcgttgttagaggagttgttacggtttcgacggtcgtttttcgaggacgaggaggaagaaggcgatttcggtttgggtacggtggaggattaggttttgggtacggcgtttttgtattattagcgcgtttatattaatattttcgggttgcgttttgagacgtagttgggtattttggcgtagttttttaatatatttttgggggatttcgttaagcgtttgcgttatttcgattttttgaggaacgagtattttttcgatcgtaatcggtttagtttcgacggtattttttattattattagttcgggggtcgtttgcggaggtcggttaacgtttttttggacgtgttcgcggacgagatacgtttttattagttgggggacgaggttatggagcgttttcgcgaggatgagggttttattaaagaagaggagaagtttttgtttcgtaacgagttttagcgttaggtgtggtttattttcgagtattcggagagttttgggttcgcgcgggttatcgttatcgtttcg

SEQ ID NO: 3552 - DNA, 701 bp, Artificial Sequence
  chemically treated genomic DNA (Homo sapiens) CpG-island No: 3552
cgaaacgataacgataacccgcgcgaacccaaaactctccgaatactcgaaaataaaccacacctaacgctaaaactcgttacgaaacaaaaacttctcctcttctttaataaaaccctcatcctcgcgaaaacgctccataacctcgtcccccaactaataaaaacgtatctcgtccgcgaacacgtccaaaaaaacgttaaccgacctccgcaaacgacccccgaactaataataataaaaaataccgtcgaaactaaaccgattacgatcgaaaaaatactcgttcctcaaaaaatcgaaataacgcaaacgcttaacgaaatcccccaaaaatatattaaaaaactacgccaaaatacccaactacgtctcaaaacgcaacccgaaaatattaatataaacgcgctaataatacaaaaacgccgtacccaaaacctaatcctccaccgtacccaaaccgaaatcgccttcttcctcctcgtcctcgaaaaacgaccgtcgaaaccgtaacaactcctctaacaacgaaaacaaaaaccgcactcccgaatccgacaacgaaaacaaaaaccgcactcccgaatccgcgtctctctacgcgccgcgcccctttaacgccgactccttaaacccatcgctaaacccaaccgtcgaaaaacactaaaactctccccctataacctaaccgcaacctaccc

SEQ ID NO: 3553 - DNA, 597 bp, Artificial Sequence
  chemically treated genomic DNA (Homo sapiens) CpG-island No: 3553
ttttcgatttttttttcgtttttttttattcgcgttgcgggttaagttcgagggaagtagtttcgaagttttcgcggcggcggcggcggcggtcgcggattttttttaggttgttcgtaaagttcggtcggtcggaggtagtcgttaattttttttaatttttgtcgattcgttgggcgaagtaatacgttttttgcgcgttttttttaggggttgagtcgggtgagtgggggcggggtaggaggttcgttggagtcggcggcggttgggcgtagatcgagggtttttagcgttttcgggttcgtttttttttttagttttcgagggtttcggtcgtttttattttttggcgttgtatataatttacgtggaggttaggttcgcgcggggggtttagagaaagtcggcgtcgggcgaggtttttgtaggtttttagattcggtgcgcgtgtttttatttagggcgaggttcgggcgagatcgggttatagttaattcgtattttttttatttcggtttattttagttttttcgtttttttgttagtttttggattttttttcggcgaattacgatttggggaacgaaggggtgggtg

SEQ ID NO: 3554 - DNA, 597 bp, Artificial Sequence
  chemically treated genomic DNA (Homo sapiens) CpG-island No: 3554
cacccaccccttcgttccccaaatcgtaattcgccgaaaaaaaatccaaaaactaacaaaaaaacgaaaaaactaaaataaaccgaaataaaaaaaatacgaattaactataacccgatctcgcccgaacctcgccctaaataaaaacacgcgcaccgaatctaaaaacctacaaaaacctcgcccgacgccgactttctctaaaccccccgcgcgaacctaacctccacgtaaattatatacaacgccaaaaaataaaaacgaccgaaaccctcgaaaactaaaaaaaaaaacgaacccgaaaacgctaaaaaccctcgatctacgcccaaccgccgccgactccaacgaacctcctaccccgcccccactcacccgactcaacccctaaaaaaaacgcgcaaaaaacgtattacttcgcccaacgaatcgacaaaaattaaaaaaaattaacgactacctccgaccgaccgaactttacgaacaacctaaaaaaaatccgcgaccgccgccgccgccgccgcgaaaacttcgaaactacttccctcgaacttaacccgcaacgcgaataaaaaaaaacgaaaaaaaaatcgaaaa

SEQ ID NO: 3555 - DNA, 597 bp, Artificial Sequence
  chemically treated genomic DNA (Homo sapiens) CpG-island No: 3555
tatttattttttcgttttttaaatcgtaattcgtcgaggaaggatttaggaattggtagaggagcgggagagttggggtgggtcggggtggggagggtgcgagttaattgtggttcggtttcgttcggatttcgttttaggtgggagtacgcgtatcgggtttgagaatttgtaagagtttcgttcggcgtcggttttttttgggtttttcgcgcgggtttggtttttacgtaagttgtgtgtagcgttagggagtggaggcggtcgagattttcggagattaggggagggggcgggttcgggggcgttgggggttttcggtttgcgtttagtcgtcgtcggttttagcgaattttttatttcgtttttatttattcggtttagtttttaggagagacgcgtaggaagcgtgttgtttcgtttagcggatcggtagaagttgagaggagttggcggttgttttcggtcggtcggattttgcgagtagtttggagaggattcgcgatcgtcgtcgtcgtcgtcgcggaggtttcggggttgtttttttcgagtttagttcgtagcgcgggtggagaggggcggggagggggtcggggg

SEQ ID NO: 3556 - DNA, 597 bp, Artificial Sequence
  chemically treated genomic DNA (Homo sapiens) CpG-island No: 3556
cccccgaccccctccccgcccctctccacccgcgctacgaactaaactcgaaaaaaacaaccccgaaacctccgcgacgacgacgacgacgatcgcgaatcctctccaaactactcgcaaaatccgaccgaccgaaaacaaccgccaactcctctcaacttctaccgatccgctaaacgaaacaacacgcttcctacgcgtctctcctaaaaactaaaccgaataaataaaaacgaaataaaaaattcgctaaaaccgacgacgactaaacgcaaaccgaaaacccccaacgcccccgaacccgccccctcccctaatctccgaaaatctcgaccgcctccactccctaacgctacacacaacttacgtaaaaaccaaacccgcgcgaaaaacccaaaaaaaaccgacgccgaacgaaactcttacaaattctcaaacccgatacgcgtactcccacctaaaacgaaatccgaacgaaaccgaaccacaattaactcgcaccctccccaccccgacccaccccaactctcccgctcctctaccaattcctaaatccttcctcgacgaattacgatttaaaaaacgaaaaaataaata

SEQ ID NO: 3557 - DNA, 679 bp, Artificial Sequence
  chemically treated genomic DNA (Homo sapiens) CpG-island No: 3557
aagtcgttgcgtcgcggtttattaagtttattttttttcgcgtttttcgtaggtttttcgtagatagtcgtatagtattttttattttatttaattcgtttcgcgtgttttgaattatagaaaggtaaatttgttaataaagaggcggttcgttcgcgtgcggggttttcgggcgcgtttcgttggttaggtgaggacggcgggtattgggtatcgtagcggggcgcggggcgggttggaggcgcgcggatattttttcggtcggtaaggaaggggcgggtcgaggcgcgggtcgtgtgtcgttgggtggttttgcgagtcgtcgtttttcgtttttttaggtttagtttttattatcgcgtggcggagttcgtgttcgggttaggtgagcgcgggcggttgcggcgggagaagcgcgttcgcgtggggtggggcgtcgggggcgggggagggaggttgggggtttcggtaaggcgtcgttattttcgtcgttcgtagtttttgatggatcgtggcggggtcggcgggtagggggacgttggttgcggataggggtggggtaggtatttcgggggagtcgcggcgcgtgggagtacgcgttggtgtgtgtaggggttcgtagtagggggtttttaattatacgtttgagttcgttttttgtatttgtgttttgggaaga

SEQ ID NO: 3558 - DNA, 679 bp, Artificial Sequence
  chemically treated genomic DNA (Homo sapiens) CpG-island No: 3558
tcttcccaaaacacaaatacaaaaaacgaactcaaacgtataattaaaaaccccctactacgaacccctacacacaccaacgcgtactcccacgcgccgcgactcccccgaaatacctaccccacccctatccgcaaccaacgtccccctacccgccgaccccgccacgatccatcaaaaactacgaacgacgaaaataacgacgccttaccgaaacccccaacctccctcccccgcccccgacgccccaccccacgcgaacgcgcttctcccgccgcaaccgcccgcgctcacctaacccgaacacgaactccgccacgcgataataaaaactaaacctaaaaaaacgaaaaacgacgactcgcaaaaccacccaacgacacacgacccgcgcctcgacccgccccttccttaccgaccgaaaaaatatccgcgcgcctccaacccgccccgcgccccgctacgatacccaatacccgccgtcctcacctaaccaacgaaacgcgcccgaaaaccccgcacgcgaacgaaccgcctctttattaacaaatttacctttctataattcaaaacacgcgaaacgaattaaataaaataaaaaatactatacgactatctacgaaaaacctacgaaaaacgcgaaaaaaaataaacttaataaaccgcgacgcaacgactt

SEQ ID NO: 3559 - DNA, 679 bp, Artificial Sequence
  chemically treated genomic DNA (Homo sapiens) CpG-island No: 3559
tttttttaaggtataagtgtagaaggcggatttaggcgtgtggttaaggattttttgttgcgggtttttgtatatattaacgcgtgtttttacgcgtcgcgattttttcgggatgtttgttttatttttattcgtagttagcgtttttttgttcgtcggtttcgttacggtttattagggattgcgggcggcggaggtggcggcgttttgtcgggatttttagtttttttttttcgttttcggcgttttattttacgcgggcgcgtttttttcgtcgtagtcgttcgcgtttatttggttcggatacgggtttcgttacgcggtgatggaagttgagtttagagaggcggagagcggcggttcgtagggttatttagcggtatacggttcgcgtttcggttcgttttttttttgtcggtcgggggagtgttcgcgcgtttttagttcgtttcgcgtttcgttgcggtgtttagtgttcgtcgtttttatttggttagcgggacgcgttcgggaatttcgtacgcgggcgggtcgtttttttgttagtaagtttgtttttttgtgatttagagtacgcggagcgaattaagtggagtgaggggtattgtgcgattgtttgcgggaaatttgcggggagcgcgggaagggatggatttgatgagtcgcggcgtagcggttt

SEQ ID NO: 3560 - DNA, 679 bp, Artificial Sequence
  chemically treated genomic DNA (Homo sapiens) CpG-island No: 3560
aaaccgctacgccgcgactcatcaaatccatcccttcccgcgctccccgcaaatttcccgcaaacaatcgcacaatacccctcactccacttaattcgctccgcgtactctaaatcacaaaaaaacaaacttactaacaaaaaaacgacccgcccgcgtacgaaattcccgaacgcgtcccgctaaccaaataaaaacgacgaacactaaacaccgcaacgaaacgcgaaacgaactaaaaacgcgcgaacactcccccgaccgacaaaaaaaaaacgaaccgaaacgcgaaccgtataccgctaaataaccctacgaaccgccgctctccgcctctctaaactcaacttccatcaccgcgtaacgaaacccgtatccgaaccaaataaacgcgaacgactacgacgaaaaaaacgcgcccgcgtaaaataaaacgccgaaaacgaaaaaaaaaaactaaaaatcccgacaaaacgccgccacctccgccgcccgcaatccctaataaaccgtaacgaaaccgacgaacaaaaaaacgctaactacgaataaaaataaaacaaacatcccgaaaaaatcgcgacgcgtaaaaacacgcgttaatatatacaaaaacccgcaacaaaaaatccttaaccacacgcctaaatccgccttctacacttataccttaaaaaaa

SEQ ID NO: 3561 - DNA, 776 bp, Artificial Sequence
  chemically treated genomic DNA (Homo sapiens) CpG-island No: 3561
acggtttttttcggagttattttttggaggattttatttcgttcggtgttcgggtttcgtatttattttttttttttcggttcgtttttcgtacggcgtttattttgtttttcgttttttcgttttatcgtcgttttgtttatattgtttttcgtgggcgttttcggtcgtttttttttttcgggtttcggtttgggggtgtttagttcgttcggcgtcggtttaaggtcgcgcgatttcgtacgtttttgagattcgtttcgtcgttcgtcgttcgggtcgtatttatcgcgttcgtaggatttgggggttttcgttttgttcgcgtttcggtatcgtcgtcgtcgtcgtcgttagcggaaatagggggcggggtttgttcgggaatggcgagtttgcggggcggggcggttcgggggcggagcggggaggggcggggcggagcggggaggggcggggcggagaaggatcgtagggttgagcggggcgttagcgttagtgttcggtattgtttcgggttgggttttttgcgttagaggaaggggagttcggggacggggtacggggttcgcgaggtacgggtgttttttcggggtttcggaagttttttttttcgtttcgtcgttcgtatgttcggatcggtcgttttttcgaggtgttatgatttcgttttttttttgcggcgaacgggttttttttcggggtaggggcggggaggttcgggtttggtagtgcgtttttttgggttttgcgtttatacggtatttaagggtttt

SEQ ID NO: 3562 - DNA, 776 bp, Artificial Sequence
  chemically treated genomic DNA (Homo sapiens) CpG-island No: 3562
aaaacccttaaataccgtataaacgcaaaacccaaaaaaacgcactaccaaacccgaacctccccgcccctaccccgaaaaaaaacccgttcgccgcaaaaaaaaaacgaaatcataacacctcgaaaaaacgaccgatccgaacatacgaacgacgaaacgaaaaaaaaaacttccgaaaccccgaaaaaacacccgtacctcgcgaaccccgtaccccgtccccgaactccccttcctctaacgcaaaaaacccaacccgaaacaataccgaacactaacgctaacgccccgctcaaccctacgatccttctccgccccgcccctccccgctccgccccgcccctccccgctccgcccccgaaccgccccgccccgcaaactcgccattcccgaacaaaccccgccccctatttccgctaacgacgacgacgacgacgataccgaaacgcgaacaaaacgaaaacccccaaatcctacgaacgcgataaatacgacccgaacgacgaacgacgaaacgaatctcaaaaacgtacgaaatcgcgcgaccttaaaccgacgccgaacgaactaaacacccccaaaccgaaacccgaaaaaaaaaaacgaccgaaaacgcccacgaaaaacaatataaacaaaacgacgataaaacgaaaaaacgaaaaacaaaataaacgccgtacgaaaaacgaaccgaaaaaaaaaaaataaatacgaaacccgaacaccgaacgaaataaaatcctccaaaaaataactccgaaaaaaaccgt

SEQ ID NO: 3563 - DNA, 776 bp, Artificial Sequence
  chemically treated genomic DNA (Homo sapiens) CpG-island No: 3563
aaggtttttgggtgtcgtgtgggcgtagagtttaggagagcgtattgttaggttcggattttttcgtttttatttcgggaagaggttcgttcgtcgtagggggaaggcgggattatagtatttcggaggagcggtcggttcgggtatgcgggcggcggggcggggagggaggttttcggaatttcgagagagtattcgtgtttcgcgggtttcgtgtttcgttttcgggtttttttttttttaacgtaggggatttagttcggggtagtgtcgggtattggcgttggcgtttcgtttagttttgcgattttttttcgtttcgttttttttcgtttcgtttcgttttttttcgtttcgttttcgggtcgtttcgtttcgtaggttcgttattttcgggtaggtttcgttttttgttttcgttggcggcggcggcggcggcggtgtcggagcgcgagtagagcggagatttttaggttttgcgggcgcggtgagtgcggttcgggcggcgggcggcgaggcgggttttaagagcgtgcggagtcgcgcggttttgagtcggcgtcgggcgggttgggtatttttaggtcgagattcgagaagggggagcggtcgggggcgtttacgggaggtagtgtgggtagggcggcggtgggacgagaggacgaggaatagagtaggcgtcgtgcgggaagcgggtcgggaaggggagggtgggtgcggggttcgggtatcgagcgaagtggggttttttaggggatggtttcgaggaagatcgt

SEQ ID NO: 3564 - DNA, 776 bp, Artificial Sequence
  chemically treated genomic DNA (Homo sapiens) CpG-island No: 3564
acgatcttcctcgaaaccatcccctaaaaaaccccacttcgctcgatacccgaaccccgcacccaccctccccttcccgacccgcttcccgcacgacgcctactctattcctcgtcctctcgtcccaccgccgccctacccacactacctcccgtaaacgcccccgaccgctcccccttctcgaatctcgacctaaaaatacccaacccgcccgacgccgactcaaaaccgcgcgactccgcacgctcttaaaacccgcctcgccgcccgccgcccgaaccgcactcaccgcgcccgcaaaacctaaaaatctccgctctactcgcgctccgacaccgccgccgccgccgccgccaacgaaaacaaaaaacgaaacctacccgaaaataacgaacctacgaaacgaaacgacccgaaaacgaaacgaaaaaaaacgaaacgaaacgaaaaaaaacgaaacgaaaaaaaatcgcaaaactaaacgaaacgccaacgccaatacccgacactaccccgaactaaatcccctacgttaaaaaaaaaaaaacccgaaaacgaaacacgaaacccgcgaaacacgaatactctctcgaaattccgaaaacctccctccccgccccgccgcccgcatacccgaaccgaccgctcctccgaaatactataatcccgccttccccctacgacgaacgaacctcttcccgaaataaaaacgaaaaaatccgaacctaacaatacgctctcctaaactctacgcccacacgacacccaaaaacctt

SEQ ID NO: 3565 - DNA, 1115 bp, Artificial Sequence
  chemically treated genomic DNA (Homo sapiens) CpG-island No: 3565
atttcgttttttttgtttgcgttttcgttttttttagtttttttttcgcggcggggcgggattaatcgtttttcgagtcgtttttgatttatttattttagttttcgcgtcgcgtgtagaggtgtttaagttttttcgcggttcgtagttagtgtcgtcgcgttcggtttttcgtacgtttcgtaggtagcgttttcgttcgcggtttagagtgcgttcgcgtcggtattagttttcggataaacggcgcgtcgcgcggagatgatagtcgaggagatgaaggcgatcgagagcggggcgtagtcggcgtcgttgtttatggagggagtggatattagttttaaataggacgaaggcgtgttgaaggtgaggggcggcggggtttgcggaggcgtcggaattcggggtttcgcgggtcgttttttcgtcgcgttcggagttcgcggtcgggtacgggtcgaggcggtcgtttttgtagtttcgcggtcgtttcgtcgggggtcggtggtatcgtcgtttcggatcgggttgcgtcgtttaaggtatcgaggtcggttatgcgttcggtaggggggcggtttaggtgcgcgggtcgaggttttaggttttttagtcggtagcgttcgggttcgggtagggggtcgggattgtagtgtttatttcggcgcgcgcggggcggcggagaggggcggggcgaggcgatcgtcgcgggtattcgagtcgtagttcggggttaggtcgggttttttacgttacgtcgttttcgatttcgcggttttagcggagttgttagtcgcgggtcgtttcgttggtggcggtgttagggttcgtttattcgggcggtggaatacgggttaggacggggagcgattttttatagtgtttttttggttttcggtttttgtgcgacgtaggcgcgatagggtttcggcgttttttcggggttttttgtcgacgtcgggatttagcgaggtttttattcgtcgcgcggcgttttttttttcggtttcggggaggtcgggcgcggggtatgtcgggagttgtagttttttttttttttcgtcgtttttcggagttagggttgcggggtgtggggcggggaggaggcgttttgt

SEQ ID NO: 3566 - DNA, 1115 bp, Artificial Sequence
  chemically treated genomic DNA (Homo sapiens) CpG-island No: 3566
acaaaacgcctcctccccgccccacaccccgcaaccctaactccgaaaaacgacgaaaaaaaaaaaaaactacaactcccgacataccccgcgcccgacctccccgaaaccgaaaaaaaaaacgccgcgcgacgaataaaaacctcgctaaatcccgacgtcgacaaaaaaccccgaaaaaacgccgaaaccctatcgcgcctacgtcgcacaaaaaccgaaaaccaaaaaaacactataaaaaatcgctccccgtcctaacccgtattccaccgcccgaataaacgaaccctaacaccgccaccaacgaaacgacccgcgactaacaactccgctaaaaccgcgaaatcgaaaacgacgtaacgtaaaaaacccgacctaaccccgaactacgactcgaatacccgcgacgatcgcctcgccccgcccctctccgccgccccgcgcgcgccgaaataaacactacaatcccgaccccctacccgaacccgaacgctaccgactaaaaaacctaaaacctcgacccgcgcacctaaaccgcccccctaccgaacgcataaccgacctcgataccttaaacgacgcaacccgatccgaaacgacgataccaccgacccccgacgaaacgaccgcgaaactacaaaaacgaccgcctcgacccgtacccgaccgcgaactccgaacgcgacgaaaaaacgacccgcgaaaccccgaattccgacgcctccgcaaaccccgccgcccctcaccttcaacacgccttcgtcctatttaaaactaatatccactccctccataaacaacgacgccgactacgccccgctctcgatcgccttcatctcctcgactatcatctccgcgcgacgcgccgtttatccgaaaactaataccgacgcgaacgcactctaaaccgcgaacgaaaacgctacctacgaaacgtacgaaaaaccgaacgcgacgacactaactacgaaccgcgaaaaaacttaaacacctctacacgcgacgcgaaaactaaaataaataaatcaaaaacgactcgaaaaacgattaatcccgccccgccgcgaaaaaaaaactaaaaaaaacgaaaacgcaaacaaaaaaaacgaaat

SEQ ID NO: 3567 - DNA, 1115 bp, Artificial Sequence
  chemically treated genomic DNA (Homo sapiens) CpG-island No: 3567
gtagagcgtttttttttcgttttatatttcgtagttttggtttcgggaggcggcggaggggggaggggattatagttttcggtatgtttcgcgttcggttttttcggggtcgagggagggggcgtcgcgcggcgagtggggatttcgttgggtttcggcgtcggtaggggatttcgggagggcgtcggaattttgtcgcgtttgcgtcgtataaaggtcgaaggttaggaaagtattgtggggagtcgtttttcgttttggttcgtgttttatcgttcgggtgggcgagttttggtatcgttattaacgaggcggttcgcggttggtagtttcgttggggtcgcggggtcgggggcggcgtggcgtgggaggttcggtttggtttcgggttgcggttcgggtgttcgcggcggtcgtttcgtttcgttttttttcgtcgtttcgcgcgcgtcggggtgggtattgtaatttcgattttttgttcgggttcgggcgttgtcggttggggagtttggggtttcggttcgcgtatttaggtcgtttttttgtcgagcgtatggtcggtttcggtgttttaaacgacgtagttcggttcgggacggcgatgttatcggttttcggcgggacggtcgcgaggttgtaaaggcggtcgtttcgattcgtgttcggtcgcgggtttcgggcgcggcggaagggcggttcgcggggtttcgggtttcgacgttttcgtaggtttcgtcgttttttatttttagtacgttttcgttttgtttggggttgatgtttattttttttatgggtagcggcgtcgattgcgtttcgttttcggtcgtttttattttttcggttgttattttcgcgcggcgcgtcgtttattcgggagttggtgtcggcgcgagcgtattttgggtcgcgggcgggggcgttatttgcggggcgtgcgggaggtcgggcgcggcggtattgattgcggatcgcgaggaggtttgagtatttttgtacgcggcgcgagagttggggtaggtgggttaggagcggttcggggagcgattggtttcgtttcgtcgcgagggaggggttgggaggagcgggagcgtagatagagggggcggggt

SEQ ID NO: 3568 - DNA, 1115 bp, Artificial Sequence
  chemically treated genomic DNA (Homo sapiens) CpG-island No: 3568
accccgccccctctatctacgctcccgctcctcccaacccctccctcgcgacgaaacgaaaccaatcgctccccgaaccgctcctaacccacctaccccaactctcgcgccgcgtacaaaaatactcaaacctcctcgcgatccgcaatcaataccgccgcgcccgacctcccgcacgccccgcaaataacgcccccgcccgcgacccaaaatacgctcgcgccgacaccaactcccgaataaacgacgcgccgcgcgaaaataacaaccgaaaaaataaaaacgaccgaaaacgaaacgcaatcgacgccgctacccataaaaaaaataaacatcaaccccaaacaaaacgaaaacgtactaaaaataaaaaacgacgaaacctacgaaaacgtcgaaacccgaaaccccgcgaaccgcccttccgccgcgcccgaaacccgcgaccgaacacgaatcgaaacgaccgcctttacaacctcgcgaccgtcccgccgaaaaccgataacatcgccgtcccgaaccgaactacgtcgtttaaaacaccgaaaccgaccatacgctcgacaaaaaaacgacctaaatacgcgaaccgaaaccccaaactccccaaccgacaacgcccgaacccgaacaaaaaatcgaaattacaatacccaccccgacgcgcgcgaaacgacgaaaaaaaacgaaacgaaacgaccgccgcgaacacccgaaccgcaacccgaaaccaaaccgaacctcccacgccacgccgcccccgaccccgcgaccccaacgaaactaccaaccgcgaaccgcctcgttaataacgataccaaaactcgcccacccgaacgataaaacacgaaccaaaacgaaaaacgactccccacaatactttcctaaccttcgacctttatacgacgcaaacgcgacaaaattccgacgccctcccgaaatcccctaccgacgccgaaacccaacgaaatccccactcgccgcgcgacgccccctccctcgaccccgaaaaaaccgaacgcgaaacataccgaaaactataatcccctcccccctccgccgcctcccgaaaccaaaactacgaaatataaaacgaaaaaaaaacgctctac

SEQ ID NO: 3569 - DNA, 965 bp, Artificial Sequence
  chemically treated genomic DNA (Homo sapiens) CpG-island No: 3569
gcgcggggcgcgtaacgagtagttaaatagtcggagcggagagatcgaagggttagtgggcgtgggggtcgtagtcgaggttcgggtggaggggttttcgtcgtttttcggttttttttttcgtcgttcgtttcggttcggttcggtttcgtttcgtttcggcggttcggtttttcgttcgttcgcgcgcggcgtagtttttttttcgaggtgtcggtggtttcgtcgttatttttttcggttttttttttttcgtcgcggcgcgtattttattttagtttttatttcgcgtattttagcgtttttttcgtatattcgaggttagggggcgggagggtcgtagtttcggcgtcgtcgcgtttcgttaggtgagaggcgttcgcgttcgtcgtattcgtcggcgtttttacgggtcgcgcgttttacgtcgtcgtagtcgatcgttcgcgtcgcgtgttcggttgttttttttttttcgtcgttcgcgttttcgttttggatttttgcgtttcgacgcgtttcgtttcgatttttggttttttttcgcgtttcggcgttgttcgttgtttttttttcgttttttttttgttcgtttcgcgttttttttttcgttttcggttgatttatttttttaggaatagggattttcgtgttttttcgttagttttattttgggaaaattttttttttcgcgcgtttcgtttcgtttcgttgggcgtatcggggtcggtcggcgcggggtgggtttggtttcgcggtttcgtttttattgcgtcgttcgtcggtttcggtcggagttcggttttgcgcgttgacgttttgtcgttttcgtagaacgatcgtcgcggtcggaagagttggcgttcggggcggattttttggaattggtttagcgtatttattttattttttcgtattttgggatcggtaaggttggggcgcggggatttggtaggattttgtcg

SEQ ID NO: 3570 - DNA, 965 bp, Artificial Sequence
  chemically treated genomic DNA (Homo sapiens) CpG-island No: 3570
cgacaaaatcctaccaaatccccgcgccccaaccttaccgatcccaaaatacgaaaaaataaaataaatacgctaaaccaattccaaaaaatccgccccgaacgccaactcttccgaccgcgacgatcgttctacgaaaacgacaaaacgtcaacgcgcaaaaccgaactccgaccgaaaccgacgaacgacgcaataaaaacgaaaccgcgaaaccaaacccaccccgcgccgaccgaccccgatacgcccaacgaaacgaaacgaaacgcgcgaaaaaaaaaattttcccaaaataaaactaacgaaaaaacacgaaaatccctattcctaaaaaaataaatcaaccgaaaacgaaaaaaaaaacgcgaaacgaacaaaaaaaaaacgaaaaaaaaacaacgaacaacgccgaaacgcgaaaaaaaaccaaaaatcgaaacgaaacgcgtcgaaacgcaaaaatccaaaacgaaaacgcgaacgacgaaaaaaaaaaaacaaccgaacacgcgacgcgaacgatcgactacgacgacgtaaaacgcgcgacccgtaaaaacgccgacgaatacgacgaacgcgaacgcctctcacctaacgaaacgcgacgacgccgaaactacgaccctcccgccccctaacctcgaatatacgaaaaaaacgctaaaatacgcgaaataaaaactaaaataaaatacgcgccgcgacgaaaaaaaaaaaaccgaaaaaaataacgacgaaaccaccgacacctcgaaaaaaaaactacgccgcgcgcgaacgaacgaaaaaccgaaccgccgaaacgaaacgaaaccgaaccgaaccgaaacgaacgacgaaaaaaaaaaccgaaaaacgacgaaaacccctccacccgaacctcgactacgacccccacgcccactaacccttcgatctctccgctccgactatttaactactcgttacgcgccccgcgc

SEQ ID NO: 3571 - DNA, 965 bp, Artificial Sequence
  chemically treated genomic DNA (Homo sapiens) CpG-island No: 3571
cggtaaagttttattaagttttcgcgttttagttttatcggttttagggtgcgggaaggtgggatgggtgcgttaagttagttttaaggagttcgtttcgagcgttaattttttcggtcgcggcgatcgttttgcggggacgatagggcgttagcgcgtagagtcgggtttcggtcggggtcgacgggcggcgtagtgaaggcggggtcgcggggttaagtttatttcgcgtcgatcggtttcggtgcgtttagcggagcggagcggagcgcgcggagggaggagtttttttagaatgggattgacgggaaaatacggggatttttatttttggaggagtgagttaatcgggagcgaggaggggagcgcggggcggataggagggaagcgggagaggggtagcgagtagcgtcggagcgcggagggaagttagaggtcgggacggagcgcgtcggagcgtagaggtttaaggcgggaacgcgggcggcggaaagaaaagagtagtcgagtacgcggcgcgagcggtcggttgcggcggcgtggggcgcgcggttcgtgagggcgtcggcgggtgcggcgggcgcgggcgttttttatttggcgggacgcggcggcgtcggagttgcggttttttcgttttttggtttcgagtgtgcgaggaggacgttggaatgcgcggaatgagggttggaatgagatgcgcgtcgcggcgggagggagggagtcggagggagtggcggcggggttatcggtatttcggggaggagattgcgtcgcgcgcgggcgggcgaggggtcgggtcgtcggggcggggcggggtcgggtcgggtcggggcgggcggcgggggagggggtcgagggacggcggggatttttttattcgggtttcggttgcggtttttacgtttattagtttttcgattttttcgtttcgattgtttggttgttcgttgcgcgtttcgcgt

SEQ ID NO: 3572 - DNA, 965 bp, Artificial Sequence
  chemically treated genomic DNA (Homo sapiens) CpG-island No: 3572
acgcgaaacgcgcaacgaacaaccaaacaatcgaaacgaaaaaatcgaaaaactaataaacgtaaaaaccgcaaccgaaacccgaataaaaaaatccccgccgtccctcgaccccctcccccgccgcccgccccgacccgacccgaccccgccccgccccgacgacccgacccctcgcccgcccgcgcgcgacgcaatctcctccccgaaataccgataaccccgccgccactccctccgactccctccctcccgccgcgacgcgcatctcattccaaccctcattccgcgcattccaacgtcctcctcgcacactcgaaaccaaaaaacgaaaaaaccgcaactccgacgccgccgcgtcccgccaaataaaaaacgcccgcgcccgccgcacccgccgacgccctcacgaaccgcgcgccccacgccgccgcaaccgaccgctcgcgccgcgtactcgactactcttttctttccgccgcccgcgttcccgccttaaacctctacgctccgacgcgctccgtcccgacctctaacttccctccgcgctccgacgctactcgctacccctctcccgcttccctcctatccgccccgcgctcccctcctcgctcccgattaactcactcctccaaaaataaaaatccccgtattttcccgtcaatcccattctaaaaaaactcctccctccgcgcgctccgctccgctccgctaaacgcaccgaaaccgatcgacgcgaaataaacttaaccccgcgaccccgccttcactacgccgcccgtcgaccccgaccgaaacccgactctacgcgctaacgccctatcgtccccgcaaaacgatcgccgcgaccgaaaaaattaacgctcgaaacgaactccttaaaactaacttaacgcacccatcccaccttcccgcaccctaaaaccgataaaactaaaacgcgaaaacttaataaaactttaccg

SEQ ID NO: 3573 - DNA, 760 bp, Artificial Sequence
  chemically treated genomic DNA (Homo sapiens) CpG-island No: 3573
gtgcgaggagtcgttgcgtgcgtggcggttggtgcggtataggagatttttttgatcggattcgtttgttggtcgcgcggcgggcgaggtttaggtaaaaataaagttttttcgtttagtatcggtttcgcgaggcgttttagaggattaagttttagttcgcgttattttattttcgcgtaggcgcgtttaattttcgttcgtttttcgttttttagtaattttttcgtatcgttgggtttcggtaatagttaatgagataggagttacgagaatacggattaatcggcggcggcgatagtgtggaacgcggttgttaggaggcgggacgcggcggcgtgttagtttagttattttagcgacggcggggaagagtgtgtacgtggtgggggttttttcggtggcgggtatggaggtttcgcgttgtcggtttagttttagcggcgataggttagatagggtcgtggtaggtttttttttgagcgaggcggaggggcgaagcgagaaggcggaggtttttttcgggagttttgcggggagagggcgggattcgggatttggcgatttagggagggattggtttcggcggcgggaggcgattttttcgttttattttcgtgtggggattttttttttaagtggagcggcggtattatatttcgcgtcgtgggtagagatttttggtttaggtttttgtttaggaatttttggagttttcgtgacgggttttttcggtttttttgggtttcgggtttttttt

SEQ ID NO: 3574 - DNA, 760 bp, Artificial Sequence
  chemically treated genomic DNA (Homo sapiens) CpG-island No: 3574
aaaaaaaacccgaaacccaaaaaaaccgaaaaaacccgtcacgaaaactccaaaaattcctaaacaaaaacctaaaccaaaaatctctacccacgacgcgaaatataataccgccgctccacttaaaaaaaaaatccccacacgaaaataaaacgaaaaaatcgcctcccgccgccgaaaccaatccctccctaaatcgccaaatcccgaatcccgccctctccccgcaaaactcccgaaaaaaacctccgccttctcgcttcgcccctccgcctcgctcaaaaaaaaacctaccacgaccctatctaacctatcgccgctaaaactaaaccgacaacgcgaaacctccatacccgccaccgaaaaaacccccaccacgtacacactcttccccgccgtcgctaaaataactaaactaacacgccgccgcgtcccgcctcctaacaaccgcgttccacactatcgccgccgccgattaatccgtattctcgtaactcctatctcattaactattaccgaaacccaacgatacgaaaaaattactaaaaaacgaaaaacgaacgaaaattaaacgcgcctacgcgaaaataaaataacgcgaactaaaacttaatcctctaaaacgcctcgcgaaaccgatactaaacgaaaaaactttatttttacctaaacctcgcccgccgcgcgaccaacaaacgaatccgatcaaaaaaatctcctataccgcaccaaccgccacgcacgcaacgactcctcgcac

SEQ ID NO: 3575 - DNA, 760 bp, Artificial Sequence
  chemically treated genomic DNA (Homo sapiens) CpG-island No: 3575
gagggaaattcgaggtttagaggggtcgagggagttcgttacgaaaattttagaagtttttaagtagggatttgaattaaaggtttttgtttacggcgcgggatgtagtgtcgtcgttttatttgagaaaggggtttttatacgggagtagggcgagggggtcgtttttcgtcgtcgaaattagtttttttttgagtcgttaagtttcgagtttcgtttttttttcgtagggttttcggagaggattttcgttttttcgtttcgttttttcgtttcgtttaggaggagatttgttacggttttgtttgatttgtcgtcgttgggattgagtcggtagcgcgaagtttttatgttcgttatcgaggaagtttttattacgtatatattttttttcgtcgtcgttagagtggttaggttggtacgtcgtcgcgtttcgttttttggtaatcgcgttttatattgtcgtcgtcgtcgattggttcgtgttttcgtggtttttgttttattggttattgtcggggtttaacgatgcgggagggttgttaaggggcgggaggcgagcgggagttaaacgcgtttgcgcgggggtggggtgacgcgagttaaggtttggttttttggagcgtttcgcggggtcggtattgagcgggaagattttgtttttgtttgggtttcgttcgtcgcgcggttagtaggcgagttcggttagaggagttttttatatcgtattaatcgttacgtacgtaacggtttttcgtat

SEQ ID NO: 3576 - DNA, 760 bp, Artificial Sequence
  chemically treated genomic DNA (Homo sapiens) CpG-island No: 3576
atacgaaaaaccgttacgtacgtaacgattaatacgatataaaaaactcctctaaccgaactcgcctactaaccgcgcgacgaacgaaacccaaacaaaaacaaaatcttcccgctcaataccgaccccgcgaaacgctccaaaaaaccaaaccttaactcgcgtcaccccacccccgcgcaaacgcgtttaactcccgctcgcctcccgccccttaacaaccctcccgcatcgttaaaccccgacaataaccaataaaacaaaaaccacgaaaacacgaaccaatcgacgacgacgacaatataaaacgcgattaccaaaaaacgaaacgcgacgacgtaccaacctaaccactctaacgacgacgaaaaaaaatatatacgtaataaaaacttcctcgataacgaacataaaaacttcgcgctaccgactcaatcccaacgacgacaaatcaaacaaaaccgtaacaaatctcctcctaaacgaaacgaaaaaacgaaacgaaaaaacgaaaatcctctccgaaaaccctacgaaaaaaaaacgaaactcgaaacttaacgactcaaaaaaaaactaatttcgacgacgaaaaacgaccccctcgccctactcccgtataaaaacccctttctcaaataaaacgacgacactacatcccgcgccgtaaacaaaaacctttaattcaaatccctacttaaaaacttctaaaattttcgtaacgaactccctcgacccctctaaacctcgaatttccctc

SEQ ID NO: 3577 - DNA, 627 bp, Artificial Sequence
  chemically treated genomic DNA (Homo sapiens) CpG-island No: 3577
gggcgtgtcgtttggcgtgattagcgcggtaggaaaagcgggtttagggattcgggtttgttacgtcgttttcgcgcgtttttaaattttttttcggttcgtttatttacgcggcggggattttttcggttttttttcggttttacggttatttttttttttataagtcggtttgcggttcgttttattagttcgggtcggacggggtcgtagtttttggtagatcgtatagttttcgagttcggaatgtcgagataaggtcggcgtcgattggcgacgtttcgttacgtgattttaacgtttcgtcggcgttaattttaaatagcggaataaattgaaagtttcggtgttagattttattttcggtttcggttcgggatttttttttttttcgggatttttcggggtttttatttcgttcgtatcgtcggggattcggtcggttcggcgcgagttttcgttcggggttttggttcggtttttaggttggaggagttcggagttcgttttcggagttacggtttaacggcggcggcgattgtagtttggaggtgagcgggatgtagtaatggagttttaggtttggtttgggtataggcggggagtaaggttttcgggcgcggaggt

SEQ ID NO: 3578 - DNA, 627 bp, Artificial Sequence
  chemically treated genomic DNA (Homo sapiens) CpG-island No: 3578
acctccgcgcccgaaaaccttactccccgcctatacccaaaccaaacctaaaactccattactacatcccgctcacctccaaactacaatcgccgccgccgttaaaccgtaactccgaaaacgaactccgaactcctccaacctaaaaaccgaaccaaaaccccgaacgaaaactcgcgccgaaccgaccgaatccccgacgatacgaacgaaataaaaaccccgaaaaatcccgaaaaaaaaaaaaatcccgaaccgaaaccgaaaataaaatctaacaccgaaactttcaatttattccgctatttaaaattaacgccgacgaaacgttaaaatcacgtaacgaaacgtcgccaatcgacgccgaccttatctcgacattccgaactcgaaaactatacgatctaccaaaaactacgaccccgtccgacccgaactaataaaacgaaccgcaaaccgacttataaaaaaaaaaataaccgtaaaaccgaaaaaaaaccgaaaaaatccccgccgcgtaaataaacgaaccgaaaaaaaatttaaaaacgcgcgaaaacgacgtaacaaacccgaatccctaaacccgcttttcctaccgcgctaatcacgccaaacgacacgccc

SEQ ID NO: 3579 - DNA, 627 bp, Artificial Sequence
  chemically treated genomic DNA (Homo sapiens) CpG-island No: 3579
attttcgcgttcggaggttttgtttttcgtttgtgtttaggttaggtttgggattttattgttgtatttcgtttatttttagattgtagtcgtcgtcgtcgttaggtcgtagtttcgaaggcgggtttcgggtttttttaatttgggggtcgagttagggtttcggacgggggttcgcgtcggatcggtcgggttttcggcggtgcgggcggggtgggaatttcgggggatttcgggaggggagggggtttcgggtcggggtcgggggtggggtttggtatcggagtttttagtttgtttcgttgtttgaaattggcgtcggcggagcgttaaggttacgtgacggaacgtcgttaatcggcgtcggttttgtttcggtatttcgggttcgaaggttgtgcggtttgttaggagttgcggtttcgttcggttcgggttggtaaggcggatcgtaggtcggtttgtgggggaagaagtggtcgtggggtcggggaggggtcggaggggttttcgtcgcgtgggtgggcgagtcgagggagagtttggggacgcgcggaagcggcgtgataggttcgggtttttgggttcgttttttttgtcgcgttggttacgttaggcgatacgttt

SEQ ID NO: 3580 - DNA, 627 bp, Artificial Sequence
  chemically treated genomic DNA (Homo sapiens) CpG-island No: 3580
aaacgtatcgcctaacgtaaccaacgcgacaaaaaaaacgaacccaaaaacccgaacctatcacgccgcttccgcgcgtccccaaactctccctcgactcgcccacccacgcgacgaaaacccctccgacccctccccgaccccacgaccacttcttcccccacaaaccgacctacgatccgccttaccaacccgaaccgaacgaaaccgcaactcctaacaaaccgcacaaccttcgaacccgaaataccgaaacaaaaccgacgccgattaacgacgttccgtcacgtaaccttaacgctccgccgacgccaatttcaaacaacgaaacaaactaaaaactccgataccaaaccccacccccgaccccgacccgaaaccccctcccctcccgaaatcccccgaaattcccaccccgcccgcaccgccgaaaacccgaccgatccgacgcgaacccccgtccgaaaccctaactcgacccccaaattaaaaaaacccgaaacccgccttcgaaactacgacctaacgacgacgacgactacaatctaaaaataaacgaaatacaacaataaaatcccaaacctaacctaaacacaaacgaaaaacaaaacctccgaacgcgaaaat

SEQ ID NO: 3581 - DNA, 683 bp, Artificial Sequence
  chemically treated genomic DNA (Homo sapiens) CpG-island No: 3581
tcgagagtgataatgtcgtttattcgcgatttatatattatttttttatttagtttatttattcgtcgcgaatcggttttttttttattttcgggtaataatacgttatatatgttacgattcggaatggtgtcgtcgttggtaatcgttaataattgagcgttaggtcgggcggttaatatttcggtttttttgttttagattagtttggggcgaaaagtagaaaaatcgttagagggatagcgttcggaaagtatatttagcgtggcgttaaaaatacgttttggtagatttttttacggtgcggtacggcgtacgcgggagtattattcgtttatttgaaatgtatttatcgtcgcggcggtaacggtttgttgcgtaaggacgtcgagaggattatgcggtggtgttaggttttttagtttgtttgcgaatatttattttataatgattgcggaatcgattaaaattacgtcgggtacgggggaaaaatagttttttagatatatcgttaatttgatgtttcggcgcgattaaaggcgttgtaatttatttgttaatagaaaagcggcggttgttatttgaattaatagatttatcgggtttatattaatttttagtttagaacggaaggttgcgattacgtagggatttattcgaatttagagttcggtggggatggg

SEQ ID NO: 3582 - DNA, 683 bp, Artificial Sequence
  chemically treated genomic DNA (Homo sapiens) CpG-island No: 3582
cccatccccaccgaactctaaattcgaataaatccctacgtaatcgcaaccttccgttctaaactaaaaattaatataaacccgataaatctattaattcaaataacaaccgccgcttttctattaacaaataaattacaacgcctttaatcgcgccgaaacatcaaattaacgatatatctaaaaaactatttttcccccgtacccgacgtaattttaatcgattccgcaatcattataaaataaatattcgcaaacaaactaaaaaacctaacaccaccgcataatcctctcgacgtccttacgcaacaaaccgttaccgccgcgacgataaatacatttcaaataaacgaataatactcccgcgtacgccgtaccgcaccgtaaaaaaatctaccaaaacgtatttttaacgccacgctaaatatactttccgaacgctatccctctaacgatttttctacttttcgccccaaactaatctaaaacaaaaaaaccgaaatattaaccgcccgacctaacgctcaattattaacgattaccaacgacgacaccattccgaatcgtaacatatataacgtattattacccgaaaataaaaaaaaaaccgattcgcgacgaataaataaactaaataaaaaaataatatataaatcgcgaataaacgacattatcactctcga

SEQ ID NO: 3583 - DNA, 683 bp, Artificial Sequence
  chemically treated genomic DNA (Homo sapiens) CpG-island No: 3583
tttatttttatcgggttttgaattcgggtaaatttttgcgtggtcgtaatttttcgttttgaattggggattaatatgggttcggtgaatttgttgatttaggtggtaatcgtcgtttttttgttgataggtgggttataacgtttttggtcgcgtcgggatattaggttggcggtgtatttaaagggttgtttttttttcgtattcggcgtgattttagtcgatttcgtagttattgtagagtgaatgttcgtaggtaggttggaaaatttgatattatcgtataattttttcgacgtttttgcgtagtaaatcgttgtcgtcgcgacgatggatgtattttaggtagacgaatggtattttcgcgtacgtcgtgtcgtatcgtggaaagatttgttaagacgtgtttttgacgttacgttggatatgtttttcgggcgttatttttttggcgatttttttgtttttcgttttaaattggtttggaatagggagatcgggatattgatcgttcgatttggcgtttaattgttggcggttattagcggcggtattatttcggatcgtggtatgtatagcgtgttattattcgaaggtgaagaaaaggtcggttcgcggcgggtgggtgaattggatgaggagatggtatatgagtcgcgggtgaacgatattattattttcgg

SEQ ID NO: 3584 - DNA, 683 bp, Artificial Sequence
  chemically treated genomic DNA (Homo sapiens) CpG-island No: 3584
ccgaaaataataatatcgttcacccgcgactcatataccatctcctcatccaattcacccacccgccgcgaaccgaccttttcttcaccttcgaataataacacgctatacataccacgatccgaaataataccgccgctaataaccgccaacaattaaacgccaaatcgaacgatcaatatcccgatctccctattccaaaccaatttaaaacgaaaaacaaaaaaatcgccaaaaaaataacgcccgaaaaacatatccaacgtaacgtcaaaaacacgtcttaacaaatctttccacgatacgacacgacgtacgcgaaaataccattcgtctacctaaaatacatccatcgtcgcgacgacaacgatttactacgcaaaaacgtcgaaaaaattatacgataatatcaaattttccaacctacctacgaacattcactctacaataactacgaaatcgactaaaatcacgccgaatacgaaaaaaaaacaaccctttaaatacaccgccaacctaatatcccgacgcgaccaaaaacgttataacccacctatcaacaaaaaaacgacgattaccacctaaatcaacaaattcaccgaacccatattaatccccaattcaaaacgaaaaattacgaccacgcaaaaatttacccgaattcaaaacccgataaaaataaa

SEQ ID NO: 3585 - DNA, 556 bp, Artificial Sequence
  chemically treated genomic DNA (Homo sapiens) CpG-island No: 3585
gtttcggcgcggttttggtttcgggagttcgcggtgtcgtagaaggcgtcggtcgtgaagtcgcggtcgaacgggcggtcggaggtggacggtttggtaaagttcgagtttttgttgtttaaagatggatttcgatggatcgaagaattttcgttattcgatttttttatgttcgcggcgttttcggggggtgcgaggagcggggggtatcgtttttagaatgggacggagggggcgtttaagtcgggcgcgggttgcgggggggtcggcggagttttgtacgttttttttttgtataggggtttattcgcggtcgaatttcgcgtttaggggttgttgtttgtcggacggcgtttcgtttttggtcggcggtttcgggagggttttgcggcgcggcgcggttttttgcgcgttcgcgaacgattttcgggaatcggttcgttcgcgtaatttagcgtttttggggaggttgtaatttgatttttttttttaggtcgttagttcgtttttggtcgtattggtcgttttatacgagggagaagggtatcgggattta

SEQ ID NO: 3586 - DNA, 556 bp, Artificial Sequence
  chemically treated genomic DNA (Homo sapiens) CpG-island No: 3586
taaatcccgatacccttctccctcgtataaaacgaccaatacgaccaaaaacgaactaacgacctaaaaaaaaaaatcaaattacaacctccccaaaaacgctaaattacgcgaacgaaccgattcccgaaaatcgttcgcgaacgcgcaaaaaaccgcgccgcgccgcaaaaccctcccgaaaccgccgaccaaaaacgaaacgccgtccgacaaacaacaacccctaaacgcgaaattcgaccgcgaataaacccctatacaaaaaaaaaacgtacaaaactccgccgacccccccgcaacccgcgcccgacttaaacgccccctccgtcccattctaaaaacgataccccccgctcctcgcaccccccgaaaacgccgcgaacataaaaaaatcgaataacgaaaattcttcgatccatcgaaatccatctttaaacaacaaaaactcgaactttaccaaaccgtccacctccgaccgcccgttcgaccgcgacttcacgaccgacgccttctacgacaccgcgaactcccgaaaccaaaaccgcgccgaaac

SEQ ID NO: 3587 - DNA, 556 bp, Artificial Sequence
  chemically treated genomic DNA (Homo sapiens) CpG-island No: 3587
tggatttcggtgtttttttttttcgtgtggagcggttagtgcggttagaggcgagttgacggtttggaaagagaaattaaattgtagtttttttaaagacgttgagttacgcgggcgagtcggttttcggggatcgttcgcgagcgcgtagagagtcgcgtcgcgtcgtagagttttttcggggtcgtcggttagaagcggggcgtcgttcgataggtagtagtttttgggcgcggggttcggtcgcgagtgagtttttgtgtagagagggggcgtgtaaggtttcgtcggttttttcgtagttcgcgttcgatttgggcgtttttttcgttttattttgggagcgatgtttttcgtttttcgtatttttcgggaacgtcgcgagtatggagaagtcgagtagcgaggatttttcgatttatcggagtttatttttggatagtaaggattcggattttgttaagtcgtttattttcggtcgttcgttcggtcgcggttttacggtcggcgttttttacggtatcgcgggttttcggggttagagtcgcgtcgaggt

SEQ ID NO: 3588 - DNA, 556 bp, Artificial Sequence
  chemically treated genomic DNA (Homo sapiens) CpG-island No: 3588
acctcgacgcgactctaaccccgaaaacccgcgataccgtaaaaaacgccgaccgtaaaaccgcgaccgaacgaacgaccgaaaataaacgacttaacaaaatccgaatccttactatccaaaaataaactccgataaatcgaaaaatcctcgctactcgacttctccatactcgcgacgttcccgaaaaatacgaaaaacgaaaaacatcgctcccaaaataaaacgaaaaaaacgcccaaatcgaacgcgaactacgaaaaaaccgacgaaaccttacacgccccctctctacacaaaaactcactcgcgaccgaaccccgcgcccaaaaactactacctatcgaacgacgccccgcttctaaccgacgaccccgaaaaaactctacgacgcgacgcgactctctacgcgctcgcgaacgatccccgaaaaccgactcgcccgcgtaactcaacgtctttaaaaaaactacaatttaatttctctttccaaaccgtcaactcgcctctaaccgcactaaccgctccacacgaaaaaaaaaaacaccgaaatcca

SEQ ID NO: 3589 - DNA, 637 bp, Artificial Sequence
  chemically treated genomic DNA (Homo sapiens) CpG-island No: 3589
cgggaaaatcgggcgtttggggaggcgcgcgggtagaggttattcgttttcgcggtttttagataggggcggagtttttattcggttttcgcgggtttcgttttcggacggcggaagtcgagttcgtttttttcgttcgggtttgggcgtgttttacgggcgtacggtatgttgggaaggcgttcgcgcggcggttattttgttttgtcggtttttgtgtgtaggagggatttcggtttgagagcgggtcgaggagattggcgacggtgtcgttcgtgttttcgttggcgggtgtttgggttggtgggaatagtcgttcgaaggaagtattatgatttcggtcgcgtagttgttggatgagttaatgggtcgggatcgaaatttagtttcggacgagaagcgtagtaacgtgcggtgggattacgagagcgtaagtttcgcgggttttggtttgagttcgggtttcgtgggggaggggagcgggcgcgggttgtggtttttttggtcgcggcgcgatgtggttagggtcgtattcggggtcgagcgtttgattcggtgtttatggagttaggagggaggatgttgttcggattcggggatgggggtgatttggttttgttgttttagtattaagggg

SEQ ID NO: 3590 - DNA, 637 bp, Artificial Sequence
  chemically treated genomic DNA (Homo sapiens) CpG-island No: 3590
ccccttaatactaaaacaacaaaaccaaatcacccccatccccgaatccgaacaacatcctccctcctaactccataaacaccgaatcaaacgctcgaccccgaatacgaccctaaccacatcgcgccgcgaccaaaaaaaccacaacccgcgcccgctcccctcccccacgaaacccgaactcaaaccaaaacccgcgaaacttacgctctcgtaatcccaccgcacgttactacgcttctcgtccgaaactaaatttcgatcccgacccattaactcatccaacaactacgcgaccgaaatcataatacttccttcgaacgactattcccaccaacccaaacacccgccaacgaaaacacgaacgacaccgtcgccaatctcctcgacccgctctcaaaccgaaatccctcctacacacaaaaaccgacaaaacaaaataaccgccgcgcgaacgccttcccaacataccgtacgcccgtaaaacacgcccaaacccgaacgaaaaaaacgaactcgacttccgccgtccgaaaacgaaacccgcgaaaaccgaataaaaactccgcccctatctaaaaaccgcgaaaacgaataacctctacccgcgcgcctccccaaacgcccgattttcccg

SEQ ID NO: 3591 - DNA, 637 bp, Artificial Sequence
  chemically treated genomic DNA (Homo sapiens) CpG-island No: 3591
ttttttgatattagaataataaaattaaattatttttattttcgggttcggatagtatttttttttttggttttatgggtatcgggttagacgttcgatttcgggtgcggttttggttatatcgcgtcgcggttaggagggttatagttcgcgttcgttttttttttttacggagttcgggtttaggttaaggttcgcgggatttacgttttcgtggttttatcgtacgttgttgcgtttttcgttcggggttaggtttcggtttcggtttattaatttatttaataattgcgcggtcgaaattatggtgtttttttcgggcggttgtttttattagtttaggtattcgttaacgaaaatacgggcgatatcgtcgttaattttttcggttcgtttttaggtcgaaattttttttatatataggagtcgataagataaaatggtcgtcgcgcggacgtttttttagtatgtcgtgcgttcgtgggatacgtttaggttcgggcggagagggcgagttcggttttcgtcgttcgggggcggggttcgcggaggtcgggtagggatttcgtttttgtttagaggtcgcggggacgggtagtttttgttcgcgcgtttttttaagcgttcggttttttcg

SEQ ID NO: 3592 - DNA, 637 bp, Artificial Sequence
  chemically treated genomic DNA (Homo sapiens) CpG-island No: 3592
cgaaaaaaccgaacgcttaaaaaaacgcgcgaacaaaaactacccgtccccgcgacctctaaacaaaaacgaaatccctacccgacctccgcgaaccccgcccccgaacgacgaaaaccgaactcgccctctccgcccgaacctaaacgtatcccacgaacgcacgacatactaaaaaaacgtccgcgcgacgaccattttatcttatcgactcctatatataaaaaaaatttcgacctaaaaacgaaccgaaaaaattaacgacgatatcgcccgtattttcgttaacgaatacctaaactaataaaaacaaccgcccgaaaaaaacaccataatttcgaccgcgcaattattaaataaattaataaaccgaaaccgaaacctaaccccgaacgaaaaacgcaacaacgtacgataaaaccacgaaaacgtaaatcccgcgaaccttaacctaaacccgaactccgtaaaaaaaaaaaacgaacgcgaactataaccctcctaaccgcgacgcgatataaccaaaaccgcacccgaaatcgaacgtctaacccgatacccataaaaccaaaaaaaaaaatactatccgaacccgaaaataaaaataatttaattttattattctaatatcaaaaaa

SEQ ID NO: 3593 - DNA, 560 bp, Artificial Sequence
  chemically treated genomic DNA (Homo sapiens) CpG-island No: 3593
gcgatcgaaagtggggagggcggatttaacgacggcgaattttcgcgttttgtttagtattaggagtaacgtttacgtttttaataaagatggcggtaatattttcggtttttagagttgttatgcgcgatgggttgtattatcgtgtttcgggcgtcggggtagaggtggagcgaattatcggggcggtcgggagttatgttggagcggcgggaggcggtagtagcgtcggggatgttgtggtgggggcggaaaaagttagggtcgtacgtcggaggggtttcggtcgcggagtagatggtgtttagagggcggcgggggtgcggagagataggcggaggggcgggggttcggggcggcggtaggggttcgggagggggttcgagcggcggggttagtttaaggttcggatcggggcggggggcggtggaggtcgtgtagggaggcgggagatgatggcgaggcggtcgtcgtggcggggtttcggggaacggtcgatttttatatttttgtttttttttttttttttgtttttttttagttaggaggagttggggggt

SEQ ID NO: 3594 - DNA, 560 bp, Artificial Sequence
  chemically treated genomic DNA (Homo sapiens) CpG-island No: 3594
accccccaactcctcctaactaaaaaaaaacaaaaaaaaaaaaaaaaacaaaaatataaaaatcgaccgttccccgaaaccccgccacgacgaccgcctcgccatcatctcccgcctccctacacgacctccaccgccccccgccccgatccgaaccttaaactaaccccgccgctcgaaccccctcccgaacccctaccgccgccccgaacccccgcccctccgcctatctctccgcacccccgccgccctctaaacaccatctactccgcgaccgaaacccctccgacgtacgaccctaactttttccgcccccaccacaacatccccgacgctactaccgcctcccgccgctccaacataactcccgaccgccccgataattcgctccacctctaccccgacgcccgaaacacgataatacaacccatcgcgcataacaactctaaaaaccgaaaatattaccgccatctttattaaaaacgtaaacgttactcctaatactaaacaaaacgcgaaaattcgccgtcgttaaatccgccctccccactttcgatcgc

SEQ ID NO: 3595 - DNA, 560 bp, Artificial Sequence
  chemically treated genomic DNA (Homo sapiens) CpG-island No: 3595
gttttttagttttttttggttgagggggaataaagagaggagaaggagtaggagtatgggggtcgatcgtttttcgaggtttcgttacggcggtcgtttcgttattatttttcgtttttttgtacggtttttatcgtttttcgtttcggttcgggttttgggttggtttcgtcgttcgggttttttttcgggtttttgtcgtcgtttcgggttttcgttttttcgtttgttttttcgtattttcgtcgttttttgggtattatttatttcgcggtcggagttttttcggcgtgcggttttggtttttttcgtttttattatagtattttcgacgttgttgtcgtttttcgtcgttttaatatggttttcggtcgtttcgatggttcgttttatttttgtttcggcgttcgaaatacggtggtataatttatcgcgtatggtagttttgaggatcgaagatgttgtcgttatttttattgaggacgtgagcgttgtttttggtgttgaatagagcgcgaaggttcgtcgtcgttgggttcgttttttttattttcggtcgt

SEQ ID NO: 3596 - DNA, 560 bp, Artificial Sequence
  chemically treated genomic DNA (Homo sapiens) CpG-island No: 3596
acgaccgaaaataaaaaaaacgaacccaacgacgacgaaccttcgcgctctattcaacaccaaaaacaacgctcacgtcctcaataaaaataacgacaacatcttcgatcctcaaaactaccatacgcgataaattataccaccgtatttcgaacgccgaaacaaaaataaaacgaaccatcgaaacgaccgaaaaccatattaaaacgacgaaaaacgacaacaacgtcgaaaatactataataaaaacgaaaaaaaccaaaaccgcacgccgaaaaaactccgaccgcgaaataaataatacccaaaaaacgacgaaaatacgaaaaaacaaacgaaaaaacgaaaacccgaaacgacgacaaaaacccgaaaaaaaacccgaacgacgaaaccaacccaaaacccgaaccgaaacgaaaaacgataaaaaccgtacaaaaaaacgaaaaataataacgaaacgaccgccgtaacgaaacctcgaaaaacgatcgacccccatactcctactccttctcctctctttattccccctcaaccaaaaaaaactaaaaaac

SEQ ID NO: 3597 - DNA, 1090 bp, Artificial Sequence
  chemically treated genomic DNA (Homo sapiens) CpG-island No: 3597
cgagttggatttagtattacgtacggcgaggatagtttttgtattaggtttagtatttcgcgagtttcggatagttttcgagtcggcgtttaagcgtatgcgttttcggggtttttttcgttgtcgttttttttcgtagcgtttcgggtcgcgtttttcgggattttcggttcgttttgaagttaggaaagtaatttcggcgaatcgggtacgttttcgtcgcgtcgtaaatcgttattcgtagttttcgtagtataattattagacgttggtgtcggagaatgaggtagtaggtatcgcggtgttacgcgtggttgtttaggattcggacgtcggcgaggtcgggcgtttagtttattcgttggcggtatttatgaatagtcgttcgttggagttgtttagtatcgattcgtagagcggttttattcgtacggcggtagttttggatcgcgagagtatggagcgttattatttgcgtgtgatcgcgtaggattacgggtcgtcgcgtttttcggttattacgatggtggtcgtgatagtagtcgatcgtaacgattattcgtcggtttttgagtaagcgtagtatcgggagatttttcgcgagaatgtggaggagggttattttattttgtagttgcgtgttattgacggcgacgcgttttttaacgttaatttgcgttatcgtttcgtggggtcgttagttgcgcgcgttgtagttgtcgtcgttttcgagattgatttacgtttcggttttattagtattagcggtcgagtggatcgcgagtatatggaaagttatgagttggtggtggaagttagcgattagggttaggaattcgggtcgcgttcggttattgtgcgcgtatatataattgtgttagacgagaacgataatgttttttagtttagcgagaagcgttacgtggcgtaggtgcgcgaggatgtgcgtttttatatagtcgtgttgcgcgttacggttattgatcgggataaggacgttaacggattggtgtattataatattattagtggtaatagtcgtggatattttgttatcgatagttttattggcgagatttaggtggtggta

SEQ ID NO: 3598 - DNA, 1090 bp, Artificial Sequence
  chemically treated genomic DNA (Homo sapiens) CpG-island No: 3598
taccaccacctaaatctcgccaataaaactatcgataacaaaatatccacgactattaccactaataatattataatacaccaatccgttaacgtccttatcccgatcaataaccgtaacgcgcaacacgactatataaaaacgcacatcctcgcgcacctacgccacgtaacgcttctcgctaaactaaaaaacattatcgttctcgtctaacacaattatatatacgcgcacaataaccgaacgcgacccgaattcctaaccctaatcgctaacttccaccaccaactcataactttccatatactcgcgatccactcgaccgctaatactaataaaaccgaaacgtaaatcaatctcgaaaacgacgacaactacaacgcgcgcaactaacgaccccacgaaacgataacgcaaattaacgttaaaaaacgcgtcgccgtcaataacacgcaactacaaaataaaataaccctcctccacattctcgcgaaaaatctcccgatactacgcttactcaaaaaccgacgaataatcgttacgatcgactactatcacgaccaccatcgtaataaccgaaaaacgcgacgacccgtaatcctacgcgatcacacgcaaataataacgctccatactctcgcgatccaaaactaccgccgtacgaataaaaccgctctacgaatcgatactaaacaactccaacgaacgactattcataaataccgccaacgaataaactaaacgcccgacctcgccgacgtccgaatcctaaacaaccacgcgtaacaccgcgatacctactacctcattctccgacaccaacgtctaataattatactacgaaaactacgaataacgatttacgacgcgacgaaaacgtacccgattcgccgaaattactttcctaacttcaaaacgaaccgaaaatcccgaaaaacgcgacccgaaacgctacgaaaaaaaacgacaacgaaaaaaaccccgaaaacgcatacgcttaaacgccgactcgaaaactatccgaaactcgcgaaatactaaacctaatacaaaaactatcctcgccgtacgtaatactaaatccaactcg

SEQ ID NO: 3599 - DNA, 1090 bp, Artificial Sequence
  chemically treated genomic DNA (Homo sapiens) CpG-island No: 3599
tgttattatttggatttcgttagtgaggttgtcgatggtaaagtgtttacggttattgttattgatgatgttgtagtgtattaattcgttggcgtttttgtttcggttagtggtcgtgacgcgtagtacgattgtgtgggggcgtatattttcgcgtatttgcgttacgtagcgtttttcgttgaattgaggagtattgtcgttttcgtttagtatagttatgtgtacgcgtatagtggtcgagcgcggttcgggtttttggttttggtcgttggtttttattattagtttatagttttttatgtgttcgcggtttattcggtcgttggtgttgatgaggtcggagcgtggattaatttcgaaggcggcggtagttgtagcgcgcgtagttggcggttttacgaagcggtagcgtaggttggcgttggggggcgcgtcgtcgttagtggtacgtagttgtaggatagggtagtttttttttatattttcgcgaagggtttttcggtattgcgtttgtttaaaaatcggcgagtggtcgttgcggtcggttattgttacggttattatcgtggtggtcgagaggcgcggcgattcgtggttttgcgcggttatacgtaggtagtgacgttttatgttttcgcggtttagagttgtcgtcgtacggataaggtcgttttgcgggtcgatgttgaatagttttagcgagcggttgtttatgagtgtcgttagcgagtagattaggcgttcggtttcgtcggcgttcgggttttgagtaattacgcgtagtatcgcggtgtttgttgttttatttttcggtattagcgtttggtagttgtattgcggaaattgcgggtggcggtttgcggcgcgacgaaagcgtgttcggttcgtcgaggttatttttttggttttaggacgggtcgggagtttcgggggacgcggttcggggcgttgcgggaggaagcggtagcggaagagatttcgggagcgtatgcgtttgggcgtcggttcgggagttgttcgagattcgcggggtgttgaatttgatgtaggagttgttttcgtcgtgcgtggtgttgaatttagttcg

SEQ ID NO: 3600 - DNA, 1090 bp, Artificial Sequence
  chemically treated genomic DNA (Homo sapiens) CpG-island No: 3600
cgaactaaattcaacaccacgcacgacgaaaacaactcctacatcaaattcaacaccccgcgaatctcgaacaactcccgaaccgacgcccaaacgcatacgctcccgaaatctcttccgctaccgcttcctcccgcaacgccccgaaccgcgtcccccgaaactcccgacccgtcctaaaaccaaaaaaataacctcgacgaaccgaacacgctttcgtcgcgccgcaaaccgccacccgcaatttccgcaatacaactaccaaacgctaataccgaaaaataaaacaacaaacaccgcgatactacgcgtaattactcaaaacccgaacgccgacgaaaccgaacgcctaatctactcgctaacgacactcataaacaaccgctcgctaaaactattcaacatcgacccgcaaaacgaccttatccgtacgacgacaactctaaaccgcgaaaacataaaacgtcactacctacgtataaccgcgcaaaaccacgaatcgccgcgcctctcgaccaccacgataataaccgtaacaataaccgaccgcaacgaccactcgccgatttttaaacaaacgcaataccgaaaaacccttcgcgaaaatataaaaaaaaactaccctatcctacaactacgtaccactaacgacgacgcgccccccaacgccaacctacgctaccgcttcgtaaaaccgccaactacgcgcgctacaactaccgccgccttcgaaattaatccacgctccgacctcatcaacaccaacgaccgaataaaccgcgaacacataaaaaactataaactaataataaaaaccaacgaccaaaaccaaaaacccgaaccgcgctcgaccactatacgcgtacacataactatactaaacgaaaacgacaatactcctcaattcaacgaaaaacgctacgtaacgcaaatacgcgaaaatatacgcccccacacaatcgtactacgcgtcacgaccactaaccgaaacaaaaacgccaacgaattaatacactacaacatcatcaataacaataaccgtaaacactttaccatcgacaacctcactaacgaaatccaaataataaca

SEQ ID NO: 3601 - DNA, 688 bp, Artificial Sequence
  chemically treated genomic DNA (Homo sapiens) CpG-island No: 3601
cggaggagttgttggttaatagtttgatcgtgcgttttgagaatatgtggtaggagcgttttttgttatcgttgttgggtcgttttttcgagggcgtggttgcggtgttcgttacgttcgttgaggacgtttttatttttaatatttagaacgatatagacgtagggggtatcgtgtttaatgtgagtttttcggcgttagttttacgtggggtcggggcgggcgttgtagggttttggtttagtttcgaggagttgtaggagtagttgtacgtgcgtcgggcggcgttggcggttcgttttttgttcgacgtattgtttttcgacgataacgtgtgtttgcgagagttttgtgagaattatatgaaatgcgtgttcgtgtttcgttttgattcgttcgcgttttttttggtttcggtttttacgttgtttcgatttatttagtttatcgttggtttgcgttgtcgttgttcgttcggatttacgggagatttttgcgagatcgagttcgatttttgttattttaatttatgtcgtaacggcggagtttgcgcgcggcgcgagggaggttatacgtgcgtttgtcgttcgcgttttatcggtgagtagggcgtcgggttagagttgggggaagtacgggttaaggttgggggcgggattataatgcgagtgagtattgggagttattt

SEQ ID NO: 3602 - DNA, 688 bp, Artificial Sequence
  chemically treated genomic DNA (Homo sapiens) CpG-island No: 3602
aaataactcccaatactcactcgcattataatcccgcccccaaccttaacccgtacttcccccaactctaacccgacgccctactcaccgataaaacgcgaacgacaaacgcacgtataacctccctcgcgccgcgcgcaaactccgccgttacgacataaattaaaataacaaaaatcgaactcgatctcgcaaaaatctcccgtaaatccgaacgaacaacgacaacgcaaaccaacgataaactaaataaatcgaaacaacgtaaaaaccgaaaccaaaaaaaacgcgaacgaatcaaaacgaaacacgaacacgcatttcatataattctcacaaaactctcgcaaacacacgttatcgtcgaaaaacaatacgtcgaacaaaaaacgaaccgccaacgccgcccgacgcacgtacaactactcctacaactcctcgaaactaaaccaaaaccctacaacgcccgccccgaccccacgtaaaactaacgccgaaaaactcacattaaacacgataccccctacgtctatatcgttctaaatattaaaaataaaaacgtcctcaacgaacgtaacgaacaccgcaaccacgccctcgaaaaaacgacccaacaacgataacaaaaaacgctcctaccacatattctcaaaacgcacgatcaaactattaaccaacaactcctccg

SEQ ID NO: 3603 - DNA, 688 bp, Artificial Sequence
  chemically treated genomic DNA (Homo sapiens) CpG-island No: 3603
aagtgatttttagtatttattcgtattgtggtttcgtttttagttttggttcgtgttttttttagttttggttcggcgttttgtttatcggtgaagcgcgggcggtagacgtacgtgtagtttttttcgcgtcgcgcgtaggtttcgtcgttgcgatatgggttggagtagtagaggtcgagttcggtttcgtaaaagtttttcgtgaattcgggcgggtagcggtagcgtaggttagcgatgggttggatgggtcggaatagcgtggaggtcgaggttaggaagggcgcggacgagttaaagcggagtacggatacgtattttatgtagtttttatagggttttcgtaggtatacgttgtcgtcgaagggtagtacgtcgagtagggagcgagtcgttagcgtcgttcggcgtacgtataattgtttttgtagtttttcggagttgaattagggttttgtagcgttcgtttcggttttacgtggagttagcgtcgagaaatttatattgagtacggtgttttttacgtttgtgtcgttttggatgttgaagatgaagacgtttttagcgggcgtagcgagtatcgtagttacgttttcgaggaagcggtttagtagcggtgataggaagcgtttttgttatatgtttttaaggcgtacggttaggttgttggttagtaattttttcg

SEQ ID NO: 3604 - DNA, 688 bp, Artificial Sequence
  chemically treated genomic DNA (Homo sapiens) CpG-island No: 3604
cgaaaaaattactaaccaacaacctaaccgtacgccttaaaaacatataacaaaaacgcttcctatcaccgctactaaaccgcttcctcgaaaacgtaactacgatactcgctacgcccgctaaaaacgtcttcatcttcaacatccaaaacgacacaaacgtaaaaaacaccgtactcaatataaatttctcgacgctaactccacgtaaaaccgaaacgaacgctacaaaaccctaattcaactccgaaaaactacaaaaacaattatacgtacgccgaacgacgctaacgactcgctccctactcgacgtactacccttcgacgacaacgtatacctacgaaaaccctataaaaactacataaaatacgtatccgtactccgctttaactcgtccgcgcccttcctaacctcgacctccacgctattccgacccatccaacccatcgctaacctacgctaccgctacccgcccgaattcacgaaaaacttttacgaaaccgaactcgacctctactactccaacccatatcgcaacgacgaaacctacgcgcgacgcgaaaaaaactacacgtacgtctaccgcccgcgcttcaccgataaacaaaacgccgaaccaaaactaaaaaaaacacgaaccaaaactaaaaacgaaaccacaatacgaataaatactaaaaatcactt

SEQ ID NO: 3605 - DNA, 713 bp, Artificial Sequence
  chemically treated genomic DNA (Homo sapiens) CpG-island No: 3605
tttaggttagaagtcgtagagcgtggtcggaaggggtcgtcgtcgaggtagcgatgagattggggagggggcggggttagacggaaggggcgtgtttatcgaagagggcgatttttcgggggttttggtattcggtttttgggcgcgcggtttttgaaggggtcggagtaggggcgggcgtgggcgtgatcgtttttgatcgcggtttggtttttaggagaggattgcgagttggatatcgaggtcggtcgttgcgtgtcgggcgtttgtcgtaacgggggtatttgtatcgacgcgtttaacggcggttttcgttgttagtgttcggtaggcggcgttttcgagggttcgcgttgcgaggtggttgcgcgttttttttcgtttagttcgttcgttatgtttcgcggtttgcggtagcgattttattttacgttgtttttttcgtaggtgttcgtttcgtgtttgagcgttttttcgtcgtttttatttattcgttttgatttagatttttgattgtttcgttttggtatttttatgagatatcgttttttttttgacgtttcgttcggggttttttgatttcgttgtattcgcgttttttcggtcggtttcgtcgtttttcgtcgttttttttttcgttttagtttttttttttcgtagggatggtgggtgtgaagtggtattttgtttttgacgtttttattttcgtaatt

SEQ ID NO: 3606 - DNA, 713 bp, Artificial Sequence
  chemically treated genomic DNA (Homo sapiens) CpG-island No: 3606
aattacgaaaataaaaacgtcaaaaacaaaataccacttcacacccaccatccctacgaaaaaaaaaaactaaaacgaaaaaaaaaacgacgaaaaacgacgaaaccgaccgaaaaaacgcgaatacaacgaaatcaaaaaaccccgaacgaaacgtcaaaaaaaaaacgatatctcataaaaataccaaaacgaaacaatcaaaaatctaaatcaaaacgaataaataaaaacgacgaaaaaacgctcaaacacgaaacgaacacctacgaaaaaaacaacgtaaaataaaatcgctaccgcaaaccgcgaaacataacgaacgaactaaacgaaaaaaaacgcgcaaccacctcgcaacgcgaaccctcgaaaacgccgcctaccgaacactaacaacgaaaaccgccgttaaacgcgtcgatacaaatacccccgttacgacaaacgcccgacacgcaacgaccgacctcgatatccaactcgcaatcctctcctaaaaaccaaaccgcgatcaaaaacgatcacgcccacgcccgcccctactccgaccccttcaaaaaccgcgcgcccaaaaaccgaataccaaaacccccgaaaaatcgccctcttcgataaacacgccccttccgtctaaccccgccccctccccaatctcatcgctacctcgacgacgaccccttccgaccacgctctacgacttctaacctaaa

SEQ ID NO: 3607 - DNA, 713 bp, Artificial Sequence
  chemically treated genomic DNA (Homo sapiens) CpG-island No: 3607
ggttgcgggggtgggagcgttaggagtagggtattattttatatttattatttttgcgaggagaaggggttggggcgagagaggaagcgacgagggacggcgggatcgatcggggggacgcgggtgtagcgaggttaggagatttcgggcggggcgttaggggaggggcggtgttttatggggatgttaggacggggtagttaggaatttgagttagggcgggtaggtgggggcggcggggaggcgtttagatacggggcgggtatttacgagagggatagcgtaaggtggaatcgttgtcgtaggtcgcgaaatatgacgaacgaattgggcgggaaggagcgcgtagttatttcgtagcgcgggttttcgaaggcgtcgtttgtcgggtattggtagcgaaagtcgtcgttgggcgcgtcggtgtaggtgttttcgttgcggtagacgttcggtacgtagcggtcggtttcggtgtttagttcgtagtttttttttgggggttaagtcgcggttagaggcggttacgtttacgttcgtttttgtttcggtttttttaaagatcgcgcgtttagaggtcgggtgttaagattttcgaaaggtcgtttttttcggtggatacgtttttttcgtttggtttcgttttttttttagttttatcgttgtttcggcggcggtttttttcggttacgttttacggtttttggtttaag

SEQ ID NO: 3608 - DNA, 713 bp, Artificial Sequence
  chemically treated genomic DNA (Homo sapiens) CpG-island No: 3608
cttaaaccaaaaaccgtaaaacgtaaccgaaaaaaaccgccgccgaaacaacgataaaactaaaaaaaaaacgaaaccaaacgaaaaaaacgtatccaccgaaaaaaacgacctttcgaaaatcttaacacccgacctctaaacgcgcgatctttaaaaaaaccgaaacaaaaacgaacgtaaacgtaaccgcctctaaccgcgacttaacccccaaaaaaaaactacgaactaaacaccgaaaccgaccgctacgtaccgaacgtctaccgcaacgaaaacacctacaccgacgcgcccaacgacgactttcgctaccaatacccgacaaacgacgccttcgaaaacccgcgctacgaaataactacgcgctccttcccgcccaattcgttcgtcatatttcgcgacctacgacaacgattccaccttacgctatccctctcgtaaatacccgccccgtatctaaacgcctccccgccgcccccacctacccgccctaactcaaattcctaactaccccgtcctaacatccccataaaacaccgcccctcccctaacgccccgcccgaaatctcctaacctcgctacacccgcgtccccccgatcgatcccgccgtccctcgtcgcttcctctctcgccccaaccccttctcctcgcaaaaataataaatataaaataataccctactcctaacgctcccacccccgcaacc

SEQ ID NO: 3609 - DNA, 949 bp, Artificial Sequence
  chemically treated genomic DNA (Homo sapiens) CpG-island No: 3609
ggcgacgttagggtagtcgtattgcggcgcgcgttttttattttttttagttttggtgtttggcggatgtcgggtttgtagggtcgcgtcgggttcgtttttatttatcgtgatttagtgttcgtgttcgcgttcgtgcgtcggcggttaaggtgtttggtcgggtttcgacgaggcgcgggagggtaggtttttttaggttttgacggatattcgggggttatagcgatcgatgtcggtattttaggtgtttgtggtattgtttgtaacgagaagtgatggggcgatgatagtcgcgagcgggtattagggggtaaggttgaggagcgttgagtcgttagatttagagagttatttatttggagggacgtgtcgttattcgcgtcgtcggagtttcggttttagttcggattttatttgttttggtttcgttcggggaagttgcgcggcgggcgggggcgatttgacgttatgaggggcgggtttcgggggcggggcgcgcgcgttttcggttcgagtcggaagtttcgattgcggcggtattcgggacggcgggcgggttggttattacgggataggaaggtgagattcgggattttagttttgtaagtaggtttcgtcggcgatcgttgacgggcgttgggttcgcggcgttgtaaggcggcgaggttcgggtttggcgtcgtttgcgtagttttggtcgcggcgtgtcggcgttgtagcgcggtagggggcggggtcggtcgttcggaggtttaagtggcggggacgtttttttgtcgggttaggtttttagagcgggttttcggcggcggcgacgggggtcgggtcgcgcgtgattcgtcgtagttacgtcgtttttaattattagtagttggtgttttaggttggcggcgtttattttttttttagtcgggtgatttaggggatttattttatgttggttttt

SEQ ID NO: 3610 - DNA, 949 bp, Artificial Sequence
  chemically treated genomic DNA (Homo sapiens) CpG-island No: 3610
aaaaaccaacataaaataaatcccctaaatcacccgactaaaaaaaaaataaacgccgccaacctaaaacaccaactactaataattaaaaacgacgtaactacgacgaatcacgcgcgacccgacccccgtcgccgccgccgaaaacccgctctaaaaacctaacccgacaaaaaaacgtccccgccacttaaacctccgaacgaccgaccccgccccctaccgcgctacaacgccgacacgccgcgaccaaaactacgcaaacgacgccaaacccgaacctcgccgccttacaacgccgcgaacccaacgcccgtcaacgatcgccgacgaaacctacttacaaaactaaaatcccgaatctcaccttcctatcccgtaataaccaacccgcccgccgtcccgaataccgccgcaatcgaaacttccgactcgaaccgaaaacgcgcgcgccccgcccccgaaacccgcccctcataacgtcaaatcgcccccgcccgccgcgcaacttccccgaacgaaaccaaaacaaataaaatccgaactaaaaccgaaactccgacgacgcgaataacgacacgtccctccaaataaataactctctaaatctaacgactcaacgctcctcaaccttaccccctaatacccgctcgcgactatcatcgccccatcacttctcgttacaaacaataccacaaacacctaaaataccgacatcgatcgctataacccccgaatatccgtcaaaacctaaaaaaacctaccctcccgcgcctcgtcgaaacccgaccaaacaccttaaccgccgacgcacgaacgcgaacacgaacactaaatcacgataaataaaaacgaacccgacgcgaccctacaaacccgacatccgccaaacaccaaaactaaaaaaaataaaaaacgcgcgccgcaatacgactaccctaacgtcgcc

SEQ ID NO: 3611 - DNA, 949 bp, Artificial Sequence
  chemically treated genomic DNA (Homo sapiens) CpG-island No: 3611
gaaagttaatataaaataaattttttgggttattcggttaggagaaaggtgagcgtcgttagtttggagtattagttattagtgattaagaacggcgtgattgcggcgggttacgcgcggttcggttttcgtcgtcgtcgtcggagattcgttttgagaatttgattcggtagggaggcgttttcgttatttgggttttcgggcggtcggtttcgttttttgtcgcgttgtagcgtcggtacgtcgcgattaaggttgcgtaggcggcgttaggttcgggtttcgtcgttttgtagcgtcgcgagtttagcgttcgttagcggtcgtcggcggagtttgtttgtaaagttgaggtttcggattttatttttttgtttcgtggtggttagttcgttcgtcgtttcggatgtcgtcgtagtcggagttttcggttcgggtcggaagcgcgcgcgtttcgttttcgaggttcgttttttatgacgttagatcgttttcgttcgtcgcgtagttttttcgagcgagattaaaataggtggaattcgggttggagtcggagtttcggcggcgcgggtggcggtacgtttttttaggtgggtggttttttgggtttggcgatttagcgttttttagttttgttttttggtgttcgttcgcgattgttatcgttttattatttttcgttgtagatagtattataggtatttggagtatcggtatcggtcgttgtggttttcgagtgttcgttagagtttaggggagtttgttttttcgcgtttcgtcggggttcggttaggtattttggtcgtcggcgtacggacgcgggtacgagtattagattacggtgagtggaagcgggttcgacgcggttttgtaggttcgatattcgttaggtattagggttgggaggggtgaggggcgcgcgtcgtagtgcggttgttttggcgtcgtt

SEQ ID NO: 3612 - DNA, 949 bp, Artificial Sequence
  chemically treated genomic DNA (Homo sapiens) CpG-island No: 3612
aacgacgccaaaacaaccgcactacgacgcgcgcccctcacccctcccaaccctaatacctaacgaatatcgaacctacaaaaccgcgtcgaacccgcttccactcaccgtaatctaatactcgtacccgcgtccgtacgccgacgaccaaaatacctaaccgaaccccgacgaaacgcgaaaaaacaaactcccctaaactctaacgaacactcgaaaaccacaacgaccgataccgatactccaaatacctataatactatctacaacgaaaaataataaaacgataacaatcgcgaacgaacaccaaaaaacaaaactaaaaaacgctaaatcgccaaacccaaaaaaccacccacctaaaaaaacgtaccgccacccgcgccgccgaaactccgactccaacccgaattccacctattttaatctcgctcgaaaaaactacgcgacgaacgaaaacgatctaacgtcataaaaaacgaacctcgaaaacgaaacgcgcgcgcttccgacccgaaccgaaaactccgactacgacgacatccgaaacgacgaacgaactaaccaccacgaaacaaaaaaataaaatccgaaacctcaactttacaaacaaactccgccgacgaccgctaacgaacgctaaactcgcgacgctacaaaacgacgaaacccgaacctaacgccgcctacgcaaccttaatcgcgacgtaccgacgctacaacgcgacaaaaaacgaaaccgaccgcccgaaaacccaaataacgaaaacgcctccctaccgaatcaaattctcaaaacgaatctccgacgacgacgacgaaaaccgaaccgcgcgtaacccgccgcaatcacgccgttcttaatcactaataactaatactccaaactaacgacgctcacctttctcctaaccgaataacccaaaaaatttattttatattaactttc

SEQ ID NO: 3613 - DNA, 836 bp, Artificial Sequence
  chemically treated genomic DNA (Homo sapiens) CpG-island No: 3613
gcgttcgtttcgtttttcggttattgtagtatcgttttagagtttatcgtttaagttttcgtttggagtcgtcgttattcggtgttgtatttttttttgtattagagggtcgaataatttcgttattatgttttttatttgggttacgttagataataggttttggaaagggtcgtcgttattcggcgttttataggatattcgtagtttttgcggtttttttttttgttcgacgtatttttttagtagttttatggtgatcgttaagtttttagaatacgatatcgggaagcgttattcggaggcggaaattagttcgcgttcggcgtaggcgggagaagggagaggagtgatattcgtttgtcggaagtcgttttttttttttttttcgttttttttttttgttattggtttttggtattcgggttttatttttttcggttacgtttttcgcggtcgtttttttcgttttcgtcggggtcgagtcgttgttcggttgatagttgaggatggtcggagtcgagggcgtcgttgggcggtagtcggagttggagttcgtggtatcgttggtcgacgtttttgaggaggacgaggagttggagaatgaggcgtgcgttgttttgggcggtagcgatttcgagaagtgtttttatttttaggtgggcgcgcggttcgggttttttttttttcggttttcgtcgaatttttttttttcggttcggttgtttttattttcgttttgtcgtagtcgtttttttagtggtggttcggggtcgtcgttagtttgtcgtttttttattttaagtttattttttttttttaattttaattttttg

SEQ ID NO: 3614 - DNA, 836 bp, Artificial Sequence
  chemically treated genomic DNA (Homo sapiens) CpG-island No: 3614
caaaaaattaaaattaaaaaaaaaaaataaacttaaaataaaaaaacgacaaactaacgacgaccccgaaccaccactaaaaaaacgactacgacaaaacgaaaataaaaacaaccgaaccgaaaaaaaaaaattcgacgaaaaccgaaaaaaaaaaaacccgaaccgcgcgcccacctaaaaataaaaacacttctcgaaatcgctaccgcccaaaacaacgcacgcctcattctccaactcctcgtcctcctcaaaaacgtcgaccaacgataccacgaactccaactccgactaccgcccaacgacgccctcgactccgaccatcctcaactatcaaccgaacaacgactcgaccccgacgaaaacgaaaaaaacgaccgcgaaaaacgtaaccgaaaaaaataaaacccgaataccaaaaaccaataacaaaaaaaaaaaacgaaaaaaaaaaaaaaaacgacttccgacaaacgaatatcactcctctcccttctcccgcctacgccgaacgcgaactaatttccgcctccgaataacgcttcccgatatcgtattctaaaaacttaacgatcaccataaaactactaaaaaaatacgtcgaacaaaaaaaaaaaccgcaaaaactacgaatatcctataaaacgccgaataacgacgaccctttccaaaacctattatctaacgtaacccaaataaaaaacataataacgaaattattcgaccctctaatacaaaaaaaaatacaacaccgaataacgacgactccaaacgaaaacttaaacgataaactctaaaacgatactacaataaccgaaaaacgaaacgaacgc

SEQ ID NO: 3615 - DNA, 836 bp, Artificial Sequence
  chemically treated genomic DNA (Homo sapiens) CpG-island No: 3615
taggaggttggggttaaaagggaagggtgggtttggggtgaggaagcggtagattaacggcggtttcggattattattggggagacgattgcggtaaggcgggaatagggatagtcgggtcgggaaggggaggttcggcgggagtcgggggagaggaggttcgggtcgcgcgtttatttgagagtaggagtatttttcggagtcgttgtcgtttaggatagcgtacgttttattttttagtttttcgttttttttaaggacgtcgattaacgatattacgggttttagtttcgattgtcgtttagcggcgttttcggtttcggttatttttaattgttagtcgaatagcggttcggtttcggcggaggcgggaaaagcggtcgcgaggggcgtagtcggaggaggtggggttcgagtgttaggaattaatgataaggaaaaaaagcgaaggaagggggaggagcgattttcgataaacggatgttattttttttttttttttcgtttgcgtcggacgcgggttgattttcgttttcgggtggcgtttttcggtgtcgtgttttggaagtttagcggttattatggagttgttgggagagtacgtcgggtaggaagggaagtcgtagaagttgcgggtgttttgtgaggcgtcgggtgacggcgattttttttagggtttgttgtttggcgtggtttagatgaaggatatggtaacggaattattcgattttttggtatagggggaagtgtagtatcgggtggcggcggttttagacgaggatttggacggtgagttttgagacggtgttgtagtgatcggaggacggggcgggcgt

SEQ ID NO: 3616 - DNA, 836 bp, Artificial Sequence
  chemically treated genomic DNA (Homo sapiens) CpG-island No: 3616
acgcccgccccgtcctccgatcactacaacaccgtctcaaaactcaccgtccaaatcctcgtctaaaaccgccgccacccgatactacacttccccctataccaaaaaatcgaataattccgttaccatatccttcatctaaaccacgccaaacaacaaaccctaaaaaaaatcgccgtcacccgacgcctcacaaaacacccgcaacttctacgacttcccttcctacccgacgtactctcccaacaactccataataaccgctaaacttccaaaacacgacaccgaaaaacgccacccgaaaacgaaaatcaacccgcgtccgacgcaaacgaaaaaaaaaaaaaaaataacatccgtttatcgaaaatcgctcctcccccttccttcgctttttttccttatcattaattcctaacactcgaaccccacctcctccgactacgcccctcgcgaccgcttttcccgcctccgccgaaaccgaaccgctattcgactaacaattaaaaataaccgaaaccgaaaacgccgctaaacgacaatcgaaactaaaacccgtaatatcgttaatcgacgtccttaaaaaaaacgaaaaactaaaaaataaaacgtacgctatcctaaacgacaacgactccgaaaaatactcctactctcaaataaacgcgcgacccgaacctcctctcccccgactcccgccgaacctccccttcccgacccgactatccctattcccgccttaccgcaatcgtctccccaataataatccgaaaccgccgttaatctaccgcttcctcaccccaaacccacccttcccttttaaccccaacctccta

SEQ ID NO: 3617 - DNA, 895 bp, Artificial Sequence
  chemically treated genomic DNA (Homo sapiens) CpG-island No: 3617
ttttcgttgacggcgttttattttgtttgtcgtttttcgttttaggtgaaggagtttaagcgttagtttattttcgacgtggtgaacgagggcggcgaggttgagaagatggagtttttcgtgagtttttgcgaggatattattttcgagatgtagatcgtcgcgtagatttcggagttcgagggcgagtcggagatcgacgaggacgagggcgcgggcgcggcggaggcgggcgcggaaggcgcggaggagggcgcggcggggttcgagggtacggcggttacggcggcggcgggggcgacggcgcgggttgtggcggtcgtaggtcgggttttgcgaggttttagttatcgtagtttgcggcggcgcgtgcggcggttgcggcggtttacggttcgcgaggcggttatcgtagtggcggcgttgttttgggtagtagtgacgcgcgttggggtcgttggcgcgggggcggcggcgggcgcgttgggtttgttttggggttcgttgttcggcggcggtttggtggagggcgttaagaaggtgacggtgatcgagtttttggtaggtatgttcgattttattagcgacgaggtgtacggcgagtagtcggtcgggtcgggcggagacgtagacggcgagggtgttagcgagggcgttggagacgtcgcggagggcgttggagacgaggaggaggcggtgtacgaggtcgggtcgggcggtgtcgacggggcggtggtcgtgatcgatgggggtttttttcggttcgaaggggttggcggtttcggggatatgggggatacgacgtttgcggaatcgtttatattcgagggtttttttatttttaagaggaaattgggggtgagagagtaggcggggttttggggttttggaaaga

SEQ ID NO: 3618 - DNA, 895 bp, Artificial Sequence
  chemically treated genomic DNA (Homo sapiens) CpG-island No: 3618
tctttccaaaaccccaaaaccccgcctactctctcacccccaatttcctcttaaaaataaaaaaaccctcgaatataaacgattccgcaaacgtcgtatcccccatatccccgaaaccgccaaccccttcgaaccgaaaaaaacccccatcgatcacgaccaccgccccgtcgacaccgcccgacccgacctcgtacaccgcctcctcctcgtctccaacgccctccgcgacgtctccaacgccctcgctaacaccctcgccgtctacgtctccgcccgacccgaccgactactcgccgtacacctcgtcgctaataaaatcgaacatacctaccaaaaactcgatcaccgtcaccttcttaacgccctccaccaaaccgccgccgaacaacgaaccccaaaacaaacccaacgcgcccgccgccgcccccgcgccaacgaccccaacgcgcgtcactactacccaaaacaacgccgccactacgataaccgcctcgcgaaccgtaaaccgccgcaaccgccgcacgcgccgccgcaaactacgataactaaaacctcgcaaaacccgacctacgaccgccacaacccgcgccgtcgcccccgccgccgccgtaaccgccgtaccctcgaaccccgccgcgccctcctccgcgccttccgcgcccgcctccgccgcgcccgcgccctcgtcctcgtcgatctccgactcgccctcgaactccgaaatctacgcgacgatctacatctcgaaaataatatcctcgcaaaaactcacgaaaaactccatcttctcaacctcgccgccctcgttcaccacgtcgaaaataaactaacgcttaaactccttcacctaaaacgaaaaacgacaaacaaaataaaacgccgtcaacgaaaa

SEQ ID NO: 3619 - DNA, 895 bp, Artificial Sequence
  chemically treated genomic DNA (Homo sapiens) CpG-island No: 3619
tttttttaaaattttaaaatttcgtttgtttttttatttttaatttttttttgaggatgggagagttttcgggtgtgggcggtttcgtaggcgtcgtgttttttatgttttcgagatcgttagttttttcgggtcggaaggggtttttatcggttacggttatcgtttcgtcggtatcgttcggttcggtttcgtgtatcgtttttttttcgtttttagcgtttttcgcggcgtttttagcgttttcgttggtattttcgtcgtttgcgttttcgttcggttcggtcggttgttcgtcgtgtatttcgtcgttggtggggtcgggtatgtttgttaggagttcggttatcgttatttttttggcgttttttattaggtcgtcgtcgaatagcgagttttagagtaggtttagcgcgttcgtcgtcgttttcgcgttagcggttttagcgcgcgttattgttgtttagagtagcgtcgttattgcggtggtcgtttcgcgggtcgtaagtcgtcgtagtcgtcgtacgcgtcgtcgtaggttgcggtagttgaggtttcgtagggttcggtttgcggtcgttataattcgcgtcgtcgttttcgtcgtcgtcgtggtcgtcgtgttttcgagtttcgtcgcgttttttttcgcgtttttcgcgttcgttttcgtcgcgttcgcgttttcgttttcgtcggttttcggttcgttttcgggtttcgagatttgcgcggcgatttgtatttcgaagatggtgttttcgtagaaatttacgaagagttttatttttttagtttcgtcgttttcgtttattacgtcgaagatgaattggcgtttggatttttttatttgaagcgaggggcggtagataggatagggcgtcgttagcggggg

SEQ ID NO: 3620 - DNA, 895 bp, Artificial Sequence
  chemically treated genomic DNA (Homo sapiens) CpG-island No: 3620
cccccgctaacgacgccctatcctatctaccgcccctcgcttcaaataaaaaaatccaaacgccaattcatcttcgacgtaataaacgaaaacgacgaaactaaaaaaataaaactcttcgtaaatttctacgaaaacaccatcttcgaaatacaaatcgccgcgcaaatctcgaaacccgaaaacgaaccgaaaaccgacgaaaacgaaaacgcgaacgcgacgaaaacgaacgcgaaaaacgcgaaaaaaaacgcgacgaaactcgaaaacacgacgaccacgacgacgacgaaaacgacgacgcgaattataacgaccgcaaaccgaaccctacgaaacctcaactaccgcaacctacgacgacgcgtacgacgactacgacgacttacgacccgcgaaacgaccaccgcaataacgacgctactctaaacaacaataacgcgcgctaaaaccgctaacgcgaaaacgacgacgaacgcgctaaacctactctaaaactcgctattcgacgacgacctaataaaaaacgccaaaaaaataacgataaccgaactcctaacaaacatacccgaccccaccaacgacgaaatacacgacgaacaaccgaccgaaccgaacgaaaacgcaaacgacgaaaataccaacgaaaacgctaaaaacgccgcgaaaaacgctaaaaacgaaaaaaaaacgatacacgaaaccgaaccgaacgataccgacgaaacgataaccgtaaccgataaaaaccccttccgacccgaaaaaactaacgatctcgaaaacataaaaaacacgacgcctacgaaaccgcccacacccgaaaactctcccatcctcaaaaaaaaattaaaaataaaaaaacaaacgaaattttaaaattttaaaaaaa

SEQ ID NO: 3621 - DNA, 757 bp, Artificial Sequence
  chemically treated genomic DNA (Homo sapiens) CpG-island No: 3621
gggaagtaggacgtttcgggtttaggagagtttagaggaggcgacgcgtagtttagagtcgggtgtttcgtagatcgttttagttttcggttagattttatttttagtagtttcgcggatcgggatcgaggattttcgggttacgcgttttcggttttcgataggtttagtacgcgtttcgcgggcggttttagttttttttttgtagaatgggcgggggatttaggcggtgcgtttcggggcgcggagggcggtcggaaggggtgtgatggggggcgggtttcgcgtcgtttcgtttcggggagggagtttcgggcgtagtattttggcgcgggtcggggtcgtcgtcgttattgtcgtcgggtaaggttttagtacggatatggtttcgcgcggcgttcgttcgggttcgagtttttcgcgtttcgttttgtagtttttcggcggagaggcggtttcgacggtgcggacggcgtagacggtcgggcgggcggtatggaggcggcgtatttgttttcggtcgtcgacgtgttgcgttatttttcggtgatagtcgagggcggtttgagttcggcgtaggtgatcggcgcgcgggagcgttacggttttaacggtgagcgcgcgggtcgggtcgggtcggggagcgggggtcgcgcgcgtcgtagttttagtttttttttttgtttttttattcggttttgggcgggtaggaagcgagggtttcggaaattttttcggatgtttttggggtattcgg

SEQ ID NO: 3622 - DNA, 757 bp, Artificial Sequence
  chemically treated genomic DNA (Homo sapiens) CpG-island No: 3622
ccgaataccccaaaaacatccgaaaaaatttccgaaaccctcgcttcctacccgcccaaaaccgaataaaaaaacaaaaaaaaaaactaaaactacgacgcgcgcgacccccgctccccgacccgacccgacccgcgcgctcaccgttaaaaccgtaacgctcccgcgcgccgatcacctacgccgaactcaaaccgccctcgactatcaccgaaaaataacgcaacacgtcgacgaccgaaaacaaatacgccgcctccataccgcccgcccgaccgtctacgccgtccgcaccgtcgaaaccgcctctccgccgaaaaactacaaaacgaaacgcgaaaaactcgaacccgaacgaacgccgcgcgaaaccatatccgtactaaaaccttacccgacgacaataacgacgacgaccccgacccgcgccaaaatactacgcccgaaactccctccccgaaacgaaacgacgcgaaacccgccccccatcacaccccttccgaccgccctccgcgccccgaaacgcaccgcctaaatcccccgcccattctacaaaaaaaaaactaaaaccgcccgcgaaacgcgtactaaacctatcgaaaaccgaaaacgcgtaacccgaaaatcctcgatcccgatccgcgaaactactaaaaataaaatctaaccgaaaactaaaacgatctacgaaacacccgactctaaactacgcgtcgcctcctctaaactctcctaaacccgaaacgtcctacttccc

SEQ ID NO: 3623 - DNA, 757 bp, Artificial Sequence
  chemically treated genomic DNA (Homo sapiens) CpG-island No: 3623
tcgggtgttttaggagtattcgaagaggttttcggagttttcgttttttgttcgtttagagtcgggtggggaggtaggaggggaaattgagattgcggcgcgcgcggttttcgtttttcggttcggttcggttcgcgcgtttatcgttggggtcgtagcgttttcgcgcgtcggttatttgcgtcgggtttaggtcgttttcggttgttatcgagaagtggcgtagtacgtcggcggtcgggagtagatgcgtcgtttttatgtcgttcgttcggtcgtttgcgtcgttcgtatcgtcgaggtcgttttttcgtcggggggttataaagcggggcgcgggggattcgggttcgggcgggcgtcgcgcgaggttatgttcgtgttgggattttattcgacggtagtggcggcggcggtttcggttcgcgttaggatgttgcgttcgggatttttttttcggggcggggcggcgcggggttcgttttttattatatttttttcggtcgtttttcgcgtttcggggcgtatcgtttgggtttttcgtttattttgtagaggggaaattgagatcgttcgcggggcgcgtgttgggtttgtcgggagtcgggggcgcgtggttcgggggttttcggtttcggttcgcggagttgttaggggtgggatttggtcgagagttggggcggtttgcggagtattcggttttgggttgcgcgtcgttttttttgggtttttttgggttcggggcgttttgtttttt

SEQ ID NO: 3624 - DNA, 757 bp, Artificial Sequence
  chemically treated genomic DNA (Homo sapiens) CpG-island No: 3624
aaaaaacaaaacgccccgaacccaaaaaaacccaaaaaaaacgacgcgcaacccaaaaccgaatactccgcaaaccgccccaactctcgaccaaatcccacccctaacaactccgcgaaccgaaaccgaaaacccccgaaccacgcgcccccgactcccgacaaacccaacacgcgccccgcgaacgatctcaatttcccctctacaaaataaacgaaaaacccaaacgatacgccccgaaacgcgaaaaacgaccgaaaaaaatataataaaaaacgaaccccgcgccgccccgccccgaaaaaaaaatcccgaacgcaacatcctaacgcgaaccgaaaccgccgccgccactaccgtcgaataaaatcccaacacgaacataacctcgcgcgacgcccgcccgaacccgaatcccccgcgccccgctttataaccccccgacgaaaaaacgacctcgacgatacgaacgacgcaaacgaccgaacgaacgacataaaaacgacgcatctactcccgaccgccgacgtactacgccacttctcgataacaaccgaaaacgacctaaacccgacgcaaataaccgacgcgcgaaaacgctacgaccccaacgataaacgcgcgaaccgaaccgaaccgaaaaacgaaaaccgcgcgcgccgcaatctcaatttcccctcctacctccccacccgactctaaacgaacaaaaaacgaaaactccgaaaacctcttcgaatactcctaaaacacccga

SEQ ID NO: 3625 - DNA, 502 bp, Artificial Sequence
  chemically treated genomic DNA (Homo sapiens) CpG-island No: 3625
gcggtcgggagggatttcggggattttaggacgtcgggggcgtggcgaggtcggtttcgtcgtaggggagggagggtttttatcgcgtcgtttatcgcggttttttagtttaggagggggcgggagtttcgggtttcgattgggcggcgttggcggggtcgttcgtttcgattaatgagcgtcggtcgggcgcggcggtgggcggggtagcgagcgttgttcggagtcgcggcgttcgcgggttgagttcggcgatttgggttttagcgaggcggtggggcggggcggggcggggcggggcgcgtagtaggagcgagtggggtcgttcgtcgggtcgcggatattgtcgttcggcgtttaggtagggatcggcggggcggggacgcgggcgaggagtaggaggacgaacgttttaatatttgtttcgagtttgtaagggagaggcggggggggtttgttaggtcgcgtttacgagggagttgggatttggttagggcgggga

SEQ ID NO: 3626 - DNA, 502 bp, Artificial Sequence
  chemically treated genomic DNA (Homo sapiens) CpG-island No: 3626
tccccgccctaaccaaatcccaactccctcgtaaacgcgacctaacaaaccccccccgcctctcccttacaaactcgaaacaaatattaaaacgttcgtcctcctactcctcgcccgcgtccccgccccgccgatccctacctaaacgccgaacgacaatatccgcgacccgacgaacgaccccactcgctcctactacgcgccccgccccgccccgccccgccccaccgcctcgctaaaacccaaatcgccgaactcaacccgcgaacgccgcgactccgaacaacgctcgctaccccgcccaccgccgcgcccgaccgacgctcattaatcgaaacgaacgaccccgccaacgccgcccaatcgaaacccgaaactcccgccccctcctaaactaaaaaaccgcgataaacgacgcgataaaaaccctccctcccctacgacgaaaccgacctcgccacgcccccgacgtcctaaaatccccgaaatccctcccgaccgc

SEQ ID NO: 3627 - DNA, 502 bp, Artificial Sequence
  chemically treated genomic DNA (Homo sapiens) CpG-island No: 3627
ttttcgttttgattagattttagttttttcgtagacgcggtttggtagatttttttcgttttttttttgtaggttcggggtaggtgttaaggcgttcgtttttttgtttttcgttcgcgttttcgtttcgtcgatttttatttgggcgtcgggcgatagtgttcgcggttcggcgggcggttttattcgtttttgttgcgcgtttcgtttcgtttcgtttcgttttatcgtttcgttggggtttagatcgtcgagtttagttcgcgggcgtcgcggtttcgggtagcgttcgttgtttcgtttatcgtcgcgttcggtcggcgtttattggtcggagcgaacggtttcgttagcgtcgtttaatcggagttcgggattttcgtttttttttggattaagggatcgcggtgggcggcgcggtaggggtttttttttttttgcggcggggtcgatttcgttacgttttcggcgttttggggttttcgaagtttttttcggtcgt

SEQ ID NO: 3628 - DNA, 502 bp, Artificial Sequence
  chemically treated genomic DNA (Homo sapiens) CpG-island No: 3628
acgaccgaaaaaaacttcgaaaaccccaaaacgccgaaaacgtaacgaaatcgaccccgccgcaaaaaaaaaaaaacccctaccgcgccgcccaccgcgatcccttaatccaaaaaaaaacgaaaatcccgaactccgattaaacgacgctaacgaaaccgttcgctccgaccaataaacgccgaccgaacgcgacgataaacgaaacaacgaacgctacccgaaaccgcgacgcccgcgaactaaactcgacgatctaaaccccaacgaaacgataaaacgaaacgaaacgaaacgaaacgcgcaacaaaaacgaataaaaccgcccgccgaaccgcgaacactatcgcccgacgcccaaataaaaatcgacgaaacgaaaacgcgaacgaaaaacaaaaaaacgaacgccttaacacctaccccgaacctacaaaaaaaaaacgaaaaaaatctaccaaaccgcgtctacgaaaaaactaaaatctaatcaaaacgaaaa

SEQ ID NO: 3629 - DNA, 619 bp, Artificial Sequence
  chemically treated genomic DNA (Homo sapiens) CpG-island No: 3629
gggtttgcggggtgtttcgcggagtttgttcgggtttgcgtcggtcgtcgggatcgtatcgtcgcgggtgtttcgtcgtttgcgttttttttcgtttttgtttgcggatcgtatttattttcggtgtattgtttttcgcgttcggtttttggtggaggttacgtttgtgcggagtgggttcggttcggggtatttacgtgcggtttttcgcggagcgttttttttacggttcgtcggagcgtttttttgtaggagtcgggggcggggtgggagatgaatggggcggcggcggcgcgcggtttaggttgcgtagggttttgttttggttggggcgagagggggcggtagaggcgggcgttgcggtttcggggttcgggaggcgtagggttggtggttgggggggtgtttacgtgcgtagggatttgcgtgtgttgtttggaggcgggtgtgcgtgtgttacgtggacgcgggagtgtgtttgtgtttgcgtggggggtgtaggataggatggagtggtgtgtgagggcgggttacgcggatacgggcgtgtgtttgttaggggagggggtgtgtttaagttttggcgttgtagggttgtgtagagaaggttgtgttatag

SEQ ID NO: 3630 - DNA, 619 bp, Artificial Sequence
  chemically treated genomic DNA (Homo sapiens) CpG-island No: 3630
ctataacacaaccttctctacacaaccctacaacgccaaaacttaaacacaccccctcccctaacaaacacacgcccgtatccgcgtaacccgccctcacacaccactccatcctatcctacaccccccacgcaaacacaaacacactcccgcgtccacgtaacacacgcacacccgcctccaaacaacacacgcaaatccctacgcacgtaaacacccccccaaccaccaaccctacgcctcccgaaccccgaaaccgcaacgcccgcctctaccgccccctctcgccccaaccaaaacaaaaccctacgcaacctaaaccgcgcgccgccgccgccccattcatctcccaccccgcccccgactcctacaaaaaaacgctccgacgaaccgtaaaaaaaacgctccgcgaaaaaccgcacgtaaataccccgaaccgaacccactccgcacaaacgtaacctccaccaaaaaccgaacgcgaaaaacaatacaccgaaaataaatacgatccgcaaacaaaaacgaaaaaaaacgcaaacgacgaaacacccgcgacgatacgatcccgacgaccgacgcaaacccgaacaaactccgcgaaacaccccgcaaaccc

SEQ ID NO: 3631 - DNA, 619 bp, Artificial Sequence
  chemically treated genomic DNA (Homo sapiens) CpG-island No: 3631
ttgtgatatagttttttttgtatagttttgtaacgttaagatttgagtatatttttttttttgataggtatacgttcgtgttcgcgtgattcgtttttatatattattttattttgttttgtattttttacgtagatataggtatattttcgcgtttacgtgatatacgtatattcgtttttaaatagtatacgtaggtttttgcgtacgtggatatttttttagttattagttttgcgtttttcgggtttcgaagtcgtagcgttcgtttttgtcgttttttttcgttttagttaaggtaggattttgcgtagtttgagtcgcgcgtcgtcgtcgttttatttattttttatttcgttttcggtttttgtaggaagacgtttcggcgggtcgtgggaggagcgtttcgcggagaatcgtacgtgggtgtttcgggtcgggtttatttcgtatagacgtggtttttattaggagtcgggcgcgggggatagtgtatcggggatggatgcggttcgtagatagaagcggggaagaacgtagacggcggggtattcgcggcgatgcggtttcggcggtcggcgtagattcgagtagatttcgcgaggtatttcgtagattt

SEQ ID NO: 3632 - DNA, 619 bp, Artificial Sequence
  chemically treated genomic DNA (Homo sapiens) CpG-island No: 3632
aaatctacgaaatacctcgcgaaatctactcgaatctacgccgaccgccgaaaccgcatcgccgcgaataccccgccgtctacgttcttccccgcttctatctacgaaccgcatccatccccgatacactatcccccgcgcccgactcctaataaaaaccacgtctatacgaaataaacccgacccgaaacacccacgtacgattctccgcgaaacgctcctcccacgacccgccgaaacgtcttcctacaaaaaccgaaaacgaaataaaaaataaataaaacgacgacgacgcgcgactcaaactacgcaaaatcctaccttaactaaaacgaaaaaaaacgacaaaaacgaacgctacgacttcgaaacccgaaaaacgcaaaactaataactaaaaaaatatccacgtacgcaaaaacctacgtatactatttaaaaacgaatatacgtatatcacgtaaacgcgaaaatatacctatatctacgtaaaaaatacaaaacaaaataaaataatatataaaaacgaatcacgcgaacacgaacgtatacctatcaaaaaaaaaaatatactcaaatcttaacgttacaaaactatacaaaaaaaactatatcacaa

SEQ ID NO: 3633 - DNA, 678 bp, Artificial Sequence
  chemically treated genomic DNA (Homo sapiens) CpG-island No: 3633
ttcgttttcgttttcgtttagtttcgtttttttttttttaggtttcgttcgcgtagtcggttcggttttttttcgttattagggggcggcggcgttaagggcggttttttgggtcgaagtcggcgacgttttaggtagttgcggcggtttttttgtggttagtggtagcggcgttttagtcggcggtcgtgaggggcgggtttttagtggtgcggtcggtaggtagcgatggcggtcgtacggggtttgcgggtgtcggtgaaggcggaggtttcggcggggtcggttttggggttttcgttttttgaggcggagttcggtgttgatcgtggcgagtcggagtttatggaggtggaggagggcgagttggaaatcgtgtttgtgcggcgttcgtttaaggaattgatttcggtacgggcgggggtcggggggtaaggaagaggtcgcggggttagtgtttagcgtcggagggggtcggaaggggcggtggtcggagttttagtcggggaagttaagggagcgggagaggagggagttagcgttttgggaacgggaacgtcgggttggaggagggacgcggagcgggagaaaggacgtcggggcgtcggaaatgggtgttgagggggttggggggtggtggcggagagttgggagggagttgaggattttttttcgttg

SEQ ID NO: 3634 - DNA, 678 bp, Artificial Sequence
  chemically treated genomic DNA (Homo sapiens) CpG-island No: 3634
caacgaaaaaaaatcctcaactccctcccaactctccgccaccaccccccaaccccctcaacacccatttccgacgccccgacgtcctttctcccgctccgcgtccctcctccaacccgacgttcccgttcccaaaacgctaactccctcctctcccgctcccttaacttccccgactaaaactccgaccaccgccccttccgaccccctccgacgctaaacactaaccccgcgacctcttccttaccccccgacccccgcccgtaccgaaatcaattccttaaacgaacgccgcacaaacacgatttccaactcgccctcctccacctccataaactccgactcgccacgatcaacaccgaactccgcctcaaaaaacgaaaaccccaaaaccgaccccgccgaaacctccgccttcaccgacacccgcaaaccccgtacgaccgccatcgctacctaccgaccgcaccactaaaaacccgcccctcacgaccgccgactaaaacgccgctaccactaaccacaaaaaaaccgccgcaactacctaaaacgtcgccgacttcgacccaaaaaaccgcccttaacgccgccgccccctaataacgaaaaaaaaccgaaccgactacgcgaacgaaacctaaaaaaaaaaaaacgaaactaaacgaaaacgaaaacgaa

SEQ ID NO: 3635 - DNA, 678 bp, Artificial Sequence
  chemically treated genomic DNA (Homo sapiens) CpG-island No: 3635
tagcggaggggggtttttaatttttttttagtttttcgttattattttttagtttttttaatatttattttcggcgtttcggcgttttttttttcgtttcgcgttttttttttagttcggcgttttcgtttttaggacgttggtttttttttttttcgtttttttgattttttcggttggggtttcggttatcgtttttttcggtttttttcggcgttagatattagtttcgcgattttttttttatttttcgattttcgttcgtatcgggattagttttttgagcgagcgtcgtataggtacgatttttagttcgtttttttttatttttatgggtttcggttcgttacggttaatatcggatttcgttttaggggacgggagttttagggtcggtttcgtcggggttttcgtttttatcgatattcgtaggtttcgtacggtcgttatcgttgtttgtcggtcgtattattgagagttcgttttttacggtcgtcggttagagcgtcgttgttattggttatagaggagtcgtcgtagttatttagagcgtcgtcggtttcggtttagaaggtcgtttttagcgtcgtcgttttttggtggcgggagaaaatcgggtcggttgcgcgggcgggatttggggaggagaaggcgggattgagcggggacgggggcggg

SEQ ID NO: 3636 - DNA, 678 bp, Artificial Sequence
  chemically treated genomic DNA (Homo sapiens) CpG-island No: 3636
cccgcccccgtccccgctcaatcccgccttctcctccccaaatcccgcccgcgcaaccgacccgattttctcccgccaccaaaaaacgacgacgctaaaaacgaccttctaaaccgaaaccgacgacgctctaaataactacgacgactcctctataaccaataacaacgacgctctaaccgacgaccgtaaaaaacgaactctcaataatacgaccgacaaacaacgataacgaccgtacgaaacctacgaatatcgataaaaacgaaaaccccgacgaaaccgaccctaaaactcccgtcccctaaaacgaaatccgatattaaccgtaacgaaccgaaacccataaaaataaaaaaaaacgaactaaaaatcgtacctatacgacgctcgctcaaaaaactaatcccgatacgaacgaaaatcgaaaaataaaaaaaaaatcgcgaaactaatatctaacgccgaaaaaaaccgaaaaaaacgataaccgaaaccccaaccgaaaaaatcaaaaaaacgaaaaaaaaaaaaaccaacgtcctaaaaacgaaaacgccgaactaaaaaaaaaacgcgaaacgaaaaaaaaaacgccgaaacgccgaaaataaatattaaaaaaactaaaaaataataacgaaaaactaaaaaaaaattaaaaacccccctccgcta

SEQ ID NO: 3637 - DNA, 1441 bp, Artificial Sequence
  chemically treated genomic DNA (Homo sapiens) CpG-island No: 3637
ttgcggcgcggtttttcggagttttttcgggttggaggcggtttagataaaggcggcggcggggtcggagcgcgtaggggaggagcgcgggttgcgtttaattttttttcgcggcggttgtaggataaaggcgtaaaggtagcggtcgaggtcggagtttacgcggggcgtgttcggtgcggggcgttcggcgcgggttgggttgggttcgggcgattttttttttcggggcggacggtgcggggatttttaggatagtaattttcgacgagggttatttattttggcgatttacgatttcggcgacgtgttcggagttgggtatcgggacgtattcggttatgttgacgttttttttgcggttgtcgattacgtttatttggtcggttagtagcgtcgggggttttagggtcgcggggtggggcgcgaagttcgcgaatacgtcggggggcgacggtcggggcggcggcggcggcgggggattcgcgttggggtttagtagcggtagcgattcgggggttacggcgggggttagggtcgggggcgcgtcggttttaggttcgtcggggggtataggtttcggagtcgtttcgtcgttcgcgtttttcgtcgtcgttgcgtcgttttcggtcgtttttttttcgttcgtgtcgttagcgttttttagttcgagcgtcgatagttggtttagcgttaggcggagcgcggcggtcgcgtcgtcgggttcgggcggcggtcggggcgcgggcgcggttttttgggcgttttcgggcgggggcgtaggttcgggttcggggttttttttcgtcgtttttacgtcgtcgtcgtcgtcgttttcgttttcgtcgtcgtcgggttggtcgagcgagttgggtatggcgggagttagcgttggggttcgcgtttttgtcgttcgcgtcgtcgtcgtcgttcgcgtcgtttttcgtttttgcgagttgggtcgtcggtcgtttgtatttagcggcgggggcgggtacggggggtcgggcgggcggggcggcggcggcgcggggttgttcggggtcgggtcgggtcgggtcgggcggcggtagcgattttggttgcggttcggcggcggcggcgacggcggcggcggtttttcggcggtcgaggcggcggcggcggcgcgggacgttttttttttttcgtcgtttttcgcggtttcgtttcggtttcgttttcgcgacgttacgtcgcggtttaataatgggcggtttttagggcgtaggcgcgcggggcggggtcggggcggggtcggcgtcgggtacgtggtttaggtttcgttttcgttcggcgttcgggcgggaattcgggcgtattcgtacgtgcgggcgttgttgtaggtgtgtgcggtttagtttttgtttggatagcgttttttttttaagtttgagagtttttgtttcgcgcgttttagggt

SEQ ID NO: 3638 - DNA, 1441 bp, Artificial Sequence
  chemically treated genomic DNA (Homo sapiens) CpG-island No: 3638
accctaaaacgcgcgaaacaaaaactctcaaacttaaaaaaaaaacgctatccaaacaaaaactaaaccgcacacacctacaacaacgcccgcacgtacgaatacgcccgaattcccgcccgaacgccgaacgaaaacgaaacctaaaccacgtacccgacgccgaccccgccccgaccccgccccgcgcgcctacgccctaaaaaccgcccattattaaaccgcgacgtaacgtcgcgaaaacgaaaccgaaacgaaaccgcgaaaaacgacgaaaaaaaaaaaacgtcccgcgccgccgccgccgcctcgaccgccgaaaaaccgccgccgccgtcgccgccgccgccgaaccgcaaccaaaatcgctaccgccgcccgacccgacccgacccgaccccgaacaaccccgcgccgccgccgccccgcccgcccgaccccccgtacccgcccccgccgctaaatacaaacgaccgacgacccaactcgcaaaaacgaaaaacgacgcgaacgacgacgacgacgcgaacgacaaaaacgcgaaccccaacgctaactcccgccatacccaactcgctcgaccaacccgacgacgacgaaaacgaaaacgacgacgacgacgacgtaaaaacgacgaaaaaaaaccccgaacccgaacctacgcccccgcccgaaaacgcccaaaaaaccgcgcccgcgccccgaccgccgcccgaacccgacgacgcgaccgccgcgctccgcctaacgctaaaccaactatcgacgctcgaactaaaaaacgctaacgacacgaacgaaaaaaaaacgaccgaaaacgacgcaacgacgacgaaaaacgcgaacgacgaaacgactccgaaacctataccccccgacgaacctaaaaccgacgcgcccccgaccctaacccccgccgtaacccccgaatcgctaccgctactaaaccccaacgcgaatcccccgccgccgccgccgccccgaccgtcgccccccgacgtattcgcgaacttcgcgccccaccccgcgaccctaaaacccccgacgctactaaccgaccaaataaacgtaatcgacaaccgcaaaaaaaacgtcaacataaccgaatacgtcccgatacccaactccgaacacgtcgccgaaatcgtaaatcgccaaaataaataaccctcgtcgaaaattactatcctaaaaatccccgcaccgtccgccccgaaaaaaaaaatcgcccgaacccaacccaacccgcgccgaacgccccgcaccgaacacgccccgcgtaaactccgacctcgaccgctacctttacgcctttatcctacaaccgccgcgaaaaaaaattaaacgcaacccgcgctcctcccctacgcgctccgaccccgccgccgcctttatctaaaccgcctccaacccgaaaaaactccgaaaaaccgcgccgcaa

SEQ ID NO: 3639 - DNA, 1441 bp, Artificial Sequence
  chemically treated genomic DNA (Homo sapiens) CpG-island No: 3639
gttttggggcgcgcgaggtagggatttttaggtttggggagggagcgttgtttaggtaggggttgagtcgtatatatttgtagtagcgttcgtacgtgcggatgcgttcgggttttcgttcgagcgtcgggcggaggcggggtttggattacgtgttcggcgtcggtttcgtttcggtttcgtttcgcgcgtttgcgttttgggggtcgtttattgttgggtcgcggcgtgacgtcgcgggggcggggtcggggcggggtcgcgggaggcggcgggagggaaggagcgtttcgcgtcgtcgtcgtcgtttcggtcgtcgaggagtcgtcgtcgtcgtcgtcgtcgtcgtcgagtcgtagttagagtcgttgtcgtcgttcggttcggttcggttcggtttcgagtagtttcgcgtcgtcgtcgtttcgttcgttcggtttttcgtgttcgttttcgtcgttggatgtaggcggtcggcggtttagttcgtagaggcggagggcggcgcgggcggcggcggcggcgcgggcggtaggagcgcgggttttagcgttagttttcgttatgtttagttcgttcggttagttcgacggcggcgggggcgggggcggcggcggcggcggcgtgggggcggcgggggaggatttcggattcggatttgcgttttcgttcgagggcgtttaggaggtcgcgttcgcgtttcggtcgtcgttcgaattcgacgacgcggtcgtcgcgtttcgtttggcgttggattagttgtcggcgttcgggttggggggcgttggcgatacggacgaggagggggcggtcggggacggcgtagcggcggcggggggcgcggacggcggggcggtttcggagtttgtgtttttcgacggatttgaggtcggcgcgttttcgattttggttttcgtcgtggttttcgggtcgttgtcgttgttggattttaacgcgagtttttcgtcgtcgtcgtcgtttcggtcgtcgtttttcgacgtgttcgcgggtttcgcgttttatttcgcggttttggggttttcgacgttgttggtcgattagatgagcgtgatcggtagtcgtaagaaaagcgttaatatgatcgagtgcgtttcggtgtttagtttcgagtacgtcgtcgagatcgtgggtcgttagggtgagtggttttcgtcgggggttgttgttttgggggttttcgtatcgttcgtttcggggaagggggtcgttcgagtttagtttagttcgcgtcggacgtttcgtatcggatacgtttcgcgtgggtttcggtttcggtcgttgtttttgcgtttttgttttgtagtcgtcgcgggagaaagttgggcgtagttcgcgttttttttttgcgcgtttcggtttcgtcgtcgtttttgtttgggtcgtttttagttcggaaaggtttcggggagtcgcgtcgtag

SEQ ID NO: 3640 - DNA, 1441 bp, Artificial Sequence
  chemically treated genomic DNA (Homo sapiens) CpG-island No: 3640
ctacgacgcgactccccgaaacctttccgaactaaaaacgacccaaacaaaaacgacgacgaaaccgaaacgcgcaaaaaaaaaacgcgaactacgcccaactttctcccgcgacgactacaaaacaaaaacgcaaaaacaacgaccgaaaccgaaacccacgcgaaacgtatccgatacgaaacgtccgacgcgaactaaactaaactcgaacgacccccttccccgaaacgaacgatacgaaaacccccaaaacaacaacccccgacgaaaaccactcaccctaacgacccacgatctcgacgacgtactcgaaactaaacaccgaaacgcactcgatcatattaacgcttttcttacgactaccgatcacgctcatctaatcgaccaacaacgtcgaaaaccccaaaaccgcgaaataaaacgcgaaacccgcgaacacgtcgaaaaacgacgaccgaaacgacgacgacgacgaaaaactcgcgttaaaatccaacaacgacaacgacccgaaaaccacgacgaaaaccaaaatcgaaaacgcgccgacctcaaatccgtcgaaaaacacaaactccgaaaccgccccgccgtccgcgccccccgccgccgctacgccgtccccgaccgccccctcctcgtccgtatcgccaacgccccccaacccgaacgccgacaactaatccaacgccaaacgaaacgcgacgaccgcgtcgtcgaattcgaacgacgaccgaaacgcgaacgcgacctcctaaacgccctcgaacgaaaacgcaaatccgaatccgaaatcctcccccgccgcccccacgccgccgccgccgccgcccccgcccccgccgccgtcgaactaaccgaacgaactaaacataacgaaaactaacgctaaaacccgcgctcctaccgcccgcgccgccgccgccgcccgcgccgccctccgcctctacgaactaaaccgccgaccgcctacatccaacgacgaaaacgaacacgaaaaaccgaacgaacgaaacgacgacgacgcgaaactactcgaaaccgaaccgaaccgaaccgaacgacgacaacgactctaactacgactcgacgacgacgacgacgacgacgacgactcctcgacgaccgaaacgacgacgacgacgcgaaacgctccttccctcccgccgcctcccgcgaccccgccccgaccccgcccccgcgacgtcacgccgcgacccaacaataaacgacccccaaaacgcaaacgcgcgaaacgaaaccgaaacgaaaccgacgccgaacacgtaatccaaaccccgcctccgcccgacgctcgaacgaaaacccgaacgcatccgcacgtacgaacgctactacaaatatatacgactcaacccctacctaaacaacgctccctccccaaacctaaaaatccctacctcgcgcgccccaaaac

SEQ ID NO: 3641 - DNA, 814 bp, Artificial Sequence
  chemically treated genomic DNA (Homo sapiens) CpG-island No: 3641
cgttgtgcgttgagtttatttggcgcggttggtttatcgttttttgcgggtcgtttttgattttgttgttggggtggttggtaattttggttatcggttgtttgaagatggacgtcgtttggcgtacgggtagcgtcgtgtttaggtcgggtttgttttgcgggaggaaggatatgtagttcggtttgggggcgtttcggcggcgcggagttttagggggtgcggggttcgggtgattttttgttttgtcggcgtttttcgtgtttttcgcgttcgttaggatttttacggttcggggaggtcgttttcgtagggtcggttcggtcggttttggaacgttcgtcgcgggtcgcgttttcgttatgcgttttgcgttttgtattttgtggtttgcgtttttcgttttgtgtttttcgttcgttgtgattttttgcgtttaggacgtcgggttgtgtcgtttgtagtttacgttatggtcgcgttttcgtttagaacgtttcgcgtcgacgttatttgcgtgacgttattatttattttgatttggttggaggagtcgtagcgtacgcgttggcggtttttgtttattttgtttattagtattttgttcgtgcggaagtcgaaggtgtttaggtttatggagtcgtttaggtagcgcgttagttgcggtttgttgcggaattttttttcgttcgggttgcggggaggcgggacggtcggcgtttcgggcggattttagattttaaatttaggtttcggtcgtagatttaaatttagttttagttttagttttaggtcgcgattttagttttagatt

SEQ ID NO: 3642 - DNA, 814 bp, Artificial Sequence
  chemically treated genomic DNA (Homo sapiens) CpG-island No: 3642
aatctaaaactaaaatcgcgacctaaaactaaaactaaaactaaatttaaatctacgaccgaaacctaaatttaaaatctaaaatccgcccgaaacgccgaccgtcccgcctccccgcaacccgaacgaaaaaaaattccgcaacaaaccgcaactaacgcgctacctaaacgactccataaacctaaacaccttcgacttccgcacgaacaaaatactaataaacaaaataaacaaaaaccgccaacgcgtacgctacgactcctccaaccaaatcaaaataaataataacgtcacgcaaataacgtcgacgcgaaacgttctaaacgaaaacgcgaccataacgtaaactacaaacgacacaacccgacgtcctaaacgcaaaaaatcacaacgaacgaaaaacacaaaacgaaaaacgcaaaccacaaaatacaaaacgcaaaacgcataacgaaaacgcgacccgcgacgaacgttccaaaaccgaccgaaccgaccctacgaaaacgacctccccgaaccgtaaaaatcctaacgaacgcgaaaaacacgaaaaacgccgacaaaacaaaaaatcacccgaaccccgcaccccctaaaactccgcgccgccgaaacgcccccaaaccgaactacatatccttcctcccgcaaaacaaacccgacctaaacacgacgctacccgtacgccaaacgacgtccatcttcaaacaaccgataaccaaaattaccaaccaccccaacaacaaaatcaaaaacgacccgcaaaaaacgataaaccaaccgcgccaaataaactcaacgcacaacg

SEQ ID NO: 3643 - DNA, 814 bp, Artificial Sequence
  chemically treated genomic DNA (Homo sapiens) CpG-island No: 3643
ggtttggggttggggtcgcgatttgaagttggggttgggattgggtttgggtttgcggtcgaggtttgggtttggggtttggggttcgttcggggcgtcgatcgtttcgttttttcgtagttcgagcgggaagaagtttcgtagtaagtcgtagttggcgcgttatttgggcggttttatggatttgagtattttcgattttcgtacgggtaagatgttgatgagtaagatgaataagagtcgttagcgcgtgcgttacgatttttttaattaggttaaggtgagtggtggcgttacgtaggtgacgtcggcgcggggcgttttaggcggggacgcggttatgacgtgagttgtaggcgatatagttcggcgttttgagcgtaggaggttatagcgggcggagggtatagagcggaaggcgtaggttatagggtgtagagcgtaaggcgtatggcgaggacgcggttcgcggcgggcgttttagagtcggtcggatcgattttgcgggagcggttttttcggatcgtgggggttttggcgggcgcgggggatacgaggggcgtcggtaaagtagggggttattcgggtttcgtattttttgaggtttcgcgtcgtcggggcgtttttaggtcggattgtatattttttttttcgtagggtaagttcgatttgaatacggcgttgttcgtgcgttagacggcgtttatttttaagtagtcggtgattaagattattaattattttagtaataaggttaagagcgattcgtagaaggcggtggattagtcgcgttaggtgagtttaacgtatagcg

SEQ ID NO: 3644 - DNA, 814 bp, Artificial Sequence
  chemically treated genomic DNA (Homo sapiens) CpG-island No: 3644
cgctatacgttaaactcacctaacgcgactaatccaccgccttctacgaatcgctcttaaccttattactaaaataattaataatcttaatcaccgactacttaaaaataaacgccgtctaacgcacgaacaacgccgtattcaaatcgaacttaccctacgaaaaaaaaaatatacaatccgacctaaaaacgccccgacgacgcgaaacctcaaaaaatacgaaacccgaataaccccctactttaccgacgcccctcgtatcccccgcgcccgccaaaacccccacgatccgaaaaaaccgctcccgcaaaatcgatccgaccgactctaaaacgcccgccgcgaaccgcgtcctcgccatacgccttacgctctacaccctataacctacgccttccgctctataccctccgcccgctataacctcctacgctcaaaacgccgaactatatcgcctacaactcacgtcataaccgcgtccccgcctaaaacgccccgcgccgacgtcacctacgtaacgccaccactcaccttaacctaattaaaaaaatcgtaacgcacgcgctaacgactcttattcatcttactcatcaacatcttacccgtacgaaaatcgaaaatactcaaatccataaaaccgcccaaataacgcgccaactacgacttactacgaaacttcttcccgctcgaactacgaaaaaacgaaacgatcgacgccccgaacgaaccccaaaccccaaacccaaacctcgaccgcaaacccaaacccaatcccaaccccaacttcaaatcgcgaccccaaccccaaacc

SEQ ID NO: 3645 - DNA, 907 bp, Artificial Sequence
  chemically treated genomic DNA (Homo sapiens) CpG-island No: 3645
gcgcgtacgaataaaggtcgtagtcgtcgttcggtagttagtttttgaacggtcggtcgaaagttatgcggtttaataagcggcgtacgcgtattgggttttcgcgcgtcgggcgtatacgtacgtaagacgtacgtacgtacgtacgacgtacgcgcggggtttaggtcgcggttcggggtaggggcgtcgaggtcgtcgtagaggtcgttgggaggagttcgttgaggttttgcgcggtcggcgcgtttatttatttatagtaaaagatatttttgtggtcggtcgatagtttcgattttttgggtatttttttttttttttagttttgcgggagcgtcgggtatttttatttttttcgttttattgcgttcggtttttcggttcgtcgtcgggttcgtcgtcgtcgttcggatttttattcgtcgtcgtcgttttagttgttttcgttgtcgttgtcgtcgtcgttatttgtcgcggttgtttcggttcgcgggttttcgtttttcgtttttagtcgggcgcgcgtcggttttgtcgttttttcggtttttttttcgcgttcgttagttttcgttcggggggttcgtttcgtttattcgttcgcgcggggtttcgcgttgcgtagtcgcggcgttatgttttcgtttttttacggtttcgttaattagcgcgttgggagggggcggggttttaagtggcgtgcgcgtttgcgcgttgtgttttgcgagttgttagtgtttagtagttgtgttcggagttcgcgcggttttttttattgtgttttgtttttgtcggtcgtttggtgcgcgtgcgcggggatatgttttcggattagtggggttttttttttcgatttttttttagtttaagttttggggattttggtttagtgattggatttcga

SEQ ID NO: 3646 - DNA, 907 bp, Artificial Sequence
  chemically treated genomic DNA (Homo sapiens) CpG-island No: 3646
tcgaaatccaatcactaaaccaaaatccccaaaacttaaactaaaaaaaaatcgaaaaaaaaaaccccactaatccgaaaacatatccccgcgcacgcgcaccaaacgaccgacaaaaacaaaacacaataaaaaaaaccgcgcgaactccgaacacaactactaaacactaacaactcgcaaaacacaacgcgcaaacgcgcacgccacttaaaaccccgccccctcccaacgcgctaattaacgaaaccgtaaaaaaacgaaaacataacgccgcgactacgcaacgcgaaaccccgcgcgaacgaataaacgaaacgaaccccccgaacgaaaactaacgaacgcgaaaaaaaaaccgaaaaaacgacaaaaccgacgcgcgcccgactaaaaacgaaaaacgaaaacccgcgaaccgaaacaaccgcgacaaataacgacgacgacaacgacaacgaaaacaactaaaacgacgacgacgaataaaaatccgaacgacgacgacgaacccgacgacgaaccgaaaaaccgaacgcaataaaacgaaaaaaataaaaatacccgacgctcccgcaaaactaaaaaaaaaaaaaaatacccaaaaaatcgaaactatcgaccgaccacaaaaatatcttttactataaataaataaacgcgccgaccgcgcaaaacctcaacgaactcctcccaacgacctctacgacgacctcgacgcccctaccccgaaccgcgacctaaaccccgcgcgtacgtcgtacgtacgtacgtacgtcttacgtacgtatacgcccgacgcgcgaaaacccaatacgcgtacgccgcttattaaaccgcataactttcgaccgaccgttcaaaaactaactaccgaacgacgactacgacctttattcgtacgcgc

SEQ ID NO: 3647 - DNA, 907 bp, Artificial Sequence
  chemically treated genomic DNA (Homo sapiens) CpG-island No: 3647
tcgaggtttagttattgggttagagtttttaagatttgggttggagaaaggtcggaggaaaggattttattagttcgaaagtatgttttcgcgtacgcgtattaggcggtcggtagagatagggtatagtaaaaggagtcgcgcggatttcgggtatagttgttgggtattggtagttcgtaaggtatagcgcgtaggcgcgtacgttatttaaggtttcgtttttttttagcgcgttgattggcggggtcgtagaggggcgggggtatggcgtcgcggttgcgtagcgcggggtttcgcgcgggcgggtgggcggagcgggtttttcgagcgggggttggcgagcgcggggagggggtcgaaagggcggtaaagtcggcgcgcgttcggttgggggcggagggcgggggttcgcgggtcggaatagtcgcggtaagtggcggcggcggtagcggtagcggaggtagttgaggcggcggcggcgagtgggggttcgggcggcggcggcgggttcggcggcgggtcgaggagtcgggcgtaatggagcggaagaggtgggagtgttcggcgttttcgtagggttgggagagggaagaagtgtttagaaggtcggggttgtcggtcggttatagggatgttttttattataggtgaatgagcgcgtcggtcgcgtagggttttaacgggttttttttagcggtttttgcggcggtttcggcgtttttgtttcgggtcgcggtttgggtttcgcgcgtgcgtcgtgcgtgcgtgcgtgcgttttgcgtgcgtgtgcgttcggcgcgcggaggtttagtgcgcgtgcgtcgtttgttgggtcgtatggttttcggtcggtcgtttagggattggttgtcggacggcgattgcggtttttgttcgtgcgcgt

SEQ ID NO: 3648 - DNA, 907 bp, Artificial Sequence
  chemically treated genomic DNA (Homo sapiens) CpG-island No: 3648
acgcgcacgaacaaaaaccgcaatcgccgtccgacaaccaatccctaaacgaccgaccgaaaaccatacgacccaacaaacgacgcacgcgcactaaacctccgcgcgccgaacgcacacgcacgcaaaacgcacgcacgcacgcacgacgcacgcgcgaaacccaaaccgcgacccgaaacaaaaacgccgaaaccgccgcaaaaaccgctaaaaaaaacccgttaaaaccctacgcgaccgacgcgctcattcacctataataaaaaacatccctataaccgaccgacaaccccgaccttctaaacacttcttccctctcccaaccctacgaaaacgccgaacactcccacctcttccgctccattacgcccgactcctcgacccgccgccgaacccgccgccgccgcccgaacccccactcgccgccgccgcctcaactacctccgctaccgctaccgccgccgccacttaccgcgactattccgacccgcgaacccccgccctccgcccccaaccgaacgcgcgccgactttaccgccctttcgaccccctccccgcgctcgccaacccccgctcgaaaaacccgctccgcccacccgcccgcgcgaaaccccgcgctacgcaaccgcgacgccatacccccgcccctctacgaccccgccaatcaacgcgctaaaaaaaaacgaaaccttaaataacgtacgcgcctacgcgctataccttacgaactaccaatacccaacaactatacccgaaatccgcgcgactccttttactataccctatctctaccgaccgcctaatacgcgtacgcgaaaacatactttcgaactaataaaatcctttcctccgacctttctccaacccaaatcttaaaaactctaacccaataactaaacctcga

SEQ ID NO: 3649 - DNA, 953 bp, Artificial Sequence
  chemically treated genomic DNA (Homo sapiens) CpG-island No: 3649
ttgtttcggcgggttggggggggggggcgttaagtcgggagttgcggcgggggggttcggggttcggaagttggggtggatcgggaattggagggggggtgttcgggggtcggcggtaggaggggaggggggtcgcgtcgggttgggagttggagagggaagatagggtcggggagttggggggggcgtcgggtcggaggtatcgggtttgggggttggggggcgcggggtcgggagtcgggggtcgggggcgtagggttcggattcggggtgggggcgtcggtcggacgggtttcgtttatcgaatgtttgttttgtggaaatattatgttaatcgcggcggggggcgcgggttgcgtttcggttgtgcgtttcggttcgggttgttgggggcgtcgggcggtcgcgtttttgtttcggcgtcgatcggtagttttcggggtcgtcgtcgtttttcgcgttcggtttcgttcgttttttgcgtttttttttcgcgcgttcggtttcggcgcgtttcgggtttcgttttttgcgcgttcggcgttttttttcgttttttttcgtcgttcgttttttcgtttttcggttttatcgttattgtttaatggcggcgacgtcggtagtggtcgcggttcggttgttgcggaggtttcggttttatttgtcgtcgttcgtgtttcgtgcgcgtcgtcgaggggggggacgcgcgcgttcggggaggtttgcggatttttacgtcggttcgttttttcgtggttcgttcgtcgcggtgattttgggttcggttcgttttcgtttcgggtagcggttttcgttatttttttttattcggtagtcggtcgggtttcggtttttttatttgttaaagaaaagggattcggttgttcgcgtcgaagtcgtcggttttgttgtggtacgatttggacgcgtgttacggacgtgttttgtgattt

SEQ ID NO: 3650 - DNA, 953 bp, Artificial Sequence
  chemically treated genomic DNA (Homo sapiens) CpG-island No: 3650
aaatcacaaaacacgtccgtaacacgcgtccaaatcgtaccacaacaaaaccgacgacttcgacgcgaacaaccgaatcccttttctttaacaaataaaaaaaccgaaacccgaccgactaccgaataaaaaaaaataacgaaaaccgctacccgaaacgaaaacgaaccgaacccaaaatcaccgcgacgaacgaaccacgaaaaaacgaaccgacgtaaaaatccgcaaacctccccgaacgcgcgcgtcccccccctcgacgacgcgcacgaaacacgaacgacgacaaataaaaccgaaacctccgcaacaaccgaaccgcgaccactaccgacgtcgccgccattaaacaataacgataaaaccgaaaaacgaaaaaacgaacgacgaaaaaaaacgaaaaaaaacgccgaacgcgcaaaaaacgaaacccgaaacgcgccgaaaccgaacgcgcgaaaaaaaaacgcaaaaaacgaacgaaaccgaacgcgaaaaacgacgacgaccccgaaaactaccgatcgacgccgaaacaaaaacgcgaccgcccgacgcccccaacaacccgaaccgaaacgcacaaccgaaacgcaacccgcgccccccgccgcgattaacataatatttccacaaaacaaacattcgataaacgaaacccgtccgaccgacgcccccaccccgaatccgaaccctacgcccccgacccccgactcccgaccccgcgccccccaacccccaaacccgatacctccgacccgacgccccccccaactccccgaccctatcttccctctccaactcccaacccgacgcgacccccctcccctcctaccgccgacccccgaacaccccccctccaattcccgatccaccccaacttccgaaccccgaacccccccgccgcaactcccgacttaacgccccccccccccaacccgccgaaacaa

SEQ ID NO: 3651 - DNA, 953 bp, Artificial Sequence
  chemically treated genomic DNA (Homo sapiens) CpG-island No: 3651
aggttatagagtacgttcgtggtacgcgtttaggtcgtgttatagtagggtcggcggtttcgacgcgggtagtcgggttttttttttttgatagatggggaaatcgaggttcggtcggttgtcgggtaggagagggtggcgggggtcgttgttcggggcgggggcgggtcgggtttaaggttatcgcggcgggcgggttacggggaggcgggtcggcgtggggattcgtaggttttttcgggcgcgcgcgttttttttttcggcggcgcgtacggggtacgggcggcggtaggtggagtcgaagttttcgtagtagtcgagtcgcggttattgtcggcgtcgtcgttattagataatagcggtggggtcggggagcggggaggcgggcggcggggaggggcggggaggggcgtcgggcgcgtaggaagcggggttcggggcgcgtcggggtcgggcgcgcggggagggggcgtaggaagcgggcgaggtcgggcgcgggaggcggcggcggtttcgggagttgtcgatcggcgtcgggataaaggcgcggtcgttcggcgtttttagtagttcgagtcggggcgtatagtcggggcgtagttcgcgtttttcgtcgcgattgatatgatgtttttataaagtaggtattcggtaagcggggttcgttcggtcggcgtttttatttcggattcgggttttacgttttcgattttcggttttcggtttcgcgttttttaatttttaggttcggtgttttcggttcggcgttttttttaatttttcggttttgttttttttttttagtttttagttcggcgcgatttttttttttttttgtcgtcggttttcggatattttttttttagttttcgatttattttagttttcgggtttcgagttttttcgtcgtagttttcggtttggcgttttttttttttaattcgtcgggatag

SEQ ID NO: 3652 - DNA, 953 bp, Artificial Sequence
  chemically treated genomic DNA (Homo sapiens) CpG-island No: 3652
ctatcccgacgaattaaaaaaaaaaaacgccaaaccgaaaactacgacgaaaaaactcgaaacccgaaaactaaaataaatcgaaaactaaaaaaaaaatatccgaaaaccgacgacaaaaaaaaaaaaaaatcgcgccgaactaaaaactaaaaaaaaaaaacaaaaccgaaaaattaaaaaaaacgccgaaccgaaaacaccgaacctaaaaattaaaaaacgcgaaaccgaaaaccgaaaatcgaaaacgtaaaacccgaatccgaaataaaaacgccgaccgaacgaaccccgcttaccgaatacctactttataaaaacatcatatcaatcgcgacgaaaaacgcgaactacgccccgactatacgccccgactcgaactactaaaaacgccgaacgaccgcgcctttatcccgacgccgatcgacaactcccgaaaccgccgccgcctcccgcgcccgacctcgcccgcttcctacgccccctccccgcgcgcccgaccccgacgcgccccgaaccccgcttcctacgcgcccgacgcccctccccgcccctccccgccgcccgcctccccgctccccgaccccaccgctattatctaataacgacgacgccgacaataaccgcgactcgactactacgaaaacttcgactccacctaccgccgcccgtaccccgtacgcgccgccgaaaaaaaaaacgcgcgcgcccgaaaaaacctacgaatccccacgccgacccgcctccccgtaacccgcccgccgcgataaccttaaacccgacccgcccccgccccgaacaacgacccccgccaccctctcctacccgacaaccgaccgaacctcgatttccccatctatcaaaaaaaaaaaacccgactacccgcgtcgaaaccgccgaccctactataacacgacctaaacgcgtaccacgaacgtactctataacct

SEQ ID NO: 3653 - DNA, 740 bp, Artificial Sequence
  chemically treated genomic DNA (Homo sapiens) CpG-island No: 3653
gggggttgttgtgtcgacgcggatttgttatatggttgcgcggagttaggaagaatgggtttttgtgtgtgcgatcgggacgtagcggcgcgggtcgtgttagtcgggcggagtcgggtgttcgacggcgtaggacgagcgggcgtaggacgagcgagcgtagcgggcgcgggcgtatcgtcggggcgcggggatttcgagggttagcggagtcgtgttgcgcgtagggatggacgttgggcgtttaaggttcgttttcgtggataggcgcgcggagggtagtaggatcgatgtatcgacggacgtatcgacggacgcgcggatagatgcgtcgatcgtaggttttttcgtcgtttcggggtcgtcgtgttcgtgtaggtcgcgagtagcggcggggtcggttttgcggttgtagtagttttattgtgaggtcggcgagataatgggcggttcgaggaggtatttgttcgtttgaaaggtttataaatcgtcgtcgcgtttagttgttttttcgttttttttcgcggattcgttagcgggaagcgcggtcgcggtcgggagggggaggttcggttcgatagtcgggtagggtcgtttgggttatcgtcgcgcgttttttttcgtttgggcgtagttgttcgtacgtttcgacgggagttgcgtttagttttttttttggagtcggcgttttaggttgttgttcggtcggtggttaaggttttagtattatcgtttttttt

SEQ ID NO: 3654 - DNA, 740 bp, Artificial Sequence
  chemically treated genomic DNA (Homo sapiens) CpG-island No: 3654
aaaaaaaacgataatactaaaaccttaaccaccgaccgaacaacaacctaaaacgccgactccaaaaaaaaaactaaacgcaactcccgtcgaaacgtacgaacaactacgcccaaacgaaaaaaaacgcgcgacgataacccaaacgaccctacccgactatcgaaccgaacctccccctcccgaccgcgaccgcgcttcccgctaacgaatccgcgaaaaaaaacgaaaaaacaactaaacgcgacgacgatttataaacctttcaaacgaacaaatacctcctcgaaccgcccattatctcgccgacctcacaataaaactactacaaccgcaaaaccgaccccgccgctactcgcgacctacacgaacacgacgaccccgaaacgacgaaaaaacctacgatcgacgcatctatccgcgcgtccgtcgatacgtccgtcgatacatcgatcctactaccctccgcgcgcctatccacgaaaacgaaccttaaacgcccaacgtccatccctacgcgcaacacgactccgctaaccctcgaaatccccgcgccccgacgatacgcccgcgcccgctacgctcgctcgtcctacgcccgctcgtcctacgccgtcgaacacccgactccgcccgactaacacgacccgcgccgctacgtcccgatcgcacacacaaaaacccattcttcctaactccgcgcaaccatataacaaatccgcgtcgacacaacaaccccc

SEQ ID NO: 3655 - DNA, 740 bp, Artificial Sequence
  chemically treated genomic DNA (Homo sapiens) CpG-island No: 3655
aggagggacggtggtgttggggttttggttatcggtcgggtagtagtttggagcgtcgattttagaggggaggttgggcgtagttttcgtcggggcgtgcgggtagttgcgtttaggcgggagggagcgcgcggcggtggtttaggcggttttgttcgattgtcggatcgagtttttttttttcggtcgcggtcgcgtttttcgttagcgggttcgcggggaggggcgggaaggtagttggacgcggcggcgatttatgggttttttaggcgagtaggtgttttttcgggtcgtttattgtttcgtcggttttataatggggttgttgtagtcgtagagtcggtttcgtcgttgttcgcggtttgtacgggtacgacggtttcgggacggcgggagagtttgcggtcggcgtatttgttcgcgcgttcgtcggtgcgttcgtcggtgtatcggttttgttgtttttcgcgcgtttgtttacgggaacgggttttgggcgtttagcgtttatttttgcgcgtagtacggtttcgttggttttcggggttttcgcgtttcgacggtgcgttcgcgttcgttgcgttcgttcgttttgcgttcgttcgttttgcgtcgtcgggtattcggtttcgttcggttggtacggttcgcgtcgttgcgtttcggtcgtatatataggggtttattttttttggtttcgcgtaattatatggtaaattcgcgtcgatatagtagttttt

SEQ ID NO: 3656 - DNA, 740 bp, Artificial Sequence
  chemically treated genomic DNA (Homo sapiens) CpG-island No: 3656
aaaaactactatatcgacgcgaatttaccatataattacgcgaaaccaaaaaaaataaacccctatatatacgaccgaaacgcaacgacgcgaaccgtaccaaccgaacgaaaccgaatacccgacgacgcaaaacgaacgaacgcaaaacgaacgaacgcaacgaacgcgaacgcaccgtcgaaacgcgaaaaccccgaaaaccaacgaaaccgtactacgcgcaaaaataaacgctaaacgcccaaaacccgttcccgtaaacaaacgcgcgaaaaacaacaaaaccgatacaccgacgaacgcaccgacgaacgcgcgaacaaatacgccgaccgcaaactctcccgccgtcccgaaaccgtcgtacccgtacaaaccgcgaacaacgacgaaaccgactctacgactacaacaaccccattataaaaccgacgaaacaataaacgacccgaaaaaacacctactcgcctaaaaaacccataaatcgccgccgcgtccaactaccttcccgcccctccccgcgaacccgctaacgaaaaacgcgaccgcgaccgaaaaaaaaaaactcgatccgacaatcgaacaaaaccgcctaaaccaccgccgcgcgctccctcccgcctaaacgcaactacccgcacgccccgacgaaaactacgcccaacctcccctctaaaatcgacgctccaaactactacccgaccgataaccaaaaccccaacaccaccgtccctcct

SEQ ID NO: 3657 - DNA, 2365 bp, Artificial Sequence
  chemically treated genomic DNA (Homo sapiens) CpG-island No: 3657
cgaggtttagcgtttttttaacgttcgttgtttcggtaggttttttcggggttttttgggttttaaattgcgaggagaggggcggttagtaaagtcggcggggattcggcgggtcggtttttcgcgtttttttaggtgcgttgtatttatttggtttatcgtagttttttgcgcggggtttgttttatcgagtttacgttaggggcggcgtttggagagggatacggcgcggggatatcgttcgacgattttttaggcgttgattttttgcgtttggcgaagaaatttgcgggcgatagcgcgcgcggtcggttagggcggggtcggttcggagattcgagagggggtcgggagagggcgcggggcgcgggtcggtcggggtgggggcgtcgttttcgttcgcgtcgaggttcgcggcgggttagttttgtttacgtcgtcgcgtaatgtgttgtgtaacgtatttttttttgtttcgcggttaagtttttcggggtcgtcgtcgcgtttaattttttttacgtcgtgtttacggcgttcggtcgcgttcggggaggggttttcgcggtcgggggcgaaaattgcgttttcggggggtcgcggtcgggatttagttttttatttcgttcgcgcgaagttgttggagggtataataacggggcggggaggggggtaagggcgtagtcgcgttttgagcgttgcgggttttttaatgttacgggaggaggcgggaatttagcgaggttttcgagggttggggggatcggtcggtcggataaagcggggtcgggtcgggtcggggcggggtcgtgcggggtttatcggagattagaggttcggatagttttttgatcgtcgcgtcgttggcgttggcggtcgcggtgtcggtcgcgggacgtttcgaaattttcgagtgtagttggttagcgagaggtttttggtcgcgttgtttttggttcgcgttttgttcggcgtttttttgaggcgtcgcgttcggggtcggggtcggggcgggggtcggggttcgggtcggggtcggggttggggtcggggtcgcgattggagtcggggtcggagtcggagtcggagtcggggtcggggtcggggttaggatcgcgatcgttatcggagtcgcgatcggagtcgcgatcggagtcggagtcggggtcggggttggagttaggatcgggattgggggcggggtggacgtcggggtcgggatcgggatattaggtagttgtttcggcgttttttcgaggtcgtcgagggatttagcggtcggttcgaggggcgggttgatagttatcgcgatcgcgacgggtcgcggcgttagtagtaggcggtagcgttttatttgtatcgtttcgcggtagaacgcgggtatcgagtcgttgtttatttcggtttattgtaggcgtttagggtttcgtagcggtatgttttgttggaagtcgtaattttagcggttttggttttcggcgtttagttcggttaggcgggtttgtagttcgcggtttagtttttcgtggtttatcggttcgaagaggttgcggtaggcgttggtgcgtattagtattgggaaggttttacgggcgataagacgttttatcgtggatgtgttgcggagggacgcgtcggatatggttcggggttgcgtaaacgcgggtagcgagagaggagaggatagcgagaagaaggggaaaggagaggaggagagggcggaggtcgggcgtaagggagatttcgcgtcgttcgattttgcgtgtgcgagggacgcggcggttatttggttgttcggtggtggatttttttgcgtcgggttcgtttgtttcgttcggacggtagtcgcgttttttcgatgtttgttggttagttcgttcgtttaggtttggtcggtatttttcgagtatagcgtatttggtttgtggaacgtttagttcgtttgcgttttttttatacgcgcgggttttattttcgtgcgcgcgggttcggtcgcgattagtataatgtagtatttttagttttaataatattacggcgattggcggtcgtttcgttgtttcgtttcgtcgcggttcggttttcgcgtatcgtttattggtcgcgcgtatatttatcgggggcggggcggggcgcgcggtcggggcgcgcggttgattggcggtcgcggggcgagcgcgttgtagtaggggaagggggcggtgagcggggcgggggcgggagttaaagggcgttgcgggcggtaacgtgatatcgcgacgtttcgttttttcgttttattttttttgtaatatttttttattttttcggttttcgtttttcgtcggtttttttgtttgtaggcgggggttttagtttagcgcgg

SEQ ID NO: 3658 - DNA, 2365 bp, Artificial Sequence
  chemically treated genomic DNA (Homo sapiens) CpG-island No: 3658
ccgcgctaaactaaaacccccgcctacaaacaaaaaaaccgacgaaaaacgaaaaccgaaaaaataaaaaaatattacaaaaaaaataaaacgaaaaaacgaaacgtcgcgatatcacgttaccgcccgcaacgccctttaactcccgcccccgccccgctcaccgcccccttcccctactacaacgcgctcgccccgcgaccgccaatcaaccgcgcgccccgaccgcgcgccccgccccgcccccgataaatatacgcgcgaccaataaacgatacgcgaaaaccgaaccgcgacgaaacgaaacaacgaaacgaccgccaatcgccgtaatattattaaaactaaaaatactacattatactaatcgcgaccgaacccgcgcgcacgaaaataaaacccgcgcgtataaaaaaaacgcaaacgaactaaacgttccacaaaccaaatacgctatactcgaaaaataccgaccaaacctaaacgaacgaactaaccaacaaacatcgaaaaaacgcgactaccgtccgaacgaaacaaacgaacccgacgcaaaaaaatccaccaccgaacaaccaaataaccgccgcgtccctcgcacacgcaaaatcgaacgacgcgaaatctcccttacgcccgacctccgccctctcctcctctcctttccccttcttctcgctatcctctcctctctcgctacccgcgtttacgcaaccccgaaccatatccgacgcgtccctccgcaacacatccacgataaaacgtcttatcgcccgtaaaaccttcccaatactaatacgcaccaacgcctaccgcaacctcttcgaaccgataaaccacgaaaaactaaaccgcgaactacaaacccgcctaaccgaactaaacgccgaaaaccaaaaccgctaaaattacgacttccaacaaaacataccgctacgaaaccctaaacgcctacaataaaccgaaataaacaacgactcgatacccgcgttctaccgcgaaacgatacaaataaaacgctaccgcctactactaacgccgcgacccgtcgcgatcgcgataactatcaacccgcccctcgaaccgaccgctaaatccctcgacgacctcgaaaaaacgccgaaacaactacctaatatcccgatcccgaccccgacgtccaccccgcccccaatcccgatcctaactccaaccccgaccccgactccgactccgatcgcgactccgatcgcgactccgataacgatcgcgatcctaaccccgaccccgaccccgactccgactccgactccgaccccgactccaatcgcgaccccgaccccaaccccgaccccgacccgaaccccgacccccgccccgaccccgaccccgaacgcgacgcctcaaaaaaacgccgaacaaaacgcgaaccaaaaacaacgcgaccaaaaacctctcgctaaccaactacactcgaaaatttcgaaacgtcccgcgaccgacaccgcgaccgccaacgccaacgacgcgacgatcaaaaaactatccgaacctctaatctccgataaaccccgcacgaccccgccccgacccgacccgaccccgctttatccgaccgaccgatccccccaaccctcgaaaacctcgctaaattcccgcctcctcccgtaacattaaaaaacccgcaacgctcaaaacgcgactacgcccttacccccctccccgccccgttattataccctccaacaacttcgcgcgaacgaaataaaaaactaaatcccgaccgcgaccccccgaaaacgcaattttcgcccccgaccgcgaaaacccctccccgaacgcgaccgaacgccgtaaacacgacgtaaaaaaaattaaacgcgacgacgaccccgaaaaacttaaccgcgaaacaaaaaaaaatacgttacacaacacattacgcgacgacgtaaacaaaactaacccgccgcgaacctcgacgcgaacgaaaacgacgcccccaccccgaccgacccgcgccccgcgccctctcccgaccccctctcgaatctccgaaccgaccccgccctaaccgaccgcgcgcgctatcgcccgcaaatttcttcgccaaacgcaaaaaatcaacgcctaaaaaatcgtcgaacgatatccccgcgccgtatccctctccaaacgccgcccctaacgtaaactcgataaaacaaaccccgcgcaaaaaactacgataaaccaaataaatacaacgcacctaaaaaaacgcgaaaaaccgacccgccgaatccccgccgactttactaaccgcccctctcctcgcaatttaaaacccaaaaaaccccgaaaaaacctaccgaaacaacgaacgttaaaaaaacgctaaacctcg

SEQ ID NO: 3659 - DNA, 2365 bp, Artificial Sequence
  chemically treated genomic DNA (Homo sapiens) CpG-island No: 3659
tcgcgttgggttgaggttttcgtttgtagataaaggagtcggcggggggcgggagtcgggggggtgggggagtgttgtaggggggatggggcgagggggcggggcgtcgcggtgttacgttatcgttcgtagcgttttttaattttcgttttcgtttcgtttatcgttttttttttttgttatagcgcgttcgtttcgcggtcgttaattagtcgcgcgtttcggtcgcgcgtttcgtttcgttttcggtgggtgtgcgcgcggttaatgggcggtgcgcgggggtcgggtcgcggcggggcggggtagcggggcggtcgttaatcgtcgtggtgttgttgaaattgaaaatattatattatgttaatcgcggtcgggttcgcgcgtacgggggtggggttcgcgcgtataaagggggcgtaggcgggttgggcgttttataggttaagtgcgttgtgttcgaggggtgtcggttaggtttgagcgagcgagttagttagtaggtatcgagggggcgcggttgtcgttcggacgagataggcgaattcgacgtagaagagtttattatcggatagttaggtagtcgtcgcgtttttcgtatacgtagagtcgggcggcgcggggttttttttgcgttcggttttcgttttttttttttttttttttttttttttttcgttgtttttttttttttcgttgttcgcgtttgcgtagtttcgggttatgttcgacgcgttttttcgtagtatatttacgatggagcgttttgtcgttcgtgggatttttttagtattagtgcgtattagcgtttgtcgtagttttttcgggtcggtggattacgaggagttgagtcgcgagttgtaggttcgtttggtcgagttgaacgtcgaggattagaatcgttgggattacgatttttagtaggatatgtcgttgcggggttttggacgtttgtagtggatcgaagtggatagcgattcggtgttcgcgttttatcgcgagacggtgtaggtggggcgttgtcgtttgttgttggcgtcgcggttcgtcgcggtcgcggtggttgttagttcgtttttcgagtcggtcgttgagtttttcgacggtttcgaggaggcgtcggagtagttgtttagtgtttcggtttcggtttcggcgtttatttcgtttttagtttcggttttggttttagtttcggtttcggtttcggtttcggtcgcggtttcggtcgcggtttcggtagcggtcgcggttttggtttcggtttcggtttcggtttcggtttcggtttcggtttcggttttagtcgcggtttcggttttagtttcggtttcggttcgggtttcggttttcgtttcggtttcggtttcggacgcggcgttttaagagagcgtcgagtagggcgcgaattaggggtagcgcggttaggagtttttcgttgattagttgtattcggggatttcgggacgtttcgcggtcggtatcgcggtcgttagcgttaacggcgcggcgattaagaagttgttcgggtttttgattttcggtgagtttcgtacggtttcgtttcggttcggttcggtttcgttttgttcggtcggtcggtttttttagttttcgggggtttcgttgggttttcgttttttttcgtggtattaaagggttcgtagcgtttagggcgcggttgcgtttttattttttttttcgtttcgttgttgtgttttttagtagtttcgcgcgggcggggtgggaggttgaatttcggtcgcgatttttcgggagcgtagttttcgttttcggtcgcgggagttttttttcgggcgcggtcgggcgtcgtgagtacggcgtggagggggttaagcgcggcggcggtttcggggggtttggtcgcgggataaggggaaatgcgttatatagtatattgcgcggcgacgtaaataaagttgattcgtcgcggatttcggcgcgggcggggacggcgtttttatttcggtcggttcgcgtttcgcgttttttttcggttttttttcgggttttcgggtcggtttcgttttgatcggtcgcgcgcgttgtcgttcgtagattttttcgttaagcgtaagagattagcgtttgagaagtcgtcgggcgatgttttcgcgtcgtgtttttttttaagcgtcgtttttggcgtgggttcggtggagtagatttcgcgtaagaggttgcggtgagttaagtgagtatagcgtatttgggggggcgcggagggtcgattcgtcgggttttcgtcggttttgttgatcgttttttttttcgtagtttagagtttaaagagtttcgagggaatttgtcggggtagcggacgttggaagggcgttgggtttcg

SEQ ID NO: 3660 - DNA, 2365 bp, Artificial Sequence
  chemically treated genomic DNA (Homo sapiens) CpG-island No: 3660
cgaaacccaacgcccttccaacgtccgctaccccgacaaattccctcgaaactctttaaactctaaactacgaaaaaaaaaacgatcaacaaaaccgacgaaaacccgacgaatcgaccctccgcgcccccccaaatacgctatactcacttaactcaccgcaacctcttacgcgaaatctactccaccgaacccacgccaaaaacgacgcttaaaaaaaaacacgacgcgaaaacatcgcccgacgacttctcaaacgctaatctcttacgcttaacgaaaaaatctacgaacgacaacgcgcgcgaccgatcaaaacgaaaccgacccgaaaacccgaaaaaaaaccgaaaaaaaacgcgaaacgcgaaccgaccgaaataaaaacgccgtccccgcccgcgccgaaatccgcgacgaatcaactttatttacgtcgccgcgcaatatactatataacgcatttccccttatcccgcgaccaaaccccccgaaaccgccgccgcgcttaaccccctccacgccgtactcacgacgcccgaccgcgcccgaaaaaaaactcccgcgaccgaaaacgaaaactacgctcccgaaaaatcgcgaccgaaattcaacctcccaccccgcccgcgcgaaactactaaaaaacacaacaacgaaacgaaaaaaaaaataaaaacgcaaccgcgccctaaacgctacgaaccctttaataccacgaaaaaaaacgaaaacccaacgaaacccccgaaaactaaaaaaaccgaccgaccgaacaaaacgaaaccgaaccgaaccgaaacgaaaccgtacgaaactcaccgaaaatcaaaaacccgaacaacttcttaatcgccgcgccgttaacgctaacgaccgcgataccgaccgcgaaacgtcccgaaatccccgaatacaactaatcaacgaaaaactcctaaccgcgctacccctaattcgcgccctactcgacgctctcttaaaacgccgcgtccgaaaccgaaaccgaaacgaaaaccgaaacccgaaccgaaaccgaaactaaaaccgaaaccgcgactaaaaccgaaaccgaaaccgaaaccgaaaccgaaaccgaaaccgaaaccaaaaccgcgaccgctaccgaaaccgcgaccgaaaccgcgaccgaaaccgaaaccgaaaccgaaactaaaaccaaaaccgaaactaaaaacgaaataaacgccgaaaccgaaaccgaaacactaaacaactactccgacgcctcctcgaaaccgtcgaaaaactcaacgaccgactcgaaaaacgaactaacaaccaccgcgaccgcgacgaaccgcgacgccaacaacaaacgacaacgccccacctacaccgtctcgcgataaaacgcgaacaccgaatcgctatccacttcgatccactacaaacgtccaaaaccccgcaacgacatatcctactaaaaatcgtaatcccaacgattctaatcctcgacgttcaactcgaccaaacgaacctacaactcgcgactcaactcctcgtaatccaccgacccgaaaaaactacgacaaacgctaatacgcactaatactaaaaaaatcccacgaacgacaaaacgctccatcgtaaatatactacgaaaaaacgcgtcgaacataacccgaaactacgcaaacgcgaacaacgaaaaaaaaaaaaacaacgaaaaaaaaaaaaaaaaaaaaaaaaaaaaaacgaaaaccgaacgcaaaaaaaaccccgcgccgcccgactctacgtatacgaaaaacgcgacgactacctaactatccgataataaactcttctacgtcgaattcgcctatctcgtccgaacgacaaccgcgccccctcgatacctactaactaactcgctcgctcaaacctaaccgacacccctcgaacacaacgcacttaacctataaaacgcccaacccgcctacgccccctttatacgcgcgaaccccacccccgtacgcgcgaacccgaccgcgattaacataatataatattttcaatttcaacaacaccacgacgattaacgaccgccccgctaccccgccccgccgcgacccgacccccgcgcaccgcccattaaccgcgcgcacacccaccgaaaacgaaacgaaacgcgcgaccgaaacgcgcgactaattaacgaccgcgaaacgaacgcgctataacaaaaaaaaaaaacgataaacgaaacgaaaacgaaaattaaaaaacgctacgaacgataacgtaacaccgcgacgccccgccccctcgccccatcccccctacaacactcccccacccccccgactcccgccccccgccgactcctttatctacaaacgaaaacctcaacccaacgcga

SEQ ID NO: 3661 - DNA, 565 bp, Artificial Sequence
  chemically treated genomic DNA (Homo sapiens) CpG-island No: 3661
gggcgcgtggggggtgagtaagttgaacggaggggagcgaggagcggtgggggagaaagggagtgaagtcgggtgggagaggttgtggattcgggaaggttcgagggattttcggagggaggcgaagtgtgaggttgaggaatgcgcgcgaggaggaggagtgggggtgtagaggggaggaggatgagcgcgggagagaaggcgcgatgagtgtagagacgcgaatcgcggcggtggacgagagcgtcgggaatggtatgtaggggcgagagtaggagcgcgggagagcgtatgaggtgtggtgatgtagagtcggggaatagtggtcgtaggggtatgcgtcgagatggacgtggtcgggtagaggcgagagaggagtgcgggagcgaagatgagggtaggagatatatggggaggaggagaggagatgagagtcgtcgagagcgcgatagggagacggaagaaaagtgaggagttgaggttagttggtagaggtgtgtgcggaagaggcgaagcgaggagtagggaagagaggagggggagagatgggtggataggggagtga

SEQ ID NO: 3662 - DNA, 565 bp, Artificial Sequence
  chemically treated genomic DNA (Homo sapiens) CpG-island No: 3662
tcactcccctatccacccatctctccccctcctctcttccctactcctcgcttcgcctcttccgcacacacctctaccaactaacctcaactcctcacttttcttccgtctccctatcgcgctctcgacgactctcatctcctctcctcctccccatatatctcctaccctcatcttcgctcccgcactcctctctcgcctctacccgaccacgtccatctcgacgcatacccctacgaccactattccccgactctacatcaccacacctcatacgctctcccgcgctcctactctcgcccctacataccattcccgacgctctcgtccaccgccgcgattcgcgtctctacactcatcgcgccttctctcccgcgctcatcctcctcccctctacacccccactcctcctcctcgcgcgcattcctcaacctcacacttcgcctccctccgaaaatccctcgaaccttcccgaatccacaacctctcccacccgacttcactccctttctcccccaccgctcctcgctcccctccgttcaacttactcaccccccacgcgccc

SEQ ID NO: 3663 - DNA, 565 bp, Artificial Sequence
  chemically treated genomic DNA (Homo sapiens) CpG-island No: 3663
ttatttttttgtttatttatttttttttttttttttttttttatttttcgtttcgtttttttcgtatatatttttattagttgattttagttttttatttttttttcgtttttttgtcgcgttttcggcggtttttattttttttttttttttttatgtgttttttgtttttattttcgttttcgtatttttttttcgtttttattcgattacgtttatttcggcgtatatttttgcggttattatttttcggttttgtattattatattttatacgttttttcgcgtttttattttcgtttttgtatattattttcgacgttttcgtttatcgtcgcggttcgcgtttttatatttatcgcgttttttttttcgcgtttattttttttttttttatatttttatttttttttttcgcgcgtattttttagttttatatttcgttttttttcgaaaatttttcgggttttttcgggtttatagttttttttattcggttttatttttttttttttttatcgtttttcgttttttttcgtttaatttgtttattttttacgcgttt

SEQ ID NO: 3664 - DNA, 565 bp, Artificial Sequence
  chemically treated genomic DNA (Homo sapiens) CpG-island No: 3664
aaacgcgtaaaaaataaacaaattaaacgaaaaaaaacgaaaaacgataaaaaaaaaaaaaaataaaaccgaataaaaaaaactataaacccgaaaaaacccgaaaaattttcgaaaaaaaacgaaatataaaactaaaaaatacgcgcgaaaaaaaaaaataaaaatataaaaaaaaaaaaaataaacgcgaaaaaaaaaacgcgataaatataaaaacgcgaaccgcgacgataaacgaaaacgtcgaaaataatatacaaaaacgaaaataaaaacgcgaaaaaacgtataaaatataataatacaaaaccgaaaaataataaccgcaaaaatatacgccgaaataaacgtaatcgaataaaaacgaaaaaaaaatacgaaaacgaaaataaaaacaaaaaacacataaaaaaaaaaaaaaaaaataaaaaccgccgaaaacgcgacaaaaaaacgaaaaaaaaataaaaaactaaaatcaactaataaaaatatatacgaaaaaaacgaaacgaaaaataaaaaaaaaaaaaaaaaaaaaaataaataaacaaaaaaataa

SEQ ID NO: 3665 - DNA, 851 bp, Artificial Sequence
  chemically treated genomic DNA (Homo sapiens) CpG-island No: 3665
cgtcgcggaggatacggcggggaagacgggggcgaggtcgaggacggggaggtcgagggagaggacgaaggagggggcggagggagagcgacggaagggggaggacgggggggggacggcgagggaggggcggagcgagggacggggggagagagggggggacggaggcgggggaataatagcgggcgtacgtaacggtaacgttaagggggggagaggggcggaggacgaattagcggacggagcgagagagagagggtagagaggaggaaagtagagacgggaaagcggagggagaggggattaggagtaggggtagcgagtggatcgtggaatgggatcgacgagttgcgatggagaggggaagagcggagcgtaggacggaggggggagagaaggagcgagacggtgaggggtgagcggaagaggaggggagaggagcggagaggacgaggggaggggagcgaggagcgagagcgcggacgagagggaggggcgaggagagggataggagaagcgggaagaggggcgagagcgggaggtagagggagggatagagaggcggagagcggagaggagagagagaggttgggcgagagtatagaggggagggaggtcggcgtggagagagaggagacgagaggtagaagaggagcgggaggtaggtgtagaaggaaggagagaggatgagtacgacgaaggagggagaagagagtgagaggagtagaggatagtggagaagcgaggcgcggagaggagagagggagagggagaagacgggagagagagaggtgcggagacggagcgagtaggagagggatgtagttatttaagtttattttgtttaaaat

SEQ ID NO: 3666 - DNA, 851 bp, Artificial Sequence
  chemically treated genomic DNA (Homo sapiens) CpG-island No: 3666
attttaaacaaaataaacttaaataactacatccctctcctactcgctccgtctccgcacctctctctctcccgtcttctccctctccctctctcctctccgcgcctcgcttctccactatcctctactcctctcactctcttctccctccttcgtcgtactcatcctctctccttccttctacacctacctcccgctcctcttctacctctcgtctcctctctctccacgccgacctccctcccctctatactctcgcccaacctctctctctcctctccgctctccgcctctctatccctccctctacctcccgctctcgcccctcttcccgcttctcctatccctctcctcgcccctccctctcgtccgcgctctcgctcctcgctcccctcccctcgtcctctccgctcctctcccctcctcttccgctcacccctcaccgtctcgctccttctctcccccctccgtcctacgctccgctcttcccctctccatcgcaactcgtcgatcccattccacgatccactcgctacccctactcctaatcccctctccctccgctttcccgtctctactttcctcctctctaccctctctctctcgctccgtccgctaattcgtcctccgcccctctcccccccttaacgttaccgttacgtacgcccgctattattcccccgcctccgtccccccctctctccccccgtccctcgctccgcccctccctcgccgtcccccccccgtcctcccccttccgtcgctctccctccgccccctccttcgtcctctccctcgacctccccgtcctcgacctcgcccccgtcttccccgccgtatcctccgcgacg

SEQ ID NO: 3667 - DNA, 851 bp, Artificial Sequence
  chemically treated genomic DNA (Homo sapiens) CpG-island No: 3667
gttttgaataaaataaatttgaatagttatattttttttttgttcgtttcgttttcgtatttttttttttttcgttttttttttttttttttttttttttcgcgtttcgtttttttattgttttttgttttttttatttttttttttttttttcgtcgtgtttattttttttttttttttttgtatttgtttttcgttttttttttgtttttcgttttttttttttttacgtcggttttttttttttttgtgttttcgtttagtttttttttttttttttcgtttttcgtttttttgtttttttttttatttttcgttttcgttttttttttcgttttttttgttttttttttcgtttttttttttcgttcgcgttttcgtttttcgttttttttttttcgtttttttcgtttttttttttttttttttcgtttattttttatcgtttcgttttttttttttttttttcgttttgcgtttcgttttttttttttttatcgtagttcgtcgattttattttacggtttattcgttgtttttgtttttggtttttttttttttcgttttttcgtttttgttttttttttttttattttttttttttcgtttcgttcgttggttcgtttttcgttttttttttttttttgacgttgtcgttgcgtacgttcgttgttgttttttcgttttcgttttttttttttttttttcgtttttcgtttcgtttttttttcgtcgtttttttttcgttttttttttttcgtcgtttttttttcgttttttttttcgttttttttttcggttttttcgttttcggtttcgttttcgtttttttcgtcgtgtttttcgcggcg

SEQ ID NO: 3668 - DNA, 851 bp, Artificial Sequence
  chemically treated genomic DNA (Homo sapiens) CpG-island No: 3668
cgccgcgaaaaacacgacgaaaaaaacgaaaacgaaaccgaaaacgaaaaaaccgaaaaaaaaaacgaaaaaaaaaacgaaaaaaaaacgacgaaaaaaaaaaaacgaaaaaaaaacgacgaaaaaaaaacgaaacgaaaaacgaaaaaaaaaaaaaaaaaacgaaaacgaaaaaacaacaacgaacgtacgcaacgacaacgtcaaaaaaaaaaaaaaaacgaaaaacgaaccaacgaacgaaacgaaaaaaaaaaaataaaaaaaaaaaaaacaaaaacgaaaaaacgaaaaaaaaaaaaaccaaaaacaaaaacaacgaataaaccgtaaaataaaatcgacgaactacgataaaaaaaaaaaaaacgaaacgcaaaacgaaaaaaaaaaaaaaaaaacgaaacgataaaaaataaacgaaaaaaaaaaaaaaaaaaacgaaaaaaacgaaaaaaaaaaaacgaaaaacgaaaacgcgaacgaaaaaaaaaaacgaaaaaaaaaacaaaaaaaacgaaaaaaaaaacgaaaacgaaaaataaaaaaaaaaacaaaaaaacgaaaaacgaaaaaaaaaaaaaaaaactaaacgaaaacacaaaaaaaaaaaaaaccgacgtaaaaaaaaaaaaaacgaaaaacaaaaaaaaaacgaaaaacaaatacaaaaaaaaaaaaaaaaaataaacacgacgaaaaaaaaaaaaaaaaataaaaaaaacaaaaaacaataaaaaaacgaaacgcgaaaaaaaaaaaaaaaaaaaaaaaaaacgaaaaaaaaaaaaatacgaaaacgaaacgaacaaaaaaaaaatataactattcaaatttattttattcaaaac

SEQ ID NO: 3669 - DNA, 561 bp, Artificial Sequence
  chemically treated genomic DNA (Homo sapiens) CpG-island No: 3669
gttgcgggttgttagcggagtcgcgcgtcgggagttacgtagggtagggaaggtatggtttttgttttcgtttaatgagaaggggttagcggtggcggtcgggttaggttcggggtttggggacgtcgaggcggtcgcggaggagcgtcgcgttaaggtttttagtttgttttatagtgtggatgcgttcgtgtcggataagaagtcgtttaaggaggtatttttagtgtcggttaaaagcgtttttttcggggttattttgcggttattgttgttgtcggggtacggcgttcgggaagcgtatagtttcgggtcgttgattaagtttttcgagatcgtttcggttaagtgggaaaattttttaagacggagcggcgtggatgtaggaattttgttgataattcgtcgtcgttaagatacgtgagttttattatttgtattttgagaaaatataagattaattcgaagtcgcgtatagtttttattacgttttagtttttcgttttggagggtaagttgttttagaaatagtatttttttattgtagagggtgcggatttt

SEQ ID NO: 3670 - DNA, 561 bp, Artificial Sequence
  chemically treated genomic DNA (Homo sapiens) CpG-island No: 3670
aaaatccgcaccctctacaataaaaaaatactatttctaaaacaacttaccctccaaaacgaaaaactaaaacgtaataaaaactatacgcgacttcgaattaatcttatattttctcaaaatacaaataataaaactcacgtatcttaacgacgacgaattatcaacaaaattcctacatccacgccgctccgtcttaaaaaattttcccacttaaccgaaacgatctcgaaaaacttaatcaacgacccgaaactatacgcttcccgaacgccgtaccccgacaacaacaataaccgcaaaataaccccgaaaaaaacgcttttaaccgacactaaaaatacctccttaaacgacttcttatccgacacgaacgcatccacactataaaacaaactaaaaaccttaacgcgacgctcctccgcgaccgcctcgacgtccccaaaccccgaacctaacccgaccgccaccgctaaccccttctcattaaacgaaaacaaaaaccataccttccctaccctacgtaactcccgacgcgcgactccgctaacaacccgcaac

SEQ ID NO: 3671 - DNA, 561 bp, Artificial Sequence
  chemically treated genomic DNA (Homo sapiens) CpG-island No: 3671
gaagttcgtattttttgtaatggagaggtattgtttttggagtaatttgttttttagagcgaggagttgggacgtggtaaaggttgtgcgcggtttcggattggttttgtgtttttttagggtgtaggtggtagggtttacgtgttttggcggcggcgaattattagtagggtttttgtatttacgtcgtttcgttttagggagtttttttatttgatcgaggcggtttcgaagggtttgattagcggttcggggttgtgcgtttttcgagcgtcgtgtttcggtagtagtagtagtcgtagggtggtttcggaagaggcgtttttggtcggtattggggatgtttttttgggcggttttttgttcgatacgagcgtatttatattgtagggtaggttggagattttgacgcggcgttttttcgcggtcgtttcggcgtttttaggtttcggatttggttcgatcgttatcgttggtttttttttattggacgaaaatagaagttatgttttttttgttttacgtagttttcgacgcgcgatttcgttagtaattcgtagt

SEQ ID NO: 3672 - DNA, 561 bp, Artificial Sequence
  chemically treated genomic DNA (Homo sapiens) CpG-island No: 3672
actacgaattactaacgaaatcgcgcgtcgaaaactacgtaaaacaaaaaaaacataacttctattttcgtccaataaaaaaaaaccaacgataacgatcgaaccaaatccgaaacctaaaaacgccgaaacgaccgcgaaaaaacgccgcgtcaaaatctccaacctaccctacaatataaatacgctcgtatcgaacaaaaaaccgcccaaaaaaacatccccaataccgaccaaaaacgcctcttccgaaaccaccctacgactactactactaccgaaacacgacgctcgaaaaacgcacaaccccgaaccgctaatcaaacccttcgaaaccgcctcgatcaaataaaaaaactccctaaaacgaaacgacgtaaatacaaaaaccctactaataattcgccgccgccaaaacacgtaaaccctaccacctacaccctaaaaaaacacaaaaccaatccgaaaccgcgcacaacctttaccacgtcccaactcctcgctctaaaaaacaaattactccaaaaacaatacctctccattacaaaaaatacgaacttc

SEQ ID NO: 3673 - DNA, 1060 bp, Artificial Sequence
  chemically treated genomic DNA (Homo sapiens) CpG-island No: 3673
gggtatcgcgagcgtaggtttaggcgtagtttttttgtttgcgggattgaataggtaggtgcgttttagcggtcgggcgggtcgggttttttttttgcgggtaggcgtcgcgttgcggggcgcggttggcggagcggggtagtcgggcgtagcgttttttgggtttgaagattggcgggcggcgggggcgcgcgtaggtcggcgggggcgcgtcgcgttgcgaggtttgcgcgttaggttgcgggagttatgcggcgatcgaggagttttgcggtcgttaagttgcgcgggtagaagcggttcggggttttcgcggttttcgcggttttcgcggtcgttgttttggtatttagcgttattcgtatacggcgtttcgttagttaggtcgggagtaagagttaggcggtggagaagtcgtcgtcggagaagtcgcggttgaggcgttcgtcgtcgcgggtttaggaggagggttcgggggagtcgtcgtcgtttgagttggcgttgttttcgttatcgtcgtcgtcgtcgtcgattttcgcgatttcgacgttttcggcgtttaatttggatttgggcgagtagcgggagcgttgggagacgttttagaagcggtagaagtttattttcgagggtgtcgttaagtttttgttagatattttgtgagtgcggcgggtcggggggcgcgggagtcgttgttacgcggattttttcggtaggagtcgggttcgtagttcgcgtgtaggttttgggcgttttttagttttgagttttttacgttacggagtcgacgcggttttttcgttagtattggggttattttttaattttaagggcggcggggcggggcggtgtttttagggttgtgtggtttgggaatggaaagggggtttcgttcggagtttgagggcgcgcgtagtcgttttgggatataaagagtttttttcggttataagtatcgtgttcggggacgttgttttttgttggcgcgtaaagggtgtgggggttttttttagtgaaaagaatataaattttacggtttttttttattcgaatttttttt

SEQ ID NO: 3674 - DNA, 1060 bp, Artificial Sequence
  chemically treated genomic DNA (Homo sapiens) CpG-island No: 3674
aaaaaaaattcgaataaaaaaaaaccgtaaaatttatattcttttcactaaaaaaaacccccacaccctttacgcgccaacaaaaaacaacgtccccgaacacgatacttataaccgaaaaaaactctttatatcccaaaacgactacgcgcgccctcaaactccgaacgaaaccccctttccattcccaaaccacacaaccctaaaaacaccgccccgccccgccgcccttaaaattaaaaaataaccccaatactaacgaaaaaaccgcgtcgactccgtaacgtaaaaaactcaaaactaaaaaacgcccaaaacctacacgcgaactacgaacccgactcctaccgaaaaaatccgcgtaacaacgactcccgcgccccccgacccgccgcactcacaaaatatctaacaaaaacttaacgacaccctcgaaaataaacttctaccgcttctaaaacgtctcccaacgctcccgctactcgcccaaatccaaattaaacgccgaaaacgtcgaaatcgcgaaaatcgacgacgacgacgacgataacgaaaacaacgccaactcaaacgacgacgactcccccgaaccctcctcctaaacccgcgacgacgaacgcctcaaccgcgacttctccgacgacgacttctccaccgcctaactcttactcccgacctaactaacgaaacgccgtatacgaataacgctaaataccaaaacaacgaccgcgaaaaccgcgaaaaccgcgaaaaccccgaaccgcttctacccgcgcaacttaacgaccgcaaaactcctcgatcgccgcataactcccgcaacctaacgcgcaaacctcgcaacgcgacgcgcccccgccgacctacgcgcgcccccgccgcccgccaatcttcaaacccaaaaaacgctacgcccgactaccccgctccgccaaccgcgccccgcaacgcgacgcctacccgcaaaaaaaaaacccgacccgcccgaccgctaaaacgcacctacctattcaatcccgcaaacaaaaaaactacgcctaaacctacgctcgcgataccc

SEQ ID NO: 3675 - DNA, 1060 bp, Artificial Sequence
  chemically treated genomic DNA (Homo sapiens) CpG-island No: 3675
aaaggggattcgggtaagagaaagtcgtgggatttatgttttttttattaagaaaggtttttatattttttgcgcgttagtaagagataacgttttcgagtacgatgtttatggtcgggaaagattttttgtgttttaagacggttgcgcgcgtttttaagtttcggacgaagttttttttttatttttaggttatatagttttagaagtatcgtttcgtttcgtcgtttttagaattaaggaataattttagtgttaacgggggagtcgcgtcggtttcgtaacgtggaaggtttagagttgaaaggcgtttaaggtttgtacgcgggttgcgagttcgatttttgtcgagggggttcgcgtggtaacggttttcgcgtttttcggttcgtcgtatttataaggtgtttagtaggagtttggcggtattttcggaggtaagtttttgtcgtttttggaacgttttttagcgttttcgttgttcgtttaggtttaggttggacgtcgaggacgtcggggtcgcgggagtcggcggcggcggcggcggtggcgggagtaacgttagtttaggcggcggcggttttttcgggttttttttttgggttcgcggcgacgagcgttttagtcgcggttttttcgacggcggtttttttatcgtttggtttttgttttcggtttggttagcggagcgtcgtgtgcgggtggcgttgggtgttaaggtagcggtcgcggaggtcgcgggggtcgcggaggtttcggatcgtttttgttcgcgtagtttggcggtcgtagagtttttcgatcgtcgtatggttttcgtagtttggcgcgtaggtttcgtagcgcggcgcgttttcgtcggtttgcgcgcgttttcgtcgttcgttagtttttaggtttagggggcgttgcgttcggttgtttcgtttcgttagtcgcgtttcgtagcgcggcgtttgttcgtaggagggagattcggttcgttcggtcgttgggacgtatttgtttgtttagtttcgtaggtagaggggttgcgtttgggtttacgttcgcgatattt

SEQ ID NO: 3676 - DNA, 1060 bp, Artificial Sequence
  chemically treated genomic DNA (Homo sapiens) CpG-island No: 3676
aaatatcgcgaacgtaaacccaaacgcaacccctctacctacgaaactaaacaaacaaatacgtcccaacgaccgaacgaaccgaatctccctcctacgaacaaacgccgcgctacgaaacgcgactaacgaaacgaaacaaccgaacgcaacgccccctaaacctaaaaactaacgaacgacgaaaacgcgcgcaaaccgacgaaaacgcgccgcgctacgaaacctacgcgccaaactacgaaaaccatacgacgatcgaaaaactctacgaccgccaaactacgcgaacaaaaacgatccgaaacctccgcgacccccgcgacctccgcgaccgctaccttaacacccaacgccacccgcacacgacgctccgctaaccaaaccgaaaacaaaaaccaaacgataaaaaaaccgccgtcgaaaaaaccgcgactaaaacgctcgtcgccgcgaacccaaaaaaaaaacccgaaaaaaccgccgccgcctaaactaacgttactcccgccaccgccgccgccgccgccgactcccgcgaccccgacgtcctcgacgtccaacctaaacctaaacgaacaacgaaaacgctaaaaaacgttccaaaaacgacaaaaacttacctccgaaaataccgccaaactcctactaaacaccttataaatacgacgaaccgaaaaacgcgaaaaccgttaccacgcgaaccccctcgacaaaaatcgaactcgcaacccgcgtacaaaccttaaacgcctttcaactctaaaccttccacgttacgaaaccgacgcgactcccccgttaacactaaaattattccttaattctaaaaacgacgaaacgaaacgatacttctaaaactatataacctaaaaataaaaaaaaaacttcgtccgaaacttaaaaacgcgcgcaaccgtcttaaaacacaaaaaatctttcccgaccataaacatcgtactcgaaaacgttatctcttactaacgcgcaaaaaatataaaaacctttcttaataaaaaaaacataaatcccacgactttctcttacccgaatccccttt

SEQ ID NO: 3677 - DNA, 632 bp, Artificial Sequence
  chemically treated genomic DNA (Homo sapiens) CpG-island No: 3677
tcgtcgtcgttttattacgtcgcggaggggtttgtagggttttttttacggtttggagttttttttttttttacgtttgaggaaggtttcgggcgcgcggaatagacgggtaggcggggggcgtataagtttagggtacgatggtagtagcgttggattcggttgggcgttgttcggtttcgtattcgttcgagaggatcgtcgttgttaggtttagaggagatatgaagagatcgggcgtagcgcgattcgggaagtttcgtcgaggtaggagaggcgttcggttagcggagggagttggttttttaatttttcggaaggaggaggagtcggcgttggagtcgttttagtcgcggtttcgcgggttggggggagggagaggggttgagttaagatggcggttaaggtggcgaagtagtagtcgcggcggcggcggcggttggagtgagcgttcgattcgtcgcgtcgaacgaggtttcggtgtagggtcgcgcgtcgtggtcgcgttttattttttaggtcggggcgtacgtcggtttttacgtttagttagttttcggtgagtaggttttggcgtttgtaatttcggttttcgggtttttgttagttcgggggttttcgagggttttcgg

SEQ ID NO: 3678 - DNA, 632 bp, Artificial Sequence
  chemically treated genomic DNA (Homo sapiens) CpG-island No: 3678
ccgaaaaccctcgaaaacccccgaactaacaaaaacccgaaaaccgaaattacaaacgccaaaacctactcaccgaaaactaactaaacgtaaaaaccgacgtacgccccgacctaaaaaataaaacgcgaccacgacgcgcgaccctacaccgaaacctcgttcgacgcgacgaatcgaacgctcactccaaccgccgccgccgccgcgactactacttcgccaccttaaccgccatcttaactcaacccctctccctccccccaacccgcgaaaccgcgactaaaacgactccaacgccgactcctcctccttccgaaaaattaaaaaaccaactccctccgctaaccgaacgcctctcctacctcgacgaaacttcccgaatcgcgctacgcccgatctcttcatatctcctctaaacctaacaacgacgatcctctcgaacgaatacgaaaccgaacaacgcccaaccgaatccaacgctactaccatcgtaccctaaacttatacgccccccgcctacccgtctattccgcgcgcccgaaaccttcctcaaacgtaaaaaaaaaaaaaactccaaaccgtaaaaaaaaccctacaaacccctccgcgacgtaataaaacgacgacga

SEQ ID NO: 3679 - DNA, 632 bp, Artificial Sequence
  chemically treated genomic DNA (Homo sapiens) CpG-island No: 3679
tcgggagttttcggaagttttcggattagtaggagttcggaggtcggggttgtaggcgttagggtttatttatcgggagttggttaagcgtgggagtcgacgtgcgtttcggtttgaggagtgggacgcggttacggcgcgcggttttatatcgggatttcgttcggcgcggcgagtcggacgtttattttagtcgtcgtcgtcgtcgcggttgttgtttcgttattttggtcgttattttgatttaatttttttttttttttttagttcgcggagtcgcggttaaggcggttttagcgtcggtttttttttttttcggagagttgggagattaatttttttcgttggtcgggcgttttttttatttcggcggagtttttcgggtcgcgttgcgttcggtttttttatgttttttttaggtttggtagcggcggttttttcggacggatacggggtcgagtagcgtttagtcggatttagcgttgttgttatcgtgttttgggtttgtgcgtttttcgtttgttcgtttgtttcgcgcgttcgaggttttttttaggcgtgggaaaaggaaaaattttaggtcgtggaagggattttgtaaattttttcgcggcgtggtggggcggcggcgg

SEQ ID NO: 3680 - DNA, 632 bp, Artificial Sequence
  chemically treated genomic DNA (Homo sapiens) CpG-island No: 3680
ccgccgccgccccaccacgccgcgaaaaaatttacaaaatcccttccacgacctaaaatttttccttttcccacgcctaaaaaaaacctcgaacgcgcgaaacaaacgaacaaacgaaaaacgcacaaacccaaaacacgataacaacaacgctaaatccgactaaacgctactcgaccccgtatccgtccgaaaaaaccgccgctaccaaacctaaaaaaaacataaaaaaaccgaacgcaacgcgacccgaaaaactccgccgaaataaaaaaaacgcccgaccaacgaaaaaaattaatctcccaactctccgaaaaaaaaaaaaaccgacgctaaaaccgccttaaccgcgactccgcgaactaaaaaaaaaaaaaaaaattaaatcaaaataacgaccaaaataacgaaacaacaaccgcgacgacgacgacgactaaaataaacgtccgactcgccgcgccgaacgaaatcccgatataaaaccgcgcgccgtaaccgcgtcccactcctcaaaccgaaacgcacgtcgactcccacgcttaaccaactcccgataaataaaccctaacgcctacaaccccgacctccgaactcctactaatccgaaaacttccgaaaactcccga

SEQ ID NO: 3681 - DNA, 739 bp, Artificial Sequence
  chemically treated genomic DNA (Homo sapiens) CpG-island No: 3681
ttcgcgcggaggagggttgcgtttttatttttttttttagtcgttttttatttttaaattgtggaaggggcgggggcgcgcgcgttttattacgtacgcgtttttacgtacgcgcgtttttttcgcgttcgcgtttttttttattttagttcggagggggcggggttgcgggcggttttagagggtgcgacgtttttagcgcggcggcggcgttagcgagcggtcggcggggcgcgggttgttgggcgcgttgtttcggcggggttcgttggtatagtcgtttcgcgcgagtcgttcgttcggcgggggaagttgcgagcgtttcgagcgttcggtttagggtcgttggcgttgttttttcgtcgttatcgtttttcgcgtttttttcgggcggtttcgtttttatttttatttttttcgcgtttatttttcggttgtgtcgcgcgttaggcggagcgaggcgttcgtcgtcgtcgagtcgagtcgaggggcgagagttggttttcgagtcgtcgttgataggagtatcgtcgcgggttgcgttcgtcggttgcgaggtttcgtcgcgtcgtttcggggtgtagattcgtcgcggggcgttggaggattgcgaggtgtttcgggaatcgcgggcggcgtcggcgggcggcgcggtttttataggagatttcggggattggggtttgattcggaggtgtagagagttttttagagcggtaggtaaggggttcggggagta

SEQ ID NO: 3682 - DNA, 739 bp, Artificial Sequence
  chemically treated genomic DNA (Homo sapiens) CpG-island No: 3682
tactccccgaaccccttacctaccgctctaaaaaactctctacacctccgaatcaaaccccaatccccgaaatctcctataaaaaccgcgccgcccgccgacgccgcccgcgattcccgaaacacctcgcaatcctccaacgccccgcgacgaatctacaccccgaaacgacgcgacgaaacctcgcaaccgacgaacgcaacccgcgacgatactcctatcaacgacgactcgaaaaccaactctcgcccctcgactcgactcgacgacgacgaacgcctcgctccgcctaacgcgcgacacaaccgaaaaataaacgcgaaaaaaataaaaataaaaacgaaaccgcccgaaaaaaacgcgaaaaacgataacgacgaaaaaacaacgccaacgaccctaaaccgaacgctcgaaacgctcgcaacttcccccgccgaacgaacgactcgcgcgaaacgactataccaacgaaccccgccgaaacaacgcgcccaacaacccgcgccccgccgaccgctcgctaacgccgccgccgcgctaaaaacgtcgcaccctctaaaaccgcccgcaaccccgccccctccgaactaaaataaaaaaaaacgcgaacgcgaaaaaaacgcgcgtacgtaaaaacgcgtacgtaataaaacgcgcgcgcccccgccccttccacaatttaaaaataaaaaacgactaaaaaaaaaaataaaaacgcaaccctcctccgcgcgaa

SEQ ID NO: 3683 - DNA, 739 bp, Artificial Sequence
  chemically treated genomic DNA (Homo sapiens) CpG-island No: 3683
tgtttttcgggttttttatttgtcgttttgaggggttttttgtattttcgggttaagttttagttttcggggttttttgtgaggatcgcgtcgttcgtcggcgtcgttcgcgattttcggagtatttcgtagttttttaacgtttcgcggcgagtttgtatttcggaacggcgcggcggggtttcgtagtcggcgagcgtagttcgcggcggtgtttttgttagcggcggttcgggggttagttttcgtttttcggttcggttcggcggcggcgggcgtttcgtttcgtttagcgcgcggtatagtcgggaggtgagcgcgagggggatgggaatgggggcggggtcgttcgaaggaggcgcggagggcggtggcggcgggagggtagcgttagcggttttaggtcgggcgttcggagcgttcgtagtttttttcgtcgggcgggcggttcgcgcgaggcggttgtgttagcgggtttcgtcggagtagcgcgtttagtaattcgcgtttcgtcggtcgttcgttagcgtcgtcgtcgcgttgggggcgtcgtattttttgaggtcgttcgtagtttcgtttttttcgggttggggtggggaggggcgcgagcgcggagggagcgcgcgtgcgtgggggcgcgtgcgtggtggagcgcgcgcgttttcgttttttttatagtttgggggtggggaacggttggaagagggagtggggacgtagttttttttcgcgcgga

SEQ ID NO: 3684 - DNA, 739 bp, Artificial Sequence
  chemically treated genomic DNA (Homo sapiens) CpG-island No: 3684
tccgcgcgaaaaaaaactacgtccccactccctcttccaaccgttccccacccccaaactataaaaaaaacgaaaacgcgcgcgctccaccacgcacgcgcccccacgcacgcgcgctccctccgcgctcgcgcccctccccaccccaacccgaaaaaaacgaaactacgaacgacctcaaaaaatacgacgcccccaacgcgacgacgacgctaacgaacgaccgacgaaacgcgaattactaaacgcgctactccgacgaaacccgctaacacaaccgcctcgcgcgaaccgcccgcccgacgaaaaaaactacgaacgctccgaacgcccgacctaaaaccgctaacgctaccctcccgccgccaccgccctccgcgcctccttcgaacgaccccgcccccattcccatccccctcgcgctcacctcccgactataccgcgcgctaaacgaaacgaaacgcccgccgccgccgaaccgaaccgaaaaacgaaaactaacccccgaaccgccgctaacaaaaacaccgccgcgaactacgctcgccgactacgaaaccccgccgcgccgttccgaaatacaaactcgccgcgaaacgttaaaaaactacgaaatactccgaaaatcgcgaacgacgccgacgaacgacgcgatcctcacaaaaaaccccgaaaactaaaacttaacccgaaaatacaaaaaacccctcaaaacgacaaataaaaaacccgaaaaaca

SEQ ID NO: 3685 - DNA, 585 bp, Artificial Sequence
  chemically treated genomic DNA (Homo sapiens) CpG-island No: 3685
gggacggcgcgtttattcgtagggcggataggtcgatgtcgtttaggttgcgggcgggggttgggtcgtttatggttttcgtggggaacggggtatcggggtcgtttacgtttcggttcggttattttattgtcgtcgtcgtcgttttttttttatcggagaatttcgggggcggattttatcgcgtttttttcggagatcggggagggggagggtcggcgcgaggatcgatttatcgattgataggcgttattttttcggagttagttattcgagtttattattttttttgcgtaggcgcggagcgatcgcgtattgggagggtggaagcgcgagcgtgacgcgagcgcgtcggggttttttttttttaggcgtcgatatttgcgcgtaggcgtaggcgagtaggcgaaaggcgcgcgcgaggacggagcgatcgcgcgagtttggcgtgaaagaagtgggcggcggtcgaggcggtcgcggagcgcgtttattagttggtgcgcgtgcgtatacgcgtttttttttttttttttattttttttgtttttttttttttttattttttttttagattttttttga

SEQ ID NO: 3686 - DNA, 585 bp, Artificial Sequence
  chemically treated genomic DNA (Homo sapiens) CpG-island No: 3686
tcaaaaaaaatctaaaaaaaaaataaaaaaaaaaaaaaacaaaaaaaataaaaaaaaaaaaaaaaacgcgtatacgcacgcgcaccaactaataaacgcgctccgcgaccgcctcgaccgccgcccacttctttcacgccaaactcgcgcgatcgctccgtcctcgcgcgcgcctttcgcctactcgcctacgcctacgcgcaaatatcgacgcctaaaaaaaaaaaaccccgacgcgctcgcgtcacgctcgcgcttccaccctcccaatacgcgatcgctccgcgcctacgcaaaaaaaataataaactcgaataactaactccgaaaaaataacgcctatcaatcgataaatcgatcctcgcgccgaccctccccctccccgatctccgaaaaaaacgcgataaaatccgcccccgaaattctccgataaaaaaaaaacgacgacgacgacaataaaataaccgaaccgaaacgtaaacgaccccgataccccgttccccacgaaaaccataaacgacccaacccccgcccgcaacctaaacgacatcgacctatccgccctacgaataaacgcgccgtccc

SEQ ID NO: 3687 - DNA, 585 bp, Artificial Sequence
  chemically treated genomic DNA (Homo sapiens) CpG-island No: 3687
ttaaaggagatttgagaaggaaataagggagagaaagggtaaaaaaaatagggaaagaaaaggaaacgcgtgtgcgtacgcgtattagttggtgggcgcgtttcgcggtcgtttcggtcgtcgtttattttttttacgttaggttcgcgcggtcgtttcgttttcgcgcgcgtttttcgtttgttcgtttgcgtttgcgcgtaggtgtcggcgtttagggggagggggtttcggcgcgttcgcgttacgttcgcgtttttatttttttagtgcgcggtcgtttcgcgtttgcgtaggagaggtggtaggttcgggtggttggtttcggggagatagcgtttgttagtcggtgggtcggttttcgcgtcggtttttttttttttcggttttcgggggaggcgcggtggagttcgttttcggggtttttcgatgggggagaagcggcgacggcggtagtggagtaatcgagtcggagcgtgagcggtttcggtgtttcgttttttacggaggttatgggcgatttagttttcgttcgtagtttggacgatatcgatttgttcgttttgcgggtgagcgcgtcgtttt

SEQ ID NO: 3688 - DNA, 585 bp, Artificial Sequence
  chemically treated genomic DNA (Homo sapiens) CpG-island No: 3688
aaaacgacgcgctcacccgcaaaacgaacaaatcgatatcgtccaaactacgaacgaaaactaaatcgcccataacctccgtaaaaaacgaaacaccgaaaccgctcacgctccgactcgattactccactaccgccgtcgccgcttctcccccatcgaaaaaccccgaaaacgaactccaccgcgcctcccccgaaaaccgaaaaaaaaaaaaaccgacgcgaaaaccgacccaccgactaacaaacgctatctccccgaaaccaaccacccgaacctaccacctctcctacgcaaacgcgaaacgaccgcgcactaaaaaaataaaaacgcgaacgtaacgcgaacgcgccgaaaccccctccccctaaacgccgacacctacgcgcaaacgcaaacgaacaaacgaaaaacgcgcgcgaaaacgaaacgaccgcgcgaacctaacgtaaaaaaaataaacgacgaccgaaacgaccgcgaaacgcgcccaccaactaatacgcgtacgcacacgcgtttccttttctttccctattttttttaccctttctctcccttatttccttctcaaatctcctttaa

SEQ ID NO: 3689 - DNA, 1014 bp, Artificial Sequence
  chemically treated genomic DNA (Homo sapiens) CpG-island No: 3689
tcgttcgcggatgacgtttgattagtttgtaacgttttatcgattttttcgagtttttattttttattttagttttttatttataattttagtttcgtttttcgtttttcgtttcgtttcgtaattagagtttcggggaatatttagttaggttcggaaggtttcgatttggggcggcgtagtagttgcgcggggaagcggttttgggtggttcggagagcgcgcggttacggggtttacgttaggttaggcgggtcgggggtaggggtttaggcgggaatgaggaagttacgcgattttagtcgggggtagaaatttcgaaatttgagcgtgcgattgagtttggaggtttcgtagttcgagttcgtttcgttttcgttcgattttcgagattcgggattttcgcgcgttttttttcggtttttttattttggtagacggagttagcgttcgcgggggtttcggagttaagagagtagatcggagttgtagtcggagtttacgtttcggtcgaggcggggtcggtcgaggcggggtcggggtttagggtttgttttcgggggcggggcggttttcggttttattttcgcgggattttcgtttgttttgtttcgttttcgttgttttcggttcgtttcgtcgtttagtgcgttatcgagagtttcgggtagggggtcgttttgtgttttgtagggtcgcggggtcgcgtagttttttcggtgcggcgggtaagtgttgttcggcgtcggggcgtttcgcgtcgtcggttttagcgtgttcggtcgttgtttttcggggtatttcgcgttgcgcgtatttttcgggttcggcgttcgtttcgggtttttttagtcgcgggcgttgtttcggcgttcgggggacgcgttttcgttgcgggagttgtcggtaggtgtttcgttttcggattcgttgcgagttatatttggtttagtttagatagcgtttgtatttggaaggaatgagggcgtaaaaggtttgaggggtggtggttat

SEQ ID NO: 3690 - DNA, 1014 bp, Artificial Sequence
  chemically treated genomic DNA (Homo sapiens) CpG-island No: 3690
ataaccaccacccctcaaaccttttacgccctcattccttccaaatacaaacgctatctaaactaaaccaaatataactcgcaacgaatccgaaaacgaaacacctaccgacaactcccgcaacgaaaacgcgtcccccgaacgccgaaacaacgcccgcgactaaaaaaacccgaaacgaacgccgaacccgaaaaatacgcgcaacgcgaaataccccgaaaaacaacgaccgaacacgctaaaaccgacgacgcgaaacgccccgacgccgaacaacacttacccgccgcaccgaaaaaactacgcgaccccgcgaccctacaaaacacaaaacgaccccctacccgaaactctcgataacgcactaaacgacgaaacgaaccgaaaacaacgaaaacgaaacaaaacaaacgaaaatcccgcgaaaataaaaccgaaaaccgccccgcccccgaaaacaaaccctaaaccccgaccccgcctcgaccgaccccgcctcgaccgaaacgtaaactccgactacaactccgatctactctcttaactccgaaacccccgcgaacgctaactccgtctaccaaaataaaaaaaccgaaaaaaaacgcgcgaaaatcccgaatctcgaaaatcgaacgaaaacgaaacgaactcgaactacgaaacctccaaactcaatcgcacgctcaaatttcgaaatttctacccccgactaaaatcgcgtaacttcctcattcccgcctaaacccctacccccgacccgcctaacctaacgtaaaccccgtaaccgcgcgctctccgaaccacccaaaaccgcttccccgcgcaactactacgccgccccaaatcgaaaccttccgaacctaactaaatattccccgaaactctaattacgaaacgaaacgaaaaacgaaaaacgaaactaaaattataaataaaaaactaaaataaaaaataaaaactcgaaaaaatcgataaaacgttacaaactaatcaaacgtcatccgcgaacga

SEQ ID NO: 3691 - DNA, 1014 bp, Artificial Sequence
  chemically treated genomic DNA (Homo sapiens) CpG-island No: 3691
gtagttattattttttaggttttttacgtttttattttttttaggtataaacgttatttgggttaggttaaatgtggttcgtagcgggttcgggagcggggtatttatcggtagttttcgtagcggaggcgcgtttttcgggcgtcgaggtagcgttcgcggttggaggggttcggggcgggcgtcgagttcgagggatgcgcgtagcgcggggtgtttcgggaggtagcggtcgggtacgttgggatcgacggcgcgggacgtttcgacgtcgggtagtatttattcgtcgtatcgagagagttacgcggtttcgcggttttgtagggtatagggcggttttttgttcggggttttcggtggcgtattgggcggcggggcgggtcgagggtagcgggggcgggataggatagacgagaatttcgcggaggtgaggtcgggggtcgtttcgttttcgagggtaggttttgagtttcggtttcgtttcggtcggtttcgtttcggtcggggcgtgggtttcggttgtagtttcggtttgtttttttggtttcggaattttcgcgggcgttggtttcgtttgttagggtgagggggtcgggaaggggcgcgcgggggtttcgggtttcggaaatcgggcggggacggaacgggttcgggttgcggggtttttagatttagtcgtacgtttagatttcgggatttttattttcggttgggatcgcgtaatttttttattttcgtttggatttttgttttcggttcgtttggtttggcgtgagtttcgtagtcgcgcgtttttcggattatttagggtcgttttttcgcgtagttgttgcgtcgttttaggtcggagtttttcgggtttggttgggtgtttttcggggttttggttacgggacggggcggggggcggggggcgggattgggattgtggatgaaggattaaggtaggggatgggggttcgaaggggtcggtggggcgttgtaaattggttaggcgttattcgcgggcgg

SEQ ID NO: 3692 - DNA, 1014 bp, Artificial Sequence
  chemically treated genomic DNA (Homo sapiens) CpG-island No: 3692
ccgcccgcgaataacgcctaaccaatttacaacgccccaccgaccccttcgaacccccatcccctaccttaatccttcatccacaatcccaatcccgccccccgccccccgccccgtcccgtaaccaaaaccccgaaaaacacccaaccaaacccgaaaaactccgacctaaaacgacgcaacaactacgcgaaaaaacgaccctaaataatccgaaaaacgcgcgactacgaaactcacgccaaaccaaacgaaccgaaaacaaaaatccaaacgaaaataaaaaaattacgcgatcccaaccgaaaataaaaatcccgaaatctaaacgtacgactaaatctaaaaaccccgcaacccgaacccgttccgtccccgcccgatttccgaaacccgaaacccccgcgcgccccttcccgaccccctcaccctaacaaacgaaaccaacgcccgcgaaaattccgaaaccaaaaaaacaaaccgaaactacaaccgaaacccacgccccgaccgaaacgaaaccgaccgaaacgaaaccgaaactcaaaacctaccctcgaaaacgaaacgacccccgacctcacctccgcgaaattctcgtctatcctatcccgcccccgctaccctcgacccgccccgccgcccaatacgccaccgaaaaccccgaacaaaaaaccgccctataccctacaaaaccgcgaaaccgcgtaactctctcgatacgacgaataaatactacccgacgtcgaaacgtcccgcgccgtcgatcccaacgtacccgaccgctacctcccgaaacaccccgcgctacgcgcatccctcgaactcgacgcccgccccgaacccctccaaccgcgaacgctacctcgacgcccgaaaaacgcgcctccgctacgaaaactaccgataaataccccgctcccgaacccgctacgaaccacatttaacctaacccaaataacgtttatacctaaaaaaaataaaaacgtaaaaaacctaaaaaataataactac

SEQ ID NO: 3693 - DNA, 967 bp, Artificial Sequence
  chemically treated genomic DNA (Homo sapiens) CpG-island No: 3693
agattgcggatagagggagtttaacgttattttttgtcgggggcggttttcgtcgcggcgacgttacggaagaggcgggatacggaggcggtcgcggcgcgggttgtaggattgatttcgggttgcgcggttttatttcgggcggttcgtttcgttttcgtcggttttcgtagtcgtcgttttaggttagttggagtaggtcgcgttcggttagtaggttttgggtgcggttgtagatattttttaaggtgtcggcggttcggattagcgcggttcgcgttttcgtttcggtggtttcgggatacgttagttttagtaggcggcggcgattcgggaaggcgaggaaggcgaggcgggcggtttgtcggattagttaggggtgatgcggatttagggtcgtacggtaggcgtcgttgtattgtacgttcgcgttcgggttttttagcgcgtcggtcgttattcggtggaggtagagttgggattagcgtagcgcgcggtgtagtaggagtagcgtgcgagagttcgagtttcgggtcgggtttcggggggtcgttttcggttgttttagtagtttcgtttttcgtttttacgtcgttatggttattagcgattagtagtgtttcgcgttcgggtcgtgtattcgagtttttaggtttgttattttggtgaaggtttttttagtggcgaaggcgaagacggagtcgaggggagttaggaatttgcgggcgagacgatttgagagaatggagatggagtcgttaaggaggcggggatcggttggggggcgggaggttatttattcgacgagtgttttttatttcgttaggtacggcgatagttttatatttttttcgggttttagattggcgtggaatcgttttattatgcggtttagtatttttcgagggtttagatacggaggttgtttttttttcggggtttttagggttttcgatttttgtcggat

SEQ ID NO: 3694 - DNA, 967 bp, Artificial Sequence
  chemically treated genomic DNA (Homo sapiens) CpG-island No: 3694
atccgacaaaaatcgaaaaccctaaaaaccccgaaaaaaaaacaacctccgtatctaaaccctcgaaaaatactaaaccgcataataaaacgattccacgccaatctaaaacccgaaaaaaatataaaactatcgccgtacctaacgaaataaaaaacactcgtcgaataaataacctcccgccccccaaccgatccccgcctccttaacgactccatctccattctctcaaatcgtctcgcccgcaaattcctaactcccctcgactccgtcttcgccttcgccactaaaaaaaccttcaccaaaataacaaacctaaaaactcgaatacacgacccgaacgcgaaacactactaatcgctaataaccataacgacgtaaaaacgaaaaacgaaactactaaaacaaccgaaaacgaccccccgaaacccgacccgaaactcgaactctcgcacgctactcctactacaccgcgcgctacgctaatcccaactctacctccaccgaataacgaccgacgcgctaaaaaacccgaacgcgaacgtacaatacaacgacgcctaccgtacgaccctaaatccgcatcacccctaactaatccgacaaaccgcccgcctcgccttcctcgccttcccgaatcgccgccgcctactaaaactaacgtatcccgaaaccaccgaaacgaaaacgcgaaccgcgctaatccgaaccgccgacaccttaaaaaatatctacaaccgcacccaaaacctactaaccgaacgcgacctactccaactaacctaaaacgacgactacgaaaaccgacgaaaacgaaacgaaccgcccgaaataaaaccgcgcaacccgaaatcaatcctacaacccgcgccgcgaccgcctccgtatcccgcctcttccgtaacgtcgccgcgacgaaaaccgcccccgacaaaaaataacgttaaactccctctatccgcaatct

SEQ ID NO: 3695 - DNA, 967 bp, Artificial Sequence
  chemically treated genomic DNA (Homo sapiens) CpG-island No: 3695
gttcggtaggagtcgggaattttggaggtttcggagaggaaatagttttcgtgtttgggttttcgggggatgttgggtcgtatgatgaggcggttttacgttagtttgaaattcgaaggggatgtggggttgtcgtcgtatttggcgggatggagggtattcgtcgagtgagtggtttttcgttttttagtcggttttcgtttttttggcggttttatttttatttttttaaatcgtttcgttcgtaggtttttgatttttttcggtttcgttttcgttttcgttattagggaggtttttattaaggtgatagatttggaggttcgggtgtacggttcggacgcggagtattattggtcgttggtggttatggcggcgtgggagcggagggcgggattgttggagtagtcgggggcggtttttcgggattcgattcggagttcgggttttcgtacgttgtttttgttgtatcgcgcgttgcgttggttttagttttgtttttatcgggtggcgatcggcgcgttgggaggttcggacgcgggcgtgtagtgtagcgacgtttatcgtgcggttttgggttcgtattatttttggttggttcgatagatcgttcgtttcgtttttttcgttttttcgggtcgtcgtcgtttgttggagttggcgtgtttcggagttatcgaggcggaggcgcgggtcgcgttggttcgggtcgtcggtattttggaggatgtttataatcgtatttagagtttgttggtcgagcgcggtttgttttagttggtttaagacggcggttgcggggatcggcgggaacggagcggatcgttcggggtggggtcgcgtagttcggggttagttttgtagttcgcgtcgcggtcgttttcgtatttcgtttttttcgtgacgtcgtcgcggcgagggtcgttttcggtagggaatggcgttgagttttttttgttcgtagttt

SEQ ID NO: 3696 - DNA, 967 bp, Artificial Sequence
  chemically treated genomic DNA (Homo sapiens) CpG-island No: 3696
aaactacgaacaaaaaaaactcaacgccattccctaccgaaaacgaccctcgccgcgacgacgtcacgaaaaaaacgaaatacgaaaacgaccgcgacgcgaactacaaaactaaccccgaactacgcgaccccaccccgaacgatccgctccgttcccgccgatccccgcaaccgccgtcttaaaccaactaaaacaaaccgcgctcgaccaacaaactctaaatacgattataaacatcctccaaaataccgacgacccgaaccaacgcgacccgcgcctccgcctcgataactccgaaacacgccaactccaacaaacgacgacgacccgaaaaaacgaaaaaaacgaaacgaacgatctatcgaaccaaccaaaaataatacgaacccaaaaccgcacgataaacgtcgctacactacacgcccgcgtccgaacctcccaacgcgccgatcgccacccgataaaaacaaaactaaaaccaacgcaacgcgcgatacaacaaaaacaacgtacgaaaacccgaactccgaatcgaatcccgaaaaaccgcccccgactactccaacaatcccgccctccgctcccacgccgccataaccaccaacgaccaataatactccgcgtccgaaccgtacacccgaacctccaaatctatcaccttaataaaaacctccctaataacgaaaacgaaaacgaaaccgaaaaaaatcaaaaacctacgaacgaaacgatttaaaaaaataaaaataaaaccgccaaaaaaacgaaaaccgactaaaaaacgaaaaaccactcactcgacgaataccctccatcccgccaaatacgacgacaaccccacatccccttcgaatttcaaactaacgtaaaaccgcctcatcatacgacccaacatcccccgaaaacccaaacacgaaaactatttcctctccgaaacctccaaaattcccgactcctaccgaac

SEQ ID NO: 3697 - DNA, 1093 bp, Artificial Sequence
  chemically treated genomic DNA (Homo sapiens) CpG-island No: 3697
cgggcgggggtcgaggttcgaggggcggcgtcgagagaaacggggcgcggattcggagcgcggcggcggcgggggaggcgcggagggcgtagggcggaggcgcgggtcgaggggggagggcgagcggagagggaggagttttcggtcgtcgtcgttagttcgttcggcggtcgcgtagttcgtattcgtcgtcgcgtttcggagtttgagttttagcgttgtcggagcgtaggtacgttcggggcgcggggtcggagcgcgtagcgcggcgtcgtttttcggttttcggttttttaatttcggcgttttcggagcggcgcgcggagggaggagggcgggcgggcgcggcgggtcgggtcggcgggcggcggattatgaggcgtttattatggtgcgatgcgatcgcgggttgtagatgttgttgattacggtcggagttttcgtcgttttttcgtttatggttatcgttatcggtatcgattattggttgtattttagcgcgtatatttgtaacggtattaatttgattatggacgacgggttttcgtttcgtcgcgttcgcggcgattttatttattttggtttgtggcgggtgtgttgtatcgaaggtacggttagtttcgatttttcgtcgttttatatatatatatatatatatatatatatatatacgcgcgcgcgcgcgcgcgtatatatatatacgcgtatatattgttcggcgcgcgggtcggggagagggtgggcgcggcgttggtttcgcgcgagatataaaggagtcggagttggcgggcgggttttttcgcggttagttgtatattagttttggtttttttcggttggggatttttttagtatatcgattttataaattttttacgcgtatattttttcgtttatagatataatgaaatatatcgaaatttaagtacgcgcgcgtagttcgggattcgagcgatttttaggggtcgcgtcggtattttcgggggaggtggaggttggcgagggggcgggaggaggttggggttggggggagcggacgggagggggggaggggttgtttggtaatcggtgtttgtgttattgttatgggaat

SEQ ID NO: 3698 - DNA, 1093 bp, Artificial Sequence
  chemically treated genomic DNA (Homo sapiens) CpG-island No: 3698
attcccataacaataacacaaacaccgattaccaaacaacccctccccccctcccgtccgctccccccaaccccaacctcctcccgccccctcgccaacctccacctcccccgaaaataccgacgcgacccctaaaaatcgctcgaatcccgaactacgcgcgcgtacttaaatttcgatatatttcattatatctataaacgaaaaaatatacgcgtaaaaaatttataaaatcgatatactaaaaaaatccccaaccgaaaaaaaccaaaactaatatacaactaaccgcgaaaaaacccgcccgccaactccgactcctttatatctcgcgcgaaaccaacgccgcgcccaccctctccccgacccgcgcgccgaacaatatatacgcgtatatatatatacgcgcgcgcgcgcgcgcgtatatatatatatatatatatatatatatatataaaacgacgaaaaatcgaaactaaccgtaccttcgatacaacacacccgccacaaaccaaaataaataaaatcgccgcgaacgcgacgaaacgaaaacccgtcgtccataatcaaattaataccgttacaaatatacgcgctaaaatacaaccaataatcgataccgataacgataaccataaacgaaaaaacgacgaaaactccgaccgtaatcaacaacatctacaacccgcgatcgcatcgcaccataataaacgcctcataatccgccgcccgccgacccgacccgccgcgcccgcccgccctcctccctccgcgcgccgctccgaaaacgccgaaattaaaaaaccgaaaaccgaaaaacgacgccgcgctacgcgctccgaccccgcgccccgaacgtacctacgctccgacaacgctaaaactcaaactccgaaacgcgacgacgaatacgaactacgcgaccgccgaacgaactaacgacgacgaccgaaaactcctccctctccgctcgccctcccccctcgacccgcgcctccgccctacgccctccgcgcctcccccgccgccgccgcgctccgaatccgcgccccgtttctctcgacgccgcccctcgaacctcgacccccgcccg

SEQ ID NO: 3699 - DNA, 1093 bp, Artificial Sequence
  chemically treated genomic DNA (Homo sapiens) CpG-island No: 3699
gtttttatagtaatagtatagatatcggttgttaagtaatttttttttttttttcgttcgttttttttaattttagttttttttcgttttttcgttagtttttatttttttcgggggtgtcggcgcggtttttggggatcgttcgggtttcgggttacgcgcgcgtgtttgagtttcggtgtgttttattgtgtttgtgggcgagggggtgtgcgcgtggagagtttgtgggatcggtgtgttggggaggtttttagtcgagagggattagagttgatgtatagttggtcgcgaagggattcgttcgttagtttcggtttttttgtgtttcgcgcggagttagcgtcgcgtttatttttttttcggttcgcgcgtcgggtagtgtgtgcgcgtgtgtgtgtgtgcgcgcgcgcgcgcgcgcgtgtgtatatgtgtgtgtgtgtgtgtgtgtgtgtggggcggcgaggggtcggggttggtcgtattttcgatgtagtatattcgttatagattagagtgggtgaggtcgtcgcgggcgcggcggggcgggggttcgtcgtttatggttaggttggtgtcgttgtagatgtgcgcgttggagtatagttagtagtcggtgtcgatggcgatggttatgagcgagaaggcggcgaaggtttcggtcgtggttagtagtatttgtagttcgcggtcgtatcgtattatggtgggcgttttatagttcgtcgttcgtcggttcggttcgtcgcgttcgttcgttttttttttttcgcgcgtcgtttcgggggcgtcggggttggggggtcgagggtcggggggcggcgtcgcgttgcgcgtttcgatttcgcgtttcgggcgtgtttgcgtttcggtagcgttggggtttaaatttcgaggcgcggcgacgagtgcgggttgcgcggtcgtcgggcgggttggcggcggcggtcgggggttttttttttttcgttcgtttttttttttcggttcgcgttttcgttttgcgtttttcgcgtttttttcgtcgtcgtcgcgtttcgggttcgcgtttcgtttttttcggcgtcgtttttcgagtttcggttttcgttcg

SEQ ID NO: 3700 - DNA, 1093 bp, Artificial Sequence
  chemically treated genomic DNA (Homo sapiens) CpG-island No: 3700
cgaacgaaaaccgaaactcgaaaaacgacgccgaaaaaaacgaaacgcgaacccgaaacgcgacgacgacgaaaaaaacgcgaaaaacgcaaaacgaaaacgcgaaccgaaaaaaaaaaacgaacgaaaaaaaaaaaacccccgaccgccgccgccaacccgcccgacgaccgcgcaacccgcactcgtcgccgcgcctcgaaatttaaaccccaacgctaccgaaacgcaaacacgcccgaaacgcgaaatcgaaacgcgcaacgcgacgccgccccccgaccctcgaccccccaaccccgacgcccccgaaacgacgcgcgaaaaaaaaaaaacgaacgaacgcgacgaaccgaaccgacgaacgacgaactataaaacgcccaccataatacgatacgaccgcgaactacaaatactactaaccacgaccgaaaccttcgccgccttctcgctcataaccatcgccatcgacaccgactactaactatactccaacgcgcacatctacaacgacaccaacctaaccataaacgacgaacccccgccccgccgcgcccgcgacgacctcacccactctaatctataacgaatatactacatcgaaaatacgaccaaccccgacccctcgccgccccacacacacacacacacacacacacatatacacacgcgcgcgcgcgcgcgcgcacacacacacacgcgcacacactacccgacgcgcgaaccgaaaaaaaaataaacgcgacgctaactccgcgcgaaacacaaaaaaaccgaaactaacgaacgaatcccttcgcgaccaactatacatcaactctaatccctctcgactaaaaacctccccaacacaccgatcccacaaactctccacgcgcacaccccctcgcccacaaacacaataaaacacaccgaaactcaaacacgcgcgcgtaacccgaaacccgaacgatccccaaaaaccgcgccgacacccccgaaaaaaataaaaactaacgaaaaaacgaaaaaaaactaaaattaaaaaaaacgaacgaaaaaaaaaaaaaaattacttaacaaccgatatctatactattactataaaaac

SEQ ID NO: 3701 - DNA, 870 bp, Artificial Sequence
  chemically treated genomic DNA (Homo sapiens) CpG-island No: 3701
ttttcgcgtcgttttttatagtttcgtttttttttttcgagttttcgtggtggcgagcgtaggggtttagcgagcgaagagcgaagtttcgggttcgcgaggacgcgcggcgggtcgtatggtgtcgggattcggggcgtatagggtgttttcggcgcgtttcgggttggtttggtttttcgcgtttttaggcgttcgtcgtttgttcgtttttgttcgtttcggtcggtaagggtgcgcggaggtttgttcgttttttcggcgtttggcggtttcggcggttgtaggaacgcggcgtttaggcggagttttcgtcgtcgagtagggtcgagcgcgaggagttgttttaattcgcgaagtcgtttagtttcgcggttcgcgagttgttgtagcggcgttcgttgtcggatgtcgagcggagttgtagtttcgtgtttcgcgtatttgggcgtcggtatttgggtttcggtatttgggttcggatcgcgtgttgtagggaggggtcggcgggcggggatcggtatttgagcgcgtttcgcgggcgtcgtcgtacggtttatttgtttttagagtcgcggaaggcgtagatcgtgatttgttcgaggaggagaaaatttagaaatgttttatttttaagaagtcgtcgagaaaatcgagagattggttcgatcgggcggaggttgttttcgttaattttaaattggttcggttcggaaattttagcggcgttaaggtttttttagggattttcggttcggggtgaggtgttcggcggtttttgaattttttttattgacgtgttgttggcgttttttaaattaaaacgggatatcgcgatcgttagcgatattgtttttaatttcgttattt

SEQ ID NO: 3702 - DNA, 870 bp, Artificial Sequence
  chemically treated genomic DNA (Homo sapiens) CpG-island No: 3702
aaataacgaaattaaaaacaatatcgctaacgatcgcgatatcccgttttaatttaaaaaacgccaacaacacgtcaataaaaaaaattcaaaaaccgccgaacacctcaccccgaaccgaaaatccctaaaaaaaccttaacgccgctaaaatttccgaaccgaaccaatttaaaattaacgaaaacaacctccgcccgatcgaaccaatctctcgattttctcgacgacttcttaaaaataaaacatttctaaattttctcctcctcgaacaaatcacgatctacgccttccgcgactctaaaaacaaataaaccgtacgacgacgcccgcgaaacgcgctcaaataccgatccccgcccgccgacccctccctacaacacgcgatccgaacccaaataccgaaacccaaataccgacgcccaaatacgcgaaacacgaaactacaactccgctcgacatccgacaacgaacgccgctacaacaactcgcgaaccgcgaaactaaacgacttcgcgaattaaaacaactcctcgcgctcgaccctactcgacgacgaaaactccgcctaaacgccgcgttcctacaaccgccgaaaccgccaaacgccgaaaaaacgaacaaacctccgcgcacccttaccgaccgaaacgaacaaaaacgaacaaacgacgaacgcctaaaaacgcgaaaaaccaaaccaacccgaaacgcgccgaaaacaccctatacgccccgaatcccgacaccatacgacccgccgcgcgtcctcgcgaacccgaaacttcgctcttcgctcgctaaacccctacgctcgccaccacgaaaactcgaaaaaaaaaaacgaaactataaaaaacgacgcgaaaa

SEQ ID NO: 3703 - DNA, 870 bp, Artificial Sequence
  chemically treated genomic DNA (Homo sapiens) CpG-island No: 3703
aaatgacgaggttaggaataatatcgttgacggtcgcggtgtttcgttttaatttagagggcgttagtaatacgttagtgagggagatttagaagtcgtcgggtattttatttcgggtcgggaatttttaagagaattttgacgtcgttgaagttttcggatcgggttagtttggaattgacgaaagtagttttcgttcggtcgagttagtttttcggttttttcggcggttttttgaggatgaggtatttttaggttttttttttttcgagtaaattacggtttgcgtttttcgcggttttgggaataggtgagtcgtgcggcggcgttcgcgggacgcgtttaggtgtcggttttcgttcgtcggtttttttttgtagtacgcggttcgggtttaggtgtcggggtttaggtgtcggcgtttaggtgcgcggggtacggggttgtagtttcgttcggtattcgatagcgggcgtcgttgtagtagttcgcgggtcgcggagttgaacggtttcgcgagttggggtagtttttcgcgttcggttttgttcggcggcgagagtttcgtttgggcgtcgcgtttttatagtcgtcggagtcgttaggcgtcgagggaacggatagattttcgcgtatttttgtcgatcggggcgggtagaggcgggtaagcggcgaacgtttgggagcgcggagagttaggttagttcggagcgcgtcggggatattttgtgcgtttcgagtttcggtattatgcgattcgtcgcgcgttttcgcgggttcggggtttcgtttttcgttcgttgagtttttgcgttcgttattacggaaattcggaaagaggaggcgaggttgtggggagcggcgcggaga

SEQ ID NO: 3704 - DNA, 870 bp, Artificial Sequence
  chemically treated genomic DNA (Homo sapiens) CpG-island No: 3704
tctccgcgccgctccccacaacctcgcctcctctttccgaatttccgtaataacgaacgcaaaaactcaacgaacgaaaaacgaaaccccgaacccgcgaaaacgcgcgacgaatcgcataataccgaaactcgaaacgcacaaaatatccccgacgcgctccgaactaacctaactctccgcgctcccaaacgttcgccgcttacccgcctctacccgccccgatcgacaaaaatacgcgaaaatctatccgttccctcgacgcctaacgactccgacgactataaaaacgcgacgcccaaacgaaactctcgccgccgaacaaaaccgaacgcgaaaaactaccccaactcgcgaaaccgttcaactccgcgacccgcgaactactacaacgacgcccgctatcgaataccgaacgaaactacaaccccgtaccccgcgcacctaaacgccgacacctaaaccccgacacctaaacccgaaccgcgtactacaaaaaaaaaccgacgaacgaaaaccgacacctaaacgcgtcccgcgaacgccgccgcacgactcacctattcccaaaaccgcgaaaaacgcaaaccgtaatttactcgaaaaaaaaaaaacctaaaaatacctcatcctcaaaaaaccgccgaaaaaaccgaaaaactaactcgaccgaacgaaaactactttcgtcaattccaaactaacccgatccgaaaacttcaacgacgtcaaaattctcttaaaaattcccgacccgaaataaaatacccgacgacttctaaatctccctcactaacgtattactaacgccctctaaattaaaacgaaacaccgcgaccgtcaacgatattattcctaacctcgtcattt

SEQ ID NO: 3705 - DNA, 643 bp, Artificial Sequence
  chemically treated genomic DNA (Homo sapiens) CpG-island No: 3705
attttcgttttaagatgagagaattttttgtcggtgttagcgtttagcggttaacggaggtgagttggatatacgttttttaatattttttttttggttcgcgatttagatttttatcggtttttattattatatcgggggtcgggttcgtcgcggggaggtagatggcgggcggcgtagttatagtttcggtttcgtcgttttttattttgcgttcgcgggttttagaattcgttcgtcggatagttaatcgcgtttcgttttttgtttatagttattgtcgtttatttcggaagtagtttttttttagacgtaagattcgttttatttacgcgcgcgtcgtagtttgggggcggagttcgtcgtagatttcgttttttttttttttcgattgggtaggcggggtaggaggggcggttattacgcgggagtatttatggcgtatgttttttggtgggttagttttcggacggcggttgcggaggtcgggtgagagggtgatcgcgttgttgaaagtcgattgcgtttacgtggattgcgggttcgtttcgggtcgtttttttttgttgtttacgaggaaatttaaagtttgtgttgatttatgaaatttgatttcgttttttttttttttttgagagtttat

SEQ ID NO: 3706 - DNA, 643 bp, Artificial Sequence
  chemically treated genomic DNA (Homo sapiens) CpG-island No: 3706
ataaactctcaaaaaaaaaaaaaaaacgaaatcaaatttcataaatcaacacaaactttaaatttcctcgtaaacaacaaaaaaaaacgacccgaaacgaacccgcaatccacgtaaacgcaatcgactttcaacaacgcgatcaccctctcacccgacctccgcaaccgccgtccgaaaactaacccaccaaaaaacatacgccataaatactcccgcgtaataaccgcccctcctaccccgcctacccaatcgaaaaaaaaaaaaaacgaaatctacgacgaactccgcccccaaactacgacgcgcgcgtaaataaaacgaatcttacgtctaaaaaaaaactacttccgaaataaacgacaataactataaacaaaaaacgaaacgcgattaactatccgacgaacgaattctaaaacccgcgaacgcaaaataaaaaacgacgaaaccgaaactataactacgccgcccgccatctacctccccgcgacgaacccgacccccgatataataataaaaaccgataaaaatctaaatcgcgaaccaaaaaaaaaatattaaaaaacgtatatccaactcacctccgttaaccgctaaacgctaacaccgacaaaaaattctctcatcttaaaacgaaaat

SEQ ID NO: 3707 - DNA, 643 bp, Artificial Sequence
  chemically treated genomic DNA (Homo sapiens) CpG-island No: 3707
gtaaatttttaggaggggagaaagaacgagattaggttttatgggttaatatagattttaggttttttcgtgaatagtagggaggagcggttcggagcgaattcgtagtttacgtaggcgtagtcggtttttagtagcgcgattatttttttattcgattttcgtagtcgtcgttcgaagattagtttattagagagtatgcgttatgggtgttttcgcgtggtagtcgttttttttgtttcgtttgtttagtcggaaaggagaaggggcggggtttgcggcgggtttcgtttttaaattgcggcgcgcgcgtgggtggggcgggttttacgtttggagaagggttattttcggggtggacggtaatggttgtgggtaaggagcgaggcgcgattggttgttcggcggacgagttttggggttcgcgagcgtaaagtggaaggcggcggggtcggggttgtggttgcgtcgttcgttatttattttttcgcggcgggttcggttttcggtatgatggtggggatcggtggggatttaggtcgcgggttaggaggagggtgttggggaacgtgtgtttagtttattttcgttagtcgttgaacgttagtatcgatagaagatttttttattttaaagcggaggt

SEQ ID NO: 3708 - DNA, 643 bp, Artificial Sequence
  chemically treated genomic DNA (Homo sapiens) CpG-island No: 3708
acctccgctttaaaataaaaaaatcttctatcgatactaacgttcaacgactaacgaaaataaactaaacacacgttccccaacaccctcctcctaacccgcgacctaaatccccaccgatccccaccatcataccgaaaaccgaacccgccgcgaaaaaataaataacgaacgacgcaaccacaaccccgaccccgccgccttccactttacgctcgcgaaccccaaaactcgtccgccgaacaaccaatcgcgcctcgctccttacccacaaccattaccgtccaccccgaaaataacccttctccaaacgtaaaacccgccccacccacgcgcgcgccgcaatttaaaaacgaaacccgccgcaaaccccgccccttctcctttccgactaaacaaacgaaacaaaaaaaacgactaccacgcgaaaacacccataacgcatactctctaataaactaatcttcgaacgacgactacgaaaatcgaataaaaaaataatcgcgctactaaaaaccgactacgcctacgtaaactacgaattcgctccgaaccgctcctccctactattcacgaaaaaacctaaaatctatattaacccataaaacctaatctcgttctttctcccctcctaaaaatttac

SEQ ID NO: 3709 - DNA, 727 bp, Artificial Sequence
  chemically treated genomic DNA (Homo sapiens) CpG-island No: 3709
gacgcgttcgtttcggtttggggggattcgggttagtagtcggtcgtcgcgcgtgcgtattgggcggggggtttcgcgtttttatttgtacgtggttagcgttcggcgttgggtcgtagtttttgtcgtgtacgttggggagtcggtatatgtaggtgggaagttttatacggagaggcgcgtcgttttcgtgatagggttttatttggtatatcggtatggtagaattaaagtaaaagggggtagcgcgtgttaaaggttaacgtttagaaatcgttagaggttacgacggagatcggttattttttttttgattttgttgcgggcgttcgggaaaacgtagttcggtgtgttttgattggtttaggttttttgacgttacgaagtcgatttttgatagagttaataggcgaaaaggagagacgggaagtatttttgtcgtttcgttcggaaagggtggagtataacgtcgaaagtagttaatgggagtttaggaggcggagcgtttgtgggagttttggagggaatttttttagttttcgaggcggatcgggtgttgtatttatggagcgagttgagagttcgaggtgagcggggttcgtagtttttcggtgttttttttcgcgcgttttttttgagatttacggtattttaatttttttggaaatggggggaatatggtcgaggcgcgtggcgaggtagttttttggaggtttcggagtggcga

SEQ ID NO: 3710 - DNA, 727 bp, Artificial Sequence
  chemically treated genomic DNA (Homo sapiens) CpG-island No: 3710
tcgccactccgaaacctccaaaaaactacctcgccacgcgcctcgaccatattccccccatttccaaaaaaattaaaataccgtaaatctcaaaaaaaacgcgcgaaaaaaaacaccgaaaaactacgaaccccgctcacctcgaactctcaactcgctccataaatacaacacccgatccgcctcgaaaactaaaaaaattccctccaaaactcccacaaacgctccgcctcctaaactcccattaactactttcgacgttatactccaccctttccgaacgaaacgacaaaaatacttcccgtctctccttttcgcctattaactctatcaaaaatcgacttcgtaacgtcaaaaaacctaaaccaatcaaaacacaccgaactacgttttcccgaacgcccgcaacaaaatcaaaaaaaaaataaccgatctccgtcgtaacctctaacgatttctaaacgttaacctttaacacgcgctacccccttttactttaattctaccataccgatataccaaataaaaccctatcacgaaaacgacgcgcctctccgtataaaacttcccacctacatataccgactccccaacgtacacgacaaaaactacgacccaacgccgaacgctaaccacgtacaaataaaaacgcgaaaccccccgcccaatacgcacgcgcgacgaccgactactaacccgaatccccccaaaccgaaacgaacgcgtc

SEQ ID NO: 3711 - DNA, 727 bp, Artificial Sequence
  chemically treated genomic DNA (Homo sapiens) CpG-island No: 3711
tcgttatttcggggtttttagggggttgtttcgttacgcgtttcggttatgttttttttatttttagggaggttggaatgtcgtgggttttaaagagggcgcgcgagaggggatatcggaagattgcgagtttcgtttatttcgagtttttagttcgttttatggatgtaatattcgattcgtttcggggattgggaaagttttttttagggtttttataggcgtttcgttttttgaatttttattggttgttttcgacgttgtgttttatttttttcgggcggggcggtaaaaatatttttcgtttttttttttcgtttattggttttgttaaaggtcgatttcgtgacgttaaagagtttgggttaattagagtatatcggattgcgttttttcgaacgttcgtagtagggttagaagggaggtggtcggttttcgtcgtgatttttgacggtttttgagcgttggtttttggtacgcgttatttttttttgttttggttttgttatgtcgatgtattaggtaaagttttattacgggggcggcgcgttttttcgtgtggagttttttatttgtatgtatcggttttttaacgtgtacggtaggagttacggtttagcgtcgggcgttggttacgtgtaggtaggagcgcggggtttttcgtttagtgcgtacgcgcggcgatcggttgttggttcgggtttttttaggtcggagcgagcgcgtt

SEQ ID NO: 3712 - DNA, 727 bp, Artificial Sequence
  chemically treated genomic DNA (Homo sapiens) CpG-island No: 3712
aacgcgctcgctccgacctaaaaaaacccgaaccaacaaccgatcgccgcgcgtacgcactaaacgaaaaaccccgcgctcctacctacacgtaaccaacgcccgacgctaaaccgtaactcctaccgtacacgttaaaaaaccgatacatacaaataaaaaactccacacgaaaaaacgcgccgcccccgtaataaaactttacctaatacatcgacataacaaaaccaaaacaaaaaaaaataacgcgtaccaaaaaccaacgctcaaaaaccgtcaaaaatcacgacgaaaaccgaccacctcccttctaaccctactacgaacgttcgaaaaaacgcaatccgatatactctaattaacccaaactctttaacgtcacgaaatcgacctttaacaaaaccaataaacgaaaaaaaaaaacgaaaaatatttttaccgccccgcccgaaaaaaataaaacacaacgtcgaaaacaaccaataaaaattcaaaaaacgaaacgcctataaaaaccctaaaaaaaactttcccaatccccgaaacgaatcgaatattacatccataaaacgaactaaaaactcgaaataaacgaaactcgcaatcttccgatatcccctctcgcgcgccctctttaaaacccacgacattccaacctccctaaaaataaaaaaaacataaccgaaacgcgtaacgaaacaaccccctaaaaaccccgaaataacga

SEQ ID NO: 3713 - DNA, 1406 bp, Artificial Sequence
  chemically treated genomic DNA (Homo sapiens) CpG-island No: 3713
tacgaacgttaacgtagtttaaggagaatttttaaaaaatttcgagggaggagttagtttattcgtttaggttacgcgtttcgcgttttttacgggtttagcgggcgcgaattcgttaatcgtttagcgtttcgttaattatcgtattttttatttattgtttcgttttgcgtttcgttttggttaattattagggagttatcgtttgttttttcgtttttttcgttcgtttttaatcggttggaagtttgaagtttttaaatttagtcggcgtttaatagcgcggtagtagcgaggtgtatttttagttttcgggcgggtagtttcgttttttttttttcgtttttttgttttttttaatgggagatggagttttcgatacgttatcgcgcggttgtgtaggagttgtttaatcggcgttcggggagaatggcgtaattaaaaagcggcggaagaaggtgggagggttatgacgtagcgagttttagtcgtgatttttttgggggtatcgcggcgttttttttttttgtttttaaagtaaaacgtcgtttcgacgtatttttcgcgtatttcggggggcggaggcggcgggttacggcgcgaagaggggcggtgttgacgtcggtcggttacgtgggcgtgttgtgggggggaggggcgtcgtcgcgcggtcggtttcgggcggttgggagcgcgcgagttagcgagcgagaggtagtcgcgttcgtcgtcgtttttgttttgtatgtcgttttttttcggcgcggtcgtcgtcgattatagtagtaggagttatcgtcgtcgcggttgatgtggttgggtcggggttgaggaggtcgttaagatgtcgtagtttaagtttcggaagatcgcgattttgggttatcggtttgtgggtgagtggtcggtggtcgcgcggttttttcgcgtcgtcggggtttcgtttgggagtcgggtcgcggtcgggtttgcgaagtttggagtcggcgcggttatgtggcggggcgggcgggggtcgcgcgtttcgtaattattattttgagcggaggtggtggcggtcggggcggcgttcgcgtcggtggaggagtcgcggtagttgggcgtttttcgcgggtcgggcgggtaggtggcggtcgggcggagggcgtgggaggcgcggggcgggggtcgtcggtcgtcgaggagttcgggtttcgtttggggaagtgaggcggcgtcggggagtcgcgttagaggttgtcgcgagggagttatatttgttttttcgttttcgtcgcgggcgcgcgtgatcggggttggcggttttttttatttcgttttcgatgtaaggaaaagaaagttcgtgggattttaataaaggaagtagcgtttcggttttattttatttgtggtgaagtttatttttg

SEQ ID NO: 3714 - DNA, 1406 bp, Artificial Sequence
  chemically treated genomic DNA (Homo sapiens) CpG-island No: 3714
caaaaataaacttcaccacaaataaaataaaaccgaaacgctacttcctttattaaaatcccacgaactttcttttccttacatcgaaaacgaaataaaaaaaaccgccaaccccgatcacgcgcgcccgcgacgaaaacgaaaaaacaaatataactccctcgcgacaacctctaacgcgactccccgacgccgcctcacttccccaaacgaaacccgaactcctcgacgaccgacgacccccgccccgcgcctcccacgccctccgcccgaccgccacctacccgcccgacccgcgaaaaacgcccaactaccgcgactcctccaccgacgcgaacgccgccccgaccgccaccacctccgctcaaaataataattacgaaacgcgcgacccccgcccgccccgccacataaccgcgccgactccaaacttcgcaaacccgaccgcgacccgactcccaaacgaaaccccgacgacgcgaaaaaaccgcgcgaccaccgaccactcacccacaaaccgataacccaaaatcgcgatcttccgaaacttaaactacgacatcttaacgacctcctcaaccccgacccaaccacatcaaccgcgacgacgataactcctactactataatcgacgacgaccgcgccgaaaaaaaacgacatacaaaacaaaaacgacgacgaacgcgactacctctcgctcgctaactcgcgcgctcccaaccgcccgaaaccgaccgcgcgacgacgcccctcccccccacaacacgcccacgtaaccgaccgacgtcaacaccgcccctcttcgcgccgtaacccgccgcctccgccccccgaaatacgcgaaaaatacgtcgaaacgacgttttactttaaaaacaaaaaaaaaaaacgccgcgatacccccaaaaaaatcacgactaaaactcgctacgtcataaccctcccaccttcttccgccgctttttaattacgccattctccccgaacgccgattaaacaactcctacacaaccgcgcgataacgtatcgaaaactccatctcccattaaaaaaaacaaaaaaacgaaaaaaaaaaaacgaaactacccgcccgaaaactaaaaatacacctcgctactaccgcgctattaaacgccgactaaatttaaaaacttcaaacttccaaccgattaaaaacgaacgaaaaaaacgaaaaaacaaacgataactccctaataattaaccaaaacgaaacgcaaaacgaaacaataaataaaaaatacgataattaacgaaacgctaaacgattaacgaattcgcgcccgctaaacccgtaaaaaacgcgaaacgcgtaacctaaacgaataaactaactcctccctcgaaattttttaaaaattctccttaaactacgttaacgttcgta

SEQ ID NO: 3715 - DNA, 1406 bp, Artificial Sequence
  chemically treated genomic DNA (Homo sapiens) CpG-island No: 3715
taagggtaaattttattatagatggaatgaagtcgaggcgttgttttttttgttaaaattttacggatttttttttttttatatcgggggcggggtgggggagatcgttagtttcggttacgcgcgttcgcggcgaaggcggggaggtaggtgtgattttttcgcggtagtttttagcgcggtttttcggcgtcgttttatttttttagacgagattcggatttttcggcggtcgacggttttcgtttcgcgttttttacgtttttcgttcggtcgttatttgttcgttcggttcgcggagggcgtttagttatcgcggtttttttatcggcgcggacgtcgtttcgatcgttattattttcgtttagaatggtggttacgaaacgcgcggttttcgttcgtttcgttatatggtcgcgtcggttttaaatttcgtaggttcggtcgcgattcggtttttaggcgaggtttcggcggcgcgaggaggtcgcgcggttatcggttatttatttatagatcggtagtttaggatcgcgatttttcgggatttggattgcggtattttggcggtttttttagtttcggtttaattatattaatcgcggcggcggtggtttttgttgttgtgatcggcggcggtcgcgtcgggagagagcggtatatagagtaggggcggcggcgggcgcggttgtttttcgttcgttagttcgcgcgtttttaatcgttcggaatcgatcgcgcggcggcgttttttttttttataatacgtttacgtgatcggtcggcgttagtatcgttttttttcgcgtcgtggttcgtcgttttcgtttttcgaaatacgcggggggtgcgtcggggcgacgttttattttaaaggtaaaaaaaggggacgtcgcgatgtttttagaaaagttacgattgaaattcgttgcgttatgatttttttattttttttcgtcgttttttaattacgttatttttttcgagcgtcgattggatagtttttgtatagtcgcgcgatgacgtgtcggaaattttattttttattgggggaaataaggaggcggggaggggggggcggggttgttcgttcgggagttaaaaatatatttcgttgttatcgcgttgttgggcgtcggttaggtttgaaggttttaaatttttaatcggttaggggcgggcgggagaggcggagagataaacggtggttttttggtgattggttagaacggagcgtagggcggggtaataggtgggaggtgcggtgattggcgaaacgttaagcggttggcgggttcgcgttcgttgagttcgtgaagggcgcgaggcgcgtggtttgggcgggtgggttggtttttttttcggggttttttgaaaattttttttgagttgcgttagcgttcgtg

SEQ ID NO: 3716 - DNA, 1406 bp, Artificial Sequence
  chemically treated genomic DNA (Homo sapiens) CpG-island No: 3716
cacgaacgctaacgcaactcaaaaaaaattttcaaaaaaccccgaaaaaaaaaccaacccacccgcccaaaccacgcgcctcgcgcccttcacgaactcaacgaacgcgaacccgccaaccgcttaacgtttcgccaatcaccgcacctcccacctattaccccgccctacgctccgttctaaccaatcaccaaaaaaccaccgtttatctctccgcctctcccgcccgcccctaaccgattaaaaatttaaaaccttcaaacctaaccgacgcccaacaacgcgataacaacgaaatatatttttaactcccgaacgaacaaccccgcccccccctccccgcctccttatttcccccaataaaaaataaaatttccgacacgtcatcgcgcgactatacaaaaactatccaatcgacgctcgaaaaaaataacgtaattaaaaaacgacgaaaaaaaataaaaaaatcataacgcaacgaatttcaatcgtaacttttctaaaaacatcgcgacgtcccctttttttacctttaaaataaaacgtcgccccgacgcaccccccgcgtatttcgaaaaacgaaaacgacgaaccacgacgcgaaaaaaaacgatactaacgccgaccgatcacgtaaacgtattataaaaaaaaaaaacgccgccgcgcgatcgattccgaacgattaaaaacgcgcgaactaacgaacgaaaaacaaccgcgcccgccgccgcccctactctatataccgctctctcccgacgcgaccgccgccgatcacaacaacaaaaaccaccgccgccgcgattaatataattaaaccgaaactaaaaaaaccgccaaaataccgcaatccaaatcccgaaaaatcgcgatcctaaactaccgatctataaataaataaccgataaccgcgcgacctcctcgcgccgccgaaacctcgcctaaaaaccgaatcgcgaccgaacctacgaaatttaaaaccgacgcgaccatataacgaaacgaacgaaaaccgcgcgtttcgtaaccaccattctaaacgaaaataataacgatcgaaacgacgtccgcgccgataaaaaaaccgcgataactaaacgccctccgcgaaccgaacgaacaaataacgaccgaacgaaaaacgtaaaaaacgcgaaacgaaaaccgtcgaccgccgaaaaatccgaatctcgtctaaaaaaataaaacgacgccgaaaaaccgcgctaaaaactaccgcgaaaaaatcacacctacctccccgccttcgccgcgaacgcgcgtaaccgaaactaacgatctcccccaccccgcccccgatataaaaaaaaaaaaatccgtaaaattttaacaaaaaaaacaacgcctcgacttcattccatctataataaaatttaccctta

SEQ ID NO: 3717 - DNA, 703 bp, Artificial Sequence
  chemically treated genomic DNA (Homo sapiens) CpG-island No: 3717
cggtgtcgggagcggggcgaggaggagggtgggtatgaggcggtagcggatcgcggagtcgagatttattcgaacgacgcgggcgagcggggttttggacgtcggtggagacgtaggcgaggtacggagcggaaggattagggttaagagtagcgcggtttttagtttcgggagcggggcggcgaggtgtttcgggtcggggttggggggagcggttggtttgtgtcgttcgcgcggcgggggcggttgcgcgtcggtgtttttcgttgtttttcgttttatattttagtttcgttagtttcgtttgtttcgttttaggtcgttttcggtttttttaatttttttagtgcgcggtttttttgttttaggcgttggttgtcggcgtttgtagcggtcggttaagtttcgaaggcgtgaggcggagtattttttggtcgtttttttttgcggcggtttttttcggttcggtttttattttttcgtttaggacgttggtttcgaagtaatatttgtggtcgggcggggttttttatagaatattttcggaacgtttcgggatgggattttcggatttaaattatagatttcggtcgcggtaggggcgtcgggatttgatttcgcgttgttttggggggatagaagcgtttcggagtggggaggggatttgaagtttgtggttttgatttttatttcgtggttgagg

SEQ ID NO: 3718 - DNA, 703 bp, Artificial Sequence
  chemically treated genomic DNA (Homo sapiens) CpG-island No: 3718
cctcaaccacgaaataaaaatcaaaaccacaaacttcaaatcccctccccactccgaaacgcttctatccccccaaaacaacgcgaaatcaaatcccgacgcccctaccgcgaccgaaatctataatttaaatccgaaaatcccatcccgaaacgttccgaaaatattctataaaaaaccccgcccgaccacaaatattacttcgaaaccaacgtcctaaacgaaaaaataaaaaccgaaccgaaaaaaaccgccgcaaaaaaaaacgaccaaaaaatactccgcctcacgccttcgaaacttaaccgaccgctacaaacgccgacaaccaacgcctaaaacaaaaaaaccgcgcactaaaaaaattaaaaaaaccgaaaacgacctaaaacgaaacaaacgaaactaacgaaactaaaatataaaacgaaaaacaacgaaaaacaccgacgcgcaaccgcccccgccgcgcgaacgacacaaaccaaccgctccccccaaccccgacccgaaacacctcgccgccccgctcccgaaactaaaaaccgcgctactcttaaccctaatccttccgctccgtacctcgcctacgtctccaccgacgtccaaaaccccgctcgcccgcgtcgttcgaataaatctcgactccgcgatccgctaccgcctcatacccaccctcctcctcgccccgctcccgacaccg

SEQ ID NO: 3719 - DNA, 703 bp, Artificial Sequence
  chemically treated genomic DNA (Homo sapiens) CpG-island No: 3719
ttttagttacggggtggaaattaggattataggttttaaattttttttttatttcgggacgtttttgtttttttagggtaacgcgggattaagtttcggcgtttttgtcgcggtcggggtttgtggtttgggttcgagagttttatttcggagcgtttcggggatgttttgtgagaggtttcgttcgattataaatgttgtttcggaattagcgttttggacggggaagtgggagtcgggtcgagggaagtcgtcgtagagggaggcggttaagaaatgtttcgttttacgttttcggggtttggtcggtcgttgtagacgtcggtaattagcgtttgagatagagaagtcgcgtattgggaggattaagggagtcgagggcggtttggaacggggtaggcggggttgacgaggttggaatgtgggacgaaggatagcgggaggtatcgacgcgtaatcgttttcgtcgcgcggacggtatagattaatcgttttttttaatttcggttcgagatatttcgtcgtttcgttttcggagttgagagtcgcgttgtttttggttttagttttttcgtttcgtatttcgtttgcgtttttatcggcgtttaaagtttcgttcgttcgcgtcgttcgggtaggtttcgatttcgcggttcgttatcgttttatatttattttttttttcgtttcgttttcggtatcg

SEQ ID NO: 3720 - DNA, 703 bp, Artificial Sequence
  chemically treated genomic DNA (Homo sapiens) CpG-island No: 3720
cgataccgaaaacgaaacgaaaaaaaaaataaatataaaacgataacgaaccgcgaaatcgaaacctacccgaacgacgcgaacgaacgaaactttaaacgccgataaaaacgcaaacgaaatacgaaacgaaaaaactaaaaccaaaaacaacgcgactctcaactccgaaaacgaaacgacgaaatatctcgaaccgaaattaaaaaaaacgattaatctataccgtccgcgcgacgaaaacgattacgcgtcgatacctcccgctatccttcgtcccacattccaacctcgtcaaccccgcctaccccgttccaaaccgccctcgactcccttaatcctcccaatacgcgacttctctatctcaaacgctaattaccgacgtctacaacgaccgaccaaaccccgaaaacgtaaaacgaaacatttcttaaccgcctccctctacgacgacttccctcgacccgactcccacttccccgtccaaaacgctaattccgaaacaacatttataatcgaacgaaacctctcacaaaacatccccgaaacgctccgaaataaaactctcgaacccaaaccacaaaccccgaccgcgacaaaaacgccgaaacttaatcccgcgttaccctaaaaaaacaaaaacgtcccgaaataaaaaaaaaatttaaaacctataatcctaatttccaccccgtaactaaaa

SEQ ID NO: 3721 - DNA, 768 bp, Artificial Sequence
  chemically treated genomic DNA (Homo sapiens) CpG-island No: 3721
cggcgtttttgtcgcggttaagagttgtggtttgggttcgagcgttttagttaggcgcgttttagagaggttatgggaggggtttcgcgcgattataaatgttgtttcggagttagcgttttggacggggaagtgagagtcgggacgaggggagtcgtcgaagagggaggcggtcgggaaatgtttcgcgttaggtttttaagggtttgttcgggcgttggagatgtcggtaacgagtacgttagacggagaagtcgcgtattgtgaggattaagggagtcgagggcggtttggaattgggaaggcggagttgacggggttggaatgtgggacgaaggatagcgggaggtatcgacgcgtaattgttttagtcgcgcggagggtacggatcgatcgtttcgtcgtttacggttcgagacgttcggtcgtttcgttttcgtagttgagagtcgcgacgtttttatattagttcgttcgtttcgtatttcgttcgcggtttcgtcgatatttatatagtcgttcgttcgcgtggttgtagtaggtttggttttcgttgttcgttttcgttttatatatatttttttgttagtttcgttttcggcgcggtttgcgtacgtacgatacgtaagtcgtgtaaacgttattttcggggtttttggttttttatcggaggaaatgtgagtcggatttaaagggtcgaggggattggggtgttttcgtgacgtttaagagtaaatagaagagggcggtttttaggttaaagttagg

SEQ ID NO: 3722 - DNA, 768 bp, Artificial Sequence
  chemically treated genomic DNA (Homo sapiens) CpG-island No: 3722
cctaactttaacctaaaaaccgccctcttctatttactcttaaacgtcacgaaaacaccccaatcccctcgaccctttaaatccgactcacatttcctccgataaaaaaccaaaaaccccgaaaataacgtttacacgacttacgtatcgtacgtacgcaaaccgcgccgaaaacgaaactaacaaaaaaatatatataaaacgaaaacgaacaacgaaaaccaaacctactacaaccacgcgaacgaacgactatataaatatcgacgaaaccgcgaacgaaatacgaaacgaacgaactaatataaaaacgtcgcgactctcaactacgaaaacgaaacgaccgaacgtctcgaaccgtaaacgacgaaacgatcgatccgtaccctccgcgcgactaaaacaattacgcgtcgatacctcccgctatccttcgtcccacattccaaccccgtcaactccgccttcccaattccaaaccgccctcgactcccttaatcctcacaatacgcgacttctccgtctaacgtactcgttaccgacatctccaacgcccgaacaaacccttaaaaacctaacgcgaaacatttcccgaccgcctccctcttcgacgactcccctcgtcccgactctcacttccccgtccaaaacgctaactccgaaacaacatttataatcgcgcgaaacccctcccataacctctctaaaacgcgcctaactaaaacgctcgaacccaaaccacaactcttaaccgcgacaaaaacgccg

SEQ ID NO: 3723 - DNA, 768 bp, Artificial Sequence
  chemically treated genomic DNA (Homo sapiens) CpG-island No: 3723
tttagttttagtttggaggtcgtttttttttatttgtttttagacgttacgggggtattttagttttttcgattttttggattcggtttatatttttttcggtgaagagttaaaggtttcggaagtgacgtttgtacggtttgcgtatcgtgcgtgcgtaggtcgcgtcgggggcggggttagtaggagggtgtgtgtggggcgggagcggataacggagattagatttattgtagttacgcgggcgagcggttgtgtggatgtcggcgaagtcgcgggcgaggtacggaacggacggattggtgtaagagcgtcgcggtttttagttacgggagcggggcggtcgggcgtttcgggtcgtgggcggcggggcggtcggttcgtgtttttcgcgcggttggggtagttgcgcgtcggtgtttttcgttgtttttcgttttatattttagtttcgttagtttcgtttttttagttttaggtcgttttcggtttttttaatttttatagtgcgcggttttttcgtttaacgtgttcgttgtcggtatttttagcgttcggataagtttttgaaggtttgacgcggagtatttttcggtcgttttttttttcggcggtttttttcgtttcggtttttattttttcgtttaggacgttggtttcgaagtaatatttgtggtcgcgcggggttttttttatgatttttttggaacgcgtttagttgggacgttcggatttagattatagtttttggtcgcgataggggcgtcg

SEQ ID NO: 3724 - DNA, 768 bp, Artificial Sequence
  chemically treated genomic DNA (Homo sapiens) CpG-island No: 3724
cgacgcccctatcgcgaccaaaaactataatctaaatccgaacgtcccaactaaacgcgttccaaaaaaatcataaaaaaaaccccgcgcgaccacaaatattacttcgaaaccaacgtcctaaacgaaaaaataaaaaccgaaacgaaaaaaaccgccgaaaaaaaaaacgaccgaaaaatactccgcgtcaaaccttcaaaaacttatccgaacgctaaaaataccgacaacgaacacgttaaacgaaaaaaccgcgcactataaaaattaaaaaaaccgaaaacgacctaaaactaaaaaaacgaaactaacgaaactaaaatataaaacgaaaaacaacgaaaaacaccgacgcgcaactaccccaaccgcgcgaaaaacacgaaccgaccgccccgccgcccacgacccgaaacgcccgaccgccccgctcccgtaactaaaaaccgcgacgctcttacaccaatccgtccgttccgtacctcgcccgcgacttcgccgacatccacacaaccgctcgcccgcgtaactacaataaatctaatctccgttatccgctcccgccccacacacaccctcctactaaccccgcccccgacgcgacctacgcacgcacgatacgcaaaccgtacaaacgtcacttccgaaacctttaactcttcaccgaaaaaaatataaaccgaatccaaaaaatcgaaaaaactaaaatacccccgtaacgtctaaaaacaaataaaaaaaaacgacctccaaactaaaactaaa

SEQ ID NO: 3725 - DNA, 592 bp, Artificial Sequence
  chemically treated genomic DNA (Homo sapiens) CpG-island No: 3725
agtcgcggtgtttcgttttaatttcggtttcgtttattcgtcgagggatcgttatgtttcgcgttcgtttttttttcgcgtttttttttacgtttcgcggttcgtcgttcgttcgggtattttttgtggtagtaggggtagcgcgtgtttcgtttgcgtggtcgtcggcgtggtcggttttagaaagtcgttttcggcgttagagttggatatggtatcgttttgacgacggttgtttggttttcgtttcgtgattattattatttttttggttttgggtagtgggcgcggtttcgggcgggcggaggcggcggtttcgggtattttttatcgtcgagtagcgtttggtatgacgcggtcggttgcgggttggtcggaggggggcgagaggtagtgcgtaggcgggagggcggtggtttttttaacgtcgattttcgtcgtcgttttgattggggttttgatttcgatacgttatttcgttgagttggtcgacgtcgcgttggtttcgttttgattggtaggaagttcgtttagtcgaagagtaggtagcgtagttcggcgtttgagtggtttttgggttgggggggggggg

SEQ ID NO: 3726 - DNA, 592 bp, Artificial Sequence
  chemically treated genomic DNA (Homo sapiens) CpG-island No: 3726
ccccccccccccaacccaaaaaccactcaaacgccgaactacgctacctactcttcgactaaacgaacttcctaccaatcaaaacgaaaccaacgcgacgtcgaccaactcaacgaaataacgtatcgaaatcaaaaccccaatcaaaacgacgacgaaaatcgacgttaaaaaaaccaccgccctcccgcctacgcactacctctcgcccccctccgaccaacccgcaaccgaccgcgtcataccaaacgctactcgacgataaaaaatacccgaaaccgccgcctccgcccgcccgaaaccgcgcccactacccaaaaccaaaaaaataataataatcacgaaacgaaaaccaaacaaccgtcgtcaaaacgataccatatccaactctaacgccgaaaacgactttctaaaaccgaccacgccgacgaccacgcaaacgaaacacgcgctacccctactaccacaaaaaatacccgaacgaacgacgaaccgcgaaacgtaaaaaaaaacgcgaaaaaaaaacgaacgcgaaacataacgatccctcgacgaataaacgaaaccgaaattaaaacgaaacaccgcgact

SEQ ID NO: 3727 - DNA, 592 bp, Artificial Sequence
  chemically treated genomic DNA (Homo sapiens) CpG-island No: 3727
ttttttttttttaatttagggattatttaggcgtcggattgcgttgtttgtttttcgattgggcgagttttttgttaattagggcggaattagcgcggcgtcggttagtttagcgggatggcgtgtcgggattagagttttagttagggcgacgacgagagtcggcgttgagggagttatcgttttttcgtttgcgtattgtttttcgttttttttcggttagttcgtagtcggtcgcgttatgttaggcgttgttcggcggtagggagtgttcggggtcgtcgttttcgttcgttcgaagtcgcgtttattgtttagagttagagggatggtggtagttacggggcgggagttagatagtcgtcgttaggacggtgttatgtttagttttgacgtcgaagacgattttttggagtcggttacgtcgacggttacgtaggcggggtacgcgttgtttttgttgttataggaggtattcgggcgggcggcgggtcgcggggcgtggggaggggcgcgggggagaagcgggcgcggggtatagcggtttttcggcgggtgggcggggtcggggttgaggcggggtatcgcgatt

SEQ ID NO: 3728 - DNA, 592 bp, Artificial Sequence
  chemically treated genomic DNA (Homo sapiens) CpG-island No: 3728
aatcgcgataccccgcctcaaccccgaccccgcccacccgccgaaaaaccgctataccccgcgcccgcttctcccccgcgcccctccccacgccccgcgacccgccgcccgcccgaatacctcctataacaacaaaaacaacgcgtaccccgcctacgtaaccgtcgacgtaaccgactccaaaaaatcgtcttcgacgtcaaaactaaacataacaccgtcctaacgacgactatctaactcccgccccgtaactaccaccatccctctaactctaaacaataaacgcgacttcgaacgaacgaaaacgacgaccccgaacactccctaccgccgaacaacgcctaacataacgcgaccgactacgaactaaccgaaaaaaaacgaaaaacaatacgcaaacgaaaaaacgataactccctcaacgccgactctcgtcgtcgccctaactaaaactctaatcccgacacgccatcccgctaaactaaccgacgccgcgctaattccgccctaattaacaaaaaactcgcccaatcgaaaaacaaacaacgcaatccgacgcctaaataatccctaaattaaaaaaaaaaaa

SEQ ID NO: 3729 - DNA, 805 bp, Artificial Sequence
  chemically treated genomic DNA (Homo sapiens) CpG-island No: 3729
  unsure (91..92, 234, 289, 317, 363, 367, 599, 726, 796)
ttacgcgtttagtatagttattttttttcgttttatgcgtttagtatagttattttttttcgttttatgcgtttagtatagttattttttnnttcgttttacgcgtttagtatagttattttttttcgttttacgcgtttagtatagttattttttttcgttttacgcgtttagtatagttattttttttcgttttacgcgtttagtatagttattttttttcgttttacgcgntttagtatagttattttttttcgttttatgcgtttagtatagttatttttttttnggttttatgcgtttagtatagttatttntttttcgttttatgcgtttagtatagttattttttttcgttttatngcgntttagtatagttattttttttcgttttacgcgtttagtatagttattttttttcgttttacgcgtttagtatagttattttttttcgttttatgcgtttagtatagttattttttttcgttttatgcgtttagtatagttattttttttcgttttatgcgtttagtatagttattttttttcgttttatgcgtttagtatagttattttttttcgttttatgcgtttagtantagttattttttttcgttttatgcgtttagtatagttattttttttcgttttatgcgtttagtatagttattttttttcgttttatgcgtttagtatagttattttttttcgttttaggcgtttagntatagttatttttttttattttatgtatttagtatagttattttttttcgttttatgcgtttagtatagnttatttttt

SEQ ID NO: 3730 - DNA, 805 bp, Artificial Sequence
  chemically treated genomic DNA (Homo sapiens) CpG-island No: 3730
  unsure (10, 80, 207, 439, 443, 489, 517, 572, 714..)
aaaaaataanctatactaaacgcataaaacgaaaaaaaataactatactaaatacataaaataaaaaaaaataactatanctaaacgcctaaaacgaaaaaaaataactatactaaacgcataaaacgaaaaaaaataactatactaaacgcataaaacgaaaaaaaataactatactaaacgcataaaacgaaaaaaaataactantactaaacgcataaaacgaaaaaaaataactatactaaacgcataaaacgaaaaaaaataactatactaaacgcataaaacgaaaaaaaataactatactaaacgcataaaacgaaaaaaaataactatactaaacgcataaaacgaaaaaaaataactatactaaacgcgtaaaacgaaaaaaaataactatactaaacgcgtaaaacgaaaaaaaataactatactaaancgcnataaaacgaaaaaaaataactatactaaacgcataaaacgaaaaanaaataactatactaaacgcataaaaccnaaaaaaaaataactatactaaacgcataaaacgaaaaaaaataactatactaaancgcgtaaaacgaaaaaaaataactatactaaacgcgtaaaacgaaaaaaaataactatactaaacgcgtaaaacgaaaaaaaataactatactaaacgcgtaaaacgaaaaaaaataactatactaaacgcgtaaaacgaannaaaaaataactatactaaacgcataaaacgaaaaaaaataactatactaaacgcataaaacgaaaaaaaataactatactaaacgcgtaa

SEQ ID NO: 3731 - DNA, 805 bp, Artificial Sequence
  chemically treated genomic DNA (Homo sapiens) CpG-island No: 3731
  unsure (10, 80, 207, 439, 443, 489, 517, 572, 714..)
gaagagtaanttgtgttgggcgtatgggacggaaaagagtaattgtgttgggtgtatggggtggaaaagagtaattgtgnttgggcgtttgggacgggaaagggtaattgtgttgggcgtatgggacgggaaagggtaattgtgttgggcgtatgggacggaaaagggtaattgtgttgggcgtatgggacgggaaagggtaattgntgttgggcgtatgggacgggaaagggtaattgtgttgggcgtatgggacgggaaagggtaattgtgttgggcgtatgggacgggaaagagtaattgtgttgggcgtatgggacgggaaagagtaattgtgttgggcgtatgggacggaaaagagtaattgtgttgggcgcgtgggacggaaaagggtaattgtgttgggcgcgtgggacgggaaagggtaattgtgttgggncgtnatgggacgggaaagggtaattgtgttgggcgtatgggacgggaaangggtaattgtgttgggcgtatgggattnggaaaagagtaattgtgttgggcgtatgggacgggaaagggtaattgtgttgggncgcgtgggacggaaaagagtaattgtgttgggcgcgtgggacgggaaagggtaattgtgttgggcgcgtgggacgggaaagggtaattgtgttgggcgcgtgggacgggaaagggtaattgtgttgggcgcgtgggacgggnnaaagggtaattgtgttgggcgtatgggacgggaaagggtaattgtgttgggcgtatggggcggaaaagagtaattgtgttgggcgcgtgg

SEQ ID NO: 3732 - DNA, 805 bp, Artificial Sequence
  chemically treated genomic DNA (Homo sapiens) CpG-island No: 3732
  unsure (91..92, 234, 289, 317, 363, 367, 599, 726, 796)
ccacgcgcccaacacaattactcttttccgccccatacgcccaacacaattaccctttcccgtcccatacgcccaacacaattaccctttnncccgtcccacgcgcccaacacaattaccctttcccgtcccacgcgcccaacacaattaccctttcccgtcccacgcgcccaacacaattaccctttcccgtcccacgcgcccaacacaattactcttttccgtcccacgcgncccaacacaattaccctttcccgtcccatacgcccaacacaattactcttttccnaatcccatacgcccaacacaattacccntttcccgtcccatacgcccaacacaattaccctttcccgtcccatnacgncccaacacaattaccctttcccgtcccacgcgcccaacacaattacccttttccgtcccacgcgcccaacacaattactcttttccgtcccatacgcccaacacaattactctttcccgtcccatacgcccaacacaattactctttcccgtcccatacgcccaacacaattaccctttcccgtcccatacgcccaacacaattaccctttcccgtcccatacgcccaacancaattaccctttcccgtcccatacgcccaacacaattacccttttccgtcccatacgcccaacacaattaccctttcccgtcccatacgcccaacacaattaccctttcccgtcccaaacgcccaancacaattactcttttccaccccatacacccaacacaattactcttttccgtcccatacgcccaacacaanttactcttc

SEQ ID NO: 3733 - DNA, 789 bp, Artificial Sequence
  chemically treated genomic DNA (Homo sapiens) CpG-island No: 3733
agttcgcggagttggttcgagaaggtggttgagggtattaagtttttatcgtcgtttttttttaaaataaatattagttagtcgtcgagttcggagtcgggagggcggtagggtggcgttagtatttatttttttcggaatggtagggttcgtagtcgaagaggtcgcggcgtcggcgtcggcgtcggtttcgggttttatgttttcgttgaatagagtttggttcggtttcgcgtcgttattatcgttatcgtttagcgtcgttattttataatcgagagtcggggttcgagcggtcgttgtcgggcggggagggggaagggaggcggagagttgggggaggcggaggcggaggcggaggcggaggagcggggggcgcggggggcgcggggaggagcggttcgggcggcgtcgcgggcggagggcgtttgggttattttaggtatcggttcgcggtttcgggcgtagtcgagtttgaggggattgggggaaggacgttaggcgggggtgcgggggggagcgggggaagggggcggagacgacgagaagtcgtcgcggtaacggcgttattcgcgtgttacggtcgtgacgttatttcggtgcgtgacgtaatttgaggcgcgttttcgcgtcgtcgttcggggagggtttttttttttttaattattcgcgtttttatattttgttttcgtttcgtcgtttttatggtttcggttttttattttttttttgtttttttcgtttttagtttgttttgtaatgtgggatttattagaagagtagggttgg

SEQ ID NO: 3734 - DNA, 789 bp, Artificial Sequence
  chemically treated genomic DNA (Homo sapiens) CpG-island No: 3734
ccaaccctactcttctaataaatcccacattacaaaacaaactaaaaacgaaaaaaacaaaaaaaaaataaaaaaccgaaaccataaaaacgacgaaacgaaaacaaaatataaaaacgcgaataattaaaaaaaaaaaaaccctccccgaacgacgacgcgaaaacgcgcctcaaattacgtcacgcaccgaaataacgtcacgaccgtaacacgcgaataacgccgttaccgcgacgacttctcgtcgtctccgcccccttcccccgctcccccccgcacccccgcctaacgtccttcccccaatcccctcaaactcgactacgcccgaaaccgcgaaccgatacctaaaataacccaaacgccctccgcccgcgacgccgcccgaaccgctcctccccgcgccccccgcgccccccgctcctccgcctccgcctccgcctccgcctcccccaactctccgcctcccttccccctccccgcccgacaacgaccgctcgaaccccgactctcgattataaaataacgacgctaaacgataacgataataacgacgcgaaaccgaaccaaactctattcaacgaaaacataaaacccgaaaccgacgccgacgccgacgccgcgacctcttcgactacgaaccctaccattccgaaaaaaataaatactaacgccaccctaccgccctcccgactccgaactcgacgactaactaatatttattttaaaaaaaaacgacgataaaaacttaataccctcaaccaccttctcgaaccaactccgcgaact

SEQ ID NO: 3735 - DNA, 789 bp, Artificial Sequence
  chemically treated genomic DNA (Homo sapiens) CpG-island No: 3735
ttagttttgtttttttagtaaattttatattatagaataggttgaggacggaggagataagaggaaagtaggaaatcggagttatggaaacggcggagcggaggtaaagtgtgagagcgcgggtggttagaagggaaaaaatttttttcggacgacggcgcgaaggcgcgttttagattacgttacgtatcggggtgacgttacgatcgtgatacgcgggtgacgtcgttgtcgcggcgatttttcgtcgttttcgtttttttttttcgttttttttcgtattttcgtttagcgttttttttttaatttttttaggttcggttgcgttcggggtcgcgggtcggtatttgaggtggtttaggcgtttttcgttcgcggcgtcgttcgggtcgttttttttcgcgtttttcgcgtttttcgttttttcgttttcgttttcgttttcgttttttttagtttttcgtttttttttttttttttcgttcgatagcggtcgttcgggtttcggttttcggttataagatggcggcgttgagcggtggcggtggtggcggcgcggagtcgggttaggttttgtttaacggggatatggagttcgaggtcggcgtcggcgtcggcgtcgcggttttttcggttgcggattttgttatttcggaggaggtgagtgttggcgttattttgtcgttttttcgatttcgggttcggcggttggttggtgtttattttggaaagaggcggcggtgggggtttgatgtttttagttattttttcgggttagtttcgcgggtt

SEQ ID NO: 3736 - DNA, 789 bp, Artificial Sequence
  chemically treated genomic DNA (Homo sapiens) CpG-island No: 3736
aacccgcgaaactaacccgaaaaaataactaaaaacatcaaacccccaccgccgcctctttccaaaataaacaccaaccaaccgccgaacccgaaatcgaaaaaacgacaaaataacgccaacactcacctcctccgaaataacaaaatccgcaaccgaaaaaaccgcgacgccgacgccgacgccgacctcgaactccatatccccgttaaacaaaacctaacccgactccgcgccgccaccaccgccaccgctcaacgccgccatcttataaccgaaaaccgaaacccgaacgaccgctatcgaacgaaaaaaaaaaaaaaaaacgaaaaactaaaaaaaacgaaaacgaaaacgaaaacgaaaaaacgaaaaacgcgaaaaacgcgaaaaaaaacgacccgaacgacgccgcgaacgaaaaacgcctaaaccacctcaaataccgacccgcgaccccgaacgcaaccgaacctaaaaaaattaaaaaaaaaacgctaaacgaaaatacgaaaaaaaacgaaaaaaaaaaacgaaaacgacgaaaaatcgccgcgacaacgacgtcacccgcgtatcacgatcgtaacgtcaccccgatacgtaacgtaatctaaaacgcgccttcgcgccgtcgtccgaaaaaaattttttcccttctaaccacccgcgctctcacactttacctccgctccgccgtttccataactccgatttcctactttcctcttatctcctccgtcctcaacctattctataatataaaatttactaaaaaaacaaaactaa

SEQ ID NO: 3737 - DNA, 541 bp, Artificial Sequence
  chemically treated genomic DNA (Homo sapiens) CpG-island No: 3737
ttcgcgggggtttgggtcgggacggggcggaggacgggggttttttattgttttttttgtcggagttcgacgacgaggcgagtgagagcgttcgggttcggttagtttcgtcgtcgtcggtcgcgtcggtttttagttcgtttcgggagcgtttttttcggtttcgttgcgatcgcgatcgtcgttttttgcggagtttatggtttcgcgtcgggttatttatggttttgttgcgtcggggttttttcgtttgttcgttataggttacggtcgtagttatataaaaaaaaattgatatcgagttttttttttttttttacggttttttttcgtttcgaggagggcgcgggggagacggcggtcgaaagaagggagagaggggaagaaagagaggagaaagaaaagggggaaggggcggagagaggggaggagggacggggagcgagggcgagaggcgaggagtttaagtgtggggttttttatagtatcgagggtcggagatgtttgggagtagcgtcgagtaaagtaatggttgaatata

SEQ ID NO: 3738 - DNA, 541 bp, Artificial Sequence
  chemically treated genomic DNA (Homo sapiens) CpG-island No: 3738
tatattcaaccattactttactcgacgctactcccaaacatctccgaccctcgatactataaaaaaccccacacttaaactcctcgcctctcgccctcgctccccgtccctcctcccctctctccgccccttcccccttttctttctcctctctttcttcccctctctcccttctttcgaccgccgtctcccccgcgccctcctcgaaacgaaaaaaaaccgtaaaaaaaaaaaaaaaactcgatatcaatttttttttatataactacgaccgtaacctataacgaacaaacgaaaaaaccccgacgcaacaaaaccataaataacccgacgcgaaaccataaactccgcaaaaaacgacgatcgcgatcgcaacgaaaccgaaaaaaacgctcccgaaacgaactaaaaaccgacgcgaccgacgacgacgaaactaaccgaacccgaacgctctcactcgcctcgtcgtcgaactccgacaaaaaaaacaataaaaaacccccgtcctccgccccgtcccgacccaaacccccgcgaa

SEQ ID NO: 3739 - DNA, 541 bp, Artificial Sequence
  chemically treated genomic DNA (Homo sapiens) CpG-island No: 3739
tgtgtttagttattattttgttcggcgttgtttttaggtattttcgattttcggtgttgtggggagttttatatttgggtttttcgtttttcgttttcgtttttcgttttttttttttttttttcgtttttttttttttttttttttttttttttttttttttttttttttttttttcggtcgtcgtttttttcgcgtttttttcggggcggagggaagtcgtgaagggggagggagggttcggtgttaatttttttttgtgtggttgcggtcgtagtttgtggcgggtaagcggggagatttcggcgtagtagaattatggatggttcgacgcggggttatggatttcgtaaaaagcggcggtcgcggtcgtagcgagatcgggagaggcgttttcggggcgggttgggggtcggcgcggtcggcggcggcggggttggtcggattcgggcgtttttattcgtttcgtcgtcgggtttcgataaggaagataatgggaagttttcgtttttcgtttcgtttcggtttagattttcgcgga

SEQ ID NO: 3740 - DNA, 541 bp, Artificial Sequence
  chemically treated genomic DNA (Homo sapiens) CpG-island No: 3740
tccgcgaaaatctaaaccgaaacgaaacgaaaaacgaaaacttcccattatcttccttatcgaaacccgacgacgaaacgaataaaaacgcccgaatccgaccaaccccgccgccgccgaccgcgccgacccccaacccgccccgaaaacgcctctcccgatctcgctacgaccgcgaccgccgctttttacgaaatccataaccccgcgtcgaaccatccataattctactacgccgaaatctccccgcttacccgccacaaactacgaccgcaaccacacaaaaaaaaattaacaccgaaccctccctcccccttcacgacttccctccgccccgaaaaaaacgcgaaaaaaacgacgaccgaaaaaaaaaaaaaaaaaaaaaaaaaaaaaaaaaaaaaaaaaaaaaaaaaaacgaaaaaaaaaaaaaaaaaacgaaaaacgaaaacgaaaaacgaaaaacccaaatataaaactccccacaacaccgaaaatcgaaaatacctaaaaacaacgccgaacaaaataataactaaacaca

SEQ ID NO: 3741 - DNA, 570 bp, Artificial Sequence
  chemically treated genomic DNA (Homo sapiens) CpG-island No: 3741
tatttatcgtttcgttttaatcgtcgttaacggttttggttttcgcgagttttggaattatagaggtcgtacggtgagttgttaggtgtggttcgtaatcggagcgtataaaatatgatgggatacgtaacgggattatatagggtatattgggtatttgtaggggcgcgaggtggcggtacgtaatgggagcgcgttgagtatgatggggtatgtgcgggagcgttaggcggggtatgtaattagagcgtgcggggtatgatggggtacggatatggggggttaggtggggtacgtaattggagttcgcggggtaggatggggtatttaattggagcgatagagagtacgatggggtatttataggggtcggaggttgggtacgtaatgagagcgagcgggaaatgatggggtatttaacgagtacgtagagtatgatggggtacgggtgcgaggtggggcgtatagtgggagcgcgtggggtatgatgggatatatggcgaggtcgttagggtataggggaagtatttttggaatacgtgagtgatagggttgtcgtttttgaaggag

SEQ ID NO: 3742 - DNA, 570 bp, Artificial Sequence
  chemically treated genomic DNA (Homo sapiens) CpG-island No: 3742
ctccttcaaaaacgacaaccctatcactcacgtattccaaaaatacttcccctataccctaacgacctcgccatatatcccatcataccccacgcgctcccactatacgccccacctcgcacccgtaccccatcatactctacgtactcgttaaataccccatcatttcccgctcgctctcattacgtacccaacctccgacccctataaataccccatcgtactctctatcgctccaattaaataccccatcctaccccgcgaactccaattacgtaccccacctaaccccccatatccgtaccccatcataccccgcacgctctaattacataccccgcctaacgctcccgcacataccccatcatactcaacgcgctcccattacgtaccgccacctcgcgcccctacaaatacccaatataccctatataatcccgttacgtatcccatcatattttatacgctccgattacgaaccacacctaacaactcaccgtacgacctctataattccaaaactcgcgaaaaccaaaaccgttaacgacgattaaaacgaaacgataaata

SEQ ID NO: 3743 - DNA, 570 bp, Artificial Sequence
  chemically treated genomic DNA (Homo sapiens) CpG-island No: 3743
tttttttaagggcggtagttttgttatttacgtgttttaaaagtgttttttttgtgttttgacggtttcgttatgtgttttattatgttttacgcgtttttattgtgcgttttatttcgtattcgtgttttattatgttttgcgtgttcgttaggtgttttattatttttcgttcgtttttattacgtatttagttttcggtttttgtaagtgttttatcgtgttttttgtcgttttagttagatgttttattttgtttcgcgagttttaattacgtgttttatttaattttttatgttcgtgttttattatgtttcgtacgttttggttatatgtttcgtttggcgttttcgtatatgttttattatgtttagcgcgtttttattacgtgtcgttatttcgcgtttttgtaagtgtttaatgtgttttgtgtggtttcgttacgtgttttattatgttttgtgcgtttcgattacgggttatatttggtaatttatcgtgcgatttttgtagttttagagttcgcgagggttagggtcgttggcggcggttggaacgaaacgatgagtg

SEQ ID NO: 3744 - DNA, 570 bp, Artificial Sequence
  chemically treated genomic DNA (Homo sapiens) CpG-island No: 3744
cactcatcgtttcgttccaaccgccgccaacgaccctaaccctcgcgaactctaaaactacaaaaatcgcacgataaattaccaaatataacccgtaatcgaaacgcacaaaacataataaaacacgtaacgaaaccacacaaaacacattaaacacttacaaaaacgcgaaataacgacacgtaataaaaacgcgctaaacataataaaacatatacgaaaacgccaaacgaaacatataaccaaaacgtacgaaacataataaaacacgaacataaaaaattaaataaaacacgtaattaaaactcgcgaaacaaaataaaacatctaactaaaacgacaaaaaacacgataaaacacttacaaaaaccgaaaactaaatacgtaataaaaacgaacgaaaaataataaaacacctaacgaacacgcaaaacataataaaacacgaatacgaaataaaacgcacaataaaaacgcgtaaaacataataaaacacataacgaaaccgtcaaaacacaaaaaaaacacttttaaaacacgtaaataacaaaactaccgcccttaaaaaaa

SEQ ID NO: 3745 - DNA, 849 bp, Artificial Sequence
  chemically treated genomic DNA (Homo sapiens) CpG-island No: 3745
gtaaaagtggtgaacgcgatgggtcggcggggagggcggtgtggagcgcggcgtcgggcgggcgggtgggcggcggttaggtttatttcgtaggttttggtttttcggagcgggggcgggttgcggcggttcgggtttgtttaggtaattgtttatgaggagtagttcggtagggttaggtttttcgagtagggttcgcggttttaggaggttttcgttggttgtcgatttggtcggaggcgaagcgaatagtgttcgtcgatgtcgcgttttttgaacgaaggaggataaggggcgcgaatttcggggttcgcggtttagtttttattaggtcgcggtagtttttacggttagttaggttagcgtagtcgtagtaggtacgaggtatagtaggaggtcgattagcgataggtcgagaagcgtcgtttcggtcggttcgtcgtagtttcggtttcggtcgtttttgatattcgttatcggtcgtcgtcgttcgtttgttttagtcgtcgtagtcgtcggagatatcgcggtttcgcgtcgcggaggagatttaaatattttagcgtgtatcgcgttacgcgtcgcgttatcgcgcgttcgttacgttatgcgcgcgcgattcggggagacgttatagttcggtagttttcgagatatagttgttttggaaaatgttgtttgtttttaacgtttgtttttgatttttgcggttttttgtatggtttttagcgagacgatttcgttcgggattttattcggtttttattcggaggcgatttcgtgaaaggatcgcgtttaaaataaaaggattcgagatttatgtttatgtaatttttaattcgtgatttt

SEQ ID NO: 3746 - DNA, 849 bp, Artificial Sequence
  chemically treated genomic DNA (Homo sapiens) CpG-island No: 3746
aaaatcacgaattaaaaattacataaacataaatctcgaatccttttattttaaacgcgatcctttcacgaaatcgcctccgaataaaaaccgaataaaatcccgaacgaaatcgtctcgctaaaaaccatacaaaaaaccgcaaaaatcaaaaacaaacgttaaaaacaaacaacattttccaaaacaactatatctcgaaaactaccgaactataacgtctccccgaatcgcgcgcgcataacgtaacgaacgcgcgataacgcgacgcgtaacgcgatacacgctaaaatatttaaatctcctccgcgacgcgaaaccgcgatatctccgacgactacgacgactaaaacaaacgaacgacgacgaccgataacgaatatcaaaaacgaccgaaaccgaaactacgacgaaccgaccgaaacgacgcttctcgacctatcgctaatcgacctcctactatacctcgtacctactacgactacgctaacctaactaaccgtaaaaactaccgcgacctaataaaaactaaaccgcgaaccccgaaattcgcgccccttatcctccttcgttcaaaaaacgcgacatcgacgaacactattcgcttcgcctccgaccaaatcgacaaccaacgaaaacctcctaaaaccgcgaaccctactcgaaaaacctaaccctaccgaactactcctcataaacaattacctaaacaaacccgaaccgccgcaacccgcccccgctccgaaaaaccaaaacctacgaaataaacctaaccgccgcccacccgcccgcccgacgccgcgctccacaccgccctccccgccgacccatcgcgttcaccacttttac

SEQ ID NO: 3747 - DNA, 849 bp, Artificial Sequence
  chemically treated genomic DNA (Homo sapiens) CpG-island No: 3747
aagattacggattaggaattatataagtataggtttcgggtttttttattttggacgcgatttttttacgggatcgttttcggatgggagtcggatgggatttcggacgggatcgtttcgttgggagttatgtaggaaatcgtaagagttagaaataggcgttgaaggtaggtagtattttttaaaatagttgtgtttcgggagttgtcgggttgtagcgttttttcgagtcgcgcgcgtatgacgtggcgggcgcgcgatgacgcgacgcgtggcgcggtgtacgttgggatatttaagtttttttcgcggcgcggagtcgcgatgttttcggcggttgcggcggttggagtaggcgagcggcggcggtcgatagcgagtgttagggacggtcggggtcggggttgcggcgggtcggtcggggcggcgtttttcggtttgtcgttggtcggttttttattgtatttcgtgtttgttgcggttgcgttggtttggttggtcgtggggattatcgcggtttggtggggattgagtcgcgagtttcgaggttcgcgttttttgttttttttcgtttagaaggcgcgatatcggcgaatattgttcgtttcgttttcggttaagtcgatagttaacggaaattttttagagtcgcggattttgttcgaaggatttgattttgtcgaattgttttttatgggtagttatttgggtaagttcgggtcgtcgtagttcgttttcgtttcggagggttaggatttgcggaataggtttggtcgtcgtttattcgttcgttcggcgtcgcgttttatatcgtttttttcgtcgatttatcgcgtttattatttttat

SEQ ID NO: 3748 - DNA, 849 bp, Artificial Sequence
  chemically treated genomic DNA (Homo sapiens) CpG-island No: 3748
ataaaaataataaacgcgataaatcgacgaaaaaaacgatataaaacgcgacgccgaacgaacgaataaacgacgaccaaacctattccgcaaatcctaaccctccgaaacgaaaacgaactacgacgacccgaacttacccaaataactacccataaaaaacaattcgacaaaatcaaatccttcgaacaaaatccgcgactctaaaaaatttccgttaactatcgacttaaccgaaaacgaaacgaacaatattcgccgatatcgcgccttctaaacgaaaaaaaacaaaaaacgcgaacctcgaaactcgcgactcaatccccaccaaaccgcgataatccccacgaccaaccaaaccaacgcaaccgcaacaaacacgaaatacaataaaaaaccgaccaacgacaaaccgaaaaacgccgccccgaccgacccgccgcaaccccgaccccgaccgtccctaacactcgctatcgaccgccgccgctcgcctactccaaccgccgcaaccgccgaaaacatcgcgactccgcgccgcgaaaaaaacttaaatatcccaacgtacaccgcgccacgcgtcgcgtcatcgcgcgcccgccacgtcatacgcgcgcgactcgaaaaaacgctacaacccgacaactcccgaaacacaactattttaaaaaatactacctaccttcaacgcctatttctaactcttacgatttcctacataactcccaacgaaacgatcccgtccgaaatcccatccgactcccatccgaaaacgatcccgtaaaaaaatcgcgtccaaaataaaaaaacccgaaacctatacttatataattcctaatccgtaatctt

SEQ ID NO: 3749 - DNA, 674 bp, Artificial Sequence
  chemically treated genomic DNA (Homo sapiens) CpG-island No: 3749
cgcgaacgttagggaggatttagcgcgcggcggtcggtgacgttagggtagcgagaggtttcgttatcgcggcgcgggggcggggtcgtttgttacgcggcgtcggcggacgcgcggcgttgggcggaggtagcggttcggggattgggcgagggttttgggtttgaggaggcgcggtcgttattgcgtttagcgtttgcgcgacgtttggttgttgggtttcggggtagtttagttcgcgtcgtttttgcgggtcggattggggttgtggcgggagagaagatgtcgtagttcgagttttagaaggcggcgattttgggttgcgggtaaggcggtgagtattttttaggcggcggtttttcggcgttttttagtatttcgagagttgcggcggcggcggcgcgcggggtttgggtaggttgggggcggcggcggggtagcgtttggtttttcgcgggttttgggttttcgtacgttttttgggcgaggttcgtgttttcgggagacgtcgttgttttcgcgttttttttagcgttttttgaggtttgttcgcgggcgtgggggcgaggattagggcgttggtttcgttttcgcgtatttaggacggaggtatatttgattttgtagttttttttagtattttttaaaatgaagtttagattagtattgtttat

SEQ ID NO: 3750 - DNA, 674 bp, Artificial Sequence
  chemically treated genomic DNA (Homo sapiens) CpG-island No: 3750
ataaacaatactaatctaaacttcattttaaaaaatactaaaaaaaactacaaaatcaaatatacctccgtcctaaatacgcgaaaacgaaaccaacgccctaatcctcgcccccacgcccgcgaacaaacctcaaaaaacgctaaaaaaaacgcgaaaacaacgacgtctcccgaaaacacgaacctcgcccaaaaaacgtacgaaaacccaaaacccgcgaaaaaccaaacgctaccccgccgccgcccccaacctacccaaaccccgcgcgccgccgccgccgcaactctcgaaatactaaaaaacgccgaaaaaccgccgcctaaaaaatactcaccgccttacccgcaacccaaaatcgccgccttctaaaactcgaactacgacatcttctctcccgccacaaccccaatccgacccgcaaaaacgacgcgaactaaactaccccgaaacccaacaaccaaacgtcgcgcaaacgctaaacgcaataacgaccgcgcctcctcaaacccaaaaccctcgcccaatccccgaaccgctacctccgcccaacgccgcgcgtccgccgacgccgcgtaacaaacgaccccgcccccgcgccgcgataacgaaacctctcgctaccctaacgtcaccgaccgccgcgcgctaaatcctccctaacgttcgcg

SEQ ID NO: 3751 - DNA, 674 bp, Artificial Sequence
  chemically treated genomic DNA (Homo sapiens) CpG-island No: 3751
gtggataatattgatttggattttattttaggaaatgttgggggaggttgtaggattaggtgtgttttcgttttaaatacgcgaaaacgaggttagcgttttggttttcgtttttacgttcgcgaataagttttaggagacgttgggggaggcgcgggggtagcggcgtttttcggagatacgagtttcgtttagggggcgtgcgggagtttaggattcgcggggagttaggcgttgtttcgtcgtcgtttttagtttgtttaggtttcgcgcgtcgtcgtcgtcgtagttttcgaggtgttgagggacgtcgggaggtcgtcgtttagagggtatttatcgttttgttcgtagtttaggatcgtcgttttttgggattcgggttgcggtattttttttttcgttatagttttagttcgattcgtaggagcggcgcgggttgaattgtttcggggtttagtagttaggcgtcgcgtaggcgttgggcgtagtggcggtcgcgtttttttaggtttagggttttcgtttagttttcgagtcgttgttttcgtttagcgtcgcgcgttcgtcggcgtcgcgtgataggcggtttcgttttcgcgtcgcggtgacgaaatttttcgttgttttgacgttatcggtcgtcgcgcgttgagttttttttagcgttcgcg

SEQ ID NO: 3752 - DNA, 674 bp, Artificial Sequence
  chemically treated genomic DNA (Homo sapiens) CpG-island No: 3752
cgcgaacgctaaaaaaaactcaacgcgcgacgaccgataacgtcaaaacaacgaaaaatttcgtcaccgcgacgcgaaaacgaaaccgcctatcacgcgacgccgacgaacgcgcgacgctaaacgaaaacaacgactcgaaaactaaacgaaaaccctaaacctaaaaaaacgcgaccgccactacgcccaacgcctacgcgacgcctaactactaaaccccgaaacaattcaacccgcgccgctcctacgaatcgaactaaaactataacgaaaaaaaaaataccgcaacccgaatcccaaaaaacgacgatcctaaactacgaacaaaacgataaataccctctaaacgacgacctcccgacgtccctcaacacctcgaaaactacgacgacgacgacgcgcgaaacctaaacaaactaaaaacgacgacgaaacaacgcctaactccccgcgaatcctaaactcccgcacgccccctaaacgaaactcgtatctccgaaaaacgccgctacccccgcgcctcccccaacgtctcctaaaacttattcgcgaacgtaaaaacgaaaaccaaaacgctaacctcgttttcgcgtatttaaaacgaaaacacacctaatcctacaacctcccccaacatttcctaaaataaaatccaaatcaatattatccac

SEQ ID NO: 3753 - DNA, 616 bp, Artificial Sequence
  chemically treated genomic DNA (Homo sapiens) CpG-island No: 3753
gcgaattttagattttagtaggcgtagtatttaaatttcgttttttttagttattaattttcggtcgtcgcggttgtagatatagattcgtttttttcgggacgcggtgatcgcgatttggcgttacggagtttgtttgggggcgttcggagagtcgtgggcggggggagggcgtttgattttttttttaaaaaaaattttttttgtcgacgcgtttcgttgcgcgtttagttcggagaattcgtcgtcgtttttcgttttcgagaagtttttacgtttttttcgttattatcgtttcgcgtttggtattggaatcggggtcggttattcgcgtcgtcgtcgtcgtcgtcgcgttttcggggcgtcgtcgtttgcgttcgcgggtcgaggggtttggtttttgcgtcgtcgtttttttcgggtttttggtcgtttaggaggtgattcgttttcgggggcgcggggaaggatttcgaggtgttgattttgttagtgaatttttggtatagcgaagttatcgggtatcgcgtttttgttggttgtttttggggttttttaatattttgtttttttttcggtttttattttttatttcgttttagattaaaaaaaaaaa

SEQ ID NO: 3754 - DNA, 616 bp, Artificial Sequence
  chemically treated genomic DNA (Homo sapiens) CpG-island No: 3754
tttttttttttaatctaaaacgaaataaaaaataaaaaccgaaaaaaaaacaaaatattaaaaaaccccaaaaacaaccaacaaaaacgcgatacccgataacttcgctataccaaaaattcactaacaaaatcaacacctcgaaatccttccccgcgcccccgaaaacgaatcacctcctaaacgaccaaaaacccgaaaaaaacgacgacgcaaaaaccaaacccctcgacccgcgaacgcaaacgacgacgccccgaaaacgcgacgacgacgacgacgacgcgaataaccgaccccgattccaataccaaacgcgaaacgataataacgaaaaaaacgtaaaaacttctcgaaaacgaaaaacgacgacgaattctccgaactaaacgcgcaacgaaacgcgtcgacaaaaaaaattttttttaaaaaaaaaatcaaacgccctccccccgcccacgactctccgaacgcccccaaacaaactccgtaacgccaaatcgcgatcaccgcgtcccgaaaaaaacgaatctatatctacaaccgcgacgaccgaaaattaataactaaaaaaaacgaaatttaaatactacgcctactaaaatctaaaattcgc

SEQ ID NO: 3755 - DNA, 616 bp, Artificial Sequence
  chemically treated genomic DNA (Homo sapiens) CpG-island No: 3755
tttttttttttaatttggagcggggtggggagtgggaatcggagagaaagtaaaatattaaaaagttttaaagatagttagtaggagcgcggtgttcgatggtttcgttgtattagaggtttattggtaagattaatatttcgaggttttttttcgcgttttcggaggcgagttattttttgggcggttaggggttcgaggaggacggcggcgtaggagttaagtttttcggttcgcgggcgtaggcggcggcgtttcgggagcgcggcggcggcggcggcggcgcgggtggtcggtttcggttttagtattaggcgcggagcgatggtgacgaggaggacgtaagagtttttcgggggcggggggcggcggcgggtttttcgggttgagcgcgtagcgagacgcgtcggtaggggaaattttttttggggggggaattaggcgtttttttttcgtttacgatttttcgggcgtttttagataggtttcgtggcgttagatcgcggttatcgcgtttcggagggagcgggtttgtgtttgtagtcgcggcggtcgggagttggtggttggagagagcggggtttgggtattgcgtttgttgggatttggaattcgt

SEQ ID NO: 3756 - DNA, 616 bp, Artificial Sequence
  chemically treated genomic DNA (Homo sapiens) CpG-island No: 3756
acgaattccaaatcccaacaaacgcaatacccaaaccccgctctctccaaccaccaactcccgaccgccgcgactacaaacacaaacccgctccctccgaaacgcgataaccgcgatctaacgccacgaaacctatctaaaaacgcccgaaaaatcgtaaacgaaaaaaaaacgcctaattccccccccaaaaaaaatttcccctaccgacgcgtctcgctacgcgctcaacccgaaaaacccgccgccgccccccgcccccgaaaaactcttacgtcctcctcgtcaccatcgctccgcgcctaatactaaaaccgaaaccgaccacccgcgccgccgccgccgccgccgcgctcccgaaacgccgccgcctacgcccgcgaaccgaaaaacttaactcctacgccgccgtcctcctcgaacccctaaccgcccaaaaaataactcgcctccgaaaacgcgaaaaaaaacctcgaaatattaatcttaccaataaacctctaatacaacgaaaccatcgaacaccgcgctcctactaactatctttaaaactttttaatattttactttctctccgattcccactccccaccccgctccaaattaaaaaaaaaaa

SEQ ID NO: 3757 - DNA, 616 bp, Artificial Sequence
  chemically treated genomic DNA (Homo sapiens) CpG-island No: 3757
cggacgacgttggtgaagaggtcgttttttttttatagtttagtttttttcgaaatcgtttttttttttcgttttttttcggaggagggtaggaaaggtcgcggggcggtagaggacgtttagaggtttaggcgtttttcgcgggcgatgcgtttcgtagagagttcggttgtgatcgcgattttatttttattattatgaacgtaggcggaggttcggtttttcggttgttcgtaatttttttaaagtttgcgttttattgtgttcgtcgagagcgagggagggcgatatggttttattcgtcgcgcgttttcgggtttgttttttgtttagtcgtaggaaggcgcgttttagcgtttttgtgtggatattcgtattagcgggtttcgttttttcgttttaggttcggtttggtttttttttttttttcggttttttcgcgtttttttcggtttttttttgtattttttttcgtttttttggagttgttgggtacgcgtttttttcgtttcgtttttacgttttttttgcgcgttttttttagtttttttcggtcgggaaggatttattatatttagagagtgaacgtgggtcgggaaattttaattttagaggg

SEQ ID NO: 3758 - DNA, 616 bp, Artificial Sequence
  chemically treated genomic DNA (Homo sapiens) CpG-island No: 3758
ccctctaaaattaaaatttcccgacccacgttcactctctaaatataataaatccttcccgaccgaaaaaaactaaaaaaaacgcgcaaaaaaaacgtaaaaacgaaacgaaaaaaacgcgtacccaacaactccaaaaaaacgaaaaaaaatacaaaaaaaaaccgaaaaaaacgcgaaaaaaccgaaaaaaaaaaaaaaaccaaaccgaacctaaaacgaaaaaacgaaacccgctaatacgaatatccacacaaaaacgctaaaacgcgccttcctacgactaaacaaaaaacaaacccgaaaacgcgcgacgaataaaaccatatcgccctccctcgctctcgacgaacacaataaaacgcaaactttaaaaaaattacgaacaaccgaaaaaccgaacctccgcctacgttcataataataaaaataaaatcgcgatcacaaccgaactctctacgaaacgcatcgcccgcgaaaaacgcctaaacctctaaacgtcctctaccgccccgcgacctttcctaccctcctccgaaaaaaaacgaaaaaaaaaaacgatttcgaaaaaaactaaactataaaaaaaaaacgacctcttcaccaacgtcgtccg

SEQ ID NO: 3759 - DNA, 616 bp, Artificial Sequence
  chemically treated genomic DNA (Homo sapiens) CpG-island No: 3759
ttttttggagttggggtttttcggtttacgtttattttttggatgtgataggtttttttcggtcgggaagggttggaaggggcgcgtaaggaggacgtggggacgagacgagagagacgcgtgtttagtaattttagaaggacggagaggagtgtagaagggagtcggggaggacgcgggagggtcgggaggggaagagaagttaggtcgggtttggagcggaggagcggagttcgttggtgcgggtgtttatataggggcgttggagcgcgtttttttgcggttgggtaggaggtaagttcgagagcgcgcggcgagtggagttatgtcgttttttttcgttttcggcgggtatagtgaggcgtaggttttggaaaagttgcgggtagtcggagagtcgagttttcgtttgcgtttatgataatgagaatggagtcgcggttatagtcgggttttttgcggggcgtatcgttcgcgaggggcgtttgggtttttgggcgttttttgtcgtttcgcgattttttttgttttttttcggagagaggcgaagggaaggggcggtttcggagggagttgggttgtggagggagggcggtttttttattagcgtcgttcg

SEQ ID NO: 3760 - DNA, 616 bp, Artificial Sequence
  chemically treated genomic DNA (Homo sapiens) CpG-island No: 3760
cgaacgacgctaataaaaaaaccgccctccctccacaacccaactccctccgaaaccgccccttcccttcgcctctctccgaaaaaaaacaaaaaaaatcgcgaaacgacaaaaaacgcccaaaaacccaaacgcccctcgcgaacgatacgccccgcaaaaaacccgactataaccgcgactccattctcattatcataaacgcaaacgaaaactcgactctccgactacccgcaacttttccaaaacctacgcctcactatacccgccgaaaacgaaaaaaaacgacataactccactcgccgcgcgctctcgaacttacctcctacccaaccgcaaaaaaacgcgctccaacgcccctatataaacacccgcaccaacgaactccgctcctccgctccaaacccgacctaacttctcttcccctcccgaccctcccgcgtcctccccgactcccttctacactcctctccgtccttctaaaattactaaacacgcgtctctctcgtctcgtccccacgtcctccttacgcgccccttccaacccttcccgaccgaaaaaaacctatcacatccaaaaaataaacgtaaaccgaaaaaccccaactccaaaaaa

SEQ ID NO: 3761 - DNA, 1474 bp, Artificial Sequence
  chemically treated genomic DNA (Homo sapiens) CpG-island No: 3761
ggttttcgggatagtgtagacgcgaggaggagaagattagggtggcgtggaagttagatttcggtaggaatttagcgattatttcgggggttgtattttcgcggcgtgtacggtagggtttcggtgtttttgatttcgtgtggtttttcgaagtttttttatttattcgttttttttcggagtacggcgcgcgtttatttttttatttatttattttatttttattttcgcgagcgttaatcggttgtgagatgggcgagttattttgttagcgtggggttttttttcgggtcggtttttttttcgttagtatacgcgcgaattttcgtatttgggtatatacgcgcgcgcgtgtatatatatatataaagttttgggggtttttttgtagatcggttcggttgcgttgggttcggagtcgtgcgttcgtcgggtttaggtcggtttttttatttattattcggggttcgttttgcgtttagttttttcgcgttgcgcggtagttttttttagcgcggttttttcgggtcgtcggcgcggttttgtttttcggttcggtttttttcgtttcgtattcgtgttatcggcgttcgattgcgcgcggattttttgtggttttttcggtttcgcgtttcgttttcgttttcgttcgtcgttttttttcgttagtaatttttgcggagttttcgcgtttagttatgttgagttgagtttcgtcggttttggtcgcgcgttgttttcggttttcgttttttcgcggattcgttcgggggtcgcggtcgttcggcgtttcggtttcggtcgtttcgttcgttcggtcgtttcgagtttcgagtttcgagtttttcgcgtcgggttcgggcggtagcggcggcggcggcggcggcggcgcgttcggttttttttttcggcgtcggttacgggaggcggtgatgcgggcgcgggcggtttcggttgcgtcgagagcggagatataggtttaagatggtagatttcgattgaggttgggggggtcgagttcgcgcgtcgttttttcgttttcgttgttatgaatcgcggatatttcggtttcgatggttttcgtgtacgaaggtaaggggcgttcggtttcgtcgatttcgcgttcgtcgtttttcgcggttttcgtagttttgttttgttcgcggtttcgcgttcgtagttttcggcgtttgttttagtttttattcggggttcgagggggtcgcgattttttttttcgttcggaagatgatcgggattcggcgtcggtagggttttgtttttagggcggggagaggggtcgggggcgtaggaggggagggggcgtgtgcgagggtgggcggttgttcggggagggtagggacgtcggggaaggcggatcggtgattgtgttttttatttatttgcgataaatgaaggtgatgcggtttagtttttatcgtttttttatattatttttcggagtatttttttt

SEQ ID NO: 3762 - DNA, 1474 bp, Artificial Sequence
  chemically treated genomic DNA (Homo sapiens) CpG-island No: 3762
aaaaaaaatactccgaaaaataatataaaaaaacgataaaaactaaaccgcatcaccttcatttatcgcaaataaataaaaaacacaatcaccgatccgccttccccgacgtccctaccctccccgaacaaccgcccaccctcgcacacgccccctcccctcctacgcccccgacccctctccccgccctaaaaacaaaaccctaccgacgccgaatcccgatcatcttccgaacgaaaaaaaaaatcgcgaccccctcgaaccccgaataaaaactaaaacaaacgccgaaaactacgaacgcgaaaccgcgaacaaaacaaaactacgaaaaccgcgaaaaacgacgaacgcgaaatcgacgaaaccgaacgccccttaccttcgtacacgaaaaccatcgaaaccgaaatatccgcgattcataacaacgaaaacgaaaaaacgacgcgcgaactcgacccccccaacctcaatcgaaatctaccatcttaaacctatatctccgctctcgacgcaaccgaaaccgcccgcgcccgcatcaccgcctcccgtaaccgacgccgaaaaaaaaaaccgaacgcgccgccgccgccgccgccgccgctaccgcccgaacccgacgcgaaaaactcgaaactcgaaactcgaaacgaccgaacgaacgaaacgaccgaaaccgaaacgccgaacgaccgcgacccccgaacgaatccgcgaaaaaacgaaaaccgaaaacaacgcgcgaccaaaaccgacgaaactcaactcaacataactaaacgcgaaaactccgcaaaaattactaacgaaaaaaaacgacgaacgaaaacgaaaacgaaacgcgaaaccgaaaaaaccacaaaaaatccgcgcgcaatcgaacgccgataacacgaatacgaaacgaaaaaaaccgaaccgaaaaacaaaaccgcgccgacgacccgaaaaaaccgcgctaaaaaaaactaccgcgcaacgcgaaaaaactaaacgcaaaacgaaccccgaataataaataaaaaaaccgacctaaacccgacgaacgcacgactccgaacccaacgcaaccgaaccgatctacaaaaaaacccccaaaactttatatatatatatacacgcgcgcgcgtatatacccaaatacgaaaattcgcgcgtatactaacgaaaaaaaaaccgacccgaaaaaaaaccccacgctaacaaaataactcgcccatctcacaaccgattaacgctcgcgaaaataaaaataaaataaataaataaaaaaataaacgcgcgccgtactccgaaaaaaaacgaataaataaaaaaacttcgaaaaaccacacgaaatcaaaaacaccgaaaccctaccgtacacgccgcgaaaatacaacccccgaaataatcgctaaattcctaccgaaatctaacttccacgccaccctaatcttctcctcctcgcgtctacactatcccgaaaacc

SEQ ID NO: 3763 - DNA, 1474 bp, Artificial Sequence
  chemically treated genomic DNA (Homo sapiens) CpG-island No: 3763
aaaggaggtgtttcgaaaggtaatgtgggggggcggtggaagttaagtcgtattatttttatttatcgtaaataaataaaaagtatagttatcggttcgtttttttcggcgtttttgtttttttcgggtagtcgtttattttcgtatacgttttttttttttttgcgttttcggttttttttttcgttttggaagtaagattttgtcggcgtcgggtttcggttatttttcgggcgagggagggggtcgcggttttttcgggtttcgggtgggggttggggtaggcgtcgggggttgcgggcgcggggtcgcgggtagaataaagttgcgggggtcgcggagggcggcgggcgcggggtcggcggggtcgggcgttttttattttcgtatacgggggttatcggggtcggggtgttcgcggtttatggtaacggggacgggaaagcggcgcgcgagttcggtttttttagttttagtcggaatttgttattttgagtttgtgttttcgttttcggcgtagtcgaggtcgttcgcgttcgtattatcgtttttcgtggtcggcgtcgggggagggggtcgggcgcgtcgtcgtcgtcgtcgtcgtcgttgtcgttcgggttcggcgcggggggttcggggttcggggttcggggcggtcgggcgggcggagcggtcgaggtcgaggcgtcgagcggtcgcggttttcgagcggattcgcggaggggcgggagtcgggggtagcgcgcggttagggtcggcggggtttagtttagtatggttgggcgcgggggtttcgtaaaagttgttggcggaggggggcggcgggcgggggcgggggcggggcgcggggtcgggagagttatagggagttcgcgcgtaatcgagcgtcgatggtacggatgcgaggcggggaaggtcgaatcgaagggtagagtcgcgtcggcggttcgaggggatcgcgttgggaggggttgtcgcgtagcgcggggggattgggcgtagggcgggtttcgggtagtgggtgagagggtcggtttggattcggcgggcgtacggtttcgagtttagcgtagtcgagtcggtttgtagaggggtttttagaattttgtgtgtgtgtgtgtacgcgcgcgcgtgtgtgtttaggtgcgagggttcgcgcgtgtgttggcggggagggaatcgattcgaaagagagttttacgttggtaaagtggttcgtttattttatagtcggttggcgttcgcggaggtaggagtggaatgaatgaatgaaggagtgggcgcgcgtcgtgtttcggaggagggcgggtgagtggaggagtttcggaaagttatacgaggttagaggtatcgaagttttgtcgtgtacgtcgcggaaatgtagttttcggggtggtcgttgggtttttgtcggagtttggtttttacgttattttgattttttttttttcgcgtttatattgtttcgagggtt

SEQ ID NO: 3764 - DNA, 1474 bp, Artificial Sequence
  chemically treated genomic DNA (Homo sapiens) CpG-island No: 3764
aaccctcgaaacaatataaacgcgaaaaaaaaaaaatcaaaataacgtaaaaaccaaactccgacaaaaacccaacgaccaccccgaaaactacatttccgcgacgtacacgacaaaacttcgatacctctaacctcgtataactttccgaaactcctccactcacccgccctcctccgaaacacgacgcgcgcccactccttcattcattcattccactcctacctccgcgaacgccaaccgactataaaataaacgaaccactttaccaacgtaaaactctctttcgaatcgattccctccccgccaacacacgcgcgaaccctcgcacctaaacacacacgcgcgcgcgtacacacacacacacaaaattctaaaaacccctctacaaaccgactcgactacgctaaactcgaaaccgtacgcccgccgaatccaaaccgaccctctcacccactacccgaaacccgccctacgcccaatccccccgcgctacgcgacaacccctcccaacgcgatcccctcgaaccgccgacgcgactctacccttcgattcgaccttccccgcctcgcatccgtaccatcgacgctcgattacgcgcgaactccctataactctcccgaccccgcgccccgcccccgcccccgcccgccgcccccctccgccaacaacttttacgaaacccccgcgcccaaccatactaaactaaaccccgccgaccctaaccgcgcgctacccccgactcccgcccctccgcgaatccgctcgaaaaccgcgaccgctcgacgcctcgacctcgaccgctccgcccgcccgaccgccccgaaccccgaaccccgaaccccccgcgccgaacccgaacgacaacgacgacgacgacgacgacgacgcgcccgaccccctcccccgacgccgaccacgaaaaacgataatacgaacgcgaacgacctcgactacgccgaaaacgaaaacacaaactcaaaataacaaattccgactaaaactaaaaaaaccgaactcgcgcgccgctttcccgtccccgttaccataaaccgcgaacaccccgaccccgataacccccgtatacgaaaataaaaaacgcccgaccccgccgaccccgcgcccgccgccctccgcgacccccgcaactttattctacccgcgaccccgcgcccgcaacccccgacgcctaccccaacccccacccgaaacccgaaaaaaccgcgaccccctccctcgcccgaaaaataaccgaaacccgacgccgacaaaatcttacttccaaaacgaaaaaaaaaaccgaaaacgcaaaaaaaaaaaaaacgtatacgaaaataaacgactacccgaaaaaaacaaaaacgccgaaaaaaacgaaccgataactatactttttatttatttacgataaataaaaataatacgacttaacttccaccgcccccccacattacctttcgaaacacctccttt

SEQ ID NO: 3765 - DNA, 841 bp, Artificial Sequence
  chemically treated genomic DNA (Homo sapiens) CpG-island No: 3765
tcgtagtttcggattaagttcgtttcgttcgattcgcgtagttttagttacgttcggtttttcgttcgagtcgaggcgtcgcggttgttagacgcggaggggtagagacgcggtttaaaggaagggataaagagttttttcggtcgcggtcggaggttgtcggttcgtttttaagtcgggttttcgtagtagcggttttagcggggcggggatcggggacgggggcgcggcgggggaggagcggtcggttaggttgaggggcgcgcgagaggtgcgggttcggttggcggattcgttttttatttattatttggtcgtgggtttttcgttacggtcgtcgtcgttacggagtttttgagtcggggcgacgtagcgagagttaataagcgggcgttagttgcgttttatattggcgaagtagtttttagatcgagttggagaaacgtcggtgggtgggagttgggacgaggtttgtttttagtttgtggagattttatttcgttcgtttttcgtattcggttttcgtttcgtttttttgtcggtttttttcgtattcgggggttagtcgttcgcggcgcgcggtattgtgggggatgtagttttagaatgaggaagcggcggtacgtgtttttagtcgttttgtatttattttgggttagaacgacgtagttgcgcggtaattagagagggcggcggggttttttgtgttggaagatgagttcgttagaggtatattttcggttttaattcgttgtaggcgttggaagaagggttttggcgttttgttttcgatttttcggtgaggaattaattttttaatattattgatttgaggttggga

SEQ ID NO: 3766 - DNA, 841 bp, Artificial Sequence
  chemically treated genomic DNA (Homo sapiens) CpG-island No: 3766
tcccaacctcaaatcaataatattaaaaaattaattcctcaccgaaaaatcgaaaacaaaacgccaaaacccttcttccaacgcctacaacgaattaaaaccgaaaatatacctctaacgaactcatcttccaacacaaaaaaccccgccgccctctctaattaccgcgcaactacgtcgttctaacccaaaataaatacaaaacgactaaaaacacgtaccgccgcttcctcattctaaaactacatcccccacaataccgcgcgccgcgaacgactaacccccgaatacgaaaaaaaccgacaaaaaaacgaaacgaaaaccgaatacgaaaaacgaacgaaataaaatctccacaaactaaaaacaaacctcgtcccaactcccacccaccgacgtttctccaactcgatctaaaaactacttcgccaatataaaacgcaactaacgcccgcttattaactctcgctacgtcgccccgactcaaaaactccgtaacgacgacgaccgtaacgaaaaacccacgaccaaataataaataaaaaacgaatccgccaaccgaacccgcacctctcgcgcgcccctcaacctaaccgaccgctcctcccccgccgcgcccccgtccccgatccccgccccgctaaaaccgctactacgaaaacccgacttaaaaacgaaccgacaacctccgaccgcgaccgaaaaaactctttatcccttcctttaaaccgcgtctctacccctccgcgtctaacaaccgcgacgcctcgactcgaacgaaaaaccgaacgtaactaaaactacgcgaatcgaacgaaacgaacttaatccgaaactacga

SEQ ID NO: 3767 - DNA, 841 bp, Artificial Sequence
  chemically treated genomic DNA (Homo sapiens) CpG-island No: 3767
ttttagttttaggttaatagtattaggaggttggttttttatcggagggtcgggaataagacgttagagttttttttttagcgtttgtagcgagttaaggtcgagggtatgtttttggcgggtttattttttaatatagaagatttcgtcgttttttttggttgtcgcgtagttgcgtcgttttgatttagggtaggtgtagggcggttggaagtacgtgtcgtcgtttttttattttgggattatattttttataatgtcgcgcgtcgcgggcggttggttttcgagtgcgggaagggtcggtagggaggcggagcggaagtcgagtgcgagggacgagcggagtaaaatttttataagttgggaataaatttcgttttaatttttatttatcggcgtttttttagttcgatttggaggttgtttcgttagtgtgggacgtagttgacgttcgtttattagttttcgttgcgtcgtttcggtttagaagtttcgtggcggcggcgatcgtgacgagaagtttacggttaggtaatgagtaaggggcgagttcgttagtcgggttcgtatttttcgcgcgttttttagtttagtcggtcgtttttttttcgtcgcgttttcgttttcggttttcgtttcgttagggtcgttgttgcggaaattcggtttaggaacgggtcggtagttttcggtcgcggtcgggaaggttttttgtttttttttttgggtcgcgtttttgttttttcgcgtttgatagtcgcggcgtttcggttcgggcggagagtcgagcgtggttggggttgcgcgagtcgagcggggcgggtttggttcggagttgcgg

SEQ ID NO: 3768 - DNA, 841 bp, Artificial Sequence
  chemically treated genomic DNA (Homo sapiens) CpG-island No: 3768
ccgcaactccgaaccaaacccgccccgctcgactcgcgcaaccccaaccacgctcgactctccgcccgaaccgaaacgccgcgactatcaaacgcgaaaaaacaaaaacgcgacccaaaaaaaaaaacaaaaaaccttcccgaccgcgaccgaaaactaccgacccgttcctaaaccgaatttccgcaacaacgaccctaacgaaacgaaaaccgaaaacgaaaacgcgacgaaaaaaaaacgaccgactaaactaaaaaacgcgcgaaaaatacgaacccgactaacgaactcgccccttactcattacctaaccgtaaacttctcgtcacgatcgccgccgccacgaaacttctaaaccgaaacgacgcaacgaaaactaataaacgaacgtcaactacgtcccacactaacgaaacaacctccaaatcgaactaaaaaaacgccgataaataaaaattaaaacgaaatttattcccaacttataaaaattttactccgctcgtccctcgcactcgacttccgctccgcctccctaccgacccttcccgcactcgaaaaccaaccgcccgcgacgcgcgacattataaaaaatataatcccaaaataaaaaaacgacgacacgtacttccaaccgccctacacctaccctaaatcaaaacgacgcaactacgcgacaaccaaaaaaaacgacgaaatcttctatattaaaaaataaacccgccaaaaacataccctcgaccttaactcgctacaaacgctaaaaaaaaaactctaacgtcttattcccgaccctccgataaaaaaccaacctcctaatactattaacctaaaactaaaa

SEQ ID NO: 3769 - DNA, 552 bp, Artificial Sequence
  chemically treated genomic DNA (Homo sapiens) CpG-island No: 3769
ttcgcggcgtagattacggaggggttcggggcgggggttagcgttcgggtttatttggtgtaggtgttgggcggggggcgcgcgttattttgaggatgttgtcgaagatggtgtcgcggaattttagtagcgttttttggtcgaattcgcggtcgtggatgatgcgtatttgtttgaggaacgtggatttgtcgttttcgttcgcgtttagtagtaggatttttattaggcgtcggatcgttcgtatatcgggttaagtagcgtttcgtatgtcgcggttatcgtttcgggtttcgtttttgcgtcgcgcgcgtcgtatgttcgtatttgcgttcgtcgggtttatttttcggtcggtagtaggtagcggttgagggttcgtattatttcggatatgtttttcgagcgcgtggtcgtttcgtcggcgttcgggggttatggacgttcgtcggcgagggcgagttcgggtcgagtatcgttttacgtttcgtcgttcgttttaggttcgtatcgtcgtcgtcgttgtagtcgtttcgaggttcgtattcgtcg

SEQ ID NO: 3770 - DNA, 552 bp, Artificial Sequence
  chemically treated genomic DNA (Homo sapiens) CpG-island No: 3770
cgacgaatacgaacctcgaaacgactacaacgacgacgacgatacgaacctaaaacgaacgacgaaacgtaaaacgatactcgacccgaactcgccctcgccgacgaacgtccataacccccgaacgccgacgaaacgaccacgcgctcgaaaaacatatccgaaataatacgaaccctcaaccgctacctactaccgaccgaaaaataaacccgacgaacgcaaatacgaacatacgacgcgcgcgacgcaaaaacgaaacccgaaacgataaccgcgacatacgaaacgctacttaacccgatatacgaacgatccgacgcctaataaaaatcctactactaaacgcgaacgaaaacgacaaatccacgttcctcaaacaaatacgcatcatccacgaccgcgaattcgaccaaaaaacgctactaaaattccgcgacaccatcttcgacaacatcctcaaaataacgcgcgccccccgcccaacacctacaccaaataaacccgaacgctaacccccgccccgaacccctccgtaatctacgccgcgaa

SEQ ID NO: 3771 - DNA, 552 bp, Artificial Sequence
  chemically treated genomic DNA (Homo sapiens) CpG-island No: 3771
cgacgagtgcgggtttcggagcgattgtagcggcggcgacggtacgggtttgaggcgagcggcggggcgtggggcggtgttcggttcgggttcgttttcgtcggcggacgtttatggttttcgggcgtcggcggggcggttacgcgttcgaggggtatgttcggggtggtgcggatttttagtcgttgtttgttgtcggtcgaggggtgaattcggcgagcgtaggtgcgggtatgcggcgcgcgcgacgtaaaggcgaggttcggagcgatagtcgcgatatacgaagcgttgtttggttcgatatgcgggcggttcggcgtttggtgaagattttgttgttgggcgcgggcgagagcggtaagtttacgttttttaagtagatgcgtattatttacggtcgcgagttcgattagaaggcgttgttggagtttcgcgatattattttcgataatatttttaaggtgacgcgcgtttttcgtttagtatttgtattaggtgggttcgggcgttaattttcgtttcgggttttttcgtggtttgcgtcgcggg

SEQ ID NO: 3772 - DNA, 552 bp, Artificial Sequence
  chemically treated genomic DNA (Homo sapiens) CpG-island No: 3772
cccgcgacgcaaaccacgaaaaaacccgaaacgaaaattaacgcccgaacccacctaatacaaatactaaacgaaaaacgcgcgtcaccttaaaaatattatcgaaaataatatcgcgaaactccaacaacgccttctaatcgaactcgcgaccgtaaataatacgcatctacttaaaaaacgtaaacttaccgctctcgcccgcgcccaacaacaaaatcttcaccaaacgccgaaccgcccgcatatcgaaccaaacaacgcttcgtatatcgcgactatcgctccgaacctcgcctttacgtcgcgcgcgccgcatacccgcacctacgctcgccgaattcacccctcgaccgacaacaaacaacgactaaaaatccgcaccaccccgaacatacccctcgaacgcgtaaccgccccgccgacgcccgaaaaccataaacgtccgccgacgaaaacgaacccgaaccgaacaccgccccacgccccgccgctcgcctcaaacccgtaccgtcgccgccgctacaatcgctccgaaacccgcactcgtcg

SEQ ID NO: 3773 - DNA, 530 bp, Artificial Sequence
  chemically treated genomic DNA (Homo sapiens) CpG-island No: 3773
gtcgcggggttttcgttcgtcgtcgtcgtcgtcgggagcgggaacggtgcgggcggcggcggcggcgtgggttgcgtttcggttgcgggagtcggtcggttgttgtagtttattcgcgttacggtgttttattagtttttgcggggtagttagtatagttttacgcgttcgttcgtcgtcgttgtcgtcgtttcgttgggtagtttttcggggttcggcgcggttcgcggttttagttcgtttagttcgacgtcgtcggcggtcgtagtttcggtcgagtaggcgtcgcgggttaagggtcgttcgagacggtttttagagagttatcggaggagtagtttatttgagagacggagtttcggttcgttcgtgtgtagaggtagcgagtttaattttttcgttttttcgggttgcgttttttcgacggtgtttttcgtggaaattttagttttttcgggtttttttttgttagtgtattatcgaaggtgtgaaagtggttttgggaattttatttttttgcggtcgttgtg

SEQ ID NO: 3774 - DNA, 530 bp, Artificial Sequence
  chemically treated genomic DNA (Homo sapiens) CpG-island No: 3774
cacaacgaccgcaaaaaaataaaattcccaaaaccactttcacaccttcgataatacactaacaaaaaaaaacccgaaaaaactaaaatttccacgaaaaacaccgtcgaaaaaacgcaacccgaaaaaacgaaaaaattaaactcgctacctctacacacgaacgaaccgaaactccgtctctcaaataaactactcctccgataactctctaaaaaccgtctcgaacgacccttaacccgcgacgcctactcgaccgaaactacgaccgccgacgacgtcgaactaaacgaactaaaaccgcgaaccgcgccgaaccccgaaaaactacccaacgaaacgacgacaacgacgacgaacgaacgcgtaaaactatactaactaccccgcaaaaactaataaaacaccgtaacgcgaataaactacaacaaccgaccgactcccgcaaccgaaacgcaacccacgccgccgccgccgcccgcaccgttcccgctcccgacgacgacgacgacgaacgaaaaccccgcgac

SEQ ID NO: 3775 - DNA, 530 bp, Artificial Sequence
  chemically treated genomic DNA (Homo sapiens) CpG-island No: 3775
tatagcgatcgtaggggggtgagatttttaaagttatttttatattttcgataatgtattagtaaagagaagttcgaagaggttgaagtttttacggagggtatcgtcggggagacgtagttcgggaggacgggagggttgggttcgttatttttgtatacgggcgagtcggggtttcgttttttaggtgagttgttttttcggtggttttttggggatcgtttcgggcggtttttggttcgcggcgtttgttcggtcggggttgcggtcgtcggcggcgtcgggttggacgggttggggtcgcgggtcgcgtcgggtttcgggaggttgtttagcgaggcggcggtagcggcgacgggcggacgcgtgggattgtgttggttgtttcgtaagagttggtagggtatcgtggcgcggatgggttgtagtagtcggtcggttttcgtagtcggggcgtagtttacgtcgtcgtcgtcgttcgtatcgttttcgttttcggcggcggcgacggcgggcggggatttcgcggt

SEQ ID NO: 3776 - DNA, 530 bp, Artificial Sequence
  chemically treated genomic DNA (Homo sapiens) CpG-island No: 3776
accgcgaaatccccgcccgccgtcgccgccgccgaaaacgaaaacgatacgaacgacgacgacgacgtaaactacgccccgactacgaaaaccgaccgactactacaacccatccgcgccacgataccctaccaactcttacgaaacaaccaacacaatcccacgcgtccgcccgtcgccgctaccgccgcctcgctaaacaacctcccgaaacccgacgcgacccgcgaccccaacccgtccaacccgacgccgccgacgaccgcaaccccgaccgaacaaacgccgcgaaccaaaaaccgcccgaaacgatccccaaaaaaccaccgaaaaaacaactcacctaaaaaacgaaaccccgactcgcccgtatacaaaaataacgaacccaaccctcccgtcctcccgaactacgtctccccgacgataccctccgtaaaaacttcaacctcttcgaacttctctttactaatacattatcgaaaatataaaaataactttaaaaatctcacccccctacgatcgctata

SEQ ID NO: 3777 - DNA, 1044 bp, Artificial Sequence
  chemically treated genomic DNA (Homo sapiens) CpG-island No: 3777
attcgtttcggacgggaggagggtaggttcgtttagagggaatcggttgttttaagggaagtttcgttttttggtggtgacgttttattaggttcgttcgcgattggttgcggttagagggcgggatggggttgttaggcgaggaggggattcggcgggttttcgtcgttcggagcgttgagtcgcgggagcggagtcggggttagcggcgttgttggaagatggcgagcggtcgggacgagcggtcgttttggcggttagggcggtttttgttgtttatgtgtttgttgttgttggggagttcggttcgggcggtttatattaagaaggcggaggcgattattataattacgagcgcgggcgtcgaggcggtcgagggttagttcgatcgttattattacgaagaggagttggagtcggcgttgagggaggcggcggtcgcgggttttttcggtttggttcgtttttttagtatcggtcgttcggtggaaggtcggtcgttgtgggtgtttcgttttatcgtcggtttggggtcgttaatttttgagggcgacgcggggtttgacgttgtcgggttcgacgttgcggggtcgttgttgttcggtcggttttaggtgaagttggtgggtaatatgtatggcgacgagatcgtgtcgcgttaggtgttgatttatttggttcgcgagttggcggtcggttatcgtcgcggggattcgcgtttggttcgtttgtttaatattatcgacgtgtatttgttgtttagttttaatttcgatggtttcgagcgtgttcgcgagggcgattgtggtttcggcgacggcggttcgttcggggttagcggtcgcgataatagtcgcggtcgcgattttaatcgaagttttttcgattagtttagtatcggcgaatttttcgttttggacgaggtgttcgaggtgcgcgtttttatcgagtggattcgtagaataagtgagtgttgtttgtttttttttcgttcgtgtgagtttttaagggtcgaggttggtttcggtatttagtaggcgttta

SEQ ID NO: 3778 - DNA, 1044 bp, Artificial Sequence
  chemically treated genomic DNA (Homo sapiens) CpG-island No: 3778
taaacgcctactaaataccgaaaccaacctcgacccttaaaaactcacacgaacgaaaaaaaaacaaacaacactcacttattctacgaatccactcgataaaaacgcgcacctcgaacacctcgtccaaaacgaaaaattcgccgatactaaactaatcgaaaaaacttcgattaaaatcgcgaccgcgactattatcgcgaccgctaaccccgaacgaaccgccgtcgccgaaaccacaatcgccctcgcgaacacgctcgaaaccatcgaaattaaaactaaacaacaaatacacgtcgataatattaaacaaacgaaccaaacgcgaatccccgcgacgataaccgaccgccaactcgcgaaccaaataaatcaacacctaacgcgacacgatctcgtcgccatacatattacccaccaacttcacctaaaaccgaccgaacaacaacgaccccgcaacgtcgaacccgacaacgtcaaaccccgcgtcgccctcaaaaattaacgaccccaaaccgacgataaaacgaaacacccacaacgaccgaccttccaccgaacgaccgatactaaaaaaacgaaccaaaccgaaaaaacccgcgaccgccgcctccctcaacgccgactccaactcctcttcgtaataataacgatcgaactaaccctcgaccgcctcgacgcccgcgctcgtaattataataatcgcctccgccttcttaatataaaccgcccgaaccgaactccccaacaacaacaaacacataaacaacaaaaaccgccctaaccgccaaaacgaccgctcgtcccgaccgctcgccatcttccaacaacgccgctaaccccgactccgctcccgcgactcaacgctccgaacgacgaaaacccgccgaatcccctcctcgcctaacaaccccatcccgccctctaaccgcaaccaatcgcgaacgaacctaataaaacgtcaccaccaaaaaacgaaacttcccttaaaacaaccgattccctctaaacgaacctaccctcctcccgtccgaaacgaat

SEQ ID NO: 3779 - DNA, 1044 bp, Artificial Sequence
  chemically treated genomic DNA (Homo sapiens) CpG-island No: 3779
tgagcgtttattgggtgtcggaattagtttcggtttttggaggtttatacggacggggagggggtaggtaatatttatttgttttgcggatttattcgatgagggcgcgtatttcgggtatttcgtttagggcggggggttcgtcggtgttaaattggtcgggaaagtttcggttgaggtcgcggtcgcgattattgtcgcggtcgttggtttcggacgggtcgtcgtcgtcgaagttatagtcgttttcgcgggtacgttcgaagttatcggggttgaggttgggtagtaggtatacgtcggtggtgttgagtaggcggattaggcgcgggttttcgcggcggtagtcggtcgttagttcgcgggttaagtagattaatatttggcgcgatacggtttcgtcgttatgtatgttgtttattagttttatttggggtcggtcgggtagtagcggtttcgtagcgtcgggttcggtagcgttaggtttcgcgtcgtttttagggattagcgattttaggtcggcggtgaggcgaagtatttatagcggtcggttttttatcgagcggtcgatgttaaagaggcgggttaggtcggggaggttcgcggtcgtcgttttttttagcgtcgattttaattttttttcgtggtagtagcggtcgaattggttttcggtcgtttcggcgttcgcgttcgtagttgtggtagtcgttttcgtttttttgatgtgagtcgttcgggtcgagttttttagtagtagtaggtatatgagtaataggagtcgttttagtcgttaaggcggtcgttcgtttcggtcgttcgttattttttagtagcgtcgttaatttcggtttcgttttcgcggtttagcgtttcgggcggcgggggttcgtcggatttttttttcgtttagtaattttatttcgttttttggtcgtagttaatcgcggacgggtttggtggagcgttattattagggggcggggttttttttaaagtagtcgattttttttgggcgggtttgtttttttttcgttcgggacgagt

SEQ ID NO: 3780 - DNA, 1044 bp, Artificial Sequence
  chemically treated genomic DNA (Homo sapiens) CpG-island No: 3780
actcgtcccgaacgaaaaaaaaacaaacccgcccaaaaaaaatcgactactttaaaaaaaaccccgccccctaataataacgctccaccaaacccgtccgcgattaactacgaccaaaaaacgaaataaaattactaaacgaaaaaaaaatccgacgaacccccgccgcccgaaacgctaaaccgcgaaaacgaaaccgaaattaacgacgctactaaaaaataacgaacgaccgaaacgaacgaccgccttaacgactaaaacgactcctattactcatatacctactactactaaaaaactcgacccgaacgactcacatcaaaaaaacgaaaacgactaccacaactacgaacgcgaacgccgaaacgaccgaaaaccaattcgaccgctactaccacgaaaaaaaattaaaatcgacgctaaaaaaaacgacgaccgcgaacctccccgacctaacccgcctctttaacatcgaccgctcgataaaaaaccgaccgctataaatacttcgcctcaccgccgacctaaaatcgctaatccctaaaaacgacgcgaaacctaacgctaccgaacccgacgctacgaaaccgctactacccgaccgaccccaaataaaactaataaacaacatacataacgacgaaaccgtatcgcgccaaatattaatctacttaacccgcgaactaacgaccgactaccgccgcgaaaacccgcgcctaatccgcctactcaacaccaccgacgtatacctactacccaacctcaaccccgataacttcgaacgtacccgcgaaaacgactataacttcgacgacgacgacccgtccgaaaccaacgaccgcgacaataatcgcgaccgcgacctcaaccgaaactttcccgaccaatttaacaccgacgaaccccccgccctaaacgaaatacccgaaatacgcgccctcatcgaataaatccgcaaaacaaataaatattacctaccccctccccgtccgtataaacctccaaaaaccgaaactaattccgacacccaataaacgctca

SEQ ID NO: 3781 - DNA, 665 bp, Artificial Sequence
  chemically treated genomic DNA (Homo sapiens) CpG-island No: 3781
ggggaggcggagacggagacggagcggttttagtcgtcgcgtcgagtttagtcgagtcgagtcgagtcgagtcgaggcgagtattttttatcgtcgtcgtttacgatattaggcgttcgttttttattcgttttagcggtttgtcgcgggttaaatttttttattatgtttcgtatttcgttcgtttttgcgattttttagtttcgtttagtttcgagcgttcgtagtcgtcgcgtcgtcggtttaagtatgtaggtgagtgagagggatttttacgtttttattcgcggggagttcggtttttgttttttcggtttcgcgttttgcgttttttgtttttttcgacgcggtttttcgttcgggataaggtttttagttttttagcgtttttttttcgaagggttttttattttttcgcggttttggttcgttttcgttttttttggcgtagtcgttttcgttttcgcggttgtttttatttcgtttcggttcggcgggcggtttcgcgtagttttttgtttcgggtttttagttcgttttcggtattttttgtttcggggttttttcgtcgattttttttttttcgtttttttttattttcgtcgttttttagttttgtgcggggagtgcgggtttgcgggatgggtgggatgggggttacgttg

SEQ ID NO: 3782 - DNA, 665 bp, Artificial Sequence
  chemically treated genomic DNA (Homo sapiens) CpG-island No: 3782
caacgtaacccccatcccacccatcccgcaaacccgcactccccgcacaaaactaaaaaacgacgaaaataaaaaaaaacgaaaaaaaaaaaatcgacgaaaaaaccccgaaacaaaaaataccgaaaacgaactaaaaacccgaaacaaaaaactacgcgaaaccgcccgccgaaccgaaacgaaataaaaacaaccgcgaaaacgaaaacgactacgccaaaaaaaacgaaaacgaaccaaaaccgcgaaaaaataaaaaacccttcgaaaaaaaaacgctaaaaaactaaaaaccttatcccgaacgaaaaaccgcgtcgaaaaaaacaaaaaacgcaaaacgcgaaaccgaaaaaacaaaaaccgaactccccgcgaataaaaacgtaaaaatccctctcactcacctacatacttaaaccgacgacgcgacgactacgaacgctcgaaactaaacgaaactaaaaaatcgcaaaaacgaacgaaatacgaaacataataaaaaaatttaacccgcgacaaaccgctaaaacgaataaaaaacgaacgcctaatatcgtaaacgacgacgataaaaaatactcgcctcgactcgactcgactcgactcgactaaactcgacgcgacgactaaaaccgctccgtctccgtctccgcctcccc

SEQ ID NO: 3783 - DNA, 665 bp, Artificial Sequence
  chemically treated genomic DNA (Homo sapiens) CpG-island No: 3783
tagcgtggtttttattttatttatttcgtaggttcgtatttttcgtatagggttggagagcggcgagagtggggggagacgaggaaaaggaggtcggcgaagggatttcgaggtagggagtgtcgagagcggattggggattcgaagtaggagattgcgcggagtcgttcgtcgagtcgaggcgggatggaggtagtcgcggggacggggacggttgcgttagggagggcgggagcgagttaggatcgcggagggatggagagtttttcggggaaggggcgttgggaggttggaggttttgtttcgggcgagggatcgcgtcgggaggggtaggaggcgtagggcgcggagtcgggaaggtaagggtcgggtttttcgcgggtgggggcgtgggggttttttttatttatttgtatgtttaggtcggcggcgcgacgattgcgggcgttcgggattgagcggggttggggggtcgtaggagcgggcggggtgcggggtatggtggggaggtttggttcgcggtaggtcgttggagcgggtggggggcgggcgtttggtatcgtgggcggcggcggtgggagatgttcgtttcggttcggttcggttcggttcggttgggttcggcgcggcggttgggatcgtttcgttttcgttttcgttttttt

SEQ ID NO: 3784 - DNA, 665 bp, Artificial Sequence
  chemically treated genomic DNA (Homo sapiens) CpG-island No: 3784
aaaaaaacgaaaacgaaaacgaaacgatcccaaccgccgcgccgaacccaaccgaaccgaaccgaaccgaaccgaaacgaacatctcccaccgccgccgcccacgataccaaacgcccgccccccacccgctccaacgacctaccgcgaaccaaacctccccaccataccccgcaccccgcccgctcctacgaccccccaaccccgctcaatcccgaacgcccgcaatcgtcgcgccgccgacctaaacatacaaataaataaaaaaaacccccacgcccccacccgcgaaaaacccgacccttaccttcccgactccgcgccctacgcctcctacccctcccgacgcgatccctcgcccgaaacaaaacctccaacctcccaacgccccttccccgaaaaactctccatccctccgcgatcctaactcgctcccgccctccctaacgcaaccgtccccgtccccgcgactacctccatcccgcctcgactcgacgaacgactccgcgcaatctcctacttcgaatccccaatccgctctcgacactccctacctcgaaatcccttcgccgacctccttttcctcgtctccccccactctcgccgctctccaaccctatacgaaaaatacgaacctacgaaataaataaaataaaaaccacgcta

SEQ ID NO: 3785 - DNA, 802 bp, Artificial Sequence
  chemically treated genomic DNA (Homo sapiens) CpG-island No: 3785
cgggcgaaatttcggatgaaatatcgcgttagatttacgtaacgtttaaacggtttttcgtatttttacggacggtcgaaatttgcgggttttcgtaaagaattatttcggttaaattcgggggatttatttcgtttttttaaaaagattaagtttgatcgagcggtcggagttgtcgtgtcgtcgtcgtcgtcgttatcgcgttaggtttcggtcgcggttatttttcgtcgttaagggttttttcgtttcggtttcgggatttcggtttttcgttagtttcggtttcggtttcggtattatgtcggagaaaagcgtggaggtagcggtcgagttgagcgttaaggtacgggcgggggcggcggcggttcggatttcgcgtagttttggggttcggcgcggtttttcgttttaggtcgttttcgacggtttcgcgcggtttttgcgttcgggttttggcggattttattgcgtttttttatcgtttttcggttcggagtttttttttcggtttcgcgcggttagcgttagcgttttttagttgttttgcgcgtattacggcgttcggtttcgtcgtttcggtcgcgtcgtttttcgtagtcgtttttattttttttcggttttatttcgttgatcggatttcgttcggtttttcgttcgaacgtttcgagttttattttgtcgcgttttttttttgcgtttcgttgtcgcgtttttgtttgtaatttgattttattttttttcgttaagcggtttgagatttttaagtgtaaataggattttttttggaggttgttttttt

SEQ ID NO: 3786 - DNA, 802 bp, Artificial Sequence
  chemically treated genomic DNA (Homo sapiens) CpG-island No: 3786
aaaaaaacaacctccaaaaaaaatcctatttacacttaaaaatctcaaaccgcttaacgaaaaaaaataaaatcaaattacaaacaaaaacgcgacaacgaaacgcaaaaaaaaaacgcgacaaaataaaactcgaaacgttcgaacgaaaaaccgaacgaaatccgatcaacgaaataaaaccgaaaaaaaataaaaacgactacgaaaaacgacgcgaccgaaacgacgaaaccgaacgccgtaatacgcgcaaaacaactaaaaaacgctaacgctaaccgcgcgaaaccgaaaaaaaaactccgaaccgaaaaacgataaaaaaacgcaataaaatccgccaaaacccgaacgcaaaaaccgcgcgaaaccgtcgaaaacgacctaaaacgaaaaaccgcgccgaaccccaaaactacgcgaaatccgaaccgccgccgcccccgcccgtaccttaacgctcaactcgaccgctacctccacgcttttctccgacataataccgaaaccgaaaccgaaactaacgaaaaaccgaaatcccgaaaccgaaacgaaaaaacccttaacgacgaaaaataaccgcgaccgaaacctaacgcgataacgacgacgacgacgacacgacaactccgaccgctcgatcaaacttaatctttttaaaaaaacgaaataaatcccccgaatttaaccgaaataattctttacgaaaacccgcaaatttcgaccgtccgtaaaaatacgaaaaaccgtttaaacgttacgtaaatctaacgcgatatttcatccgaaatttcgcccg

SEQ ID NO: 3787 - DNA, 802 bp, Artificial Sequence
  chemically treated genomic DNA (Homo sapiens) CpG-island No: 3787
ggaggagtagtttttagggagagttttgtttatatttgaggattttaaatcgtttagcgaggaaaggtgaggttaggttgtaagtaaagacgcggtagcggggcgtagggagggggcgcggtaaagtgagattcggggcgttcggacgggaagtcggacgggattcggttagcgaggtggggtcgaagaggggtggggacggttgcgggggacggcgcgatcggagcggcgaggtcgggcgtcgtggtgcgcgtagggtagttagagggcgttggcgttagtcgcgcggagtcgggaaaggagtttcgggtcggggagcggtgggagggcgtagtggggttcgttaggattcgggcgtaagggtcgcgcggggtcgtcgggggcggtttggggcgaaggatcgcgtcgggttttagggttgcgcgaggttcgggtcgtcgtcgttttcgttcgtattttggcgtttaattcggtcgttgtttttacgttttttttcgatatggtgtcggggtcggggtcggggttggcggggagtcggggtttcggggtcgagacggaggggtttttgacggcggagggtggtcgcggtcggaatttggcgcggtggcggcggcggcggcgatacggtagtttcggtcgttcggttaaatttggtttttttgaaaaagcggaataagtttttcgggtttggtcggggtggttttttacggaaattcgtaggtttcggtcgttcgtaggggtgcgaaaggtcgtttaagcgttgcgtggatttggcgcggtattttattcggggtttcgttcg

SEQ ID NO: 3788 - DNA, 802 bp, Artificial Sequence
  chemically treated genomic DNA (Homo sapiens) CpG-island No: 3788
cgaacgaaaccccgaataaaataccgcgccaaatccacgcaacgcttaaacgacctttcgcacccctacgaacgaccgaaacctacgaatttccgtaaaaaaccaccccgaccaaacccgaaaaacttattccgctttttcaaaaaaaccaaatttaaccgaacgaccgaaactaccgtatcgccgccgccgccgccaccgcgccaaattccgaccgcgaccaccctccgccgtcaaaaacccctccgtctcgaccccgaaaccccgactccccgccaaccccgaccccgaccccgacaccatatcgaaaaaaaacgtaaaaacaacgaccgaattaaacgccaaaatacgaacgaaaacgacgacgacccgaacctcgcgcaaccctaaaacccgacgcgatccttcgccccaaaccgcccccgacgaccccgcgcgacccttacgcccgaatcctaacgaaccccactacgccctcccaccgctccccgacccgaaactcctttcccgactccgcgcgactaacgccaacgccctctaactaccctacgcgcaccacgacgcccgacctcgccgctccgatcgcgccgtcccccgcaaccgtccccacccctcttcgaccccacctcgctaaccgaatcccgtccgacttcccgtccgaacgccccgaatctcactttaccgcgccccctccctacgccccgctaccgcgtctttacttacaacctaacctcacctttcctcgctaaacgatttaaaatcctcaaatataaacaaaactctccctaaaaactactcctcc

SEQ ID NO: 3789 - DNA, 1040 bp, Artificial Sequence
  chemically treated genomic DNA (Homo sapiens) CpG-island No: 3789
gcggtagcggggcgtagggagggggcgcggtaaagtgagattcggggcgttcggacgggaagtcggacgggattcggttagcgaggtggggtcgaagaggggtggggacggttgcgggggtcggcgcgatcggagcggcgaggtcgggcgtcgtggtgcgcgtagggtagttagagggcgttggcgttagtcgcgcggagtcgggaaaggagtttcgggtcggggagcggtgggagggcgtagtggggttcgttaggattcgggcgtaagggtcgcgcggggtcgtcgggggcggtttggggcgaaggatcgcgtcgggttttagggttgcgcgaggttcgggtcgtcgtcgttttcgttcgtattttggcgtttaattcggtcgttgtttttacgttttttttcgatatggtgtcggggtcggggtcggggttggcggggagtcggggtttcggggtcgagacggaggggttttggacggcggagggtggtcgcggtcggaatttggcgcggtggcggcggcggcggcgatagcggtagcggcggtcgttcggtaagttgggtttttggaagaggcggtagaggcgcgcggggtggggcgggggtgggtttggagcggagattcgtagggttgcggtcgttcggagggcgggcggaagggcggtgtaggcggtggtcggcgcgttcggtcgcggtagttcgatttcgggttcgtcgttttcgtattagtagagtgtcgtcgattagtcgtgtcgttttcgggaagggaattcgtttataaggcggcgttgttcgacgggaggggttttttaggggtggggtaggcgggagcggggaggagaggagaggggagggttatgaaagaggaggttggagaggtggggataggaggatgaaagcgaggggagggagagttagggagtcgggagggaggacgagattaggagggggaaatggagagattgacggtcgcggagaaagagtggggcgaggaggtgggaaggggtggggtttttgcggggaggtatttttttaaattt

SEQ ID NO: 3790 - DNA, 1040 bp, Artificial Sequence
  chemically treated genomic DNA (Homo sapiens) CpG-island No: 3790
aaatttaaaaaaatacctccccgcaaaaaccccaccccttcccacctcctcgccccactctttctccgcgaccgtcaatctctccatttccccctcctaatctcgtcctccctcccgactccctaactctccctcccctcgctttcatcctcctatccccacctctccaacctcctctttcataaccctcccctctcctctcctccccgctcccgcctaccccacccctaaaaaacccctcccgtcgaacaacgccgccttataaacgaattcccttcccgaaaacgacacgactaatcgacgacactctactaatacgaaaacgacgaacccgaaatcgaactaccgcgaccgaacgcgccgaccaccgcctacaccgcccttccgcccgccctccgaacgaccgcaaccctacgaatctccgctccaaacccacccccgccccaccccgcgcgcctctaccgcctcttccaaaaacccaacttaccgaacgaccgccgctaccgctatcgccgccgccgccgccaccgcgccaaattccgaccgcgaccaccctccgccgtccaaaacccctccgtctcgaccccgaaaccccgactccccgccaaccccgaccccgaccccgacaccatatcgaaaaaaaacgtaaaaacaacgaccgaattaaacgccaaaatacgaacgaaaacgacgacgacccgaacctcgcgcaaccctaaaacccgacgcgatccttcgccccaaaccgcccccgacgaccccgcgcgacccttacgcccgaatcctaacgaaccccactacgccctcccaccgctccccgacccgaaactcctttcccgactccgcgcgactaacgccaacgccctctaactaccctacgcgcaccacgacgcccgacctcgccgctccgatcgcgccgacccccgcaaccgtccccacccctcttcgaccccacctcgctaaccgaatcccgtccgacttcccgtccgaacgccccgaatctcactttaccgcgccccctccctacgccccgctaccgc

SEQ ID NO: 3791 - DNA, 1040 bp, Artificial Sequence
  chemically treated genomic DNA (Homo sapiens) CpG-island No: 3791
ggatttggaaaggtgttttttcgtaggaattttatttttttttattttttcgttttatttttttttcgcggtcgttagtttttttattttttttttttggtttcgttttttttttcgattttttagtttttttttttttcgtttttatttttttatttttatttttttaatttttttttttataattttttttttttttttttttttcgttttcgtttgttttatttttgggaagtttttttcgtcgggtagcgtcgttttataagcgggtttttttttcgggggcggtacggttggtcggcggtattttgttggtgcgggggcggcgagttcgggatcgagttatcgcggtcgagcgcgtcggttatcgtttgtatcgttttttcgttcgtttttcggacggtcgtagttttgcgggttttcgttttagatttattttcgttttatttcgcgcgtttttgtcgttttttttagagatttagtttgtcgagcggtcgtcgttgtcgttgtcgtcgtcgtcgtcgttatcgcgttaggtttcggtcgcggttatttttcgtcgtttagggttttttcgtttcggtttcgggatttcggtttttcgttagtttcggtttcggtttcggtattatgtcggagaaaagcgtggaggtagcggtcgagttgagcgttaaggtacgggcgggggcggcggcggttcggatttcgcgtagttttggggttcggcgcggtttttcgttttaggtcgttttcgacggtttcgcgcggtttttgcgttcgggttttggcggattttattgcgtttttttatcgtttttcggttcggagtttttttttcggtttcgcgcggttagcgttagcgttttttagttgttttgcgcgtattacggcgttcggtttcgtcgtttcggtcgcgtcggttttcgtagtcgtttttattttttttcggttttatttcgttgatcggatttcgttcggtttttcgttcgaacgtttcgagttttattttgtcgcgttttttttttgcgtttcgttgtcgt

SEQ ID NO: 3792 - DNA, 1040 bp, Artificial Sequence
  chemically treated genomic DNA (Homo sapiens) CpG-island No: 3792
acgacaacgaaacgcaaaaaaaaaacgcgacaaaataaaactcgaaacgttcgaacgaaaaaccgaacgaaatccgatcaacgaaataaaaccgaaaaaaaataaaaacgactacgaaaaccgacgcgaccgaaacgacgaaaccgaacgccgtaatacgcgcaaaacaactaaaaaacgctaacgctaaccgcgcgaaaccgaaaaaaaaactccgaaccgaaaaacgataaaaaaacgcaataaaatccgccaaaacccgaacgcaaaaaccgcgcgaaaccgtcgaaaacgacctaaaacgaaaaaccgcgccgaaccccaaaactacgcgaaatccgaaccgccgccgcccccgcccgtaccttaacgctcaactcgaccgctacctccacgcttttctccgacataataccgaaaccgaaaccgaaactaacgaaaaaccgaaatcccgaaaccgaaacgaaaaaaccctaaacgacgaaaaataaccgcgaccgaaacctaacgcgataacgacgacgacgacgacaacgacaacgacgaccgctcgacaaactaaatctctaaaaaaaacgacaaaaacgcgcgaaataaaacgaaaataaatctaaaacgaaaacccgcaaaactacgaccgtccgaaaaacgaacgaaaaaacgatacaaacgataaccgacgcgctcgaccgcgataactcgatcccgaactcgccgcccccgcaccaacaaaataccgccgaccaaccgtaccgcccccgaaaaaaaaacccgcttataaaacgacgctacccgacgaaaaaaacttcccaaaaataaaacaaacgaaaacgaaaaaaaaaaaaaaaaaaaaaattataaaaaaaaaaattaaaaaaataaaaataaaaaaataaaaacgaaaaaaaaaaaaactaaaaaatcgaaaaaaaaaacgaaaccaaaaaaaaaaaataaaaaaactaacgaccgcgaaaaaaaaataaaacgaaaaaataaaaaaaaataaaattcctacgaaaaaacacctttccaaatcc

SEQ ID NO: 3793 - DNA, 974 bp, Artificial Sequence
  chemically treated genomic DNA (Homo sapiens) CpG-island No: 3793
gtggcgtcggtggtgacggcggatttttcggattgcgcgagcgtcgttcgcgtttcgttggtggtcgaggttttggttcggtgcggagtgtttaggtcgcgtagggtgttgcggaagttttcggcgttaaagtagtatattagcgggtttagtacgtagttggcgtcggttagtagtattattattattagtatttcgcgtacgcgatcgcgggtaggtacgttggtcgttattagtttgtttcgtagtagttcgtagatcgttagcgtgttgttgtagggtacgaagtatagtaggaagatgacgaggttagttagtaggaggcgtacggtttttcgtcgtcgttggttttgcgtggcgtcggggcgcgttagcgtttagaagattcggttcgacgagtagattatcgtcgttaggggtagtaggaagtttagcgtttcggttagtagtacgaggggtagtagtttgtttttttatagttcgtcgttgaagttttcgaagtataggcgtatttcgaggtttcggtagcggtaacgcgagggtttgtgtacgcgggcggcgggtacggtaaatattaggatgagcgtttatacgtttaggtagagtagtcgcgttacgcggggtcgtcgtaggtggcgtagtcgtagcgggtgtacgatggcggcgtagcggtttacgttgatgagtattaggaagatgtagttgtcgtatatgtttatttggaagatggcgttcgtcgtttggtataggaggtcggggaagggttagtggtgtagtgcgtagtaggagagacgaacgggtagcgagagggtgaagagtaggtcgttggtcgttaggttatatatgtatacgtttattatcgagtgtacgcgtagcgcgcgtaggaagatttagagggttagcgcgttgagggggagttcggtagttagtattaagttgtagattattaagtgtaggcggtgggtaggtcggta

SEQ ID NO: 3794 - DNA, 974 bp, Artificial Sequence
  chemically treated genomic DNA (Homo sapiens) CpG-island No: 3794
taccgacctacccaccgcctacacttaataatctacaacttaatactaactaccgaactccccctcaacgcgctaaccctctaaatcttcctacgcgcgctacgcgtacactcgataataaacgtatacatatataacctaacgaccaacgacctactcttcaccctctcgctacccgttcgtctctcctactacgcactacaccactaacccttccccgacctcctataccaaacgacgaacgccatcttccaaataaacatatacgacaactacatcttcctaatactcatcaacgtaaaccgctacgccgccatcgtacacccgctacgactacgccacctacgacgaccccgcgtaacgcgactactctacctaaacgtataaacgctcatcctaatatttaccgtacccgccgcccgcgtacacaaaccctcgcgttaccgctaccgaaacctcgaaatacgcctatacttcgaaaacttcaacgacgaactataaaaaaacaaactactacccctcgtactactaaccgaaacgctaaacttcctactacccctaacgacgataatctactcgtcgaaccgaatcttctaaacgctaacgcgccccgacgccacgcaaaaccaacgacgacgaaaaaccgtacgcctcctactaactaacctcgtcatcttcctactatacttcgtaccctacaacaacacgctaacgatctacgaactactacgaaacaaactaataacgaccaacgtacctacccgcgatcgcgtacgcgaaatactaataataataatactactaaccgacgccaactacgtactaaacccgctaatatactactttaacgccgaaaacttccgcaacaccctacgcgacctaaacactccgcaccgaaccaaaacctcgaccaccaacgaaacgcgaacgacgctcgcgcaatccgaaaaatccgccgtcaccaccgacgccac

SEQ ID NO: 3795 - DNA, 974 bp, Artificial Sequence
  chemically treated genomic DNA (Homo sapiens) CpG-island No: 3795
tatcgatttatttatcgtttgtatttggtggtttatagtttggtgttggttgtcgggtttttttttaacgcgttagttttttgggtttttttgcgcgcgttgcgcgtgtattcggtggtgagcgtgtatatgtgtaatttggcggttagcgatttgttttttattttttcgttgttcgttcgttttttttattacgtattgtattattggttttttttcgattttttgtgttagacgacgggcgttattttttagatgaatatgtacggtagttgtatttttttgatgtttattaacgtggatcgttacgtcgttatcgtgtattcgttgcgattgcgttatttgcggcggtttcgcgtggcgcggttgttttgtttgggcgtgtgggcgtttattttggtgtttgtcgtgttcgtcgttcgcgtgtataggttttcgcgttgtcgttatcgggatttcgaggtgcgtttatgtttcgagagttttagcgacgagttgtggaaaggtaggttgttgtttttcgtgttgttggtcgaggcgttgggttttttgttgtttttggcggcggtggtttattcgtcgggtcgagttttttggacgttggcgcgtttcgacgttacgtagagttagcggcggcggaagatcgtgcgttttttgttggttaatttcgttatttttttgttgtgtttcgtgttttataatagtacgttggcggtttacgggttgttgcggagtaagttggtggcggttagcgtgtttgttcgcgatcgcgtgcgcggggtgttgatggtgatggtgttgttggtcggcgttaattgcgtgttggattcgttggtgtattattttagcgtcgagggttttcgtaatattttgcgcggtttgggtatttcgtatcgggttaggatttcggttattaacgggacgcgggcggcgttcgcgtaattcgaaaggttcgtcgttattatcgacgttat

SEQ ID NO: 3796 - DNA, 974 bp, Artificial Sequence
  chemically treated genomic DNA (Homo sapiens) CpG-island No: 3796
ataacgtcgataataacgacgaacctttcgaattacgcgaacgccgcccgcgtcccgttaataaccgaaatcctaacccgatacgaaatacccaaaccgcgcaaaatattacgaaaaccctcgacgctaaaataatacaccaacgaatccaacacgcaattaacgccgaccaacaacaccatcaccatcaacaccccgcgcacgcgatcgcgaacaaacacgctaaccgccaccaacttactccgcaacaacccgtaaaccgccaacgtactattataaaacacgaaacacaacaaaaaaataacgaaattaaccaacaaaaaacgcacgatcttccgccgccgctaactctacgtaacgtcgaaacgcgccaacgtccaaaaaactcgacccgacgaataaaccaccgccgccaaaaacaacaaaaaacccaacgcctcgaccaacaacacgaaaaacaacaacctacctttccacaactcgtcgctaaaactctcgaaacataaacgcacctcgaaatcccgataacgacaacgcgaaaacctatacacgcgaacgacgaacacgacaaacaccaaaataaacgcccacacgcccaaacaaaacaaccgcgccacgcgaaaccgccgcaaataacgcaatcgcaacgaatacacgataacgacgtaacgatccacgttaataaacatcaaaaaaatacaactaccgtacatattcatctaaaaaataacgcccgtcgtctaacacaaaaaatcgaaaaaaaaccaataatacaatacgtaataaaaaaaacgaacgaacaacgaaaaaataaaaaacaaatcgctaaccgccaaattacacatatacacgctcaccaccgaatacacgcgcaacgcgcgcaaaaaaacccaaaaaactaacgcgttaaaaaaaaacccgacaaccaacaccaaactataaaccaccaaatacaaacgataaataaatcgata

SEQ ID NO: 3797 - DNA, 507 bp, Artificial Sequence
  chemically treated genomic DNA (Homo sapiens) CpG-island No: 3797
gtgacgcgcgcgcgcgcgttcgaagggggcgtggttagtggttgtttgagcgacgagggggcgggggttgttcgggagatttggggaggagggtggcggtagtggaaggggggggttggagttggttgaggttattatgggttgttcgtgggggggcggggtttgtgcggtgggatttttcggtcggtgttttaggttttttaagaggcgacgttggagtcggagttattttttttttttcggtcgcggcgaggaggagtcggagcgggagtgatatcgagtcggatttagcgcgatttgcggcggtttcggggtgaggagagcgcggggtttttaaagagacgttttttacggttttattagtttcgagggttatttcgttattcgttttttttttaggcgttttcggattcgcggatcgttttttgtttagaggagtcgatttttttttttttggttttgtagggcgttcggttttttttttagttttcgttttaattttgtcgg

SEQ ID NO: 3798 - DNA, 507 bp, Artificial Sequence
  chemically treated genomic DNA (Homo sapiens) CpG-island No: 3798
ccgacaaaattaaaacgaaaactaaaaaaaaaaccgaacgccctacaaaaccaaaaaaaaaaaaatcgactcctctaaacaaaaaacgatccgcgaatccgaaaacgcctaaaaaaaaaacgaataacgaaataaccctcgaaactaataaaaccgtaaaaaacgtctctttaaaaaccccgcgctctcctcaccccgaaaccgccgcaaatcgcgctaaatccgactcgatatcactcccgctccgactcctcctcgccgcgaccgaaaaaaaaaaaataactccgactccaacgtcgcctcttaaaaaacctaaaacaccgaccgaaaaatcccaccgcacaaaccccgcccccccacgaacaacccataataacctcaaccaactccaaccccccccttccactaccgccaccctcctccccaaatctcccgaacaacccccgccccctcgtcgctcaaacaaccactaaccacgcccccttcgaacgcgcgcgcgcgcgtcac

SEQ ID NO: 3799 - DNA, 507 bp, Artificial Sequence
  chemically treated genomic DNA (Homo sapiens) CpG-island No: 3799
tcggtagggttagggcgggggttggggaggaggtcgggcgttttgtagggttaggaaaggaagggtcggtttttttgggtaaggggcggttcgcgggttcggagacgtttgaggaaggggcgggtgacgggatgattttcggggttggtagggtcgtgaggggcgtttttttgggaatttcgcgttttttttatttcggagtcgtcgtaggtcgcgttgggttcggttcggtgttattttcgtttcggttttttttcgtcgcggtcgaaggggggaaaatggtttcggttttagcgtcgttttttaaagggtttgaaatatcggtcgggaaattttatcgtataggtttcgtttttttacggatagtttataataattttaattaattttaattttttttttttattatcgttatttttttttttaggtttttcgggtaattttcgttttttcgtcgtttaggtaattattggttacgtttttttcgagcgcgcgcgcgcgcgttat

SEQ ID NO: 3800 - DNA, 507 bp, Artificial Sequence
  chemically treated genomic DNA (Homo sapiens) CpG-island No: 3800
ataacgcgcgcgcgcgcgctcgaaaaaaacgtaaccaataattacctaaacgacgaaaaaacgaaaattacccgaaaaacctaaaaaaaaaaataacgataataaaaaaaaaaaattaaaattaattaaaattattataaactatccgtaaaaaaacgaaacctatacgataaaatttcccgaccgatatttcaaaccctttaaaaaacgacgctaaaaccgaaaccattttccccccttcgaccgcgacgaaaaaaaaccgaaacgaaaataacaccgaaccgaacccaacgcgacctacgacgactccgaaataaaaaaaacgcgaaattcccaaaaaaacgcccctcacgaccctaccaaccccgaaaatcatcccgtcacccgccccttcctcaaacgtctccgaacccgcgaaccgccccttacccaaaaaaaccgacccttcctttcctaaccctacaaaacgcccgacctcctccccaacccccgccctaaccctaccga

SEQ ID NO: 3801 - DNA, 604 bp, Artificial Sequence
  chemically treated genomic DNA (Homo sapiens) CpG-island No: 3801
  unsure (457..458, 555)
ggattcgcgttcgtattcgaagattttatacgtttttcgtattgtttttatagtattttacgttcgcggtgtacgtttatttgtcggtagacgagttatacgtttcggcggtttagattttcgtgtcgattttcgtgggcgagtttacgcgttgggtgttcggcgcgtttttaggagtggttgggatcgcgggttggcgtcgggtagggcggtgggacgtttggagtcggcgggaggagtacgtttaggcgggttcgcgtcgagttcgagcgagcgggcgagtcgggcgggaggggttatttgtaatcgagtagacgttattatcgttttttattcgcggggggcgggggcgggcggttaggtgacggcggtttatttttcgtcgtcgagtcgggtggtttttgttcgggaggagttttttggcgcggtttgattgggattcgcggcgtagttgcgnngggaggggggatacgtgatcgttcgggttaggggggttcggggggttttatttcgcgaatgggtatttatgttttttttttggaaaatcgggggganatagagaaggcggaggagtacgcgcgggtgtaagagaagtttagtagtt

SEQ ID NO: 3802 - DNA, 604 bp, Artificial Sequence
  chemically treated genomic DNA (Homo sapiens) CpG-island No: 3802
  unsure (50, 147..)
aactactaaacttctcttacacccgcgcgtactcctccgccttctctatntccccccgattttccaaaaaaaaaacataaatacccattcgcgaaataaaaccccccgaacccccctaacccgaacgatcacgtatcccccctcccnncgcaactacgccgcgaatcccaatcaaaccgcgccaaaaaactcctcccgaacaaaaaccacccgactcgacgacgaaaaataaaccgccgtcacctaaccgcccgcccccgccccccgcgaataaaaaacgataataacgtctactcgattacaaataacccctcccgcccgactcgcccgctcgctcgaactcgacgcgaacccgcctaaacgtactcctcccgccgactccaaacgtcccaccgccctacccgacgccaacccgcgatcccaaccactcctaaaaacgcgccgaacacccaacgcgtaaactcgcccacgaaaatcgacacgaaaatctaaaccgccgaaacgtataactcgtctaccgacaaataaacgtacaccgcgaacgtaaaatactataaaaacaatacgaaaaacgtataaaatcttcgaatacgaacgcgaatcc

SEQ ID NO: 3803 - DNA, 604 bp, Artificial Sequence
  chemically treated genomic DNA (Homo sapiens) CpG-island No: 3803
  unsure (50, 147..)
ggttgttaagttttttttatattcgcgcgtgttttttcgttttttttgtnttttttcggttttttaaaggagaaatatgggtgtttattcgcgaaatggggtttttcgggtttttttggttcgggcggttacgtgtttttttttttnncgtaattgcgtcgcgagttttaattagatcgcgttagggggtttttttcgggtaggaattattcggttcggcggcggagggtgggtcgtcgttatttgatcgttcgttttcgtttttcgcgagtaaggggcggtggtagcgtttgttcggttataaatggtttttttcgttcggttcgttcgttcgttcgggttcggcgcggattcgtttgggcgtgtttttttcgtcggttttaggcgttttatcgttttgttcggcgttagttcgcggttttagttatttttgagggcgcgtcgggtatttagcgcgtaggttcgtttacggaggtcgatacggaagtttggatcgtcgaggcgtgtggttcgtttatcggtaggtgagcgtgtatcgcgggcgtgggatgttgtggggatagtgcgggggacgtgtggggttttcggatgcgaacgcgagttt

SEQ ID NO: 3804 - DNA, 604 bp, Artificial Sequence
  chemically treated genomic DNA (Homo sapiens) CpG-island No: 3804
  unsure (457..458, 555)
aaactcgcgttcgcatccgaaaaccccacacgtcccccgcactatccccacaacatcccacgcccgcgatacacgctcacctaccgataaacgaaccacacgcctcgacgatccaaacttccgtatcgacctccgtaaacgaacctacgcgctaaatacccgacgcgccctcaaaaataactaaaaccgcgaactaacgccgaacaaaacgataaaacgcctaaaaccgacgaaaaaaacacgcccaaacgaatccgcgccgaacccgaacgaacgaacgaaccgaacgaaaaaaaccatttataaccgaacaaacgctaccaccgccccttactcgcgaaaaacgaaaacgaacgatcaaataacgacgacccaccctccgccgccgaaccgaataattcctacccgaaaaaaaccccctaacgcgatctaattaaaactcgcgacgcaattacgnnaaaaaaaaaaacacgtaaccgcccgaaccaaaaaaacccgaaaaaccccatttcgcgaataaacacccatatttctcctttaaaaaaccgaaaaaanacaaaaaaaacgaaaaaacacgcgcgaatataaaaaaaacttaacaacc

SEQ ID NO: 3805 - DNA, 529 bp, Artificial Sequence
  chemically treated genomic DNA (Homo sapiens) CpG-island No: 3805
cgtcggtttttatttaggtcgaggtggttcggttttatgtatcgcgacgtaacgcggggaggtagataaggtatagggcggcgtttataatttatgttaattcgttttatgtgttcgtcgaggcggtataaatcgtcgtgacgattagcggtttaatgatcgaagttaggttggtaagagtcgcgagcgatttttgaagttgtttttgatggtcgttatttatttgtttggatagtatggtttgtaacgcgggtatttcgatgtcgtcggaagcgagaagaattataatggggaaggttatttagtttcgcgtcgcgaacgttagtaagacgtagtttagcgcgtcggtcgttatgtcggcgataatggtttgtttttcgtcgaaacgtttggtggcgggattagtgacgaaggtttgagcgagggcgtgtaagatttcgaatatcgtaagcgataggtcgattatcgtcgcgttttagcgaaagcggttttcgtcgaaaatgatttagagcgtttgatgaattttcgg

SEQ ID NO: 3806 - DNA, 529 bp, Artificial Sequence
  chemically treated genomic DNA (Homo sapiens) CpG-island No: 3806
ccgaaaattcatcaaacgctctaaatcattttcgacgaaaaccgctttcgctaaaacgcgacgataatcgacctatcgcttacgatattcgaaatcttacacgccctcgctcaaaccttcgtcactaatcccgccaccaaacgtttcgacgaaaaacaaaccattatcgccgacataacgaccgacgcgctaaactacgtcttactaacgttcgcgacgcgaaactaaataaccttccccattataattcttctcgcttccgacgacatcgaaatacccgcgttacaaaccatactatccaaacaaataaataacgaccatcaaaaacaacttcaaaaatcgctcgcgactcttaccaacctaacttcgatcattaaaccgctaatcgtcacgacgatttataccgcctcgacgaacacataaaacgaattaacataaattataaacgccgccctataccttatctacctccccgcgttacgtcgcgatacataaaaccgaaccacctcgacctaaataaaaaccgacg

SEQ ID NO: 3807 - DNA, 529 bp, Artificial Sequence
  chemically treated genomic DNA (Homo sapiens) CpG-island No: 3807
tcgaaagtttattaagcgttttgggttattttcggcgaggatcgttttcgttggagcgcgacgatgatcggtttgtcgtttgcggtattcggaattttgtacgttttcgtttaagttttcgttattggtttcgttattaaacgtttcggcgagaagtaggttattatcgtcggtatggcggtcgacgcgttgggttacgttttgttggcgttcgcgacgcgaggttggatggttttttttattatgatttttttcgttttcggcggtatcgggatgttcgcgttgtaggttatgttgtttaggtaggtagatgacgattattagggatagttttaaggatcgttcgcggtttttattagtttaatttcgattattggatcgttgatcgttacggcgatttatgtcgtttcggcgagtatatggaacgggttggtatggattgtaggcgtcgttttatattttgtttgttttttcgcgttgcgtcgcggtgtatggagtcgggttatttcgatttgaatggaagtcggcg

SEQ ID NO: 3808 - DNA, 529 bp, Artificial Sequence
  chemically treated genomic DNA (Homo sapiens) CpG-island No: 3808
cgccgacttccattcaaatcgaaataacccgactccatacaccgcgacgcaacgcgaaaaaacaaacaaaatataaaacgacgcctacaatccataccaacccgttccatatactcgccgaaacgacataaatcgccgtaacgatcaacgatccaataatcgaaattaaactaataaaaaccgcgaacgatccttaaaactatccctaataatcgtcatctacctacctaaacaacataacctacaacgcgaacatcccgataccgccgaaaacgaaaaaaatcataataaaaaaaaccatccaacctcgcgtcgcgaacgccaacaaaacgtaacccaacgcgtcgaccgccataccgacgataataacctacttctcgccgaaacgtttaataacgaaaccaataacgaaaacttaaacgaaaacgtacaaaattccgaataccgcaaacgacaaaccgatcatcgtcgcgctccaacgaaaacgatcctcgccgaaaataacccaaaacgcttaataaactttcga

SEQ ID NO: 3809 - DNA, 527 bp, Artificial Sequence
  chemically treated genomic DNA (Homo sapiens) CpG-island No: 3809
atcgcggcgcgcgcggtttcgattcgggtttttaggggcggcgcgcgggagggggcggggtttgcgcggtagcgtgggcgttaggcgcgcgggaggagggagtcgggaggagggggcggggtcgcgtcgttcgcgtcgcgttgggcgttttcggttaatgagcggcgtttatatgtcgcggcggcggcgaaaggggaggtagcggtcgataaatgttattagagtagtcgtcgcggagtcgttttcgacgttatttttttttttttcgtcgtagtttttttcgtcgttgtcgggcgtgcggcgttgagggattcgggcgagcgcgtcgcgtatcgtttcgtcggttcgtttttttcgtcgcgtttcgtttttagtggtttgtcgggcgttttttttttcggttcgggcggggtttttgatcgttttaagagagcggggagggggttcgggggtcgcggtttgttttttcggcgggcggttgagggcgagggaggtttttttttttggcgaggggagggagggtgggt

SEQ ID NO: 3810 - DNA, 527 bp, Artificial Sequence
  chemically treated genomic DNA (Homo sapiens) CpG-island No: 3810
acccaccctccctcccctcgccaaaaaaaaaaacctccctcgccctcaaccgcccgccgaaaaaacaaaccgcgacccccgaaccccctccccgctctcttaaaacgatcaaaaaccccgcccgaaccgaaaaaaaaaacgcccgacaaaccactaaaaacgaaacgcgacgaaaaaaacgaaccgacgaaacgatacgcgacgcgctcgcccgaatccctcaacgccgcacgcccgacaacgacgaaaaaaactacgacgaaaaaaaaaaaaataacgtcgaaaacgactccgcgacgactactctaataacatttatcgaccgctacctcccctttcgccgccgccgcgacatataaacgccgctcattaaccgaaaacgcccaacgcgacgcgaacgacgcgaccccgccccctcctcccgactccctcctcccgcgcgcctaacgcccacgctaccgcgcaaaccccgccccctcccgcgcgccgcccctaaaaacccgaatcgaaaccgcgcgcgccgcgat

SEQ ID NO: 3811 - DNA, 527 bp, Artificial Sequence
  chemically treated genomic DNA (Homo sapiens) CpG-island No: 3811
atttatttttttttttttcgttagaagggagggtttttttcgtttttagtcgttcgtcgggagggtaggtcgcggttttcgagtttttttttcgtttttttgaggcgattagaggtttcgttcgggtcggaggagggggcgttcggtagattattgagggcggaacgcggcgagggaggcgagtcggcggggcggtgcgcggcgcgttcgttcgggttttttagcgtcgtacgttcgatagcggcggaggaaattgcggcgaaggaaaaggaggtggcgtcggggacggtttcgcggcggttgttttaatagtatttatcggtcgttgttttttttttcgtcgtcgtcgcggtatgtggacgtcgtttattggtcgagagcgtttagcgcggcgcgggcggcgcggtttcgtttttttttttcggtttttttttttcgcgcgtttggcgtttacgttgtcgcgtaggtttcgttttttttcgcgcgtcgtttttaggaattcggatcgaggtcgcgcgcgtcgcggt

SEQ ID NO: 3812 - DNA, 527 bp, Artificial Sequence
  chemically treated genomic DNA (Homo sapiens) CpG-island No: 3812
accgcgacgcgcgcgacctcgatccgaattcctaaaaacgacgcgcgaaaaaaaacgaaacctacgcgacaacgtaaacgccaaacgcgcgaaaaaaaaaaaccgaaaaaaaaaaacgaaaccgcgccgcccgcgccgcgctaaacgctctcgaccaataaacgacgtccacataccgcgacgacgacgaaaaaaaaaacaacgaccgataaatactattaaaacaaccgccgcgaaaccgtccccgacgccacctccttttccttcgccgcaatttcctccgccgctatcgaacgtacgacgctaaaaaacccgaacgaacgcgccgcgcaccgccccgccgactcgcctccctcgccgcgttccgccctcaataatctaccgaacgccccctcctccgacccgaacgaaacctctaatcgcctcaaaaaaacgaaaaaaaaactcgaaaaccgcgacctaccctcccgacgaacgactaaaaacgaaaaaaaccctcccttctaacgaaaaaaaaaaaaataaat

SEQ ID NO: 3813 - DNA, 723 bp, Artificial Sequence
  chemically treated genomic DNA (Homo sapiens) CpG-island No: 3813
gggggcgcggggtgatttagcgttcggcgaggcggaagcggtcgtaagaggaggaggggagagttcgttcgcgtttgggttttcggggtggtacgagttcgcggtcggagtgcgaggcggaggcgaggaggtcgcggggacgggaggcgaggtcggtcgggttttcgaagttatggagaacgcgtatattaagacggtggaggaggtgttgggttatttcggcgttaacgagagtacggggttgagtttggaataggttaagaagtttaaggagagatggggttttaacggtaggtgtagggcgtttcgttgtaggggttcggcgcggtcgggagagttagggaagatggttgatcgggttttatttcgtgggtttcggtttcgcgttcgtcgatagttgcgggcggagggtcgggttagcgcgtcggtttcgcgggagagaaaggggttgcggttttcgtttcgttttttttggattttttcgtttttcgggttttcgattttttcggcgcgtaaggttcggaggtttttttttagtagtagtcggtttcggtggagggagggacgtggtttttgtagttaggttgagttcggtaagacgttttttcgttttttgtcgatttatgaggagtcgaggtcgttggaaggtttttgatcgtttttgttttatttaaagttatatatttggtagaagtgatgatatcgttgaaattatttttaggt

SEQ ID NO: 3814 - DNA, 723 bp, Artificial Sequence
  chemically treated genomic DNA (Homo sapiens) CpG-island No: 3814
acctaaaaataatttcaacgatatcatcacttctaccaaatatataactttaaataaaacaaaaacgatcaaaaaccttccaacgacctcgactcctcataaatcgacaaaaaacgaaaaaacgtcttaccgaactcaacctaactacaaaaaccacgtccctccctccaccgaaaccgactactactaaaaaaaaacctccgaaccttacgcgccgaaaaaatcgaaaacccgaaaaacgaaaaaatccaaaaaaaacgaaacgaaaaccgcaacccctttctctcccgcgaaaccgacgcgctaacccgaccctccgcccgcaactatcgacgaacgcgaaaccgaaacccacgaaataaaacccgatcaaccatcttccctaactctcccgaccgcgccgaacccctacaacgaaacgccctacacctaccgttaaaaccccatctctccttaaacttcttaacctattccaaactcaaccccgtactctcgttaacgccgaaataacccaacacctcctccaccgtcttaatatacgcgttctccataacttcgaaaacccgaccgacctcgcctcccgtccccgcgacctcctcgcctccgcctcgcactccgaccgcgaactcgtaccaccccgaaaacccaaacgcgaacgaactctcccctcctcctcttacgaccgcttccgcctcgccgaacgctaaatcaccccgcgccccc

SEQ ID NO: 3815 - DNA, 723 bp, Artificial Sequence
  chemically treated genomic DNA (Homo sapiens) CpG-island No: 3815
atttaggagtggttttagcgatgttattatttttgttagatgtgtaattttgggtaggataagaacggttagaggttttttaacgatttcgattttttataaatcggtaggggacgagaaaacgttttgtcgggtttaatttagttgtagaagttacgtttttttttttatcggggtcggttgttgttggagagaagttttcgagttttgcgcgtcgaaaaggtcgagggttcgagaagcgaagaggtttagggaaggcgaggcgaggatcgtagtttttttttttttcgcggggtcggcgcgttggttcgatttttcgttcgtagttgtcggcgggcgcggagtcgaagtttacgaggtggagttcggttagttattttttttggttttttcggtcgcgtcgggtttttgtagcggagcgttttgtatttatcgttggagttttatttttttttaagttttttgatttgttttaggtttagtttcgtattttcgttgacgtcgaagtggtttagtattttttttatcgttttggtgtgcgcgttttttatggtttcgggggttcggtcggtttcgtttttcgttttcgcggttttttcgttttcgtttcgtatttcggtcgcgggttcgtgttatttcgggagtttaggcgcggacgggttttttttttttttttttgcggtcgttttcgtttcgtcgggcgttgaattatttcgcgttttt

SEQ ID NO: 3816 - DNA, 723 bp, Artificial Sequence
  chemically treated genomic DNA (Homo sapiens) CpG-island No: 3816
aaaaacgcgaaataattcaacgcccgacgaaacgaaaacgaccgcaaaaaaaaaaaaaaaaaacccgtccgcgcctaaactcccgaaataacacgaacccgcgaccgaaatacgaaacgaaaacgaaaaaaccgcgaaaacgaaaaacgaaaccgaccgaacccccgaaaccataaaaaacgcgcacaccaaaacgataaaaaaaatactaaaccacttcgacgtcaacgaaaatacgaaactaaacctaaaacaaatcaaaaaacttaaaaaaaaataaaactccaacgataaatacaaaacgctccgctacaaaaacccgacgcgaccgaaaaaaccaaaaaaaataactaaccgaactccacctcgtaaacttcgactccgcgcccgccgacaactacgaacgaaaaatcgaaccaacgcgccgaccccgcgaaaaaaaaaaaaactacgatcctcgcctcgccttccctaaacctcttcgcttctcgaaccctcgaccttttcgacgcgcaaaactcgaaaacttctctccaacaacaaccgaccccgataaaaaaaaaaacgtaacttctacaactaaattaaacccgacaaaacgttttctcgtcccctaccgatttataaaaaatcgaaatcgttaaaaaacctctaaccgttcttatcctacccaaaattacacatctaacaaaaataataacatcgctaaaaccactcctaaat

SEQ ID NO: 3817 - DNA, 816 bp, Artificial Sequence
  chemically treated genomic DNA (Homo sapiens) CpG-island No: 3817
  unsure (453, 560)
gttgtatacgtttgattcggttatttgtttattcgattattaagcgaaatatcgtatcgagcgagtacgtattcggatggaagtcggttttgtcgattaggatgatttggacgaagagtattaggggttcgcgttagtcgaatttgttgttaggtttaaggcgcgtatgttcgacggcgaggatttcgtcgtgatttatggcgatgtttgtttgtcgaatattatggtggaaaatggtcgtttttttggatttatcgattgtggtcggttgggtgtggcggatcgttattaggatatagcgttggttattcgtgatattgttgaagagtttggcggcgaatgggttgatcgttttttcgtgttttacggtatcgtcgttttcgattcgtagcgtatcgttttttatcgtttttttgacgaatttttttgagcgggattttggggttcgaaatnatcgattaagcgacgtttaatttgttattacgagatttcgattttatcgtcgttttttatgaaaggttgggtttcggaatcgtttttcgggacgtcggttggatgantttttagcgcggggattttatgttggagtttttcgtttatttcgggttcgattttttcgcgagttggtttagttgttgtttgaggttggacgatttcgcggagttttatcggtagtgtaaattcgtcggtatttaggaaattagtagcggttattcgcgtatttatgttttcgaattgtaggagtggggaggtacgatggtcgttttggttcggatttttgtgaaggaattttatttttgtggtgtgatataattg

SEQ ID NO: 3818 - DNA, 816 bp, Artificial Sequence
  chemically treated genomic DNA (Homo sapiens) CpG-island No: 3818
  unsure (257, 364)
caattatatcacaccacaaaaataaaattccttcacaaaaatccgaaccaaaacgaccatcgtacctccccactcctacaattcgaaaacataaatacgcgaataaccgctactaatttcctaaataccgacgaatttacactaccgataaaactccgcgaaatcgtccaacctcaaacaacaactaaaccaactcgcgaaaaaatcgaacccgaaataaacgaaaaactccaacataaaatccccgcgctaaaaantcatccaaccgacgtcccgaaaaacgattccgaaacccaacctttcataaaaaacgacgataaaatcgaaatctcgtaataacaaattaaacgtcgcttaatcgatnatttcgaaccccaaaatcccgctcaaaaaaattcgtcaaaaaaacgataaaaaacgatacgctacgaatcgaaaacgacgataccgtaaaacacgaaaaaacgatcaacccattcgccgccaaactcttcaacaatatcacgaataaccaacgctatatcctaataacgatccgccacacccaaccgaccacaatcgataaatccaaaaaaacgaccattttccaccataatattcgacaaacaaacatcgccataaatcacgacgaaatcctcgccgtcgaacatacgcgccttaaacctaacaacaaattcgactaacgcgaacccctaatactcttcgtccaaatcatcctaatcgacaaaaccgacttccatccgaatacgtactcgctcgatacgatatttcgcttaataatcgaataaacaaataaccgaatcaaacgtatacaac

SEQ ID NO: 3819 - DNA, 816 bp, Artificial Sequence
  chemically treated genomic DNA (Homo sapiens) CpG-island No: 3819
  unsure (257, 364)
taattatgttatattatagaagtaaggtttttttataaagattcggattaaagcggttatcgtgtttttttatttttgtagttcgggggtatggatgcgcggatagtcgttgttggttttttggatgtcgacggatttgtattgtcggtagaatttcgcgaggtcgtttagttttaggtagtagttgaattaattcgcgaggggatcgagttcggggtgggcgaagaattttagtatgagattttcgcgttggaggnttatttagtcggcgtttcggaaaacgatttcgaagtttaattttttatagaaggcggcggtggaatcgaaatttcgtgatggtaggttgggcgtcgtttggtcggtnatttcgaattttagagtttcgtttagaagaattcgttaagaaggcgatagaaggcgatgcgttgcgaatcgggagcggcgatatcgtaaagtacgaggaagcggttagtttattcgtcgttaagttttttagtaatattacgggtagttaacgttatgttttgatagcggttcgttatatttagtcggttatagtcgatgaatttagaaaagcggttattttttattatgatattcggtaagtaggtatcgttatgggttacgacgagattttcgtcgtcgggtatgcgcgttttgagtttggtaataagttcggttggcgcgagtttttgatgtttttcgtttagattattttgatcgataagatcggtttttattcgagtacgtgttcgttcgatgcgatgtttcgtttggtggtcgaatgggtaggtagtcggattaagcgtatgtagt

SEQ ID NO: 3820 - DNA, 816 bp, Artificial Sequence
  chemically treated genomic DNA (Homo sapiens) CpG-island No: 3820
  unsure (453, 560)
actacatacgcttaatccgactacctacccattcgaccaccaaacgaaacatcgcatcgaacgaacacgtactcgaataaaaaccgatcttatcgatcaaaataatctaaacgaaaaacatcaaaaactcgcgccaaccgaacttattaccaaactcaaaacgcgcatacccgacgacgaaaatctcgtcgtaacccataacgatacctacttaccgaatatcataataaaaaataaccgcttttctaaattcatcgactataaccgactaaatataacgaaccgctatcaaaacataacgttaactacccgtaatattactaaaaaacttaacgacgaataaactaaccgcttcctcgtactttacgatatcgccgctcccgattcgcaacgcatcgccttctatcgccttcttaacgaattcttctaaacgaaactctaaaattcgaaatnaccgaccaaacgacgcccaacctaccatcacgaaatttcgattccaccgccgccttctataaaaaattaaacttcgaaatcgttttccgaaacgccgactaaataancctccaacgcgaaaatctcatactaaaattcttcgcccaccccgaactcgatcccctcgcgaattaattcaactactacctaaaactaaacgacctcgcgaaattctaccgacaatacaaatccgtcgacatccaaaaaaccaacaacgactatccgcgcatccatacccccgaactacaaaaataaaaaaacacgataaccgctttaatccgaatctttataaaaaaaccttacttctataatataacataatta

SEQ ID NO: 3821 - DNA, 704 bp, Artificial Sequence
  chemically treated genomic DNA (Homo sapiens) CpG-island No: 3821
tgtcgtcggtttttatttaggtcgaggtggttcggttttatgtatcgcgacgtaacgcggggaggtagataaggtatagggcggcgtttataatttatgttaattcgttttatgtgttcgtcgaggcggtataaatcgtcgtgacgattagcggtttaatgatcgaagttaggttggtaagagtcgcgagcgatttttgaagttgtttttgatggtcgttatttatttgtttggatagtatggtttgtaacgcgggtatttcgatgtcgtcggaagcgagaagaattataatggggaaggttatttagtttcgcgtcgcgaacgttagtaagacgtagtttagcgcgtcggtcgttatgtcggcgataatggtttgtttttcgtcgaaacgtttggtggcgggattagtgacgaaggtttgagcgagggcgtgtaagatttcgaatatcgtaagcgataggtcgattatcgtcgcgttttagcgaaagcggttttcgtcgaaaatgatttagagcgttgtcggtatttgttttacgagttgtatgataaagaagatagttataagtgcggcgacgatagttatgtttcgcgtttatcggaaggagttgattgggttgaaggtttttaagggtatcggtcgaggaattttcggcggttttgttgtgcgataggtttacgtttaaaaggaaataaattatgggtta

SEQ ID NO: 3822 - DNA, 704 bp, Artificial Sequence
  chemically treated genomic DNA (Homo sapiens) CpG-island No: 3822
taacccataatttatttccttttaaacgtaaacctatcgcacaacaaaaccgccgaaaattcctcgaccgatacccttaaaaaccttcaacccaatcaactccttccgataaacgcgaaacataactatcgtcgccgcacttataactatcttctttatcatacaactcgtaaaacaaataccgacaacgctctaaatcattttcgacgaaaaccgctttcgctaaaacgcgacgataatcgacctatcgcttacgatattcgaaatcttacacgccctcgctcaaaccttcgtcactaatcccgccaccaaacgtttcgacgaaaaacaaaccattatcgccgacataacgaccgacgcgctaaactacgtcttactaacgttcgcgacgcgaaactaaataaccttccccattataattcttctcgcttccgacgacatcgaaatacccgcgttacaaaccatactatccaaacaaataaataacgaccatcaaaaacaacttcaaaaatcgctcgcgactcttaccaacctaacttcgatcattaaaccgctaatcgtcacgacgatttataccgcctcgacgaacacataaaacgaattaacataaattataaacgccgccctataccttatctacctccccgcgttacgtcgcgatacataaaaccgaaccacctcgacctaaataaaaaccgacgaca

SEQ ID NO: 3823 - DNA, 704 bp, Artificial Sequence
  chemically treated genomic DNA (Homo sapiens) CpG-island No: 3823
tgatttatgatttatttttttttagacgtgagtttgtcgtatagtaaagtcgtcgaaagtttttcgatcgatgtttttgagagtttttaatttagttagtttttttcggtgggcgcggggtatgattatcgtcgtcgtatttatgattgttttttttattatgtaattcgtaggataggtgtcggtagcgttttgggttattttcggcgaggatcgttttcgttggagcgcgacgatgatcggtttgtcgtttgcggtattcggaattttgtacgttttcgtttaagttttcgttattggtttcgttattaaacgtttcggcgagaagtaggttattatcgtcggtatggcggtcgacgcgttgggttacgttttgttggcgttcgcgacgcgaggttggatggttttttttattatgatttttttcgttttcggcggtatcgggatgttcgcgttgtaggttatgttgtttaggtaggtagatgacgattattagggatagttttaaggatcgttcgcggtttttattagtttaatttcgattattggatcgttgatcgttacggcgatttatgtcgtttcggcgagtatatggaacgggttggtatggattgtaggcgtcgttttatattttgtttgttttttcgcgttgcgtcgcggtgtatggagtcgggttatttcgatttgaatggaagtcggcggta

SEQ ID NO: 3824 - DNA, 704 bp, Artificial Sequence
  chemically treated genomic DNA (Homo sapiens) CpG-island No: 3824
taccgccgacttccattcaaatcgaaataacccgactccatacaccgcgacgcaacgcgaaaaaacaaacaaaatataaaacgacgcctacaatccataccaacccgttccatatactcgccgaaacgacataaatcgccgtaacgatcaacgatccaataatcgaaattaaactaataaaaaccgcgaacgatccttaaaactatccctaataatcgtcatctacctacctaaacaacataacctacaacgcgaacatcccgataccgccgaaaacgaaaaaaatcataataaaaaaaaccatccaacctcgcgtcgcgaacgccaacaaaacgtaacccaacgcgtcgaccgccataccgacgataataacctacttctcgccgaaacgtttaataacgaaaccaataacgaaaacttaaacgaaaacgtacaaaattccgaataccgcaaacgacaaaccgatcatcgtcgcgctccaacgaaaacgatcctcgccgaaaataacccaaaacgctaccgacacctatcctacgaattacataataaaaaaaacaatcataaatacgacgacgataatcataccccgcgcccaccgaaaaaaactaactaaattaaaaactctcaaaaacatcgatcgaaaaactttcgacgactttactatacgacaaactcacgtctaaaaaaaaataaatcataaatca

SEQ ID NO: 3825 - DNA, 1260 bp, Artificial Sequence
  chemically treated genomic DNA (Homo sapiens) CpG-island No: 3825
cgcggcggttcgttttttttttacgattagggtcgggaattgcgggtgcgcggggcgggagtcgggcgggtttaggcgcggtcgatacgtggggagggaggtcgcggtttaggaggcgggttcggagtgggtgtgggtgtgttcgtgcgtgggagaaattaattttagtttttttcgaggcgttacgttttagtacggttcgttgggttcgggaggtcggaaattagtttttacgtttcggatttttttttggagggataacgaatataggcgcgggacggtttcggttacgttcgcgtcgttttttgttttcgtgtttgttcgcgcgttattttcgtttcggtgcggtggtagggttcggcgcgacgttatttattgtttataaattaattcgagtcggtaggatttcggttttagcggttgtaggcgcgtggttcgagtgtttggcgggttttggttttcgcgttcgttttttgtttcggtttcgttcgtagtttcgcgtttcgcggtaataagtttttagcgaagttcgtatagtttcgggtgttaggacggggggttatgtcgtgtcggagggaggaggaagaggaagtcggcgaggaggcggagggggaggaagaggaggacgatagtttttttttgttgtagtagtcggtgacgttgggtagttcgggcgaggtggatcggttggtggtttagatcggcgagacgttgtagttggacgcggcgtagatagttcggtttcgtcgtgcgcgttttcgggggtgtcgttgcgggtttcggggtttttgttgcgcggtgtcgacggataaggttcggttttcggcggtgtcgttgttgttgtcgttcgtttcggttgagacggtggttcggcgttttttgggttttgtcgtgcgttttaggggatcgcggcgcgtgcgcggacgtcgtgcgttttattgcgtggcggaggtcgtcgtaggttttagcgcgttgtcggggtcgtgtcggcgaggatggtttagggacgcggttatttttcgtcgtttgtagtagcgtcgatggatttaagtcgggggtacgcgtcggcgacgacgattcgtatcggtttttttagtagttcgtgttttcggggaaaattttattaaggaagtcgtgcggagattttaacgagtcgtcgtcgcggttgtagttacgggtttcgtaagcgtttttgggttcgggggaggtcgtagcggatttgatcgtattgttttgtagtttttaggttttttgttttga

SEQ ID NO: 3826 - DNA, 1260 bp, Artificial Sequence
  chemically treated genomic DNA (Homo sapiens) CpG-island No: 3826
tcaaaacaaaaaacctaaaaactacaaaacaatacgatcaaatccgctacgacctcccccgaacccaaaaacgcttacgaaacccgtaactacaaccgcgacgacgactcgttaaaatctccgcacgacttccttaataaaattttccccgaaaacacgaactactaaaaaaaccgatacgaatcgtcgtcgccgacgcgtacccccgacttaaatccatcgacgctactacaaacgacgaaaaataaccgcgtccctaaaccatcctcgccgacacgaccccgacaacgcgctaaaacctacgacgacctccgccacgcaataaaacgcacgacgtccgcgcacgcgccgcgatcccctaaaacgcacgacaaaacccaaaaaacgccgaaccaccgtctcaaccgaaacgaacgacaacaacaacgacaccgccgaaaaccgaaccttatccgtcgacaccgcgcaacaaaaaccccgaaacccgcaacgacacccccgaaaacgcgcacgacgaaaccgaactatctacgccgcgtccaactacaacgtctcgccgatctaaaccaccaaccgatccacctcgcccgaactacccaacgtcaccgactactacaacaaaaaaaaactatcgtcctcctcttcctccccctccgcctcctcgccgacttcctcttcctcctccctccgacacgacataaccccccgtcctaacacccgaaactatacgaacttcgctaaaaacttattaccgcgaaacgcgaaactacgaacgaaaccgaaacaaaaaacgaacgcgaaaaccaaaacccgccaaacactcgaaccacgcgcctacaaccgctaaaaccgaaatcctaccgactcgaattaatttataaacaataaataacgtcgcgccgaaccctaccaccgcaccgaaacgaaaataacgcgcgaacaaacacgaaaacaaaaaacgacgcgaacgtaaccgaaaccgtcccgcgcctatattcgttatccctccaaaaaaaaatccgaaacgtaaaaactaatttccgacctcccgaacccaacgaaccgtactaaaacgtaacgcctcgaaaaaaactaaaattaatttctcccacgcacgaacacacccacacccactccgaacccgcctcctaaaccgcgacctccctccccacgtatcgaccgcgcctaaacccgcccgactcccgccccgcgcacccgcaattcccgaccctaatcgtaaaaaaaaaacgaaccgccgcg

SEQ ID NO: 3827 - DNA, 1260 bp, Artificial Sequence
  chemically treated genomic DNA (Homo sapiens) CpG-island No: 3827
ttagagtaaggagtttgagggttgtagggtaatgcggttaggttcgttgcggtttttttcgggtttaggggcgtttgcggggttcgtggttgtaatcgcggcgacggttcgttggagttttcgtacggtttttttgatgaggtttttttcgagagtacgagttgttggaggagtcgatgcgggtcgtcgtcgtcggcgcgtgttttcggtttgggtttatcggcgttgttgtaagcggcgggaggtgatcgcgtttttgagttattttcgtcggtacggtttcggtagcgcgttggggtttgcggcgattttcgttacgtagtagggcgtacggcgttcgcgtacgcgtcgcggttttttagggcgtacggtagggtttagagggcgtcgggttatcgttttagtcgaagcgggcggtagtagtagcggtatcgtcgggggtcgggttttgttcgtcggtatcgcgtagtaggggtttcggggttcgtagcggtattttcgggggcgcgtacggcgaggtcgggttgtttgcgtcgcgtttagttgtagcgtttcgtcgatttgggttattagtcggtttatttcgttcgagttgtttagcgttatcgattgttgtagtaggaggaagttgtcgttttttttttttttttttttcgttttttcgtcggttttttttttttttttttttcggtacggtatggtttttcgttttggtattcggagttgtgcgggtttcgttgggggtttgttgtcgcggggcgcggagttgcgggcgaagtcggagtagggggcggacgcggaagttagagttcgttaggtattcgagttacgcgtttgtagtcgttggagtcggaattttgtcggttcgggttgatttgtaaataatgggtgacgtcgcgtcgggttttattatcgtatcggggcgggggtgacgcgcgagtaggtacgggggtaaagggcggcgcgggcgtgatcgaagtcgtttcgcgtttgtgttcgttgtttttttaggagggggttcggggcgtggggattgattttcgatttttcgggtttaacgagtcgtgttgaaacgtggcgtttcggaggaggttgaggttggttttttttacgtacggatatatttatatttatttcgggttcgttttttgggtcgcggtttttttttttacgtgtcggtcgcgtttaagttcgttcgattttcgtttcgcgtattcgtagttttcggttttggtcgtgggggaggggcgggtcgtcgcg

SEQ ID NO: 3828 - DNA, 1260 bp, Artificial Sequence
  chemically treated genomic DNA (Homo sapiens) CpG-island No: 3828
cgcgacgacccgcccctcccccacgaccaaaaccgaaaactacgaatacgcgaaacgaaaatcgaacgaacttaaacgcgaccgacacgtaaaaaaaaaaaccgcgacccaaaaaacgaacccgaaataaatataaatatatccgtacgtaaaaaaaaccaacctcaacctcctccgaaacgccacgtttcaacacgactcgttaaacccgaaaaatcgaaaatcaatccccacgccccgaaccccctcctaaaaaaacaacgaacacaaacgcgaaacgacttcgatcacgcccgcgccgccctttacccccgtacctactcgcgcgtcacccccgccccgatacgataataaaacccgacgcgacgtcacccattatttacaaatcaacccgaaccgacaaaattccgactccaacgactacaaacgcgtaactcgaatacctaacgaactctaacttccgcgtccgccccctactccgacttcgcccgcaactccgcgccccgcgacaacaaacccccaacgaaacccgcacaactccgaataccaaaacgaaaaaccataccgtaccgaaaaaaaaaaaaaaaaaaaaccgacgaaaaaacgaaaaaaaaaaaaaaaaaaaacgacaacttcctcctactacaacaatcgataacgctaaacaactcgaacgaaataaaccgactaataacccaaatcgacgaaacgctacaactaaacgcgacgcaaacaacccgacctcgccgtacgcgcccccgaaaataccgctacgaaccccgaaacccctactacgcgataccgacgaacaaaacccgacccccgacgataccgctactactaccgcccgcttcgactaaaacgataacccgacgccctctaaaccctaccgtacgccctaaaaaaccgcgacgcgtacgcgaacgccgtacgccctactacgtaacgaaaatcgccgcaaaccccaacgcgctaccgaaaccgtaccgacgaaaataactcaaaaacgcgatcacctcccgccgcttacaacaacgccgataaacccaaaccgaaaacacgcgccgacgacgacgacccgcatcgactcctccaacaactcgtactctcgaaaaaaacctcatcaaaaaaaccgtacgaaaactccaacgaaccgtcgccgcgattacaaccacgaaccccgcaaacgcccctaaacccgaaaaaaaccgcaacgaacctaaccgcattaccctacaaccctcaaactccttactctaa

SEQ ID NO: 3829 - DNA, 519 bp, Artificial Sequence
  chemically treated genomic DNA (Homo sapiens) CpG-island No: 3829
ttcgtgggtggtcgcgagcgttttcgttgggaagttttgggcgggtatcggtttataggtttcgttcgtgggtgtgcgagcgcgtcggtgtttttcgttttttcgggttttttttacgcggacgcggtgatcgttttattttcgttcggttcgttcgttacggttattattttgttcgcgatatttgcgtttgagattcggcgggaggagcgggcggagaagttatcggtcggattcgtggggttcgttttggtttgtaggcgtttgatttttatttttcgattttttcgtagggagcgagtttttcggtaattcgtatagttatttttagtatacggtttataacgaggtttggagatttagtaatttcgttttattaagtgagtacgttatttggttggtcggcggtttagcgcggtcgcgcggtttttgggtacggttttattttcggcgattcgatttttggggattcggtcgggttagggggataggtttgttagtgtagtattgaggttcggg

SEQ ID NO: 3830 - DNA, 519 bp, Artificial Sequence
  chemically treated genomic DNA (Homo sapiens) CpG-island No: 3830
cccgaacctcaatactacactaacaaacctatccccctaacccgaccgaatccccaaaaatcgaatcgccgaaaataaaaccgtacccaaaaaccgcgcgaccgcgctaaaccgccgaccaaccaaataacgtactcacttaataaaacgaaattactaaatctccaaacctcgttataaaccgtatactaaaaataactatacgaattaccgaaaaactcgctccctacgaaaaaatcgaaaaataaaaatcaaacgcctacaaaccaaaacgaaccccacgaatccgaccgataacttctccgcccgctcctcccgccgaatctcaaacgcaaatatcgcgaacaaaataataaccgtaacgaacgaaccgaacgaaaataaaacgatcaccgcgtccgcgtaaaaaaaacccgaaaaaacgaaaaacaccgacgcgctcgcacacccacgaacgaaacctataaaccgatacccgcccaaaacttcccaacgaaaacgctcgcgaccacccacgaa

SEQ ID NO: 3831 - DNA, 519 bp, Artificial Sequence
  chemically treated genomic DNA (Homo sapiens) CpG-island No: 3831
ttcgggttttagtgttgtattaataagtttgtttttttggttcggtcgggtttttagaggtcgggtcgtcgggagtgggatcgtgtttagaagtcgcgcggtcgcgttgagtcgtcggttagttaggtggcgtatttatttagtaaggcggggttgttgaatttttaagtttcgttgtaggtcgtgtattgggggtggttgtacgggttgtcggagaattcgttttttgcgggagggtcggggagtggggattagacgtttgtaagttagggcggattttacgagttcggtcggtggttttttcgttcgtttttttcgtcgggttttaggcgtaggtgtcgcgggtagggtaatggtcgtggcgggcgggtcgggcggaggtggggcgattatcgcgttcgcgtggagagagttcggggaggcgggaggtatcgacgcgttcgtatatttacgggcgggatttgtgggtcggtgttcgtttagggttttttagcggaggcgttcgcggttatttacgaa

SEQ ID NO: 3832 - DNA, 519 bp, Artificial Sequence
  chemically treated genomic DNA (Homo sapiens) CpG-island No: 3832
ttcgtaaataaccgcgaacgcctccgctaaaaaaccctaaacgaacaccgacccacaaatcccgcccgtaaatatacgaacgcgtcgatacctcccgcctccccgaactctctccacgcgaacgcgataatcgccccacctccgcccgacccgcccgccacgaccattaccctacccgcgacacctacgcctaaaacccgacgaaaaaaacgaacgaaaaaaccaccgaccgaactcgtaaaatccgccctaacttacaaacgtctaatccccactccccgaccctcccgcaaaaaacgaattctccgacaacccgtacaaccacccccaatacacgacctacaacgaaacttaaaaattcaacaaccccgccttactaaataaatacgccacctaactaaccgacgactcaacgcgaccgcgcgacttctaaacacgatcccactcccgacgacccgacctctaaaaacccgaccgaaccaaaaaaacaaacttattaatacaacactaaaacccgaa

SEQ ID NO: 3833 - DNA, 575 bp, Artificial Sequence
  chemically treated genomic DNA (Homo sapiens) CpG-island No: 3833
gtcgttgtttatgatcgttattagttatcgcggggattatattaagttttaggtcgatagtttcggtttttatatcgttttcgtttgattttatttcggagggagggaggatcgacgcgacgcgatgtttttcggttatcgttttagttttattttattttacgattttcgtaattttttatattatttttttcgaaggtcggataggacgggtggagtcgtgggcgggatttttaggttcgggttcgtcgtttttagtttcgtttgtcgttttttttcgtttgtttggattgcgcggcgtcgtgagggggattcggtttagttcgtttcggtttttattaagttagtttcgaagttcgttagttattttgtcggattcgggcgcgatttgttggcgcgcgtcggatgtttttgtgatatataattagcgcggatcgtagcgcggtttagtttcgggtattcgtttcggacgttcgggcgttaggaggtttcgttggaggggttgggttaaggagattaagaagaaaacgattttttgtaggaggaagagttcgttgtcgaatttttgggaaaaa

SEQ ID NO: 3834 - DNA, 575 bp, Artificial Sequence
  chemically treated genomic DNA (Homo sapiens) CpG-island No: 3834
tttttcccaaaaattcgacaacgaactcttcctcctacaaaaaatcgttttcttcttaatctccttaacccaacccctccaacgaaacctcctaacgcccgaacgtccgaaacgaatacccgaaactaaaccgcgctacgatccgcgctaattatatatcacaaaaacatccgacgcgcgccaacaaatcgcgcccgaatccgacaaaataactaacgaacttcgaaactaacttaataaaaaccgaaacgaactaaaccgaatccccctcacgacgccgcgcaatccaaacaaacgaaaaaaaacgacaaacgaaactaaaaacgacgaacccgaacctaaaaatcccgcccacgactccacccgtcctatccgaccttcgaaaaaaataatataaaaaattacgaaaatcgtaaaataaaataaaactaaaacgataaccgaaaaacatcgcgtcgcgtcgatcctccctccctccgaaataaaatcaaacgaaaacgatataaaaaccgaaactatcgacctaaaacttaatataatccccgcgataactaataacgatcataaacaacgac

SEQ ID NO: 3835 - DNA, 575 bp, Artificial Sequence
  chemically treated genomic DNA (Homo sapiens) CpG-island No: 3835
ttttttttagggattcggtagcgggtttttttttttgtagaaagtcgttttttttttaatttttttggtttagtttttttagcgaagttttttggcgttcgagcgttcgaggcgggtgttcggggttgggtcgcgttgcggttcgcgttgattgtgtgttatagaaatattcggcgcgcgttagtaggtcgcgttcgagttcggtagggtggttggcgggtttcggggttggtttggtggaggtcgggacgagttgggtcgaattttttttacggcgtcgcgtagtttaggtaggcggggaggggcggtaggcggggttgggggcggcgggttcgggtttgagggtttcgtttacggttttattcgttttgttcgattttcgaggggggtgatgtgaagggttgcgggggtcgtgggatggggtgaggttggggcggtggtcgggaggtatcgcgtcgcgtcggtttttttttttttcggggtggggttagacggggacgatgtggaggtcgaagttgtcggtttgaagtttgatgtggttttcgcggtaattagtggcggttataggtagcggt

SEQ ID NO: 3836 - DNA, 575 bp, Artificial Sequence
  chemically treated genomic DNA (Homo sapiens) CpG-island No: 3836
accgctacctataaccgccactaattaccgcgaaaaccacatcaaacttcaaaccgacaacttcgacctccacatcgtccccgtctaaccccaccccgaaaaaaaaaaaaaccgacgcgacgcgatacctcccgaccaccgccccaacctcaccccatcccacgacccccgcaacccttcacatcacccccctcgaaaatcgaacaaaacgaataaaaccgtaaacgaaaccctcaaacccgaacccgccgcccccaaccccgcctaccgcccctccccgcctacctaaactacgcgacgccgtaaaaaaaattcgacccaactcgtcccgacctccaccaaaccaaccccgaaacccgccaaccaccctaccgaactcgaacgcgacctactaacgcgcgccgaatatttctataacacacaatcaacgcgaaccgcaacgcgacccaaccccgaacacccgcctcgaacgctcgaacgccaaaaaacttcgctaaaaaaactaaaccaaaaaaattaaaaaaaaaacgactttctacaaaaaaaaaaacccgctaccgaatccctaaaaaaaa

SEQ ID NO: 3837 - DNA, 815 bp, Artificial Sequence
  chemically treated genomic DNA (Homo sapiens) CpG-island No: 3837
tttcgtataggtcggttcgaagaagcggaaggagggatgtcggcgggggttatttatcgcgattacgatcgtgttttttttttgaaatttggcgatgtatttgtcgtcgcggtttattttagattcgttgagaggtttgaagcgatatattattttgatgttgtattcggttaggttcgttatttttttcgtagtcggggtcggcggtcgggagttatttttcgtcgtttagttttgtagggaacgcgtcggatttgagggtttgtggtcgcgagggtcgtgagaggtagtagttagttgcgtcgcgttgcgttttttcgggtggaggcggtcggggagtcgggatttgaagagtcggcgtcggtagtcgttaattttaatgtttattttcgatttattatggtagttatggcggcggcggcggcggcggtatcggggagagcgttcgcggttttttagcgtttttttttacggtttgggcggattgcgggggttggggaggttttggggatcgggagagtggttatttttttttttttcgcgaagagtaggtcgggtttattcgttcgttcgttttgtcgttcgttggtcggtcgattgttgttcgattatttttgaggtcgtcgttgggcgatagggcggtgcgggaggaggattgcgtaggcgtagtgggttaggcggttcggcgattaatcggtgcgcgcgttcgtattttgtcgcggcggtcgggttgttgtttttattattatttttggttcggggtcgtagatttaaattttattgtattgtttttgtcgtagaagtttttggggagg

SEQ ID NO: 3838 - DNA, 815 bp, Artificial Sequence
  chemically treated genomic DNA (Homo sapiens) CpG-island No: 3838
cctccccaaaaacttctacgacaaaaacaatacaataaaatttaaatctacgaccccgaaccaaaaataataataaaaacaacaacccgaccgccgcgacaaaatacgaacgcgcgcaccgattaatcgccgaaccgcctaacccactacgcctacgcaatcctcctcccgcaccgccctatcgcccaacgacgacctcaaaaataatcgaacaacaatcgaccgaccaacgaacgacaaaacgaacgaacgaataaacccgacctactcttcgcgaaaaaaaaaaaaataaccactctcccgatccccaaaacctccccaacccccgcaatccgcccaaaccgtaaaaaaaaacgctaaaaaaccgcgaacgctctccccgataccgccgccgccgccgccgccataactaccataataaatcgaaaataaacattaaaattaacgactaccgacgccgactcttcaaatcccgactccccgaccgcctccacccgaaaaaacgcaacgcgacgcaactaactactacctctcacgaccctcgcgaccacaaaccctcaaatccgacgcgttccctacaaaactaaacgacgaaaaataactcccgaccgccgaccccgactacgaaaaaaataacgaacctaaccgaatacaacatcaaaataatatatcgcttcaaacctctcaacgaatctaaaataaaccgcgacgacaaatacatcgccaaatttcaaaaaaaaaacacgatcgtaatcgcgataaataacccccgccgacatccctccttccgcttcttcgaaccgacctatacgaaa

SEQ ID NO: 3839 - DNA, 815 bp, Artificial Sequence
  chemically treated genomic DNA (Homo sapiens) CpG-island No: 3839
tttttttaggaatttttgcgataggggtagtgtagtaaaatttgaatttgcgatttcgggttaggagtggtggtggaaatagtagttcggtcgtcgcggtagggtgcgagcgcgcgtatcgattggtcgtcgggtcgtttggtttattgcgtttgcgtagtttttttttcgtatcgttttgtcgtttaacggcggttttaggagtgatcgggtagtagtcggtcggttagcggacggtagagcgggcggacgggtaggttcggtttgtttttcgcgaggaggaagaaggtggttattttttcggtttttagaatttttttagttttcgtagttcgtttagatcgtaaagggggacgttgaggagtcgcggacgtttttttcggtgtcgtcgtcgtcgtcgtcgttatggttgttatgatggatcggaagtgagtattagggttaacggttgtcggcgtcggttttttaagtttcggtttttcggtcgtttttattcggggaagcgtagcgcggcgtagttgattgttgttttttacggttttcgcgattataagtttttaggttcggcgcgttttttgtaagattgagcggcggggagtggttttcggtcgtcggtttcggttgcgagaaagatggcggatttggtcgagtgtaatattaaagtgatgtgtcgttttagattttttaacgagtttgaagtgaatcgcggcgataagtatatcgttaagttttagggagaagatacggtcgtgatcgcggtgagtgattttcgtcggtattttttttttcgttttttcgggtcggtttgtgcgggg

SEQ ID NO: 3840 - DNA, 815 bp, Artificial Sequence
  chemically treated genomic DNA (Homo sapiens) CpG-island No: 3840
ccccgcacaaaccgacccgaaaaaacgaaaaaaaaaataccgacgaaaatcactcaccgcgatcacgaccgtatcttctccctaaaacttaacgatatacttatcgccgcgattcacttcaaactcgttaaaaaatctaaaacgacacatcactttaatattacactcgaccaaatccgccatctttctcgcaaccgaaaccgacgaccgaaaaccactccccgccgctcaatcttacaaaaaacgcgccgaacctaaaaacttataatcgcgaaaaccgtaaaaaacaacaatcaactacgccgcgctacgcttccccgaataaaaacgaccgaaaaaccgaaacttaaaaaaccgacgccgacaaccgttaaccctaatactcacttccgatccatcataacaaccataacgacgacgacgacgacgacaccgaaaaaaacgtccgcgactcctcaacgtccccctttacgatctaaacgaactacgaaaactaaaaaaattctaaaaaccgaaaaaataaccaccttcttcctcctcgcgaaaaacaaaccgaacctacccgtccgcccgctctaccgtccgctaaccgaccgactactacccgatcactcctaaaaccgccgttaaacgacaaaacgatacgaaaaaaaaactacgcaaacgcaataaaccaaacgacccgacgaccaatcgatacgcgcgctcgcaccctaccgcgacgaccgaactactatttccaccaccactcctaacccgaaatcgcaaattcaaattttactacactacccctatcgcaaaaattcctaaaaaaa

SEQ ID NO: 3841 - DNA, 689 bp, Artificial Sequence
  chemically treated genomic DNA (Homo sapiens) CpG-island No: 3841
  unsure (62, 81, 280, 360, 586, 623, 625, 630, 637, 639, 643, 655)
tgtcgtcggtttttatttaggtcgaggtggttcggttttatgtatcgcgacgtaacgcgggnaagtagataaggtataggncggcgtttataatttatgttaattcgttttatgtgttcgtcgaggcggtataaatcgtcgtgacgattagcggtttaatgatcgaagttaggttggtaagagtcgcgagcgatttttgaagttgtttttgatggtcgttatttatttgtttggatagtatggtttgtaacgcgggtatttcgatgtcgtcggaagcganaagaattattatggggaaggttatttagtttcgcgtcgcgaacgttagtaagacgtagtttagcgcgtcggtcgttatgncggcgataatggtttgtttttcgtcgaaacgtttggtggcgggattagtgacgacggtttgagcgagggcgtgtaagatttcgaatatcgtaagcgataggtcgattatcgtcgcgttttaacgaaagcggttttcgtcgaaaatgatttagagcgttgtcggtatttgttttacgagttgtatgataaagaagatagttataagtgcggcgacgatagttatgtntcgcgtttatcggaaaggagttgattgggttgaaggntnttaanggtattngncgangaattttcggtngttttgttgtgcggataggtttacgtttaaaagg

SEQ ID NO: 3842 - DNA, 689 bp, Artificial Sequence
  chemically treated genomic DNA (Homo sapiens) CpG-island No: 3842
  unsure (35, 47, 51, 53, 60, 65, 67, 104, 330, 410, 609, 628)
ccttttaaacgtaaacctatccgcacaacaaaacnaccgaaaattcntcgncnaataccnttaananccttcaacccaatcaactcctttccgataaacgcganacataactatcgtcgccgcacttataactatcttctttatcatacaactcgtaaaacaaataccgacaacgctctaaatcattttcgacgaaaaccgctttcgttaaaacgcgacgataatcgacctatcgcttacgatattcgaaatcttacacgccctcgctcaaaccgtcgtcactaatcccgccaccaaacgtttcgacgaaaaacaaaccattatcgccgncataacgaccgacgcgctaaactacgtcttactaacgttcgcgacgcgaaactaaataaccttccccataataattcttntcgcttccgacgacatcgaaatacccgcgttacaaaccatactatccaaacaaataaataacgaccatcaaaaacaacttcaaaaatcgctcgcgactcttaccaacctaacttcgatcattaaaccgctaatcgtcacgacgatttataccgcctcgacgaacacataaaacgaattaacataaattataaacgccgncctataccttatctacttncccgcgttacgtcgcgatacataaaaccgaaccacctcgacctaaataaaaaccgacgaca

SEQ ID NO: 3843 - DNA, 689 bp, Artificial Sequence
  chemically treated genomic DNA (Homo sapiens) CpG-island No: 3843
  unsure (35, 47, 51, 53, 60, 65, 67, 104, 330, 410, 609, 628)
ttttttagacgtgagtttgttcgtatagtaaagtngtcgaaagtttntcgntngatgttnttganantttttaatttagttagttttttttcggtgggcgcggngtatgattatcgtcgtcgtatttatgattgttttttttattatgtaattcgtaggataggtgtcggtagcgttttgggttattttcggcgaggatcgttttcgttggagcgcgacgatgatcggtttgtcgtttgcggtattcggaattttgtacgttttcgtttaagtcgtcgttattggtttcgttattaaacgtttcggcgagaagtaggttattatcgtcgntatggcggtcgacgcgttgggttacgttttgttggcgttcgcgacgcgaggttggatggttttttttataatgatttttntcgttttcggcggtatcgggatgttcgcgttgtaggttatgttgtttaggtaggtagatgacgattattagggatagttttaaggatcgttcgcggtttttattagtttaatttcgattattggatcgttgatcgttacggcgatttatgtcgtttcggcgagtatatggaacgggttggtatggattgtaggcgtcgntttatattttgtttgtttnttcgcgttgcgtcgcggtgtatggagtcgggttatttcgatttgaatggaagtcggcggta

SEQ ID NO: 3844 - DNA, 689 bp, Artificial Sequence
  chemically treated genomic DNA (Homo sapiens) CpG-island No: 3844
  unsure (62, 81, 280, 360, 586, 623, 625, 630, 637, 639, 643, 655)
taccgccgacttccattcaaatcgaaataacccgactccatacaccgcgacgcaacgcgaanaaacaaacaaaatataaancgacgcctacaatccataccaacccgttccatatactcgccgaaacgacataaatcgccgtaacgatcaacgatccaataatcgaaattaaactaataaaaaccgcgaacgatccttaaaactatccctaataatcgtcatctacctacctaaacaacataacctacaacgcgaacatcccgataccgccgaaaacganaaaaatcattataaaaaaaaccatccaacctcgcgtcgcgaacgccaacaaaacgtaacccaacgcgtcgaccgccatancgacgataataacctacttctcgccgaaacgtttaataacgaaaccaataacgacgacttaaacgaaaacgtacaaaattccgaataccgcaaacgacaaaccgatcatcgtcgcgctccaacgaaaacgatcctcgccgaaaataacccaaaacgctaccgacacctatcctacgaattacataataaaaaaaacaatcataaatacgacgacgataatcatacnccgcgcccaccgaaaaaaaactaactaaattaaaaantntcaanaacatcnancganaaactttcgacnactttactatacgaacaaactcacgtctaaaaaa

SEQ ID NO: 3845 - DNA, 816 bp, Artificial Sequence
  chemically treated genomic DNA (Homo sapiens) CpG-island No: 3845
  unsure (32, 47..48, 288, 332, 390, 542, 544, 566, 570, 585..586, 591)
  unsure (602, 608, 610, 631, 637)
ggatgcgcggatagtcgttgttggttttttgnatgtcgacggatttnnattgtcggtagaatttcgcgaggtcgtttagttttaggtagtagttgaattaattcgcgaggggatcgagttcggggtgggcgaagaattttagtatgagattttcgcgttggaggattatttagtcggcgtttcggaaaacgatttcgaagtttaattttttatagaaggcggcggtggaatcgaaatttcgtgatggtaggttgggcgtcgtttggtcggttatttcgaattttagantttcgtttagaagaattcgtgtaagaaggcgatagaaggcgatncgttgcgaatcgggagcggcgatatcgtaaagtacgaggaagcggttagtttattcgncgttaagttttttagtaatattacgggtagttaacgttatgttttgatacggttcgttatatttagtcggttatagtcgatgaatttagaaaagcggttattttttattatgatattcggtaagtaggtatcgttatgggttacgacgagantntcgtcgtcgggtatgcgcgttntgantttggcgaatagttnngttgngcgcgagtttntgatgntnttcgtttagattattttgatngataanatcggtttttattcgagtacgtgttcgttcgatgcgatgtttcgtttggtggtcgaatgggtaggtagtcggattaagcgtatgtagtcgtcgtattgtattagttatgatggatattttttcggtaggagtaaggtgagatgataggagattttgtttcggtatttcgtttaatagta

SEQ ID NO: 3846 - DNA, 816 bp, Artificial Sequence
  chemically treated genomic DNA (Homo sapiens) CpG-island No: 3846
  unsure (180, 186, 207, 209, 215, 226, 231..232, 247, 251, 273, 275)
  unsure (427, 485, 529, 769..770, 785)
tactattaaacgaaataccgaaacaaaatctcctatcatctcaccttactcctaccgaaaaaatatccatcataactaatacaatacgacgactacatacgcttaatccgactacctacccattcgaccaccaaacgaaacatcgcatcgaacgaacacgtactcgaataaaaaccgatnttatcnatcaaaataatctaaacgaanancatcanaaactcgcgcncaacnnaactattcgccaaantcanaacgcgcatacccgacgacganantctcgtcgtaacccataacgatacctacttaccgaatatcataataaaaaataaccgcttttctaaattcatcgactataaccgactaaatataacgaaccgtatcaaaacataacgttaactacccgtaatattactaaaaaacttaacgncgaataaactaaccgcttcctcgtactttacgatatcgccgctcccgattcgcaacgnatcgccttctatcgccttcttacacgaattcttctaaacgaaantctaaaattcgaaataaccgaccaaacgacgcccaacctaccatcacgaaatttcgattccaccgccgccttctataaaaaattaaacttcgaaatcgttttccgaaacgccgactaaataatcctccaacgcgaaaatctcatactaaaattcttcgcccaccccgaactcgatcccctcgcgaattaattcaactactacctaaaactaaacgacctcgcgaaattctaccgacaatnnaaatccgtcgacatncaaaaaaccaacaacgactatccgcgcatcc

SEQ ID NO: 3847 - DNA, 816 bp, Artificial Sequence
  chemically treated genomic DNA (Homo sapiens) CpG-island No: 3847
  unsure (180, 186, 207, 209, 215, 226, 231..232, 247, 251, 273, 275)
  unsure (427, 485, 529, 769..770, 785)
tgttattgggcgaagtgtcggggtaggattttttgttattttattttgtttttgtcgagaaagtatttattatggttgatgtaatgcggcggttgtatacgtttgattcggttatttgtttattcgattattaagcgaaatatcgtatcgagcgagtacgtattcggatggaagtcggtnttgttnattaggatgatttggacgaanantattangggttcgcgtntaatnnaattgttcgttaggnttanggcgcgtatgttcgacggcgangntttcgtcgtgatttatggcgatgtttgtttgtcgaatattatggtggaaaatggtcgtttttttggatttatcgattgtggtcggttgggtgtggcggatcgtattaggatatagcgttggttattcgtgatattgttgaagagtttggcgncgaatgggttgatcgttttttcgtgttttacggtatcgtcgttttcgattcgtagcgnatcgttttttatcgtttttttatacgagtttttttgagcgggantttggggttcgaaatgatcgattaagcgacgtttaatttgttattacgagatttcgattttatcgtcgttttttatgaaaggttgggtttcggaatcgtttttcgggacgtcggttggatgattttttagcgcggggattttatgttggagtttttcgtttatttcgggttcgattttttcgcgagttggtttagttgttgtttgaggttggacgatttcgcggagttttatcggtagtnnaaattcgtcggtatntaggaaattagtagcggttattcgcgtattt

SEQ ID NO: 3848 - DNA, 816 bp, Artificial Sequence
  chemically treated genomic DNA (Homo sapiens) CpG-island No: 3848
  unsure (32, 47..48, 288, 332, 390, 542, 544, 566, 570, 585..586, 591)
  unsure (602, 608, 610, 631, 637)
aaatacgcgaataaccgctactaatttcctanataccgacgaatttnnactaccgataaaactccgcgaaatcgtccaacctcaaacaacaactaaaccaactcgcgaaaaaatcgaacccgaaataaacgaaaaactccaacataaaatccccgcgctaaaaaatcatccaaccgacgtcccgaaaaacgattccgaaacccaacctttcataaaaaacgacgataaaatcgaaatctcgtaataacaaattaaacgtcgcttaatcgatcatttcgaaccccaaantcccgctcaaaaaaactcgtataaaaaaacgataaaaaacgatncgctacgaatcgaaaacgacgataccgtaaaacacgaaaaaacgatcaacccattcgncgccaaactcttcaacaatatcacgaataaccaacgctatatcctaatacgatccgccacacccaaccgaccacaatcgataaatccaaaaaaacgaccattttccaccataatattcgacaaacaaacatcgccataaatcacgacgaaancntcgccgtcgaacatacgcgccntaancctaacgaacaattnnattanacgcgaacccntaatantnttcgtccaaatcatcctaatnaacaanaccgacttccatccgaatacgtactcgctcgatacgatatttcgcttaataatcgaataaacaaataaccgaatcaaacgtatacaaccgccgcattacatcaaccataataaatactttctcgacaaaaacaaaataaaataacaaaaaatcctaccccgacacttcgcccaataaca

SEQ ID NO: 3849 - DNA, 687 bp, Artificial Sequence
  chemically treated genomic DNA (Homo sapiens) CpG-island No: 3849
taaggggcggattttttcgttttttttaattcggcgatttacggaaaggggttgaggggtttttcgtttgggaaaagggttgttaaagattttaacggttttaaagttagacggagaatttcgattttcggattggttcggacggagattatcgtggggattcggattcgttatttttttttttttaggcgggtttcggtttttttttattcgagtgcggtttttgttttttcgtcggggttgcgggtttgtcgaggttacggagttagcgagggagacgggcgagaaaggttttttttttttaggaaagagagaacggttcgaaatgataggattttcgtttttcgggtgtcgatttttagttttatagttcggttttttttattttcggcgtcgtcgcggtatttttttaacggagattcgcgcgtttgcgtatgcgtcgttcgcgttttcgcggagtattgtttgcgcgtaggcgtagagcgggcgcgcgcggtggtgcggtagtttcgttttcggtttttttttgcggcgtcgggcgcgggttcgcggcggttagcgttttcggtcggtaggaggcggggcgaggcggaagcggcgtttgttttaggtggagtttgttagtttttgagaaagagttagggcgagtttaaggtattgtggtagttgtgagataaagtttggttt

SEQ ID NO: 3850 - DNA, 687 bp, Artificial Sequence
  chemically treated genomic DNA (Homo sapiens) CpG-island No: 3850
aaaccaaactttatctcacaactaccacaataccttaaactcgccctaactctttctcaaaaactaacaaactccacctaaaacaaacgccgcttccgcctcgccccgcctcctaccgaccgaaaacgctaaccgccgcgaacccgcgcccgacgccgcaaaaaaaaaccgaaaacgaaactaccgcaccaccgcgcgcgcccgctctacgcctacgcgcaaacaatactccgcgaaaacgcgaacgacgcatacgcaaacgcgcgaatctccgttaaaaaaataccgcgacgacgccgaaaataaaaaaaaccgaactataaaactaaaaatcgacacccgaaaaacgaaaatcctatcatttcgaaccgttctctctttcctaaaaaaaaaaaacctttctcgcccgtctccctcgctaactccgtaacctcgacaaacccgcaaccccgacgaaaaaacaaaaaccgcactcgaataaaaaaaaaccgaaacccgcctaaaaaaaaaaaaataacgaatccgaatccccacgataatctccgtccgaaccaatccgaaaatcgaaattctccgtctaactttaaaaccgttaaaatctttaacaacccttttcccaaacgaaaaacccctcaacccctttccgtaaatcgccgaattaaaaaaaacgaaaaaatccgcccctta

SEQ ID NO: 3851 - DNA, 687 bp, Artificial Sequence
  chemically treated genomic DNA (Homo sapiens) CpG-island No: 3851
gaattagattttattttatagttgttatagtgttttaaattcgttttaatttttttttaaaaattaatagattttatttgaagtaagcgtcgttttcgtttcgtttcgttttttgtcgatcggaagcgttggtcgtcgcgggttcgcgttcggcgtcgtagaggaagatcggaagcgaggttgtcgtattatcgcgcgcgttcgttttgcgtttgcgcgtaggtaatgtttcgcgggggcgcgggcggcgtatgcgtaggcgcgcgagttttcgttaagaaggtgtcgcggcggcgtcggaggtaggaggagtcgggttgtggggttgggagtcggtattcgggaggcggaggttttgttatttcgggtcgtttttttttttttaagggagaagagtttttttcgttcgtttttttcgttggtttcgtggtttcggtaggttcgtagtttcgacggagaggtaggagtcgtattcgggtggagaggggtcggggttcgtttggagggaggagggtggcggattcggatttttacggtggttttcgttcgggttagttcggggatcggggtttttcgtttgattttagagtcgttagagtttttggtagttttttttttagacggggaattttttagttttttttcgtaggtcgtcgggttgggggaagcgggagggttcgtttttta

SEQ ID NO: 3852 - DNA, 687 bp, Artificial Sequence
  chemically treated genomic DNA (Homo sapiens) CpG-island No: 3852
taaaaaacgaaccctcccgcttcccccaacccgacgacctacgaaaaaaaactaaaaaattccccgtctaaaaaaaaaactaccaaaaactctaacgactctaaaatcaaacgaaaaaccccgatccccgaactaacccgaacgaaaaccaccgtaaaaatccgaatccgccaccctcctccctccaaacgaaccccgacccctctccacccgaatacgactcctacctctccgtcgaaactacgaacctaccgaaaccacgaaaccaacgaaaaaaacgaacgaaaaaaactcttctcccttaaaaaaaaaaaaacgacccgaaataacaaaacctccgcctcccgaataccgactcccaaccccacaacccgactcctcctacctccgacgccgccgcgacaccttcttaacgaaaactcgcgcgcctacgcatacgccgcccgcgcccccgcgaaacattacctacgcgcaaacgcaaaacgaacgcgcgcgataatacgacaacctcgcttccgatcttcctctacgacgccgaacgcgaacccgcgacgaccaacgcttccgatcgacaaaaaacgaaacgaaacgaaaacgacgcttacttcaaataaaatctattaatttttaaaaaaaaattaaaacgaatttaaaacactataacaactataaaataaaatctaattc

SEQ ID NO: 3853 - DNA, 593 bp, Artificial Sequence
  chemically treated genomic DNA (Homo sapiens) CpG-island No: 3853
cgtaggcgtagcgtttttaatatcgttaacgggtataaagttacgtttttacggtcgaatttacgtttacgtatttagttattagcggaattttttttattaggtttcgcgtcgaggttttacggggcgttaatacgtacgcgtattttgtgttttaggtagttcgttttttagttatgtacgtttttgtatttcggttattgggagcggggtcgtgggggttgtatatgcgtattgcgagttttcgtttatttttagaaattattcgggcgtatacgcggtgcggtcgttgttttaggtcggcgggttttagggagatttgggtgggtagcgtcgtcgtttttttttttttgggtagtattttttttagcgttacgcggaggttgggttattatgaggtttgtgttgcgtcggggcggttcgttttagaggcgtttcggggaggagtgggcggttgaatggttagaggtttagggattcgtttaggttagcgttggcgttcgggtttgagtttggaggtggcgggtgttttataagaatgttcgcgtgattagtgtgttggcgtttgtgtatatagaggatattattaaaat

SEQ ID NO: 3854 - DNA, 593 bp, Artificial Sequence
  chemically treated genomic DNA (Homo sapiens) CpG-island No: 3854
attttaataatatcctctatatacacaaacgccaacacactaatcacgcgaacattcttataaaacacccgccacctccaaactcaaacccgaacgccaacgctaacctaaacgaatccctaaacctctaaccattcaaccgcccactcctccccgaaacgcctctaaaacgaaccgccccgacgcaacacaaacctcataataacccaacctccgcgtaacgctaaaaaaaatactacccaaaaaaaaaaaaacgacgacgctacccacccaaatctccctaaaacccgccgacctaaaacaacgaccgcaccgcgtatacgcccgaataatttctaaaaataaacgaaaactcgcaatacgcatatacaacccccacgaccccgctcccaataaccgaaatacaaaaacgtacataactaaaaaacgaactacctaaaacacaaaatacgcgtacgtattaacgccccgtaaaacctcgacgcgaaacctaataaaaaaaattccgctaataactaaatacgtaaacgtaaattcgaccgtaaaaacgtaactttatacccgttaacgatattaaaaacgctacgcctacg

SEQ ID NO: 3855 - DNA, 593 bp, Artificial Sequence
  chemically treated genomic DNA (Homo sapiens) CpG-island No: 3855
attttaataatgttttttgtgtatataaacgttaatatattgattacgcgagtatttttgtaaggtattcgttatttttaaatttaggttcggacgttagcgttgatttgaacggatttttgggtttttggttatttagtcgtttattttttttcggagcgtttttgagacggatcgtttcgacgtaatataaattttataatggtttagttttcgcgtggcgttgggaaaaatattgtttaagaaaggagaaacggcgacgttgtttatttaggtttttttggagttcgtcgatttgaagtagcggtcgtatcgcgtatgcgttcgggtggtttttgggagtaggcgaggattcgtagtgcgtatgtgtagtttttacggtttcgtttttagtgatcggaatgtagaggcgtatatggttaagagacgagttatttgggatataaagtacgcgtgcgtattgacgtttcgtagggtttcgacgcggagtttggtggagagggtttcgttggtgattgagtacgtaggcgtgagttcggtcgtgggggcgtggttttgtgttcgttggcggtgttgagaacgttgcgtttgcg

SEQ ID NO: 3856 - DNA, 593 bp, Artificial Sequence
  chemically treated genomic DNA (Homo sapiens) CpG-island No: 3856
cgcaaacgcaacgttctcaacaccgccaacgaacacaaaaccacgcccccacgaccgaactcacgcctacgtactcaatcaccaacgaaaccctctccaccaaactccgcgtcgaaaccctacgaaacgtcaatacgcacgcgtactttatatcccaaataactcgtctcttaaccatatacgcctctacattccgatcactaaaaacgaaaccgtaaaaactacacatacgcactacgaatcctcgcctactcccaaaaaccacccgaacgcatacgcgatacgaccgctacttcaaatcgacgaactccaaaaaaacctaaataaacaacgtcgccgtttctcctttcttaaacaatatttttcccaacgccacgcgaaaactaaaccattataaaatttatattacgtcgaaacgatccgtctcaaaaacgctccgaaaaaaaataaacgactaaataaccaaaaacccaaaaatccgttcaaatcaacgctaacgtccgaacctaaatttaaaaataacgaataccttacaaaaatactcgcgtaatcaatatattaacgtttatatacacaaaaaacattattaaaat

SEQ ID NO: 3857 - DNA, 638 bp, Artificial Sequence
  chemically treated genomic DNA (Homo sapiens) CpG-island No: 3857
gtaggagcgtcgttatggtaacggggtcgcgcgtacgtcgttatttgtgggtggagaaatgttcgcgcggaagttttcgtttttagtttggggcgtcggtggtcgtcgtcgtcgggaacgtcgttatggtaatcgtatcgtaggttagaggggtggagtagggggcggggaaatgcgagcgcgaaagttttcgttttcgggttgttgggcggcggcgatttagcggttcgtaaggatttgaaatcgtttggtaggggcggcggtggcggcggcgttggcggtagcggtcgagcggaaagtttgcgtgtggtggtgttaggttttcgtttttttttgaatttttttttttcgttttttttattaggtttttgagtggaattttgcgtcggtggttgtcgtttcgtttttgcgggttcgttcgggaaggggcgtcgtttttaggttttgggttcgtttttcgggtttggggggcgcgcgtttttggggtttcggcgttgttcgttgtggtgttttcggtaggtagagcgcgatttaggtcgggacgatttgggaaagttttaagtaaagtttgattagtcggtttgatcggtttgacgtggtttaagagtttgatttaagggtttgcgattgggagagga

SEQ ID NO: 3858 - DNA, 638 bp, Artificial Sequence
  chemically treated genomic DNA (Homo sapiens) CpG-island No: 3858
tcctctcccaatcgcaaacccttaaatcaaactcttaaaccacgtcaaaccgatcaaaccgactaatcaaactttacttaaaactttcccaaatcgtcccgacctaaatcgcgctctacctaccgaaaacaccacaacgaacaacgccgaaaccccaaaaacgcgcgccccccaaacccgaaaaacgaacccaaaacctaaaaacgacgccccttcccgaacgaacccgcaaaaacgaaacgacaaccaccgacgcaaaattccactcaaaaacctaataaaaaaaacgaaaaaaaaaaattcaaaaaaaaacgaaaacctaacaccaccacacgcaaactttccgctcgaccgctaccgccaacgccgccgccaccgccgcccctaccaaacgatttcaaatccttacgaaccgctaaatcgccgccgcccaacaacccgaaaacgaaaactttcgcgctcgcatttccccgccccctactccacccctctaacctacgatacgattaccataacgacgttcccgacgacgacgaccaccgacgccccaaactaaaaacgaaaacttccgcgcgaacatttctccacccacaaataacgacgtacgcgcgaccccgttaccataacgacgctcctac

SEQ ID NO: 3859 - DNA, 638 bp, Artificial Sequence
  chemically treated genomic DNA (Homo sapiens) CpG-island No: 3859
tttttttttagtcgtaaatttttgggttagatttttggattacgttagatcgattaaatcggttgattaaattttatttagaatttttttaagtcgtttcggtttggatcgcgttttgtttgtcggggatattatagcgggtagcgtcgggattttaggggcgcgcgttttttaggttcggagaacgggtttagggtttgagggcgacgttttttttcgaacgggttcgtaagggcggggcggtagttatcggcgtaaaattttatttaagaatttggtgggaggggcgggggaaggaaatttagaaaaaaacgagaatttggtattattatacgtaagtttttcgttcggtcgttgtcgttaacgtcgtcgttatcgtcgtttttgttaaacggttttaaatttttgcgggtcgttgggtcgtcgtcgtttagtagttcgggggcggggattttcgcgttcgtattttttcgttttttattttatttttttagtttgcggtgcggttgttatggcgacgttttcggcggcggcgattatcggcgttttaggttgggggcggagattttcgcgcgggtatttttttatttataggtggcggcgtgcgcgcggtttcgttgttatggcgacgtttttgt

SEQ ID NO: 3860 - DNA, 638 bp, Artificial Sequence
  chemically treated genomic DNA (Homo sapiens) CpG-island No: 3860
acaaaaacgtcgccataacaacgaaaccgcgcgcacgccgccacctataaataaaaaaatacccgcgcgaaaatctccgcccccaacctaaaacgccgataatcgccgccgccgaaaacgtcgccataacaaccgcaccgcaaactaaaaaaataaaataaaaaacgaaaaaatacgaacgcgaaaatccccgcccccgaactactaaacgacgacgacccaacgacccgcaaaaatttaaaaccgtttaacaaaaacgacgataacgacgacgttaacgacaacgaccgaacgaaaaacttacgtataataataccaaattctcgtttttttctaaatttccttcccccgcccctcccaccaaattcttaaataaaattttacgccgataactaccgccccgcccttacgaacccgttcgaaaaaaaacgtcgccctcaaaccctaaacccgttctccgaacctaaaaaacgcgcgcccctaaaatcccgacgctacccgctataatatccccgacaaacaaaacgcgatccaaaccgaaacgacttaaaaaaattctaaataaaatttaatcaaccgatttaatcgatctaacgtaatccaaaaatctaacccaaaaatttacgactaaaaaaaaa

SEQ ID NO: 3861 - DNA, 966 bp, Artificial Sequence
  chemically treated genomic DNA (Homo sapiens) CpG-island No: 3861
ggaagtcggtttcggggaggtagaagagggttttggggaggcggaagtaggtttcggggaggcggaagcgggttttggggaggcggaagcgggttttggggaggcggaagtgggtttcggggaggtagaagcgggttttggggaggcggaagtgggtttcggggagacggaagcgggtttcggggaggtagacgtatgtttcgggggacggggaagtgggtttcggggaggtagacgcgggtttcggcggagggggaagtgggtttcggggaggcggaagcgggttttggggaggcggaagtgggtttcggggaggcggaagcgggttttggggaggcggaagcgggtttcggggagatagaagcgggtttcggggaggcggaagcgggtttcggggaggcggaatcgggtttcggggaggcggaagcgggttttggggaggtagaagcgggttttggggaggcggaagtgggtttcggggaggtagacgtatgtttcgggggacggggaagtaggtttcggggaggcggaagcgggttttggggaggcggattcgggtttcggggaggtggaagcgggttttggggaggcggaagcgggtttcgggggacggggaagtgggttttagggaggcggacgcgggtttcggggaggcggaagtcggttttggggaggcggaagtgggtttcgggggagggggaagcgggtttcggggaggcggaagcgggttttggggaggcggaagtgggtttcggggaggcggaagcgggtttcggggaggcggaggcgggtttcggggaggcggaagcgggttttggggaggcggaagcgggttttggggaggcggaagagggtttcggggaggcggaagcgggttttggggaggtagaagtcggttgtattgcgtaggtcgagcgcgtttggggattatacgtgggggagtgaggttttatagttagtttttgg

SEQ ID NO: 3862 - DNA, 966 bp, Artificial Sequence
  chemically treated genomic DNA (Homo sapiens) CpG-island No: 3862
ccaaaaactaactataaaacctcactcccccacgtataatccccaaacgcgctcgacctacgcaatacaaccgacttctacctccccaaaacccgcttccgcctccccgaaaccctcttccgcctccccaaaacccgcttccgcctccccaaaacccgcttccgcctccccgaaacccgcctccgcctccccgaaacccgcttccgcctccccgaaacccacttccgcctccccaaaacccgcttccgcctccccgaaacccgcttccccctcccccgaaacccacttccgcctccccaaaaccgacttccgcctccccgaaacccgcgtccgcctccctaaaacccacttccccgtcccccgaaacccgcttccgcctccccaaaacccgcttccacctccccgaaacccgaatccgcctccccaaaacccgcttccgcctccccgaaacctacttccccgtcccccgaaacatacgtctacctccccgaaacccacttccgcctccccaaaacccgcttctacctccccaaaacccgcttccgcctccccgaaacccgattccgcctccccgaaacccgcttccgcctccccgaaacccgcttctatctccccgaaacccgcttccgcctccccaaaacccgcttccgcctccccgaaacccacttccgcctccccaaaacccgcttccgcctccccgaaacccacttccccctccgccgaaacccgcgtctacctccccgaaacccacttccccgtcccccgaaacatacgtctacctccccgaaacccgcttccgtctccccgaaacccacttccgcctccccaaaacccgcttctacctccccgaaacccacttccgcctccccaaaacccgcttccgcctccccaaaacccgcttccgcctccccgaaacctacttccgcctccccaaaaccctcttctacctccccgaaaccgacttcc

SEQ ID NO: 3863 - DNA, 966 bp, Artificial Sequence
  chemically treated genomic DNA (Homo sapiens) CpG-island No: 3863
ttagaagttggttgtgaaattttatttttttacgtgtggtttttaggcgcgttcggtttgcgtagtataatcggtttttgtttttttaggattcgttttcgttttttcggaattttttttcgtttttttaagattcgttttcgtttttttaggattcgttttcgttttttcggaattcgttttcgttttttcgggattcgttttcgttttttcggaatttattttcgtttttttaagattcgttttcgttttttcggaattcgtttttttttttttcggaatttattttcgtttttttaagatcggttttcgttttttcggaattcgcgttcgtttttttggaatttattttttcgtttttcggaattcgttttcgtttttttaggattcgtttttattttttcggaattcgaattcgtttttttaggattcgttttcgttttttcggaatttgttttttcgtttttcggaatatgcgtttgttttttcggaatttattttcgtttttttaagattcgtttttgtttttttaggattcgttttcgttttttcggaattcgatttcgttttttcgggattcgttttcgttttttcggaattcgtttttgttttttcggaattcgttttcgtttttttaagattcgttttcgttttttcgggatttattttcgtttttttaagattcgttttcgttttttcggaatttattttttttttcgtcggaattcgcgtttgttttttcggaatttattttttcgtttttcggaatatgcgtttgttttttcggaattcgttttcgttttttcggaatttattttcgtttttttaagattcgtttttgttttttcgggatttattttcgtttttttaagattcgttttcgtttttttaagattcgttttcgttttttcggaatttattttcgtttttttaagatttttttttgttttttcgggatcggttttt

SEQ ID NO: 3864 - DNA, 966 bp, Artificial Sequence
  chemically treated genomic DNA (Homo sapiens) CpG-island No: 3864
aaaaaccgatcccgaaaaaacaaaaaaaaatcttaaaaaaacgaaaataaattccgaaaaaacgaaaacgaatcttaaaaaaacgaaaacgaatcttaaaaaaacgaaaataaatcccgaaaaaacaaaaacgaatcttaaaaaaacgaaaataaattccgaaaaaacgaaaacgaattccgaaaaaacaaacgcatattccgaaaaacgaaaaaataaattccgaaaaaacaaacgcgaattccgacgaaaaaaaaaataaattccgaaaaaacgaaaacgaatcttaaaaaaacgaaaataaatcccgaaaaaacgaaaacgaatcttaaaaaaacgaaaacgaattccgaaaaaacaaaaacgaattccgaaaaaacgaaaacgaatcccgaaaaaacgaaatcgaattccgaaaaaacgaaaacgaatcctaaaaaaacaaaaacgaatcttaaaaaaacgaaaataaattccgaaaaaacaaacgcatattccgaaaaacgaaaaaacaaattccgaaaaaacgaaaacgaatcctaaaaaaacgaattcgaattccgaaaaaataaaaacgaatcctaaaaaaacgaaaacgaattccgaaaaacgaaaaaataaattccaaaaaaacgaacgcgaattccgaaaaaacgaaaaccgatcttaaaaaaacgaaaataaattccgaaaaaaaaaaaaacgaattccgaaaaaacgaaaacgaatcttaaaaaaacgaaaataaattccgaaaaaacgaaaacgaatcccgaaaaaacgaaaacgaattccgaaaaaacgaaaacgaatcctaaaaaaacgaaaacgaatcttaaaaaaacgaaaaaaaattccgaaaaaacgaaaacgaatcctaaaaaaacaaaaaccgattatactacgcaaaccgaacgcgcctaaaaaccacacgtaaaaaaataaaatttcacaaccaacttctaa

SEQ ID NO: 3865 - DNA, 1243 bp, Artificial Sequence
  chemically treated genomic DNA (Homo sapiens) CpG-island No: 3865
ttcgtttgttattcgtgaatagttgttcggggggtttcggtggtagagacgtttcggtcgttcgtcgttttcggtttcgttcgtttagttcgagtggggggcggtgtatttgcgtatgcgcgtttttttttcgtcgtttttttttcgtttttttttacgtgacgtcgtgggaattcggattttagcgttttcgggtgggggtagtcgtcggtcgtcggtcggggatgggggttcggggtggcgggagagtaggaaggatggggaggggatatttggttcgcggggttcgggggtttcggaggagagggtgggggaggggaggtcgtcgcgaacgggttttcggggggggtgggggggatttattcgtacgacgtaggagatttcgggttttaggattttggcgtcggggtgtagttagtcgtgcgcgggtttgtggatgaagttgttttttcggatttattcggcggcggcggcggcgttttcggatttcgtcgtttttcgttcgtttcgcgattttcgcgatttcgcgtttcgatagcggttgagcgcgggtaggggatagggcgcggcgtagcggggttcgtaggcgtttaggacggcggtcgttagcgtcgggacgtttttcgggttcgtcggttcgggttgggggttcgcgtttttcgaggttttagtcgttcgcgtcgtcgtcgggtcgcggtttaggaagtcgttcggggtcgcgaatttttattgcggtattcggggtagtaacgcgtagaaggtggtgggcgtttcgggttcggggggcgcggggggcgtcgggggcgcgcgttcgttcggattttgcgttatggtcgcggtcgttcgacggagttcgatcgggcgttgcgtttggcgcggaggaagttttttcgtttcgttcgttttttttcgtttttcggttcggtgatgttattcgttcggtttagcgcgtagtcgcggggggttgcgtttttgggatttcggtttttttcgtttcggagtttggtcgcgaggttggggaaattgaggtttttcgaggatatcgggcgttggtttggaattcgtagttaaggcgggacggggttttgaatttagaatttcgttagcgatttttttcgttgcgttttttattttcgttcgtcgtttaagttcgtagaaggatcgagttggagaagtttagaaattttatatttttttttttttttattttttagtggggaaattgaggtttcgggaggcgcgg

SEQ ID NO: 3866 - DNA, 1243 bp, Artificial Sequence
  chemically treated genomic DNA (Homo sapiens) CpG-island No: 3866
ccgcgcctcccgaaacctcaatttccccactaaaaaataaaaaaaaaaaaaaatataaaatttctaaacttctccaactcgatccttctacgaacttaaacgacgaacgaaaataaaaaacgcaacgaaaaaaatcgctaacgaaattctaaattcaaaaccccgtcccgccttaactacgaattccaaaccaacgcccgatatcctcgaaaaacctcaatttccccaacctcgcgaccaaactccgaaacgaaaaaaaccgaaatcccaaaaacgcaaccccccgcgactacgcgctaaaccgaacgaataacatcaccgaaccgaaaaacgaaaaaaaacgaacgaaacgaaaaaacttcctccgcgccaaacgcaacgcccgatcgaactccgtcgaacgaccgcgaccataacgcaaaatccgaacgaacgcgcgcccccgacgccccccgcgccccccgaacccgaaacgcccaccaccttctacgcgttactaccccgaataccgcaataaaaattcgcgaccccgaacgacttcctaaaccgcgacccgacgacgacgcgaacgactaaaacctcgaaaaacgcgaacccccaacccgaaccgacgaacccgaaaaacgtcccgacgctaacgaccgccgtcctaaacgcctacgaaccccgctacgccgcgccctatcccctacccgcgctcaaccgctatcgaaacgcgaaatcgcgaaaatcgcgaaacgaacgaaaaacgacgaaatccgaaaacgccgccgccgccgccgaataaatccgaaaaaacaacttcatccacaaacccgcgcacgactaactacaccccgacgccaaaatcctaaaacccgaaatctcctacgtcgtacgaataaatcccccccaccccccccgaaaacccgttcgcgacgacctcccctcccccaccctctcctccgaaacccccgaaccccgcgaaccaaatatcccctccccatccttcctactctcccgccaccccgaacccccatccccgaccgacgaccgacgactacccccacccgaaaacgctaaaatccgaattcccacgacgtcacgtaaaaaaaaacgaaaaaaaaacgacgaaaaaaaaacgcgcatacgcaaatacaccgccccccactcgaactaaacgaacgaaaccgaaaacgacgaacgaccgaaacgtctctaccaccgaaaccccccgaacaactattcacgaataacaaacgaa

SEQ ID NO: 3867 - DNA, 1243 bp, Artificial Sequence
  chemically treated genomic DNA (Homo sapiens) CpG-island No: 3867
tcgcgtttttcggggttttagtttttttattaggaaataggggaaagaagggatgtggaatttttaagtttttttagttcggtttttttgcgaatttgggcggcgggcgggggtggggggcgtagcggggagggtcgttgacggggttttgggtttaaagtttcgtttcgttttggttgcgggttttaggttagcgttcggtgttttcggagggttttagtttttttagtttcgcggttaggtttcgggacgaggagggtcggggttttaggggcgtagtttttcgcggttgcgcgttgggtcgggcggatgatattatcgggtcggggggcgggagggagcgggcggagcgggagggtttttttcgcgttaggcgtagcgttcggtcgggtttcgtcgggcggtcgcggttatgacgtagggttcgggcgggcgcgcgttttcggcgtttttcgcgtttttcgagttcgaggcgtttattattttttgcgcgttgttgtttcgaatgtcgtagtggaagttcgcggtttcgggcggttttttgggtcgcggttcggcggcggcgcgggcggttggggtttcggggggcgcggatttttaattcgagtcggcgggttcggggggcgtttcggcgttggcggtcgtcgttttgggcgtttgcgagtttcgttgcgtcgcgttttgttttttgttcgcgtttagtcgttgtcggggcgcggggtcgcgggggtcgcggggcgggcggggggcggcggggttcggggacgtcgtcgtcgtcgtcgagtggattcggaagggtagttttatttataaattcgcgtacggttggttatatttcgacgttagggttttggggttcggggttttttacgtcgtgcgggtgagttttttttatttttttcgggagttcgttcgcggcggtttttttttttttattttttttttcgggattttcggatttcgcgagttaggtgttttttttttattttttttgttttttcgttatttcggatttttattttcggtcggcggtcggcggttgtttttattcggaggcgttggggttcgggtttttacggcgttacgtggggaggggcggggagagggcggcgggggaggggcgcgtatgcgtaggtgtatcgttttttattcggattgggcgggcgaggtcgagagcggcgagcggtcggggcgtttttgttatcggagtttttcggatagttgtttacgaatgatagacggg

SEQ ID NO: 3868 - DNA, 1243 bp, Artificial Sequence
  chemically treated genomic DNA (Homo sapiens) CpG-island No: 3868
cccgtctatcattcgtaaacaactatccgaaaaactccgataacaaaaacgccccgaccgctcgccgctctcgacctcgcccgcccaatccgaataaaaaacgatacacctacgcatacgcgcccctcccccgccgccctctccccgcccctccccacgtaacgccgtaaaaacccgaaccccaacgcctccgaataaaaacaaccgccgaccgccgaccgaaaataaaaatccgaaataacgaaaaaacaaaaaaaataaaaaaaaaacacctaactcgcgaaatccgaaaatcccgaaaaaaaaaataaaaaaaaaaaaaccgccgcgaacgaactcccgaaaaaaataaaaaaaactcacccgcacgacgtaaaaaaccccgaaccccaaaaccctaacgtcgaaatataaccaaccgtacgcgaatttataaataaaactacccttccgaatccactcgacgacgacgacgacgtccccgaaccccgccgccccccgcccgccccgcgacccccgcgaccccgcgccccgacaacgactaaacgcgaacaaaaaacaaaacgcgacgcaacgaaactcgcaaacgcccaaaacgacgaccgccaacgccgaaacgccccccgaacccgccgactcgaattaaaaatccgcgccccccgaaaccccaaccgcccgcgccgccgccgaaccgcgacccaaaaaaccgcccgaaaccgcgaacttccactacgacattcgaaacaacaacgcgcaaaaaataataaacgcctcgaactcgaaaaacgcgaaaaacgccgaaaacgcgcgcccgcccgaaccctacgtcataaccgcgaccgcccgacgaaacccgaccgaacgctacgcctaacgcgaaaaaaaccctcccgctccgcccgctccctcccgccccccgacccgataatatcatccgcccgacccaacgcgcaaccgcgaaaaactacgcccctaaaaccccgaccctcctcgtcccgaaacctaaccgcgaaactaaaaaaactaaaaccctccgaaaacaccgaacgctaacctaaaacccgcaaccaaaacgaaacgaaactttaaacccaaaaccccgtcaacgaccctccccgctacgccccccacccccgcccgccgcccaaattcgcaaaaaaaccgaactaaaaaaacttaaaaattccacatcccttctttcccctatttcctaataaaaaaactaaaaccccgaaaaacgcga

SEQ ID NO: 3869 - DNA, 743 bp, Artificial Sequence
  chemically treated genomic DNA (Homo sapiens) CpG-island No: 3869
tagcggtagtttgcgacgggcggaggtttttagttattcggttagggtttcgtggtagtcgcgtaggtagacgtcgaaggcgtttaggtcggcggggtaggcgggcgttaggcggtttcgtattacggttatattttttagtagtcgcgttcgtagcgtttttagttgttcggttaggttttcgggcgtttcgggagtcgttgtttttaggcgttttcgggtcgcgcgcgttacggtttcggtttagcgtgcgcgtagtttgcgggtcgtttcgggatttcgacgttcgtcggtcgtttttttttgtattagtatttggtttagttgcgttatcgcgttagtttcggcgtacgttttcggttcggggttcgttagcgtttcgcgtattagcgtttatagttcgcgttgtagggtttcgtatagtagcgttacgtttcgcgttcggcggttttcgttagcgttttcggttttgggaggtttaggcgcgtcgtttttcgacggcgttagtttttcggtttttagttttaggatgtgttcgttcgtacgcgttagttcgcgttgttggattaggtttaggatttttagtattgcgggagtaaagcgggaggttagtagtgcgcgggggggaggagggcgatgtcggacgcggggttgggggtgtttaggaaggggagagagatgaggggaaaagggttataggaggcgggaaagtgtgggggtagagaagagttcggagaagagta

SEQ ID NO: 3870 - DNA, 743 bp, Artificial Sequence
  chemically treated genomic DNA (Homo sapiens) CpG-island No: 3870
tactcttctccgaactcttctctacccccacactttcccgcctcctataacccttttcccctcatctctctccccttcctaaacacccccaaccccgcgtccgacatcgccctcctcccccccgcgcactactaacctcccgctttactcccgcaatactaaaaatcctaaacctaatccaacaacgcgaactaacgcgtacgaacgaacacatcctaaaactaaaaaccgaaaaactaacgccgtcgaaaaacgacgcgcctaaacctcccaaaaccgaaaacgctaacgaaaaccgccgaacgcgaaacgtaacgctactatacgaaaccctacaacgcgaactataaacgctaatacgcgaaacgctaacgaaccccgaaccgaaaacgtacgccgaaactaacgcgataacgcaactaaaccaaatactaatacaaaaaaaaacgaccgacgaacgtcgaaatcccgaaacgacccgcaaactacgcgcacgctaaaccgaaaccgtaacgcgcgcgacccgaaaacgcctaaaaacaacgactcccgaaacgcccgaaaacctaaccgaacaactaaaaacgctacgaacgcgactactaaaaaatataaccgtaatacgaaaccgcctaacgcccgcctaccccgccgacctaaacgccttcgacgtctacctacgcgactaccacgaaaccctaaccgaataactaaaaacctccgcccgtcgcaaactaccgcta

SEQ ID NO: 3871 - DNA, 743 bp, Artificial Sequence
  chemically treated genomic DNA (Homo sapiens) CpG-island No: 3871
tgttttttttcgggtttttttttgtttttatattttttcgttttttgtaatttttttttttttattttttttttttttttaagtatttttaatttcgcgttcggtatcgtttttttttttttcgcgtattgttgatttttcgttttgttttcgtagtgttggagattttgagtttgatttagtagcgcgaattagcgcgtgcggacgagtatattttggagttagaggtcgaggagttggcgtcgtcgaggggcggcgcgtttgggttttttaaggtcgagggcgttggcgggggtcgtcgggcgcgggacgtggcgttgttgtacgaggttttgtagcgcgagttgtgggcgttggtgcgcgagacgttggcgggtttcgggtcgggagcgtgcgtcggggttggcgcggtggcgtagttgggttaggtgttggtataggaggaggcggtcgacgggcgtcggggtttcggggcggttcgtaaattacgcgtacgttgggtcgaagtcgtggcgcgcgcggttcgggagcgtttagaggtagcggttttcggggcgttcgggggtttggtcgggtagttggaggcgttgcgggcgcggttgttggaggatatggtcgtggtgcggggtcgtttggcgttcgtttatttcgtcggtttgggcgttttcggcgtttatttgcgcggttattacggggttttggtcgagtggttgggggttttcgttcgtcgtaggttgtcgttg

SEQ ID NO: 3872 - DNA, 743 bp, Artificial Sequence
  chemically treated genomic DNA (Homo sapiens) CpG-island No: 3872
caacgacaacctacgacgaacgaaaacccccaaccactcgaccaaaaccccgtaataaccgcgcaaataaacgccgaaaacgcccaaaccgacgaaataaacgaacgccaaacgaccccgcaccacgaccatatcctccaacaaccgcgcccgcaacgcctccaactacccgaccaaacccccgaacgccccgaaaaccgctacctctaaacgctcccgaaccgcgcgcgccacgacttcgacccaacgtacgcgtaatttacgaaccgccccgaaaccccgacgcccgtcgaccgcctcctcctataccaacacctaacccaactacgccaccgcgccaaccccgacgcacgctcccgacccgaaacccgccaacgtctcgcgcaccaacgcccacaactcgcgctacaaaacctcgtacaacaacgccacgtcccgcgcccgacgacccccgccaacgccctcgaccttaaaaaacccaaacgcgccgcccctcgacgacgccaactcctcgacctctaactccaaaatatactcgtccgcacgcgctaattcgcgctactaaatcaaactcaaaatctccaacactacgaaaacaaaacgaaaaatcaacaatacgcgaaaaaaaaaaaaacgataccgaacgcgaaattaaaaatacttaaaaaaaaaaaaaaaataaaaaaaaaaaaattacaaaaaacgaaaaaatataaaaacaaaaaaaaacccgaaaaaaaaca

SEQ ID NO: 3873 - DNA, 1274 bp, Artificial Sequence
  chemically treated genomic DNA (Homo sapiens) CpG-island No: 3873
cgtagcgcgatgacgttacgtttgcgggtttcgtttttacgtaggtttcggtttttcggattcggcgtttagttttcgttcgttttgttaggttcgggtcgttcgtttgtatttattttttgttcggataaggggtcgtttcgtgaggaaattagtttggagtttttacgttcgtttcggaggaggacgcgggcggggcgttcgaattgcggggagagggcgatttcgtttcgggttgaaattagttcgtttagaagttagtgttttcgtagggcgggatagttacgcgtgttcgtaacgttttcgttatttatcggtagggggtgggttttagggaattatttagttaggacgggcgggggcggggtcgagataagtatttaatgagggacgtttaatcggaattcggggaattgtttaatttatagcgttaggggacggattggggaattttttaattagagtcgtcgacgttggtagtattgtttaattagaagcgcggtttttcgagttttgtttaattaggtttttgggacgggacgtttttgttttagtcgtgagtgtttcgtttgtttttagcggtttttggcgtttcggtttttgtcgcgtttatttgcgtcggtagcgaagaaatcgtttcgggatatggtgagtgtggcgtaggagaggatttcggtgcggggtagtaggaatcggcgatcgttcgagatcgcggtttggggggagttgagggacgcggggggcggtttcggcgagggcggcgtaggacgggagtttgggtttcgggggtttcgttcggtttcgtttttcgcgttgaggtcgcggttagggcgtttcgagtttcgggttttcgttcgtttttggttttaaggttgtagagcggggagcggcgttcggagttcgatttcgttttcgtcgtttcggggttttcgcgtttttgcgttttcgattttttacgtttcgttcggggtcgcgacgtttcggagcgtttcgttgcggtttcgggattttcgggtcgcgggaggtagagtcgttcgagatttcgaggtgcggtttaggttttttcgggattcgttttggggtcgacgtcgcggtgttttttggggtgcgggtttttggtcggtgtcgttttcgttcgcgttttcgcggtttagttttttggaggtttcgcgttttcggtcgcggtttttgggggattttgggtttttttcgggatagttcgggagcggtggggtttcggcgggggcggagacgtttttatttgtaaaggtagt

SEQ ID NO: 3874 - DNA, 1274 bp, Artificial Sequence
  chemically treated genomic DNA (Homo sapiens) CpG-island No: 3874
actacctttacaaataaaaacgtctccgcccccgccgaaaccccaccgctcccgaactatcccgaaaaaaacccaaaatcccccaaaaaccgcgaccgaaaacgcgaaacctccaaaaaactaaaccgcgaaaacgcgaacgaaaacgacaccgaccaaaaacccgcaccccaaaaaacaccgcgacgtcgaccccaaaacgaatcccgaaaaaacctaaaccgcacctcgaaatctcgaacgactctacctcccgcgacccgaaaatcccgaaaccgcaacgaaacgctccgaaacgtcgcgaccccgaacgaaacgtaaaaaatcgaaaacgcaaaaacgcgaaaaccccgaaacgacgaaaacgaaatcgaactccgaacgccgctccccgctctacaaccttaaaaccaaaaacgaacgaaaacccgaaactcgaaacgccctaaccgcgacctcaacgcgaaaaacgaaaccgaacgaaacccccgaaacccaaactcccgtcctacgccgccctcgccgaaaccgccccccgcgtccctcaactccccccaaaccgcgatctcgaacgatcgccgattcctactaccccgcaccgaaatcctctcctacgccacactcaccatatcccgaaacgatttcttcgctaccgacgcaaataaacgcgacaaaaaccgaaacgccaaaaaccgctaaaaacaaacgaaacactcacgactaaaacaaaaacgtcccgtcccaaaaacctaattaaacaaaactcgaaaaaccgcgcttctaattaaacaatactaccaacgtcgacgactctaattaaaaaattccccaatccgtcccctaacgctataaattaaacaattccccgaattccgattaaacgtccctcattaaatacttatctcgaccccgcccccgcccgtcctaactaaataattccctaaaacccaccccctaccgataaataacgaaaacgttacgaacacgcgtaactatcccgccctacgaaaacactaacttctaaacgaactaatttcaacccgaaacgaaatcgccctctccccgcaattcgaacgccccgcccgcgtcctcctccgaaacgaacgtaaaaactccaaactaatttcctcacgaaacgaccccttatccgaacaaaaaataaatacaaacgaacgacccgaacctaacaaaacgaacgaaaactaaacgccgaatccgaaaaaccgaaacctacgtaaaaacgaaacccgcaaacgtaacgtcatcgcgctacg

SEQ ID NO: 3875 - DNA, 1274 bp, Artificial Sequence
  chemically treated genomic DNA (Homo sapiens) CpG-island No: 3875
gttgtttttgtaggtgggggcgttttcgttttcgtcgaggttttatcgttttcgggttgtttcgggaggaatttagggttttttagagatcgcggtcggaggcgcggggtttttaaggagttgagtcgcgggagcgcgagcggaggcggtatcgattagggattcgtattttaggaggtatcgcggcgtcggttttagggcgggtttcgggggagtttggatcgtatttcggggtttcgggcgattttgtttttcgcggttcgggggtttcgaagtcgtagcgaaacgtttcgaggcgtcgcggtttcgggcggggcgtggggggtcgggagcgtagggacgcggggatttcgggacgacggggacggagtcgggtttcgggcgtcgtttttcgttttgtagttttggggttagaggcgggcggggattcggagttcggagcgttttagtcgcgattttagcgcgggaggcggggtcgggcgggattttcggggtttaggttttcgttttgcgtcgttttcgtcggggtcgtttttcgcgttttttagttttttttaagtcgcggtttcgggcggtcgtcggtttttgttgtttcgtatcgggatttttttttgcgttatatttattatgtttcggggcgattttttcgttatcggcgtaggtgagcgcgataggaatcgggacgttagggatcgttaggggtaggcggggtatttacggttaggatagaggcgtttcgttttaggggtttgattagatagagttcgggaagtcgcgtttttgattggatagtgttgttaacgtcggcgattttgattggagaattttttagttcgttttttggcgttgtaaattgggtagtttttcggatttcgattgggcgttttttattggatatttgtttcggtttcgttttcgttcgttttgattgggtagttttttagggtttattttttgtcggtgagtgacgggagcgttgcgaatacgcgtggttgtttcgttttgcggggatattggtttttgggcgaattggttttagttcggggcggaatcgtttttttttcgtagttcgggcgtttcgttcgcgttttttttcgggacgggcgtgggaattttagattagtttttttacgaggcgattttttgttcggataggaggtggatgtaagcgggcggttcgggtttggtagggcgaacgggggttgggcgtcgggttcgaagggtcgagatttacgtgggggcgggattcgtagacgtgacgttatcgcgttgcg

SEQ ID NO: 3876 - DNA, 1274 bp, Artificial Sequence
  chemically treated genomic DNA (Homo sapiens) CpG-island No: 3876
cgcaacgcgataacgtcacgtctacgaatcccgcccccacgtaaatctcgacccttcgaacccgacgcccaacccccgttcgccctaccaaacccgaaccgcccgcttacatccacctcctatccgaacaaaaaatcgcctcgtaaaaaaactaatctaaaattcccacgcccgtcccgaaaaaaaacgcgaacgaaacgcccgaactacgaaaaaaaaacgattccgccccgaactaaaaccaattcgcccaaaaaccaatatccccgcaaaacgaaacaaccacgcgtattcgcaacgctcccgtcactcaccgacaaaaaataaaccctaaaaaactacccaatcaaaacgaacgaaaacgaaaccgaaacaaatatccaataaaaaacgcccaatcgaaatccgaaaaactacccaatttacaacgccaaaaaacgaactaaaaaattctccaatcaaaatcgccgacgttaacaacactatccaatcaaaaacgcgacttcccgaactctatctaatcaaacccctaaaacgaaacgcctctatcctaaccgtaaataccccgcctacccctaacgatccctaacgtcccgattcctatcgcgctcacctacgccgataacgaaaaaatcgccccgaaacataataaatataacgcaaaaaaaaatcccgatacgaaacaacaaaaaccgacgaccgcccgaaaccgcgacttaaaaaaaactaaaaaacgcgaaaaacgaccccgacgaaaacgacgcaaaacgaaaacctaaaccccgaaaatcccgcccgaccccgcctcccgcgctaaaatcgcgactaaaacgctccgaactccgaatccccgcccgcctctaaccccaaaactacaaaacgaaaaacgacgcccgaaacccgactccgtccccgtcgtcccgaaatccccgcgtccctacgctcccgaccccccacgccccgcccgaaaccgcgacgcctcgaaacgtttcgctacgacttcgaaacccccgaaccgcgaaaaacaaaatcgcccgaaaccccgaaatacgatccaaactcccccgaaacccgccctaaaaccgacgccgcgatacctcctaaaatacgaatccctaatcgataccgcctccgctcgcgctcccgcgactcaactccttaaaaaccccgcgcctccgaccgcgatctctaaaaaaccctaaattcctcccgaaacaacccgaaaacgataaaacctcgacgaaaacgaaaacgcccccacctacaaaaacaac

SEQ ID NO: 3877 - DNA, 600 bp, Artificial Sequence
  chemically treated genomic DNA (Homo sapiens) CpG-island No: 3877
tttaaaatcgtttttttttttttatatttttagtgttttattgtatcgatttatatttttattttagattttaggcgttagtttcgtttttttttcgttttattcgtatttttttttttttattttggttttttcgtgttttagtttttcgcggtttttttcgtttatttcgtttttttggtacgtttcgtttttatttttttttttttcgggtttttttaagtgagatttttttttttttttttcgtttttttttttttcgaggttgtattttttttttttttttcgttttttcgattgtcgtttttatttcggcgttcgttttttttttcgttttttttttgtttttttagttttcgttcgtttttttatttttcgttgtcgcgcgtcgttcgtgacgttagagtttttttttagttttatattttttttttgtttttttttttttttttcgtcggttagttagttcgcgaggagagttcgcggtggcggcgacggtggcgagagtcgcgggggtcgtaggaagttaattttttttgttttttcggggttttcgtttttttttttttataaaattagggatggaggcgttttttcggt

SEQ ID NO: 3878 - DNA, 600 bp, Artificial Sequence
  chemically treated genomic DNA (Homo sapiens) CpG-island No: 3878
accgaaaaaacgcctccatccctaattttataaaaaaaaaaaaacgaaaaccccgaaaaaacaaaaaaaattaacttcctacgacccccgcgactctcgccaccgtcgccgccaccgcgaactctcctcgcgaactaactaaccgacgaaaaaaaaaaaaaaaaacaaaaaaaaaatataaaactaaaaaaaaactctaacgtcacgaacgacgcgcgacaacgaaaaataaaaaaacgaacgaaaactaaaaaaacaaaaaaaaaacgaaaaaaaaaacgaacgccgaaataaaaacgacaatcgaaaaaacgaaaaaaaaaaaaaaaatacaacctcgaaaaaaaaaaaaacgaaaaaaaaaaaaaaaaatctcacttaaaaaaacccgaaaaaaaaaaaaataaaaacgaaacgtaccaaaaaaacgaaataaacgaaaaaaaccgcgaaaaactaaaacacgaaaaaaccaaaataaaaaaaaaaaaatacgaataaaacgaaaaaaaaacgaaactaacgcctaaaatctaaaataaaaatataaatcgatacaataaaacactaaaaatataaaaaaaaaaaaacgattttaaa

SEQ ID NO: 3879 - DNA, 600 bp, Artificial Sequence
  chemically treated genomic DNA (Homo sapiens) CpG-island No: 3879
gtcggggaggcgtttttatttttgattttgtggggaggagggggcgagggtttcggagaagtagggaaggttggttttttacggttttcgcggttttcgttatcgtcgtcgttatcgcggatttttttcgcggattgattgatcgacggaggggaggaggaggagtaggagggagatgtggggttgggagggggttttgacgttacgggcggcgcgcggtagcggggggtgggggggcgggcgggagttggggaggtaggaagggggcggggagggaagcgagcgtcgaggtgggagcgatagtcggaggggcggggaggggaggggggatgtaatttcgaggaggaaaggaacgaaagaggaagggagggattttatttaaggggattcgaggggaggagaaatggggacggggcgtgttaggagggcggggtgggcggagggagtcgcgggaggttgaagtacggaggaattagggtaggaagggaaggatgcgagtgggacgggagagaaacggggttggcgtttgaggtttgaagtgggagtatgagtcgatatagtgaagtattgaggatgtgggggagaggaaacggttttgga

SEQ ID NO: 3880 - DNA, 600 bp, Artificial Sequence
  chemically treated genomic DNA (Homo sapiens) CpG-island No: 3880
tccaaaaccgtttcctctcccccacatcctcaatacttcactatatcgactcatactcccacttcaaacctcaaacgccaaccccgtttctctcccgtcccactcgcatccttcccttcctaccctaattcctccgtacttcaacctcccgcgactccctccgcccaccccgccctcctaacacgccccgtccccatttctcctcccctcgaatccccttaaataaaatccctcccttcctctttcgttcctttcctcctcgaaattacatcccccctcccctccccgcccctccgactatcgctcccacctcgacgctcgcttccctccccgcccccttcctacctccccaactcccgcccgcccccccaccccccgctaccgcgcgccgcccgtaacgtcaaaaccccctcccaaccccacatctccctcctactcctcctcctcccctccgtcgatcaatcaatccgcgaaaaaaatccgcgataacgacgacgataacgaaaaccgcgaaaaccgtaaaaaaccaaccttccctacttctccgaaaccctcgccccctcctccccacaaaatcaaaaataaaaacgcctccccgac

SEQ ID NO: 3881 - DNA, 783 bp, Artificial Sequence
  chemically treated genomic DNA (Homo sapiens) CpG-island No: 3881
gcgatacgaatttgtttcgtgtttggttgtagcgttgcgcgggttgtaggtaggtgtagatggtcgagtcgtagaataggtagacggttgttaggtgggatttatacgtgtttatcgttttttttcggttttcgttgaatcgtatgtaatagatagttcgggttacggtatcgtaggaggttaggatgacggtaaacggtagtagtaggatgattacgcgggcggcgaatatttggttttcggtagtgttttcgtcgttttcgtaggttagtttgagtaacgtcggtagtttatagatgaagtggtttagtaggcggggcgcgtatagcggtcgtttagttaggagcgcggtttgcgtaatcgagttggtgaggtcgtttagttaggaggcgttggttagcgtgcgatataggcgcggggagacgagtttcgtatagcgtagcgggcggtatattgcggtcgcgcggtttagagttattatcgttaggaggacgtattcggtcgaatttagagttagcgatgcgtatagttgggtcgtgtagtggttgcgcggtagttagagcgttggttcgcgtaggttggttagtagcggcggtattacgttagtagtgaagttcgcgtttattaaggttaggtggtagaggaagtagtatatgggcgtgtgtaggcgcgggtcgcgtatcgttagtagtattagcgtcgagttgttcgttaaggttaggaggtagtataggaggataagggcgaagaggatcggttgtagggaaggttagtcggagaaat

SEQ ID NO: 3882 - DNA, 783 bp, Artificial Sequence
  chemically treated genomic DNA (Homo sapiens) CpG-island No: 3882
atttctccgactaaccttccctacaaccgatcctcttcgcccttatcctcctatactacctcctaaccttaacgaacaactcgacgctaatactactaacgatacgcgacccgcgcctacacacgcccatatactacttcctctaccacctaaccttaataaacgcgaacttcactactaacgtaataccgccgctactaaccaacctacgcgaaccaacgctctaactaccgcgcaaccactacacgacccaactatacgcatcgctaactctaaattcgaccgaatacgtcctcctaacgataataactctaaaccgcgcgaccgcaatataccgcccgctacgctatacgaaactcgtctccccgcgcctatatcgcacgctaaccaacgcctcctaactaaacgacctcaccaactcgattacgcaaaccgcgctcctaactaaacgaccgctatacgcgccccgcctactaaaccacttcatctataaactaccgacgttactcaaactaacctacgaaaacgacgaaaacactaccgaaaaccaaatattcgccgcccgcgtaatcatcctactactaccgtttaccgtcatcctaacctcctacgataccgtaacccgaactatctattacatacgattcaacgaaaaccgaaaaaaaacgataaacacgtataaatcccacctaacaaccgtctacctattctacgactcgaccatctacacctacctacaacccgcgcaacgctacaaccaaacacgaaacaaattcgtatcgc

SEQ ID NO: 3883 - DNA, 783 bp, Artificial Sequence
  chemically treated genomic DNA (Homo sapiens) CpG-island No: 3883
gttttttcgattggttttttttgtagtcggtttttttcgtttttgtttttttgtgttattttttgattttgacgggtaattcggcgttggtgttgttggcggtgcgcgattcgcgtttgtatacgtttatgtattattttttttgttatttggttttggtagacgcgggttttattattagcgtggtgtcgtcgttgttggttaatttgcgcggattagcgttttggttgtcgcgtagttattgtacggtttagttgtgcgtatcgttggttttgggttcggtcgaatgcgtttttttggcggtgatggttttggatcgcgcggtcgtagtgtgtcgttcgttgcgttatgcggggttcgttttttcgcgtttatgtcgtacgttggttagcgttttttggttaagcggttttattaattcggttgcgtaaatcgcgtttttggttgagcggtcgttgtgcgcgtttcgtttgttggattattttatttgtgagttgtcggcgttgtttaagttggtttgcggaggcgacggagatattatcgagaattagatgttcgtcgttcgcgtggttattttgttgttgtcgtttgtcgttattttggttttttacggtgtcgtggttcgagttgtttgttgtatgcggtttagcggaggtcggaggagggcggtgggtacgtgtgggttttatttgatagtcgtttgtttgttttacggttcggttatttatatttatttgtagttcgcgtagcgttataattaggtacggggtaagttcgtatcgt

SEQ ID NO: 3884 - DNA, 783 bp, Artificial Sequence
  chemically treated genomic DNA (Homo sapiens) CpG-island No: 3884
acgatacgaacttaccccgtacctaattataacgctacgcgaactacaaataaatataaataaccgaaccgtaaaacaaacaaacgactatcaaataaaacccacacgtacccaccgccctcctccgacctccgctaaaccgcatacaacaaacaactcgaaccacgacaccgtaaaaaaccaaaataacgacaaacgacaacaacaaaataaccacgcgaacgacgaacatctaattctcgataatatctccgtcgcctccgcaaaccaacttaaacaacgccgacaactcacaaataaaataatccaacaaacgaaacgcgcacaacgaccgctcaaccaaaaacgcgatttacgcaaccgaattaataaaaccgcttaaccaaaaaacgctaaccaacgtacgacataaacgcgaaaaaacgaaccccgcataacgcaacgaacgacacactacgaccgcgcgatccaaaaccatcaccgccaaaaaaacgcattcgaccgaacccaaaaccaacgatacgcacaactaaaccgtacaataactacgcgacaaccaaaacgctaatccgcgcaaattaaccaacaacgacgacaccacgctaataataaaacccgcgtctaccaaaaccaaataacaaaaaaaataatacataaacgtatacaaacgcgaatcgcgcaccgccaacaacaccaacgccgaattacccgtcaaaatcaaaaaataacacaaaaaaacaaaaacgaaaaaaaccgactacaaaaaaaaccaatcgaaaaaac

SEQ ID NO: 3885 - DNA, 532 bp, Artificial Sequence
  chemically treated genomic DNA (Homo sapiens) CpG-island No: 3885
atttgggattcgaagattcgaggggattcgcgtcgttcgtgggggatggggaggggtcgtgatttgtttttttggtcggggttatttatcggtttcgttttgattgtagtagtcgcgtagcgttcgtagatttattcggaaaatttgtgcggtgtttttggcgtttcgtgtttttcggttttaatattttgattttttttgttttatttacggcgttcgcggtattattttcggattcgcggcgtcgttgtcgaagcgtacgaattgggtgtcgtttacgtagtttatagagatgaagcggggtttttcgcggtcgggtcgggatacggaagtgtggaaatattttaaggagtgggagtttgggggcgaggaggggttgagatcggttcgatttttttttcggcgcggtttttcgagtttttcgttttcgtcgggtcggtttttttttattttcggtagaggtcgtttttatttcgatttcgtatttattcgtttaggtttgggtaagggttagggttttcgagaggagtaa

SEQ ID NO: 3886 - DNA, 532 bp, Artificial Sequence
  chemically treated genomic DNA (Homo sapiens) CpG-island No: 3886
ttactcctctcgaaaaccctaacccttacccaaacctaaacgaataaatacgaaatcgaaataaaaacgacctctaccgaaaataaaaaaaaaccgacccgacgaaaacgaaaaactcgaaaaaccgcgccgaaaaaaaaatcgaaccgatctcaacccctcctcgcccccaaactcccactccttaaaatatttccacacttccgtatcccgacccgaccgcgaaaaaccccgcttcatctctataaactacgtaaacgacacccaattcgtacgcttcgacaacgacgccgcgaatccgaaaataataccgcgaacgccgtaaataaaacaaaaaaaatcaaaatattaaaaccgaaaaacacgaaacgccaaaaacaccgcacaaattttccgaataaatctacgaacgctacgcgactactacaatcaaaacgaaaccgataaataaccccgaccaaaaaaacaaatcacgacccctccccatcccccacgaacgacgcgaatcccctcgaatcttcgaatcccaaat

SEQ ID NO: 3887 - DNA, 532 bp, Artificial Sequence
  chemically treated genomic DNA (Homo sapiens) CpG-island No: 3887
ttatttttttcggaggttttggtttttatttagatttgggcgggtgagtgcggggtcgggatggaaacggtttttatcgggagtagagaggggtcggttcggcgggggcgaaggattcggggagtcgcgtcgggaggagggtcgggtcgattttagttttttttcgtttttaggtttttattttttgaagtatttttatattttcgtgtttcggttcggtcgcggggagtttcgttttatttttgtgggttacgtggacgatatttagttcgtgcgtttcgataacgacgtcgcgagttcgaggatggtgtcgcgggcgtcgtggatggagtaggaggggttagagtattgggatcgggagatacggagcgttagggatatcgtatagatttttcgagtgaatttgcggacgttgcgcggttattataattagagcgaggtcggtgagtgatttcggttaggggagtaggttacgatttttttttattttttacggacggcgcgggttttttcgaattttcgggttttagat

SEQ ID NO: 3888 - DNA, 532 bp, Artificial Sequence
  chemically treated genomic DNA (Homo sapiens) CpG-island No: 3888
atctaaaacccgaaaattcgaaaaaacccgcgccgtccgtaaaaaataaaaaaaaatcgtaacctactcccctaaccgaaatcactcaccgacctcgctctaattataataaccgcgcaacgtccgcaaattcactcgaaaaatctatacgatatccctaacgctccgtatctcccgatcccaatactctaacccctcctactccatccacgacgcccgcgacaccatcctcgaactcgcgacgtcgttatcgaaacgcacgaactaaatatcgtccacgtaacccacaaaaataaaacgaaactccccgcgaccgaaccgaaacacgaaaatataaaaatacttcaaaaaataaaaacctaaaaacgaaaaaaaactaaaatcgacccgaccctcctcccgacgcgactccccgaatccttcgcccccgccgaaccgacccctctctactcccgataaaaaccgtttccatcccgaccccgcactcacccgcccaaatctaaataaaaaccaaaacctccgaaaaaaataa

SEQ ID NO: 3889 - DNA, 824 bp, Artificial Sequence
  chemically treated genomic DNA (Homo sapiens) CpG-island No: 3889
gttacgtggtaagaggttgcgtaggtttttttcggttttcggggtttcggcggcggcggttcgcgaggggtttgggcgtatgcgtagcgaggttttacgtgagcgtttgcgtttttttttaaatttaacgatgtcgtcggagcggaggagacgaatgaaattggatcggagaatcggagcgaagtcgaagcggaagttcggaatgaggtcggattggaaagtcggagcggggttaggcgggtttttttaaaagtttgtttttttattttagcggaaatcgtcggttcggtcgagcgcggcggtcgttgcgattgtagtcgcggcggcggaggaagagagacggtttcggtagcggaatcgtttgaggttggaggaggataaatcggtcgtggagcggtgtttggaggagttggttttcggcgacgtcgagaacgacgaggacgcgttgttgcggcgtttgcgaggttcgagggtgagggaggtcgcggcgcgcgggttgggcgtattcgggcggggcgcgcggtgggcggtgaagtttcggggggcggagtttgggcgatttgcggcggcggggagcgtttaggtgggagggagttcgagaacgcgggcgcggagggtcgtagttgcgggtttttcgtttttttgttttagattgaaagtgtttggagggcggggatcgcgttttttttcgtttttggaggcgtcgttgttcgggtatttgttttgcgaattgtggtcgtgagtatttttcgttgttgttcgatttcgttagtttttttttaaattgagggtggttttttgattatttgttttagttttttgtg

SEQ ID NO: 3890 - DNA, 824 bp, Artificial Sequence
  chemically treated genomic DNA (Homo sapiens) CpG-island No: 3890
cacaaaaaactaaaacaaataatcaaaaaaccaccctcaatttaaaaaaaaactaacgaaatcgaacaacaacgaaaaatactcacgaccacaattcgcaaaacaaatacccgaacaacgacgcctccaaaaacgaaaaaaaacgcgatccccgccctccaaacactttcaatctaaaacaaaaaaacgaaaaacccgcaactacgaccctccgcgcccgcgttctcgaactccctcccacctaaacgctccccgccgccgcaaatcgcccaaactccgccccccgaaacttcaccgcccaccgcgcgccccgcccgaatacgcccaacccgcgcgccgcgacctccctcaccctcgaacctcgcaaacgccgcaacaacgcgtcctcgtcgttctcgacgtcgccgaaaaccaactcctccaaacaccgctccacgaccgatttatcctcctccaacctcaaacgattccgctaccgaaaccgtctctcttcctccgccgccgcgactacaatcgcaacgaccgccgcgctcgaccgaaccgacgatttccgctaaaataaaaaaacaaacttttaaaaaaacccgcctaaccccgctccgactttccaatccgacctcattccgaacttccgcttcgacttcgctccgattctccgatccaatttcattcgtctcctccgctccgacgacatcgttaaatttaaaaaaaaacgcaaacgctcacgtaaaacctcgctacgcatacgcccaaacccctcgcgaaccgccgccgccgaaaccccgaaaaccgaaaaaaacctacgcaacctcttaccacgtaac

SEQ ID NO: 3891 - DNA, 824 bp, Artificial Sequence
  chemically treated genomic DNA (Homo sapiens) CpG-island No: 3891
tataaggaattgaggtaggtgattaaaagattatttttagtttgggaagaggttagcggagtcgagtagtagcgaaagatgtttacgattatagttcgtaaagtagatattcgagtagcggcgtttttaggggcggagaaagacgcggttttcgttttttaggtatttttagtttggagtagggaggcgagggattcgtagttgcgatttttcgcgttcgcgttttcgggtttttttttatttgagcgtttttcgtcgtcgtaggtcgtttaggtttcgtttttcggagttttatcgtttatcgcgcgtttcgttcgagtgcgtttagttcgcgcgtcgcggttttttttattttcgggtttcgtagacgtcgtagtaacgcgttttcgtcgttttcgacgtcgtcgaagattagtttttttaagtatcgttttacggtcggtttgtttttttttagttttaggcggtttcgttgtcggagtcgttttttttttttcgtcgtcgcgattgtaatcgtagcggtcgtcgcgttcggtcgggtcggcggttttcgttgggatgaaggggtaggtttttggggaggttcgtttggtttcgtttcggttttttagttcggttttatttcgggttttcgtttcggtttcgtttcggtttttcggtttagttttattcgtttttttcgtttcggcggtatcgttaggtttgaggagaaacgtaggcgtttacgtggaatttcgttgcgtatgcgtttaggtttttcgcgggtcgtcgtcgtcgaagtttcgggggtcggaaggagtttgcgtagttttttgttacgtgat

SEQ ID NO: 3892 - DNA, 824 bp, Artificial Sequence
  chemically treated genomic DNA (Homo sapiens) CpG-island No: 3892
atcacgtaacaaaaaactacgcaaactccttccgacccccgaaacttcgacgacgacgacccgcgaaaaacctaaacgcatacgcaacgaaattccacgtaaacgcctacgtttctcctcaaacctaacgataccgccgaaacgaaaaaaacgaataaaactaaaccgaaaaaccgaaacgaaaccgaaacgaaaacccgaaataaaaccgaactaaaaaaccgaaacgaaaccaaacgaacctccccaaaaacctaccccttcatcccaacgaaaaccgccgacccgaccgaacgcgacgaccgctacgattacaatcgcgacgacgaaaaaaaaaaaacgactccgacaacgaaaccgcctaaaactaaaaaaaaacaaaccgaccgtaaaacgatacttaaaaaaactaatcttcgacgacgtcgaaaacgacgaaaacgcgttactacgacgtctacgaaacccgaaaataaaaaaaaccgcgacgcgcgaactaaacgcactcgaacgaaacgcgcgataaacgataaaactccgaaaaacgaaacctaaacgacctacgacgacgaaaaacgctcaaataaaaaaaaacccgaaaacgcgaacgcgaaaaatcgcaactacgaatccctcgcctccctactccaaactaaaaatacctaaaaaacgaaaaccgcgtctttctccgcccctaaaaacgccgctactcgaatatctactttacgaactataatcgtaaacatctttcgctactactcgactccgctaacctcttcccaaactaaaaataatcttttaatcacctacctcaattccttata

SEQ ID NO: 3893 - DNA, 565 bp, Artificial Sequence
  chemically treated genomic DNA (Homo sapiens) CpG-island No: 3893
ttcgcgtcggattttttttttttagtcgcggggagtttgagaaagcgtatttgtttcgcgatcgttacgtatttttttttcgtttgtcgcgatgtatcgttatttggttaaagcgttgttgtcgtttcgggtcgggttcgttgttttgggtttcgcggttaattattcggtcgcgttgttgggtcggggtcgcggatagttcgtcgtcgtttcgtagtcggggttcgtattggtcgttcggcgttattatagcgagttggtggtcgatcgcgaggacgattttaatttttttaagatggtggagggttttttcgatcgcggcgttagtatcgtggaggataagttggtgaaggatttgaggatttaggaaagcgaggagtagaagcggaatcgggtgcgcggtattttgcggattattaagttttgtaattatgtgttgagtttttttttttttattcggcgcgacgacggtttttgggaggttatcgaaggttatcgggtttagtatagttagtatcgtacgttttgtaagggaggtattcgttatagtattgatgtgagtgta

SEQ ID NO: 3894 - DNA, 565 bp, Artificial Sequence
  chemically treated genomic DNA (Homo sapiens) CpG-island No: 3894
tacactcacatcaatactataacgaatacctcccttacaaaacgtacgatactaactatactaaacccgataaccttcgataacctcccaaaaaccgtcgtcgcgccgaataaaaaaaaaaaaactcaacacataattacaaaacttaataatccgcaaaataccgcgcacccgattccgcttctactcctcgctttcctaaatcctcaaatccttcaccaacttatcctccacgatactaacgccgcgatcgaaaaaaccctccaccatcttaaaaaaattaaaatcgtcctcgcgatcgaccaccaactcgctataataacgccgaacgaccaatacgaaccccgactacgaaacgacgacgaactatccgcgaccccgacccaacaacgcgaccgaataattaaccgcgaaacccaaaacaacgaacccgacccgaaacgacaacaacgctttaaccaaataacgatacatcgcgacaaacgaaaaaaaaatacgtaacgatcgcgaaacaaatacgctttctcaaactccccgcgactaaaaaaaaaaaatccgacgcgaa

SEQ ID NO: 3895 - DNA, 565 bp, Artificial Sequence
  chemically treated genomic DNA (Homo sapiens) CpG-island No: 3895
tatatttatattagtgttgtaacggatattttttttgtagggcgtgcggtgttggttgtgttgggttcggtagttttcgatgattttttaggagtcgtcgtcgcgtcggatggggaaggagagatttagtatatggttgtagggtttgatgattcgtaggatgtcgcgtattcggtttcgtttttgtttttcgtttttttgggtttttaggttttttattaatttgttttttacgatgttggcgtcgcgatcgaagaagttttttattattttgaagaagttggggtcgttttcgcggtcggttattaattcgttgtagtggcgtcgggcggttaatgcgagtttcggttgcgaggcggcggcgggttgttcgcggtttcggtttagtaacgcggtcgagtggttggtcgcggagtttagggtagcgggttcggttcgggacggtagtagcgttttggttaggtagcggtatatcgcggtaggcggaggaggggtgcgtgacggtcgcggaataggtgcgtttttttagatttttcgcgattaggaaggaagggttcggcgcggg

SEQ ID NO: 3896 - DNA, 565 bp, Artificial Sequence
  chemically treated genomic DNA (Homo sapiens) CpG-island No: 3896
cccgcgccgaacccttccttcctaatcgcgaaaaatctaaaaaaacgcacctattccgcgaccgtcacgcacccctcctccgcctaccgcgatataccgctacctaaccaaaacgctactaccgtcccgaaccgaacccgctaccctaaactccgcgaccaaccactcgaccgcgttactaaaccgaaaccgcgaacaacccgccgccgcctcgcaaccgaaactcgcattaaccgcccgacgccactacaacgaattaataaccgaccgcgaaaacgaccccaacttcttcaaaataataaaaaacttcttcgatcgcgacgccaacatcgtaaaaaacaaattaataaaaaacctaaaaacccaaaaaaacgaaaaacaaaaacgaaaccgaatacgcgacatcctacgaatcatcaaaccctacaaccatatactaaatctctccttccccatccgacgcgacgacgactcctaaaaaatcatcgaaaactaccgaacccaacacaaccaacaccgcacgccctacaaaaaaaatatccgttacaacactaatataaatata

SEQ ID NO: 3897 - DNA, 918 bp, Artificial Sequence
  chemically treated genomic DNA (Homo sapiens) CpG-island No: 3897
ttcgtgtacgttggtaggggaaggggttttcgcgttaagtttttttagttggttagtttttcgtcgcgtttttcgggtttgggtttcgttacgttagtcggtttttacggatattacgtttttttttagcggaggaggagtagtcggattttcgagtcgtcgcgggtcgtcgggtggggagggtttttttggcggggtcgcgttcgggtgggcgggggtcgcgcgtaagttgcgtagttgtataaatatcgcggggttgcgttgtatacgtagttgcgggtcgagggcgcggatcgcgggggagggggcggcgggttgtaggcggttttcgtacggttatacgcgttcgttttatcgtcgtttaggtcgtagaagttcgagcgtagcggttttcgcggtttttttttcgggtcgcgtttgtagagttgtaattcgtcgtgcgagtagttatagttcgcgcgtcgtttggggttttttcgtcggtttcgtcgcgtgtaggtttcggtcgtcggttaggtagttttatttatttagtttttgttcgggtttcgggtttcgggttcggttgtttttttttcgtcgcgggtcgtcgttttcggtcgttttcgggattttagtcgtttgtacgtattttcgattttaaaaataaataggcgtcgtcgttttttcgcggcgttcgcggggttttcgttagttcgcgtttttcgaggttgagaagtttgttggtagggttcgggcgggacgcgcgggttgttatttttcgtttgcgatgtaggagtttcggcgcgtttcgtattcgtgtcgttcgtttcgcgagcgttttgttttttttcgtgttatttttagttttgcgatgtagtgttaggattgtacggttttgatttatcggttgagtttatagtttgaaaaaaaaaaaaa

SEQ ID NO: 3898 - DNA, 918 bp, Artificial Sequence
  chemically treated genomic DNA (Homo sapiens) CpG-island No: 3898
tttttttttttttcaaactataaactcaaccgataaatcaaaaccgtacaatcctaacactacatcgcaaaactaaaaataacacgaaaaaaaacaaaacgctcgcgaaacgaacgacacgaatacgaaacgcgccgaaactcctacatcgcaaacgaaaaataacaacccgcgcgtcccgcccgaaccctaccaacaaacttctcaacctcgaaaaacgcgaactaacgaaaaccccgcgaacgccgcgaaaaaacgacgacgcctatttatttttaaaatcgaaaatacgtacaaacgactaaaatcccgaaaacgaccgaaaacgacgacccgcgacgaaaaaaaaacaaccgaacccgaaacccgaaacccgaacaaaaactaaataaataaaactacctaaccgacgaccgaaacctacacgcgacgaaaccgacgaaaaaaccccaaacgacgcgcgaactataactactcgcacgacgaattacaactctacaaacgcgacccgaaaaaaaaaccgcgaaaaccgctacgctcgaacttctacgacctaaacgacgataaaacgaacgcgtataaccgtacgaaaaccgcctacaacccgccgccccctcccccgcgatccgcgccctcgacccgcaactacgtatacaacgcaaccccgcgatatttatacaactacgcaacttacgcgcgacccccgcccacccgaacgcgaccccgccaaaaaaaccctccccacccgacgacccgcgacgactcgaaaatccgactactcctcctccgctaaaaaaaaacgtaatatccgtaaaaaccgactaacgtaacgaaacccaaacccgaaaaacgcgacgaaaaactaaccaactaaaaaaacttaacgcgaaaaccccttcccctaccaacgtacacgaa

SEQ ID NO: 3899 - DNA, 918 bp, Artificial Sequence
  chemically treated genomic DNA (Homo sapiens) CpG-island No: 3899
ttttttttttttttaagttgtgagtttaatcgatgagttagagtcgtgtaattttgatattgtatcgtaggattgggggtgatacggagggaggtagagcgttcgcgaggcggacggtacgggtgcggggcgcgtcgaggtttttgtatcgtaagcggggggtgatagttcgcgcgtttcgttcgggttttgttagtaaattttttagtttcgggaggcgcgggttggcggaagtttcgcgagcgtcgcggggaggcgacggcgtttgtttgtttttaaaatcgggagtgcgtgtaggcggttggagtttcggaggcgatcgaaggcggcgattcgcggcggaagggggatagtcgagttcggagttcggagttcgggtaagagttgggtaagtggggttgtttggtcggcggtcgaggtttgtacgcggcggggtcggcgaggggattttaggcggcgcgcgagttgtggttgttcgtacggcgggttgtagttttgtaggcgcggttcggagagggggtcgcgggggtcgttgcgttcgaatttttgcggtttgggcggcggtggagcgggcgcgtgtggtcgtgcgggggtcgtttgtagttcgtcgttttttttttcgcggttcgcgttttcggttcgtagttgcgtgtgtagcgtagtttcgcggtgtttgtgtagttacgtagtttgcgcgcggttttcgtttattcgggcgcggtttcgttaggaaagttttttttattcggcggttcgcggcggttcgggaattcggttgtttttttttcgttggagagaaacgtggtgttcgtggggatcggttgacgtgacggagtttaggttcggaaggcgcggcgaggggttagttagttgagggaatttggcgcgggagtttttttttttgttagcgtgtacggg

SEQ ID NO: 3900 - DNA, 918 bp, Artificial Sequence
  chemically treated genomic DNA (Homo sapiens) CpG-island No: 3900
cccgtacacgctaacaaaaaaaaaaactcccgcgccaaattccctcaactaactaacccctcgccgcgccttccgaacctaaactccgtcacgtcaaccgatccccacgaacaccacgtttctctccaacgaaaaaaaaacaaccgaattcccgaaccgccgcgaaccgccgaataaaaaaaactttcctaacgaaaccgcgcccgaataaacgaaaaccgcgcgcaaactacgtaactacacaaacaccgcgaaactacgctacacacgcaactacgaaccgaaaacgcgaaccgcgaaaaaaaaaacgacgaactacaaacgacccccgcacgaccacacgcgcccgctccaccgccgcccaaaccgcaaaaattcgaacgcaacgacccccgcgaccccctctccgaaccgcgcctacaaaactacaacccgccgtacgaacaaccacaactcgcgcgccgcctaaaatcccctcgccgaccccgccgcgtacaaacctcgaccgccgaccaaacaaccccacttacccaactcttacccgaactccgaactccgaactcgactatcccccttccgccgcgaatcgccgccttcgatcgcctccgaaactccaaccgcctacacgcactcccgattttaaaaacaaacaaacgccgtcgcctccccgcgacgctcgcgaaacttccgccaacccgcgcctcccgaaactaaaaaatttactaacaaaacccgaacgaaacgcgcgaactatcaccccccgcttacgatacaaaaacctcgacgcgccccgcacccgtaccgtccgcctcgcgaacgctctacctccctccgtatcacccccaatcctacgatacaatatcaaaattacacgactctaactcatcgattaaactcacaacttaaaaaaaaaaaaaa

SEQ ID NO: 3901 - DNA, 803 bp, Artificial Sequence
  chemically treated genomic DNA (Homo sapiens) CpG-island No: 3901
tttcgcgagtcgtcggagtaggcgtgtttcgcgtcggttgggatatcgttgttatggagacgttcgagtagtttcgtcgcgggggcgggacggggcggggcggggcggacgtcgttcgtcggttggttttattttttattgtagtagtaacgtcgcggcgggttgcgggtaggattggacgttagagtagtcgcgtagcgtttgaatcgttgcgggtcgtcgcggtcgtttttttttattttcgtttttgttgtttttagtttcgttttttcgatttttttgtttttttgttgttttcgtttttggttttcggtcgttttcgtcgttcgtttagaggagttttcgcgttcgttaagaagtcgtttttcgttggttcgtagtcgtcgcgatttcggtatagtttttttttttggttagttttttaaacggtcgtttttcgttcgcgggaagattaggttgcgatcgcgaacgttcgattttttttaggagtcgtagcgagcgttcggcggttacgtttcgcgattatatttcggcggttttcggtttagcgcgtttgttttcgtcgttcgtcgtcgtttttcgttcgttgtacgacgacgcgacgtttttgttgtaggcggcggattcgatcggatttagatttagacgtaagatggcgacggtcgcgtgattgttttagcgttttcgagttcggtttcgagtgtatttacggattgattgtgggggtagagaagggcgagattaggattttgtttttgttaatcgtgattgtatgaaggtcgtttttttcgggtttatttggt

SEQ ID NO: 3902 - DNA, 803 bp, Artificial Sequence
  chemically treated genomic DNA (Homo sapiens) CpG-island No: 3902
accaaataaacccgaaaaaaacgaccttcatacaatcacgattaacaaaaacaaaatcctaatctcgcccttctctacccccacaatcaatccgtaaatacactcgaaaccgaactcgaaaacgctaaaacaatcacgcgaccgtcgccatcttacgtctaaatctaaatccgatcgaatccgccgcctacaacaaaaacgtcgcgtcgtcgtacaacgaacgaaaaacgacgacgaacgacgaaaacaaacgcgctaaaccgaaaaccgccgaaatataatcgcgaaacgtaaccgccgaacgctcgctacgactcctaaaaaaaatcgaacgttcgcgatcgcaacctaatcttcccgcgaacgaaaaacgaccgtttaaaaaactaaccaaaaaaaaaaactataccgaaatcgcgacgactacgaaccaacgaaaaacgacttcttaacgaacgcgaaaactcctctaaacgaacgacgaaaacgaccgaaaaccaaaaacgaaaacaacaaaaaaacaaaaaaatcgaaaaaacgaaactaaaaacaacaaaaacgaaaataaaaaaaaacgaccgcgacgacccgcaacgattcaaacgctacgcgactactctaacgtccaatcctacccgcaacccgccgcgacgttactactacaataaaaaataaaaccaaccgacgaacgacgtccgccccgccccgccccgtcccgcccccgcgacgaaactactcgaacgtctccataacaacgatatcccaaccgacgcgaaacacgcctactccgacgactcgcgaaa

SEQ ID NO: 3903 - DNA, 803 bp, Artificial Sequence
  chemically treated genomic DNA (Homo sapiens) CpG-island No: 3903
attaagtaggttcgagggaggcgatttttatgtagttacgattaataaagatagagttttgatttcgtttttttttgtttttatagttagttcgtaggtgtattcggagtcgagttcggggacgttgaggtagttacgcggtcgtcgttattttgcgtttgggtttgggttcggtcgggttcgtcgtttgtagtaggggcgtcgcgtcgtcgtgtagcgggcgaggagcgacggcgggcggcgaaggtaggcgcgttgggtcgagagtcgtcggggtgtggtcgcggggcgtggtcgtcgggcgttcgttgcggtttttggagaggatcgggcgttcgcggtcgtagtttggttttttcgcgggcgaggagcggtcgtttgggagattagttagagggagaaattgtgtcgaagtcgcggcggttgcgggttagcggaaagcggttttttggcgggcgcggggatttttttgggcgggcggcgaggacggtcgaggattagaaacgaaggtagtagaggagtaggaaagtcggagaagcgaggttggagatagtagaggcgagggtgggaaggggcggtcgcggcggttcgtagcggtttaggcgttgcgcggttgttttggcgtttagttttattcgtaattcgtcgcgacgttattgttgtagtggaggatggggttagtcggcgagcggcgttcgtttcgtttcgtttcgtttcgttttcgcggcggagttgttcgggcgtttttatggtaacggtgttttagtcggcgcgaggtacgtttgtttcggcggttcgcgggg

SEQ ID NO: 3904 - DNA, 803 bp, Artificial Sequence
  chemically treated genomic DNA (Homo sapiens) CpG-island No: 3904
ccccgcgaaccgccgaaacaaacgtacctcgcgccgactaaaacaccgttaccataaaaacgcccgaacaactccgccgcgaaaacgaaacgaaacgaaacgaaacgaacgccgctcgccgactaaccccatcctccactacaacaataacgtcgcgacgaattacgaataaaactaaacgccaaaacaaccgcgcaacgcctaaaccgctacgaaccgccgcgaccgccccttcccaccctcgcctctactatctccaacctcgcttctccgactttcctactcctctactaccttcgtttctaatcctcgaccgtcctcgccgcccgcccaaaaaaatccccgcgcccgccaaaaaaccgctttccgctaacccgcaaccgccgcgacttcgacacaatttctccctctaactaatctcccaaacgaccgctcctcgcccgcgaaaaaaccaaactacgaccgcgaacgcccgatcctctccaaaaaccgcaacgaacgcccgacgaccacgccccgcgaccacaccccgacgactctcgacccaacgcgcctaccttcgccgcccgccgtcgctcctcgcccgctacacgacgacgcgacgcccctactacaaacgacgaacccgaccgaacccaaacccaaacgcaaaataacgacgaccgcgtaactacctcaacgtccccgaactcgactccgaatacacctacgaactaactataaaaacaaaaaaaaacgaaatcaaaactctatctttattaatcgtaactacataaaaatcgcctccctcgaacctacttaat

SEQ ID NO: 3905 - DNA, 1262 bp, Artificial Sequence
  chemically treated genomic DNA (Homo sapiens) CpG-island No: 3905
gtgcgtaagtagtggtgacggcgggcgcgcggagaaaaggaacgttgtgacggaaattttagttgtcggagattttatcgtagtgaggttattggatttttcggattcggggcgtgatcggcgtcgattcggggcgtcgagaggtttatcgggcggagggggtttaattattatttcgtatttttttgggtttttttttcgggcggtgacgtgacgtgttgacggcgggttcgtgtcggggagttgggtcgttttttgttagtttcgaattcggtttttttttttttttttcgttcgttttattagtcggagttcggtttagtgttttagagaaaggtcgttttgtagtattcgtcgttgtcgtcgatcgttcgtatattcgtcgggtgagtttcgcgtgttttcgcggtcgcggggtttagtgcgcgcgtagtaatttgtttgtggtttggtcggcgtttcgtagggcgttttttcgcgttaggtcggtcggcgtggcgttcggcgtcgaataggtttcgaggaggtcgtagttaggtttagtgattatttagttgttttgagcggttgcggaggtgcgttttataagcgggtagggtgggaaaagttcgttcgtttgttcggaaggtagttgatggatttggggtcgatattattgcggacgtagggtacggtacgggggcgagaaggcgaaggttgtaggcgtgaggtgaaggtcggaggtttgttgggtttattttcgttatgtaaatgttcgcgaaggggaggagggacgggggggtaagatggcggttgttaggcgtttgttgttggggagtattgagagtgttgtcgggaggcggagtcgttattttgaaggcggtatttggaaaaaaaattcggttatgatttttgaggcggggatggggaaaaggacggcggcggcggcggtagcgtagttttcggcgcgacggcgtgtttgcgtaatagggcgtgttcgtttttttggcggtttttgtttttgtcgttatatgcgcgcgtacgttttagacgtttgcggtagcgttatttttcggttttttttttatagtttatttttggttgggtgtagtgtcggttacgttttaggtgatatgtcgtaggcgttcgttcgggcgtcggggttatttcgttttttagcgttttcggttttgtgttttttcgagagtttatagttattcgttttagtaggtggtaattcgggtatttaggtttacgagagtatataaattttagaaaatttt

SEQ ID NO: 3906 - DNA, 1262 bp, Artificial Sequence
  chemically treated genomic DNA (Homo sapiens) CpG-island No: 3906
aaaattttctaaaatttatatactctcgtaaacctaaatacccgaattaccacctactaaaacgaataactataaactctcgaaaaaacacaaaaccgaaaacgctaaaaaacgaaataaccccgacgcccgaacgaacgcctacgacatatcacctaaaacgtaaccgacactacacccaaccaaaaataaactataaaaaaaaaaccgaaaaataacgctaccgcaaacgtctaaaacgtacgcgcgcatataacgacaaaaacaaaaaccgccaaaaaaacgaacacgccctattacgcaaacacgccgtcgcgccgaaaactacgctaccgccgccgccgccgtccttttccccatccccgcctcaaaaatcataaccgaattttttttccaaataccgccttcaaaataacgactccgcctcccgacaacactctcaatactccccaacaacaaacgcctaacaaccgccatcttacccccccgtccctcctccccttcgcgaacatttacataacgaaaataaacccaacaaacctccgaccttcacctcacgcctacaaccttcgccttctcgcccccgtaccgtaccctacgtccgcaataatatcgaccccaaatccatcaactaccttccgaacaaacgaacgaacttttcccaccctacccgcttataaaacgcacctccgcaaccgctcaaaacaactaaataatcactaaacctaactacgacctcctcgaaacctattcgacgccgaacgccacgccgaccgacctaacgcgaaaaaacgccctacgaaacgccgaccaaaccacaaacaaattactacgcgcgcactaaaccccgcgaccgcgaaaacacgcgaaactcacccgacgaatatacgaacgatcgacgacaacgacgaatactacaaaacgacctttctctaaaacactaaaccgaactccgactaataaaacgaacgaaaaaaaaaaaaaaaaaccgaattcgaaactaacaaaaaacgacccaactccccgacacgaacccgccgtcaacacgtcacgtcaccgcccgaaaaaaaaacccaaaaaaatacgaaataataattaaaccccctccgcccgataaacctctcgacgccccgaatcgacgccgatcacgccccgaatccgaaaaatccaataacctcactacgataaaatctccgacaactaaaatttccgtcacaacgttccttttctccgcgcgcccgccgtcaccactacttacgcac

SEQ ID NO: 3907 - DNA, 1262 bp, Artificial Sequence
  chemically treated genomic DNA (Homo sapiens) CpG-island No: 3907
aaaattttttggaatttatgtgttttcgtgagtttagatgttcgaattgttatttgttgaaacgggtggttgtagattttcggaagggtatagagtcgggagcgttgaggggcgaaatgatttcggcgttcgaacggacgtttgcggtatgttatttaaagcgtagtcgatattgtatttagttaaggatgggttgtgaggggaaggtcgaaaggtggcgttgtcgtaggcgtttggaacgtacgcgcgtatatggcgataaaggtaagggtcgttaagggaacgagtacgttttgttgcgtagatacgtcgtcgcgtcggaggttgcgttgtcgtcgtcgtcgtcgtttttttttttattttcgttttaaggattataatcgaattttttttttagatatcgtttttaagatggcggtttcgtttttcgataatatttttaatattttttagtagtaggcgtttagtagtcgttattttgttttttcgttttttttttttttcgcggatatttatatagcgaaaataggtttagtaggttttcggtttttattttacgtttgtagttttcgttttttcgttttcgtgtcgtgttttgcgttcgtagtggtgtcgattttaggtttattaattgtttttcggataaacgggcgaattttttttattttgttcgtttatggagcgtattttcgtagtcgtttagggtaattggataattattaggtttaattgcggttttttcggggtttgttcggcgtcgagcgttacgtcggtcggtttagcgcgggagggcgttttacgggacgtcgattaggttataaataggttattgcgcgcgtattaggtttcgcggtcgcgggggtacgcgggatttattcgacggatgtgcgggcggtcggcgatagcggcgggtgttgtaggacggtttttttttggagtattgggtcgggtttcggttggtagggcgggcggagggagggaggaggggtcgagttcggagttgataaaaagcggtttagtttttcggtacgggttcgtcgttagtacgttacgttatcgttcgggagagagatttaggaaaatgcgggatggtagttgggtttttttcgttcggtgggtttttcggcgtttcgggtcggcgtcggttacgtttcgagttcggggagtttagtgattttattgcggtggggttttcggtagttggagttttcgttataacgtttttttttttcgcgcgttcgtcgttattattatttgcgtat

SEQ ID NO: 3908 - DNA, 1262 bp, Artificial Sequence
  chemically treated genomic DNA (Homo sapiens) CpG-island No: 3908
atacgcaaataataataacgacgaacgcgcgaaaaaaaaaaacgttataacgaaaactccaactaccgaaaaccccaccgcaataaaatcactaaactccccgaactcgaaacgtaaccgacgccgacccgaaacgccgaaaaacccaccgaacgaaaaaaacccaactaccatcccgcattttcctaaatctctctcccgaacgataacgtaacgtactaacgacgaacccgtaccgaaaaactaaaccgctttttatcaactccgaactcgacccctcctccctccctccgcccgccctaccaaccgaaacccgacccaatactccaaaaaaaaaccgtcctacaacacccgccgctatcgccgaccgcccgcacatccgtcgaataaatcccgcgtacccccgcgaccgcgaaacctaatacgcgcgcaataacctatttataacctaatcgacgtcccgtaaaacgccctcccgcgctaaaccgaccgacgtaacgctcgacgccgaacaaaccccgaaaaaaccgcaattaaacctaataattatccaattaccctaaacgactacgaaaatacgctccataaacgaacaaaataaaaaaaattcgcccgtttatccgaaaaacaattaataaacctaaaatcgacaccactacgaacgcaaaacacgacacgaaaacgaaaaaacgaaaactacaaacgtaaaataaaaaccgaaaacctactaaacctattttcgctatataaatatccgcgaaaaaaaaaaaaaacgaaaaaacaaaataacgactactaaacgcctactactaaaaaatattaaaaatattatcgaaaaacgaaaccgccatcttaaaaacgatatctaaaaaaaaaattcgattataatccttaaaacgaaaataaaaaaaaaaacgacgacgacgacgacaacgcaacctccgacgcgacgacgtatctacgcaacaaaacgtactcgttcccttaacgacccttacctttatcgccatatacgcgcgtacgttccaaacgcctacgacaacgccacctttcgaccttcccctcacaacccatccttaactaaatacaatatcgactacgctttaaataacataccgcaaacgtccgttcgaacgccgaaatcatttcgcccctcaacgctcccgactctatacccttccgaaaatctacaaccacccgtttcaacaaataacaattcgaacatctaaactcacgaaaacacataaattccaaaaaatttt

SEQ ID NO: 3909 - DNA, 688 bp, Artificial Sequence
  chemically treated genomic DNA (Homo sapiens) CpG-island No: 3909
ttttttttagggttacggtggcgtacggaaatttgttaagaatttttgttacgcgggcgttttggtgacggtggtatcggggaagggtgcgatttttagatttgcggggttaattcggtagtaatggtgggacgggttagggcggggttgaggggcgttcgtatttttcggttttagcggggatttgggagttcgaatttcgggttttattttgagatgcgagttgagtcggtggggatttcggttttggttcgagttcgcgaatttttcggggtcggcgtattcgaggtcgttgtggtggttgtaggagtcgtcgtttatgaagagttgtacgttcgtttttttcgtttttagttttatcgtagttttggtgcgcggtcgttgtagtcggttgggcggtgcggttttcggttcgcgcggtttttttttttcgtagcgttcgtttcgttttttttcgtttcgtttagttttgcgaggttcgggcggcggacgttttacgttgtgggttttagtttttagttcgcgtttcgagttcgtttcgtttcgtcgttttttttcgtttatttttttcggggcgtagggaatcgtttttacgagttatagttcgggttttgtagtgggcgacgacgtcggtagttgggacgaggagggttttttggttatttttttgggggttcgtattgttatg

SEQ ID NO: 3910 - DNA, 688 bp, Artificial Sequence
  chemically treated genomic DNA (Homo sapiens) CpG-island No: 3910
cataacaatacgaacccccaaaaaaataaccaaaaaaccctcctcgtcccaactaccgacgtcgtcgcccactacaaaacccgaactataactcgtaaaaacgattccctacgccccgaaaaaaataaacgaaaaaaaacgacgaaacgaaacgaactcgaaacgcgaactaaaaactaaaacccacaacgtaaaacgtccgccgcccgaacctcgcaaaactaaacgaaacgaaaaaaaacgaaacgaacgctacgaaaaaaaaaaaccgcgcgaaccgaaaaccgcaccgcccaaccgactacaacgaccgcgcaccaaaactacgataaaactaaaaacgaaaaaaacgaacgtacaactcttcataaacgacgactcctacaaccaccacaacgacctcgaatacgccgaccccgaaaaattcgcgaactcgaaccaaaaccgaaatccccaccgactcaactcgcatctcaaaataaaacccgaaattcgaactcccaaatccccgctaaaaccgaaaaatacgaacgcccctcaaccccgccctaacccgtcccaccattactaccgaattaaccccgcaaatctaaaaatcgcacccttccccgataccaccgtcaccaaaacgcccgcgtaacaaaaattcttaacaaatttccgtacgccaccgtaaccctaaaaaaaa

SEQ ID NO: 3911 - DNA, 688 bp, Artificial Sequence
  chemically treated genomic DNA (Homo sapiens) CpG-island No: 3911
tatgatagtacgggtttttagaagggtgattaggaggtttttttcgttttagttgtcggcgtcgtcgtttattgtagggttcgggttgtgattcgtggggacggttttttgcgtttcgggggaggtgggcggggaggggcggcggggcggggcgggttcgggacgcgggttgggagttggagtttatagcgtgaagcgttcgtcgttcgggtttcgtagggttaggcgaggcgagggggggcggggcgggcgttacgggaaggggaggtcgcgcggatcgggagtcgtatcgtttagtcggttgtagcggtcgcgtattaaggttgcgatggggttggagacggagaaggcggacgtatagttttttatggacgacgatttttatagttattatagcggtttcgagtacgtcgatttcgagaagttcgcggattcggattaggatcgggatttttatcggtttaattcgtattttaaggtgaagttcggggttcgggtttttaagttttcgttgaggtcgggaagtgcgggcgttttttagtttcgttttaattcgttttattattgttatcgggttggtttcgtaggtttgaggatcgtattttttttcggtattatcgttattagggcgttcgcgtagtaggaatttttagtaggttttcgtgcgttatcgtgattttaagaaaga

SEQ ID NO: 3912 - DNA, 688 bp, Artificial Sequence
  chemically treated genomic DNA (Homo sapiens) CpG-island No: 3912
tctttcttaaaatcacgataacgcacgaaaacctactaaaaattcctactacgcgaacgccctaataacgataataccgaaaaaaaatacgatcctcaaacctacgaaaccaacccgataacaataataaaacgaattaaaacgaaactaaaaaacgcccgcacttcccgacctcaacgaaaacttaaaaacccgaaccccgaacttcaccttaaaatacgaattaaaccgataaaaatcccgatcctaatccgaatccgcgaacttctcgaaatcgacgtactcgaaaccgctataataactataaaaatcgtcgtccataaaaaactatacgtccgccttctccgtctccaaccccatcgcaaccttaatacgcgaccgctacaaccgactaaacgatacgactcccgatccgcgcgacctccccttcccgtaacgcccgccccgccccccctcgcctcgcctaaccctacgaaacccgaacgacgaacgcttcacgctataaactccaactcccaacccgcgtcccgaacccgccccgccccgccgcccctccccgcccacctcccccgaaacgcaaaaaaccgtccccacgaatcacaacccgaaccctacaataaacgacgacgccgacaactaaaacgaaaaaaacctcctaatcacccttctaaaaacccgtactatcata

SEQ ID NO: 3913 - DNA, 916 bp, Artificial Sequence
  chemically treated genomic DNA (Homo sapiens) CpG-island No: 3913
ttcgggttattgttaggatcgcgggtgacgattggagtaagtgcgcggtcgagtggagtcgggtaaagggcggttataattattattttttagtttcgagtaggggaatcgcgtttttaatacgatcgttggggtttttagcggtttaggtcgattttcgtaaggagagaattttttttttaaattgatttttgtaatttggtttgggcgtttaggatatcgcggtttcgattagtttcgtagttttagtagtttacgggtagggttttagcggcggattatgagcgagtcgtcgttttttattttcgttatgtttgcggtggagagatttcggttttcgaaacgttttacggttagacgtcggacgattattcgtttcgtagtcggaagaggtagtaagaatattttgtcggttcggtttttcgtatcgttttttagcgagtacgtggagagcggtgggcgggcgcgttttggggcggggttttcggggcgtagacggcgtgcgcgcggattggttcgggcgtcgggcgagcggacgtgcgtttagggggcgggacggatgggtagtatcggtcgattggatcgttgggattaaatcgcggttgtggaggggatttaagggtgcgttcgtattcgtgtgcgttcgtattcgtgtgcgttcgtattcgtgtgcgttcgcgtatgcgggcgggggcgaaaaggcggggttttcggacgcggttgatagtttcgggagtaacgcgaagtagaggggcgggatcgatatggtgacgttatacgatgggtggggcggaggcggggcgagttttgtaagcgggcgtgggcggagcgttgggtaattttcgggaaatagaaattgagtgttagagtttgttgttaaggttgttgaatagacgattgtatagtgaagatattt

SEQ ID NO: 3914 - DNA, 916 bp, Artificial Sequence
  chemically treated genomic DNA (Homo sapiens) CpG-island No: 3914
aaatatcttcactatacaatcgtctattcaacaaccttaacaacaaactctaacactcaatttctatttcccgaaaattacccaacgctccgcccacgcccgcttacaaaactcgccccgcctccgccccacccatcgtataacgtcaccatatcgatcccgcccctctacttcgcgttactcccgaaactatcaaccgcgtccgaaaaccccgccttttcgcccccgcccgcatacgcgaacgcacacgaatacgaacgcacacgaatacgaacgcacacgaatacgaacgcacccttaaatcccctccacaaccgcgatttaatcccaacgatccaatcgaccgatactacccatccgtcccgccccctaaacgcacgtccgctcgcccgacgcccgaaccaatccgcgcgcacgccgtctacgccccgaaaaccccgccccaaaacgcgcccgcccaccgctctccacgtactcgctaaaaaacgatacgaaaaaccgaaccgacaaaatattcttactacctcttccgactacgaaacgaataatcgtccgacgtctaaccgtaaaacgtttcgaaaaccgaaatctctccaccgcaaacataacgaaaataaaaaacgacgactcgctcataatccgccgctaaaaccctacccgtaaactactaaaactacgaaactaatcgaaaccgcgatatcctaaacgcccaaaccaaattacaaaaatcaatttaaaaaaaaaattctctccttacgaaaatcgacctaaaccgctaaaaaccccaacgatcgtattaaaaacgcgattcccctactcgaaactaaaaaataataattataaccgccctttacccgactccactcgaccgcgcacttactccaatcgtcacccgcgatcctaacaataacccgaa

SEQ ID NO: 3915 - DNA, 916 bp, Artificial Sequence
  chemically treated genomic DNA (Homo sapiens) CpG-island No: 3915
gagtgtttttattatgtagtcgtttatttagtaattttgataataagttttggtatttagtttttatttttcgggagttgtttagcgtttcgtttacgttcgtttgtagaattcgtttcgttttcgttttatttatcgtgtgacgttattatatcggtttcgtttttttatttcgcgttgttttcgggattgttaatcgcgttcggaagtttcgttttttcgttttcgttcgtatgcgcgggcgtatacgaatgcgggcgtatacgaatgcgggcgtatacgaatgcgggcgtatttttgagttttttttataatcgcggtttgattttagcggtttagtcggtcggtgttgtttattcgtttcgttttttagacgtacgttcgttcgttcggcgttcgagttagttcgcgcgtacgtcgtttgcgtttcgaaagtttcgttttaaggcgcgttcgtttatcgttttttacgtgttcgttggagggcggtgcgaggggtcgagtcgataagatgtttttgttgtttttttcggttgcggggcgagtagtcgttcgacgtttggtcgtgagacgtttcgggagtcggagtttttttatcgtagatatgacgaaggtgagaggcggcggttcgtttatggttcgtcgttggggttttgttcgtgggttattggggttgcggggttggtcgaagtcgcggtgttttgggcgtttaagttaagttgtaaaaattagtttaaaagaaaaattttttttttgcggggatcggtttaggtcgttgaggattttagcggtcgtattgagggcgcgatttttttgttcggggttagggggtgatggttgtagtcgttttttattcggttttattcggtcgcgtatttgttttagtcgttattcgcggttttggtagtaattcggg

SEQ ID NO: 3916 - DNA, 916 bp, Artificial Sequence
  chemically treated genomic DNA (Homo sapiens) CpG-island No: 3916
cccgaattactaccaaaaccgcgaataacgactaaaacaaatacgcgaccgaataaaaccgaataaaaaacgactacaaccatcaccccctaaccccgaacaaaaaaatcgcgccctcaatacgaccgctaaaatcctcaacgacctaaaccgatccccgcaaaaaaaaaatttttcttttaaactaatttttacaacttaacttaaacgcccaaaacaccgcgacttcgaccaaccccgcaaccccaataacccacgaacaaaaccccaacgacgaaccataaacgaaccgccgcctctcaccttcgtcatatctacgataaaaaaactccgactcccgaaacgtctcacgaccaaacgtcgaacgactactcgccccgcaaccgaaaaaaacaacaaaaacatcttatcgactcgacccctcgcaccgccctccaacgaacacgtaaaaaacgataaacgaacgcgccttaaaacgaaactttcgaaacgcaaacgacgtacgcgcgaactaactcgaacgccgaacgaacgaacgtacgtctaaaaaacgaaacgaataaacaacaccgaccgactaaaccgctaaaatcaaaccgcgattataaaaaaaactcaaaaatacgcccgcattcgtatacgcccgcattcgtatacgcccgcattcgtatacgcccgcgcatacgaacgaaaacgaaaaaacgaaacttccgaacgcgattaacaatcccgaaaacaacgcgaaataaaaaaacgaaaccgatataataacgtcacacgataaataaaacgaaaacgaaacgaattctacaaacgaacgtaaacgaaacgctaaacaactcccgaaaaataaaaactaaataccaaaacttattatcaaaattactaaataaacgactacataataaaaacactc

SEQ ID NO: 3917 - DNA, 642 bp, Artificial Sequence
  chemically treated genomic DNA (Homo sapiens) CpG-island No: 3917
  unsure (51)
cgttcgatttattattcgttttttttgggttcgggttcgtttatttcgggnttcgtcggaggcggaggtaacgtcgtgcgtacgcgtaggtcgtggtgcggttttttggagcgtcggaagttcgtagtgtcggaggttcgtagcgtcggaattttagaggcgggtcgtagcggcgtagaggaggttagttgcgggagcgttttcggggacggtgtcgttatgagattgatttcgcgcgcgttgtgtagcgtcgtttaggtcgtttggcgggagaatttttttttgtgcggtcgcgacgtggcgcgttggttttcgggttatatggttaagggtgaggtacggcggggaggggtaaggttatgtttacggtcgcggcgtttttgttttttttttatttcggtttcggtcgtcgtttgtttttttcggtcgttttgggttggtttcgtttttttttttttgtttttttttttttttcgtttttattcgttttcggagtcgtcgggatttttttttttgcgtagttgcgggagaggttcgttttcgcgagtgttttcgcggcgtagtttcggatttagggtttgtttgattttttatttttggttcgtcgtttttgttttttgtttttagtaagttttttttgtt

SEQ ID NO: 3918 - DNA, 642 bp, Artificial Sequence
  chemically treated genomic DNA (Homo sapiens) CpG-island No: 3918
  unsure (592)
aacaaaaaaaacttactaaaaacaaaaaacaaaaacgacgaaccaaaaataaaaaatcaaacaaaccctaaatccgaaactacgccgcgaaaacactcgcgaaaacgaacctctcccgcaactacgcaaaaaaaaaaatcccgacgactccgaaaacgaataaaaacgaaaaaaaaaaaaaaacaaaaaaaaaaaaacgaaaccaacccaaaacgaccgaaaaaaacaaacgacgaccgaaaccgaaataaaaaaaaaacaaaaacgccgcgaccgtaaacataaccttacccctccccgccgtacctcacccttaaccatataacccgaaaaccaacgcgccacgtcgcgaccgcacaaaaaaaaattctcccgccaaacgacctaaacgacgctacacaacgcgcgcgaaatcaatctcataacgacaccgtccccgaaaacgctcccgcaactaacctcctctacgccgctacgacccgcctctaaaattccgacgctacgaacctccgacactacgaacttccgacgctccaaaaaaccgcaccacgacctacgcgtacgcacgacgttacctccgcctccgacgaancccgaaataaacgaacccgaacccaaaaaaaacgaataataaatcgaacg

SEQ ID NO: 3919 - DNA, 642 bp, Artificial Sequence
  chemically treated genomic DNA (Homo sapiens) CpG-island No: 3919
  unsure (592)
ggtagaaggaatttgttgggaatagaggataggggcggcgggttagaggtaggaggttaagtaggttttgggttcgaggttgcgtcgcgggggtattcgcgggaacgggtttttttcgtagttgcgtaggggaaggggtttcggcggtttcgggagcgggtgagagcggggaaggaggggagataagggaggaggggcggggttagtttaggacgatcgggagaagtaggcgacggtcgaaatcggggtgggagggaagtagaggcgtcgcggtcgtaggtatgattttgttttttttcgtcgtgttttatttttggttatgtggttcgggaattagcgcgttacgtcgcgatcgtatagggggaagttttttcgttaggcggtttgggcggcgttgtatagcgcgcgcggggttaattttatggcggtatcgttttcggaaacgttttcgtagttgattttttttgcgtcgttgcgattcgtttttgaggtttcggcgttgcgggttttcggtattgcgggttttcggcgttttaaggggtcgtattacggtttgcgcgtgcgtacgacgttgttttcgttttcggcgaanttcggagtgggcgggttcgggtttaaggaggacgaatggtgggtcgagcg

SEQ ID NO: 3920 - DNA, 642 bp, Artificial Sequence
  chemically treated genomic DNA (Homo sapiens) CpG-island No: 3920
  unsure (51)
cgctcgacccaccattcgtcctccttaaacccgaacccgcccactccgaanttcgccgaaaacgaaaacaacgtcgtacgcacgcgcaaaccgtaatacgaccccttaaaacgccgaaaacccgcaataccgaaaacccgcaacgccgaaacctcaaaaacgaatcgcaacgacgcaaaaaaaatcaactacgaaaacgtttccgaaaacgataccgccataaaattaaccccgcgcgcgctatacaacgccgcccaaaccgcctaacgaaaaaacttccccctatacgatcgcgacgtaacgcgctaattcccgaaccacataaccaaaaataaaacacgacgaaaaaaaacaaaatcatacctacgaccgcgacgcctctacttccctcccaccccgatttcgaccgtcgcctacttctcccgatcgtcctaaactaaccccgcccctcctcccttatctcccctccttccccgctctcacccgctcccgaaaccgccgaaaccccttcccctacgcaactacgaaaaaaacccgttcccgcgaatacccccgcgacgcaacctcgaacccaaaacctacttaacctcctacctctaacccgccgcccctatcctctattcccaacaaattccttctacc

SEQ ID NO: 3921 - DNA, 724 bp, Artificial Sequence
  chemically treated genomic DNA (Homo sapiens) CpG-island No: 3921
ggaagtgtttcgcgtgggagggttcgcgaggataggcgttagggagcgtttcgcgttgtcgggcggtgcgcgcgagcgtttttatggagggagaagtcggtcggtcgggcgggttagtgttttttgtaagggagacgagggcgtagcgagcgtttttttttagggattcgcgtcgagtgcgagggcgtagtgggtttgggggtgttacggtgttaggggtgggatttgggagagtttaacgcgttcggaggggggttgtgaaagtttttagtatcgttagcgagtcgttagttcgcgtgtgcgcgcgtttgcgtgtgcgcgtgtagttatagggttgtagggatataggattaaagtataaagtatattcgtaaagtataaagtttagaagtcgagggtaagtgtagaaacgtttttcgttcgggaagttgagcgtatatttaggtacgtttgtgtttttggaggaatttttcggtgtaggcggtcgagttttttgttgtatcgtagttcgcgggggttggaaaggttttcgttttgtttttaggcgcgttttcgttttttgagtttcggttttttgcggaggggtcgcgcgttttagtttgttagcgtgagttttatttttcgttttcggcgtgggttttttgagtcgtgttttatttttttttgattttttttcgttttagttggagaaaaggttttcggaagggtgatttggtgtcgttgg

SEQ ID NO: 3922 - DNA, 724 bp, Artificial Sequence
  chemically treated genomic DNA (Homo sapiens) CpG-island No: 3922
ccaacgacaccaaatcacccttccgaaaaccttttctccaactaaaacgaaaaaaaatcaaaaaaaaataaaacacgactcaaaaaacccacgccgaaaacgaaaaataaaactcacgctaacaaactaaaacgcgcgacccctccgcaaaaaaccgaaactcaaaaaacgaaaacgcgcctaaaaacaaaacgaaaacctttccaacccccgcgaactacgatacaacaaaaaactcgaccgcctacaccgaaaaattcctccaaaaacacaaacgtacctaaatatacgctcaacttcccgaacgaaaaacgtttctacacttaccctcgacttctaaactttatactttacgaatatactttatactttaatcctatatccctacaaccctataactacacgcgcacacgcaaacgcgcgcacacgcgaactaacgactcgctaacgatactaaaaactttcacaacccccctccgaacgcgttaaactctcccaaatcccacccctaacaccgtaacacccccaaacccactacgccctcgcactcgacgcgaatccctaaaaaaaaacgctcgctacgccctcgtctcccttacaaaaaacactaacccgcccgaccgaccgacttctccctccataaaaacgctcgcgcgcaccgcccgacaacgcgaaacgctccctaacgcctatcctcgcgaaccctcccacgcgaaacacttcc

SEQ ID NO: 3923 - DNA, 724 bp, Artificial Sequence
  chemically treated genomic DNA (Homo sapiens) CpG-island No: 3923
ttagcgatattaggttattttttcgggagttttttttttagttgggacgagagggaattaaaggaaagtaagatacggtttaggaggtttacgtcgagagcgaagagtgaagtttacgttggtaaattggagcgcgcggttttttcgtagaggatcggggtttaggaggcggggacgcgtttgaaaatagggcgggagtttttttaattttcgcgggttgcgatgtagtagaaaattcggtcgtttgtatcggggaatttttttagaaatataggcgtgtttgggtgtgcgtttaatttttcgggcgagggacgtttttgtatttgttttcggtttttgaattttgtattttgcgagtgtattttgtattttggttttgtgtttttgtagttttgtgattatacgcgtatacgtaggcgcgcgtatacgcgaattgacggttcgttggcgatgttggaggtttttatagttttttttcggacgcgttaagtttttttaggttttatttttgatatcgtggtatttttagatttattgcgttttcgtattcgacgcgggtttttgggggaaagcgttcgttgcgttttcgttttttttgtaggagatattggttcgttcggtcggtcggtttttttttttatggggacgttcgcgcgtatcgttcggtagcgcgggacgttttttgacgtttgttttcgcgggtttttttacgcggggtattttt

SEQ ID NO: 3924 - DNA, 724 bp, Artificial Sequence
  chemically treated genomic DNA (Homo sapiens) CpG-island No: 3924
aaaaataccccgcgtaaaaaaacccgcgaaaacaaacgtcaaaaaacgtcccgcgctaccgaacgatacgcgcgaacgtccccataaaaaaaaaaaccgaccgaccgaacgaaccaatatctcctacaaaaaaaacgaaaacgcaacgaacgctttcccccaaaaacccgcgtcgaatacgaaaacgcaataaatctaaaaataccacgatatcaaaaataaaacctaaaaaaacttaacgcgtccgaaaaaaaactataaaaacctccaacatcgccaacgaaccgtcaattcgcgtatacgcgcgcctacgtatacgcgtataatcacaaaactacaaaaacacaaaaccaaaatacaaaatacactcgcaaaatacaaaattcaaaaaccgaaaacaaatacaaaaacgtccctcgcccgaaaaattaaacgcacacccaaacacgcctatatttctaaaaaaattccccgatacaaacgaccgaattttctactacatcgcaacccgcgaaaattaaaaaaactcccgccctattttcaaacgcgtccccgcctcctaaaccccgatcctctacgaaaaaaccgcgcgctccaatttaccaacgtaaacttcactcttcgctctcgacgtaaacctcctaaaccgtatcttactttcctttaattccctctcgtcccaactaaaaaaaaaactcccgaaaaaataacctaatatcgctaa

SEQ ID NO: 3925 - DNA, 961 bp, Artificial Sequence
  chemically treated genomic DNA (Homo sapiens) CpG-island No: 3925
  unsure (42, 261)
tacgtttcggcgtttagtttcgtttcgattttttttaggagnttcgtttcgttttcgttttttttagaagtttcgtttatgtttcgtttttagcgttcgtaatttacggggcgggttttatcgtttagaagagcgtacggcgggcgttgtcggtttcgagcgttttcgttattattgtcgttttcggttttgtcggtcggttatgtttcgagtttcggttgtcgcgcgtatttagattcggcgatgaggagtggcgtcgancgtaggggtagtagcgtcgcggcgttttcgggttcgtcgtttttcggtcgcgcgcgtttcgtcggtttcgacgcgttttcggttttgtcgtcgttcgttgttggttagtttcgggttcgggattcgggcgatgttcgttcgtagtcgcgttttttgttttagtggagtaagtggaagaagaggatgggttcgtttatgtcggcggttatcgcgcggaggtcggtgtttgacgataaggaggacggtgagtgcgggtacggggacgacgtgggggtcgcgcgttattgtaggggcgggcgcggttgggcggttttttttcgtaggggttttttcggtgttcgggacggtttttcggggcgtttcggttttcggagaagttcgcgtcgggtggttgcggttttacgcgagttttgggcgttcgttcgcgtttttcgtttttagtggcggcgtcgtaggaggagtaggttgggttcgggttttcggggcgagggtttttcgcggttgtggcgttttcgggtttgcgcgcgttttcgtttatcgttcgtggtagttttgtttttcgtttttcgtgattcgttcgggtttacgtgcgggttcgtttgtattttgtagttagagaggcgtttatttgtgtcgttcgagtgcgagtgaggtttttgttttataggtggcggggttcggtcgtttagaggtttagttt

SEQ ID NO: 3926 - DNA, 961 bp, Artificial Sequence
  chemically treated genomic DNA (Homo sapiens) CpG-island No: 3926
  unsure (701, 920)
aaactaaacctctaaacgaccgaaccccgccacctataaaacaaaaacctcactcgcactcgaacgacacaaataaacgcctctctaactacaaaatacaaacgaacccgcacgtaaacccgaacgaatcacgaaaaacgaaaaacaaaactaccacgaacgataaacgaaaacgcgcgcaaacccgaaaacgccacaaccgcgaaaaaccctcgccccgaaaacccgaacccaacctactcctcctacgacgccgccactaaaaacgaaaaacgcgaacgaacgcccaaaactcgcgtaaaaccgcaaccacccgacgcgaacttctccgaaaaccgaaacgccccgaaaaaccgtcccgaacaccgaaaaaacccctacgaaaaaaaaccgcccaaccgcgcccgcccctacaataacgcgcgacccccacgtcgtccccgtacccgcactcaccgtcctccttatcgtcaaacaccgacctccgcgcgataaccgccgacataaacgaacccatcctcttcttccacttactccactaaaacaaaaaacgcgactacgaacgaacatcgcccgaatcccgaacccgaaactaaccaacaacgaacgacgacaaaaccgaaaacgcgtcgaaaccgacgaaacgcgcgcgaccgaaaaacgacgaacccgaaaacgccgcgacgctactacccctacgntcgacgccactcctcatcgccgaatctaaatacgcgcgacaaccgaaactcgaaacataaccgaccgacaaaaccgaaaacgacaataataacgaaaacgctcgaaaccgacaacgcccgccgtacgctcttctaaacgataaaacccgccccgtaaattacgaacgctaaaaacgaaacataaacgaaacttctaaaaaaaacgaaaacgaaacgaanctcctaaaaaaaatcgaaacgaaactaaacgccgaaacgta

SEQ ID NO: 3927 - DNA, 961 bp, Artificial Sequence
  chemically treated genomic DNA (Homo sapiens) CpG-island No: 3927
  unsure (701, 920)
agattgagtttttgagcggtcgggtttcgttatttgtggggtaggagttttattcgtattcgggcggtataggtgagcgtttttttaattgtaaagtataaacgagttcgtacgtgggttcgagcggattacggaaagcggaaagtagggttgttacgggcggtgggcggaggcgcgcgtaagttcggagacgttatagtcgcgggggattttcgtttcgagggttcgggtttagtttgttttttttgcggcgtcgttattagaaacggaggacgcgggcgggcgtttagaattcgcgtggggtcgtagttattcggcgcgagttttttcggaagtcggggcgtttcgggaagtcgtttcggatatcgggggaatttttgcgggaaaaagtcgtttagtcgcgttcgtttttgtaatagcgcgcggtttttacgtcgttttcgtgttcgtatttatcgttttttttgtcgttaaatatcggttttcgcgcggtggtcgtcgatatggacgagtttattttttttttttatttgttttattgaaatagggggcgcggttgcgaacggatatcgttcgagtttcgggttcggggttggttagtagcgggcggcggtagggtcgaaggcgcgtcggagtcggcggggcgcgcgcggtcggggggcggcgagttcggggacgtcgcggcgttgttgtttttgcgntcggcgttattttttatcgtcgggtttgggtgcgcgcggtagtcggaattcggggtatggtcggtcggtagggtcgggagcggtagtggtagcgggagcgttcggggtcggtagcgttcgtcgtgcgtttttttgggcggtggaattcgtttcgtagattgcgagcgttgggggcggggtatgggcggggtttttggaaggggcgggggcggggcggantttttggaaggggtcgaggcggagttgagcgtcggggcgtg

SEQ ID NO: 3928 - DNA, 961 bp, Artificial Sequence
  chemically treated genomic DNA (Homo sapiens) CpG-island No: 3928
  unsure (42, 261)
cacgccccgacgctcaactccgcctcgaccccttccaaaaantccgccccgcccccgccccttccaaaaaccccgcccataccccgcccccaacgctcgcaatctacgaaacgaattccaccgcccaaaaaaacgcacgacgaacgctaccgaccccgaacgctcccgctaccactaccgctcccgaccctaccgaccgaccataccccgaattccgactaccgcgcgcacccaaacccgacgataaaaaataacgccgancgcaaaaacaacaacgccgcgacgtccccgaactcgccgccccccgaccgcgcgcgccccgccgactccgacgcgccttcgaccctaccgccgcccgctactaaccaaccccgaacccgaaactcgaacgatatccgttcgcaaccgcgccccctatttcaataaaacaaataaaaaaaaaaaataaactcgtccatatcgacgaccaccgcgcgaaaaccgatatttaacgacaaaaaaaacgataaatacgaacacgaaaacgacgtaaaaaccgcgcgctattacaaaaacgaacgcgactaaacgactttttcccgcaaaaattcccccgatatccgaaacgacttcccgaaacgccccgacttccgaaaaaactcgcgccgaataactacgaccccacgcgaattctaaacgcccgcccgcgtcctccgtttctaataacgacgccgcaaaaaaaacaaactaaacccgaaccctcgaaacgaaaatcccccgcgactataacgtctccgaacttacgcgcgcctccgcccaccgcccgtaacaaccctactttccgctttccgtaatccgctcgaacccacgtacgaactcgtttatactttacaattaaaaaaacgctcacctataccgcccgaatacgaataaaactcctaccccacaaataacgaaacccgaccgctcaaaaactcaatct

SEQ ID NO: 3929 - DNA, 685 bp, Artificial Sequence
  chemically treated genomic DNA (Homo sapiens) CpG-island No: 3929
  unsure (53)
cgcgttatcgaattgttcgttaggtttaaggcgcgatatttcgacggtaaggntttcgtcgtgatttatggcgatgtttgtttgtcgaatattatggtggaaaatggtcgtttttttggatttatcgattgtggtcggttgggtgtggcggattttattaggatatagcgttggttattcgtgatattgttgaagagtttggcggcgaatgggttgatcgttttttcgtgttttacggtatcgtcgttttcgattcgtagcgtatcgttttttatcgtttttttgacgagtttttttgagcgggattttggggttcgaaatgatcgattaagcgacgtttaatttgttattacgagatttcgattttatcgtcgttttttatgaaaggttgggtttcggaatcgtttttcgggacgtcggttggatgattttttagcgcggggattttatgttggagtttttcgtttatttcgggttcgattttttcgcgagttggtttagttgttgtttgaggtggacgatttcgcggagttttatcggtagtgtaaattcgtcggtattttaggaaattagtagcggttattcgcgtatttatgttttcgaattgtaggagtggggaggtacgatggtcgttttggttcggaatttttgtgaaggaattttatttttgtggtgtgatataatt

SEQ ID NO: 3930 - DNA, 685 bp, Artificial Sequence
  chemically treated genomic DNA (Homo sapiens) CpG-island No: 3930
  unsure (633)
aattatatcacaccacaaaaataaaattccttcacaaaaattccgaaccaaaacgaccatcgtacctccccactcctacaattcgaaaacataaatacgcgaataaccgctactaatttcctaaaataccgacgaatttacactaccgataaaactccgcgaaatcgtccacctcaaacaacaactaaaccaactcgcgaaaaaatcgaacccgaaataaacgaaaaactccaacataaaatccccgcgctaaaaaatcatccaaccgacgtcccgaaaaacgattccgaaacccaacctttcataaaaaacgacgataaaatcgaaatctcgtaataacaaattaaacgtcgcttaatcgatcatttcgaaccccaaaatcccgctcaaaaaaactcgtcaaaaaaacgataaaaaacgatacgctacgaatcgaaaacgacgataccgtaaaacacgaaaaaacgatcaacccattcgccgccaaactcttcaacaatatcacgaataaccaacgctatatcctaataaaatccgccacacccaaccgaccacaatcgataaatccaaaaaaacgaccattttccaccataatattcgacaaacaaacatcgccataaatcacgacgaaanccttaccgtcgaaatatcgcgccttaaacctaacgaacaattcgataacgcg

SEQ ID NO: 3931 - DNA, 685 bp, Artificial Sequence
  chemically treated genomic DNA (Homo sapiens) CpG-island No: 3931
  unsure (633)
aattatgttatattatagaagtaaggtttttttataaagatttcggattaaagcggttatcgtgtttttttatttttgtagttcgggggtatggatgcgcggatagtcgttgttggttttttgggatgtcgacggatttgtattgtcggtagaatttcgcgaggtcgtttattttaggtagtagttgaattaattcgcgaggggatcgagttcggggtgggcgaagaattttagtatgagattttcgcgttggaggattatttagtcggcgtttcggaaaacgatttcgaagtttaattttttatagaaggcggcggtggaatcgaaatttcgtgatggtaggttgggcgtcgtttggtcggttatttcgaattttagagtttcgtttagaagaattcgttaagaaggcgatagaaggcgatgcgttgcgaatcgggagcggcgatatcgtaaagtacgaggaagcggttagtttattcgtcgttaagttttttagtaatattacgggtagttaacgttatgttttgatagggttcgttatatttagtcggttatagtcgatgaatttagaaaagcggttattttttattatgatattcggtaagtaggtatcgttatgggttacgacgaganttttgtcgtcgggatgtcgcgttttgagtttggcgaatagttcggtggcgcg

SEQ ID NO: 3932 - DNA, 685 bp, Artificial Sequence
  chemically treated genomic DNA (Homo sapiens) CpG-island No: 3932
  unsure (53)
cgcgccaccgaactattcgccaaactcaaaacgcgacatcccgacgacaaaantctcgtcgtaacccataacgatacctacttaccgaatatcataataaaaaataaccgcttttctaaattcatcgactataaccgactaaatataacgaaccctatcaaaacataacgttaactacccgtaatattactaaaaaacttaacgacgaataaactaaccgcttcctcgtactttacgatatcgccgctcccgattcgcaacgcatcgccttctatcgccttcttaacgaattcttctaaacgaaactctaaaattcgaaataaccgaccaaacgacgcccaacctaccatcacgaaatttcgattccaccgccgccttctataaaaaattaaacttcgaaatcgttttccgaaacgccgactaaataatcctccaacgcgaaaatctcatactaaaattcttcgcccaccccgaactcgatcccctcgcgaattaattcaactactacctaaaataaacgacctcgcgaaattctaccgacaatacaaatccgtcgacatcccaaaaaaccaacaacgactatccgcgcatccatacccccgaactacaaaaataaaaaaacacgataaccgctttaatccgaaatctttataaaaaaaccttacttctataatataacataatt

SEQ ID NO: 3933 - DNA, 858 bp, Artificial Sequence
  chemically treated genomic DNA (Homo sapiens) CpG-island No: 3933
  unsure (109, 126)
ttattggcgatcgttagcggggttataaataaattgtgttgcggtaaatgtatttgtaacgtcgggaattgtttgcgaaatagtttcgttacgttcggttgtatataanagtcgttcgttagttanaaattagtaatgttttgttttttaatatgtcgggcgataatgttcgttattttttcgtatatcggttttatcgtaggttaaatttttttatcgtgatcgcgtttgtattgtttcgttttttttagcgaaatacggcgattttcggcgaaagttaaaaagatgtgatgttcgtcggtggttttattcgtcgagtacgttattttgtttttttttataatggtaatgtcggtagtgtcgtcgtcgatatttattatatcggcgttgtttagttgtagtaaattcgtaattgcggttggtttatttagtatatggtttatttttagttcggtagattttagtacgttgatggaaatacgcgggttcgtatttggaggaaatgaagtcgtcgtatggttaaaacgacgatcgaattgttgttcgagcgtgtcgaaatggcgacgaataatggtgatagcgtcgaagaaattttagacgatgtcgtcgcgaattatatcggtttagtcgaggtatatcgttattggttgatcgtcgcggtcgataattatcgatattatatcgtaggtgtttagatttatttttagttatagcggagattcgtcgcggggggcgttttggttatatagcgttgtcgtcgtttgtagaacgttggggtaagttattgttcgtcgtgcgttatttgttattttttaaataatgcgaaacgtatcgattaatatatagcgacgtagacgg

SEQ ID NO: 3934 - DNA, 858 bp, Artificial Sequence
  chemically treated genomic DNA (Homo sapiens) CpG-island No: 3934
  unsure (733, 750)
ccgtctacgtcgctatatattaatcgatacgtttcgcattatttaaaaaataacaaataacgcacgacgaacaataacttaccccaacgttctacaaacgacgacaacgctatataaccaaaacgccccccgcgacgaatctccgctataactaaaaataaatctaaacacctacgatataatatcgataattatcgaccgcgacgatcaaccaataacgatatacctcgactaaaccgatataattcgcgacgacatcgtctaaaatttcttcgacgctatcaccattattcgtcgccatttcgacacgctcgaacaacaattcgatcgtcgttttaaccatacgacgacttcatttcctccaaatacgaacccgcgtatttccatcaacgtactaaaatctaccgaactaaaaataaaccatatactaaataaaccaaccgcaattacgaatttactacaactaaacaacgccgatataataaatatcgacgacgacactaccgacattaccattataaaaaaaaacaaaataacgtactcgacgaataaaaccaccgacgaacatcacatctttttaactttcgccgaaaatcgccgtatttcgctaaaaaaaacgaaacaatacaaacgcgatcacgataaaaaaatttaacctacgataaaaccgatatacgaaaaaataacgaacattatcgcccgacatattaaaaaacaaaacattactaatttntaactaacgaacgactnttatatacaaccgaacgtaacgaaactatttcgcaaacaattcccgacgttacaaatacatttaccgcaacacaatttatttataaccccgctaacgatcgccaataa

SEQ ID NO: 3935 - DNA, 858 bp, Artificial Sequence
  chemically treated genomic DNA (Homo sapiens) CpG-island No: 3935
  unsure (733, 750)
tcgtttgcgtcgttgtgtattagtcgatgcgtttcgtattgtttaaggagtaatagatggcgtacgacgaataatggtttattttaacgttttgtaaacggcggtaacgttgtgtaattagaacgtttttcgcgacggattttcgttgtggttgggggtggatttgggtatttgcgatgtggtgtcgatggttgtcgatcgcgacggttagttagtggcggtatgtttcgattgggtcgatgtggttcgcgacggtatcgtttgggattttttcggcgttgttattattgttcgtcgttatttcgatacgttcgagtagtaattcggtcgtcgttttagttatgcggcgattttattttttttaggtacggattcgcgtatttttattaacgtgttggaatttgtcggattggaagtgagttatgtgttggatgagttaatcgtagttgcggatttgttgtaattggataacgtcggtgtagtggatatcggcggcggtattatcggtattgttattgtgaaaaagggtaaggtgacgtattcggcggatgaagttatcggcggatattatatttttttgattttcgtcggaaatcgtcgtatttcgttggaagaggcggagtagtataagcgcggttacggtgaagagatttggtttgcggtgaaatcggtgtacgaaaaaatggcggatattgtcgttcggtatattgaagggtagggtattattgatttntggttggcgggcggttnttgtatgtaatcgggcgtggcggaattgtttcgtaaataattttcggcgttataggtgtatttatcgtagtatagtttgtttatgatttcgttggcgatcgttagtag

SEQ ID NO: 3936 - DNA, 858 bp, Artificial Sequence
  chemically treated genomic DNA (Homo sapiens) CpG-island No: 3936
  unsure (109, 126)
ctactaacgatcgccaacgaaatcataaacaaactatactacgataaatacacctataacgccgaaaattatttacgaaacaattccgccacgcccgattacatacaanaaccgcccgccaaccanaaatcaataataccctacccttcaatataccgaacgacaatatccgccattttttcgtacaccgatttcaccgcaaaccaaatctcttcaccgtaaccgcgcttatactactccgcctcttccaacgaaatacgacgatttccgacgaaaatcaaaaaaatataatatccgccgataacttcatccgccgaatacgtcaccttaccctttttcacaataacaataccgataataccgccgccgatatccactacaccgacgttatccaattacaacaaatccgcaactacgattaactcatccaacacataactcacttccaatccgacaaattccaacacgttaataaaaatacgcgaatccgtacctaaaaaaaataaaatcgccgcataactaaaacgacgaccgaattactactcgaacgtatcgaaataacgacgaacaataataacaacgccgaaaaaatcccaaacgataccgtcgcgaaccacatcgacccaatcgaaacataccgccactaactaaccgtcgcgatcgacaaccatcgacaccacatcgcaaatacccaaatccacccccaaccacaacgaaaatccgtcgcgaaaaacgttctaattacacaacgttaccgccgtttacaaaacgttaaaataaaccattattcgtcgtacgccatctattactccttaaacaatacgaaacgcatcgactaatacacaacgacgcaaacga

SEQ ID NO: 3937 - DNA, 522 bp, Artificial Sequence
  chemically treated genomic DNA (Homo sapiens) CpG-island No: 3937
  unsure (303)
aacgtacgcgcgttggttatttttttatcggttggcgtggtgatggttatggtggtttagtttttttcgtttagttttagttcggtaatgtacggttcgtttttaacgaaaatgttggtattaatagtattcgttatttggtttatgttttcgatgttgcgcgagtgtattgtcgtcgtgtggtggtaatcgttttttagttttatcgttagcgtaatggtattcgttacgttggcgacgcgtacgacgggtaatatcggtattattagtttagttacggtaaacggatgttttgcggtggtntttataaatagtaggcgcgttttttgcggaattttaaggtcgattgtcgtcgcgattttgtttgcgtcgcgattaatttagttacggttgacggtgtttttttcgcgttcgtcgatattttttagtaatatcggttgtagttgttgcgtttgttttgcggttagttttatcgcgtgttggttttttattagacgtattagtttatcggttacgttatta

SEQ ID NO: 3938 - DNA, 522 bp, Artificial Sequence
  chemically treated genomic DNA (Homo sapiens) CpG-island No: 3938
  unsure (220)
taataacgtaaccgataaactaatacgtctaataaaaaaccaacacgcgataaaactaaccgcaaaacaaacgcaacaactacaaccgatattactaaaaaatatcgacgaacgcgaaaaaaacaccgtcaaccgtaactaaattaatcgcgacgcaaacaaaatcgcgacgacaatcgaccttaaaattccgcaaaaaacgcgcctactatttataaanaccaccgcaaaacatccgtttaccgtaactaaactaataataccgatattacccgtcgtacgcgtcgccaacgtaacgaataccattacgctaacgataaaactaaaaaacgattaccaccacacgacgacaatacactcgcgcaacatcgaaaacataaaccaaataacgaatactattaataccaacattttcgttaaaaacgaaccgtacattaccgaactaaaactaaacgaaaaaaactaaaccaccataaccatcaccacgccaaccgataaaaaaataaccaacgcgcgtacgtt

SEQ ID NO: 3939 - DNA, 522 bp, Artificial Sequence
  chemically treated genomic DNA (Homo sapiens) CpG-island No: 3939
  unsure (220)
tgatagcgtagtcgatgaattgatgcgtttgatggaaggttagtacgcggtgaaattgatcgtagaataggcgtagtagttgtaatcggtgttgttgaaaaatatcgacgagcgcggaaaaggtatcgttagtcgtgattgggttggtcgcgacgtaggtaaaatcgcggcggtaatcggttttaaagtttcgtaagaaacgcgtttgttgtttgtgganattatcgtagaatattcgtttgtcgtgattgaattgatgatgtcggtgttgttcgtcgtgcgcgtcgttaacgtggcggatgttattgcgttagcggtgaaattggaaggcggttgttattatacggcggtaatgtattcgcgtaatatcgaaaatatgaattagatggcgaatgttattgatattagtattttcgttaagaacggatcgtgtattgtcgggttggggttgggcggggaaggttggattattatgattattattacgttaatcggtgaaggggtaattagcgcgcgtacgtt

SEQ ID NO: 3940 - DNA, 522 bp, Artificial Sequence
  chemically treated genomic DNA (Homo sapiens) CpG-island No: 3940
  unsure (303)
aacgtacgcgcgctaattaccccttcaccgattaacgtaataataatcataataatccaaccttccccgcccaaccccaacccgacaatacacgatccgttcttaacgaaaatactaatatcaataacattcgccatctaattcatattttcgatattacgcgaatacattaccgccgtataataacaaccgccttccaatttcaccgctaacgcaataacatccgccacgttaacgacgcgcacgacgaacaacaccgacatcatcaattcaatcacgacaaacgaatattctacgataatntccacaaacaacaaacgcgtttcttacgaaactttaaaaccgattaccgccgcgattttacctacgtcgcgaccaacccaatcacgactaacgataccttttccgcgctcgtcgatatttttcaacaacaccgattacaactactacgcctattctacgatcaatttcaccgcgtactaaccttccatcaaacgcatcaattcatcgactacgctatca

SEQ ID NO: 3941 - DNA, 1001 bp, Artificial Sequence
  chemically treated genomic DNA (Homo sapiens) CpG-island No: 3941
tgttcgcgtgcgttgcgtttaggttgtgcggtcgcgtaggaatcgagggaggttttttcgggaaagagacgcggaggattcggggagcggcgcgcgggggcgggaatgtcgggaggggtttttcgggggattcggtcgtttttagttttaattcggtttttttgggggatttatttcggggttatcgtaggagtttttgtattcgggcgcgggcggttttttgattttatttcgagttggaagggtcggagttattgtttcgtacggcggggtaggaatttcgcgtcggcggcgggattggtgcgttttcgttaagttaggttgtttttattgtggttagggcgcgggtagagtcgtcggtgattgtggcgtttaaattttacggggacgttttgagtacgggttttcgggacggttatagttacgcgcggtcgttgtttttacgaatttgagtttcgagttgtttgcgttttcgcgttttcgggtcgtttgcgcgtcggcgtggggcgcggggatcgacgtgatcgggtgggaggtagttatgtcgagggtaggacggtgtttttcgcgtattggtttggggttcgtacggcgttttcggcggtcggagttaggcggaggcgtaggttcggttttcgaagttatgcggggtttcggcgtagacgcggggtttacggagtagtttcgattttcggttaggttttgatcgcggttgttttagcgtttacgtcgttcgcggaaattagaaagatcggcgggtttcgttttacggttacgttcgttttagttagtcgagtttttcgggttgagtaaagaggttggagttcgggaggcgggcgttggggcgggattttagtcgggaatcgatcggcggtttatttggggttataggagaggggtcgcggaacggatcgtgtcgtcgttgattttggtttttttcggattttgtcggtttagttaggttattgggtttttaaggggaagttggcgggggtggggcg

SEQ ID NO: 3942 - DNA, 1001 bp, Artificial Sequence
  chemically treated genomic DNA (Homo sapiens) CpG-island No: 3942
cgccccacccccgccaacttccccttaaaaacccaataacctaactaaaccgacaaaatccgaaaaaaaccaaaatcaacgacgacacgatccgttccgcgacccctctcctataaccccaaataaaccgccgatcgattcccgactaaaatcccgccccaacgcccgcctcccgaactccaacctctttactcaacccgaaaaactcgactaactaaaacgaacgtaaccgtaaaacgaaacccgccgatctttctaatttccgcgaacgacgtaaacgctaaaacaaccgcgatcaaaacctaaccgaaaatcgaaactactccgtaaaccccgcgtctacgccgaaaccccgcataacttcgaaaaccgaacctacgcctccgcctaactccgaccgccgaaaacgccgtacgaaccccaaaccaatacgcgaaaaacaccgtcctaccctcgacataactacctcccacccgatcacgtcgatccccgcgccccacgccgacgcgcaaacgacccgaaaacgcgaaaacgcaaacaactcgaaactcaaattcgtaaaaacaacgaccgcgcgtaactataaccgtcccgaaaacccgtactcaaaacgtccccgtaaaatttaaacgccacaatcaccgacgactctacccgcgccctaaccacaataaaaacaacctaacttaacgaaaacgcaccaatcccgccgccgacgcgaaattcctaccccgccgtacgaaacaataactccgacccttccaactcgaaataaaatcaaaaaaccgcccgcgcccgaatacaaaaactcctacgataaccccgaaataaatcccccaaaaaaaccgaattaaaactaaaaacgaccgaatcccccgaaaaacccctcccgacattcccgcccccgcgcgccgctccccgaatcctccgcgtctctttcccgaaaaaacctccctcgattcctacgcgaccgcacaacctaaacgcaacgcacgcgaaca

SEQ ID NO: 3943 - DNA, 1001 bp, Artificial Sequence
  chemically treated genomic DNA (Homo sapiens) CpG-island No: 3943
cgttttattttcgttagtttttttttgagggtttagtgatttaattgggtcggtagggttcgaggaagattagggttagcggcggtacggttcgtttcgcgattttttttttgtgattttaggtaggtcgtcgatcggttttcggttgaggtttcgttttagcgttcgtttttcgggttttaatttttttgtttagttcgggaggttcggttggttggggcgggcgtaatcgtggggcgaggttcgtcggtttttttgattttcgcgggcggcgtgggcgttgaggtagtcgcggttaggatttggtcgggagtcggggttgtttcgtggatttcgcgtttgcgtcgaaatttcgtatggtttcgggggtcggatttgcgttttcgtttaatttcggtcgtcggagacgtcgtgcggattttaagttagtgcgcggaagatatcgttttattttcggtatggttgttttttattcggttacgtcggttttcgcgttttacgtcgacgcgtaggcgattcggggacgcggagacgtagatagttcgggatttaggttcgtgggagtagcggtcgcgcgtggttatgatcgtttcgggggttcgtgtttagggcgttttcgtgaggtttgggcgttatagttatcggcggttttgttcgcgttttggttatagtggggatagtttggtttggcggggacgtattagtttcgtcgtcgacgcggagtttttatttcgtcgtgcgaggtagtggtttcggtttttttagttcgggatggagttagggagtcgttcgcgttcgaatgtagaggtttttgcgatggtttcggagtgagttttttagaggagtcggattagggttggaggcggtcgagtttttcgagaggtttttttcgatattttcgttttcgcgcgtcgtttttcgggtttttcgcgtttttttttcgggaaagtttttttcggtttttgcgcggtcgtatagtttggacgtagcgtacgcgggta

SEQ ID NO: 3944 - DNA, 1001 bp, Artificial Sequence
  chemically treated genomic DNA (Homo sapiens) CpG-island No: 3944
tacccgcgtacgctacgtccaaactatacgaccgcgcaaaaaccgaaaaaaactttcccgaaaaaaaaacgcgaaaaacccgaaaaacgacgcgcgaaaacgaaaatatcgaaaaaaacctctcgaaaaactcgaccgcctccaaccctaatccgactcctctaaaaaactcactccgaaaccatcgcaaaaacctctacattcgaacgcgaacgactccctaactccatcccgaactaaaaaaaccgaaaccactacctcgcacgacgaaataaaaactccgcgtcgacgacgaaactaatacgtccccgccaaaccaaactatccccactataaccaaaacgcgaacaaaaccgccgataactataacgcccaaacctcacgaaaacgccctaaacacgaacccccgaaacgatcataaccacgcgcgaccgctactcccacgaacctaaatcccgaactatctacgtctccgcgtccccgaatcgcctacgcgtcgacgtaaaacgcgaaaaccgacgtaaccgaataaaaaacaaccataccgaaaataaaacgatatcttccgcgcactaacttaaaatccgcacgacgtctccgacgaccgaaattaaacgaaaacgcaaatccgacccccgaaaccatacgaaatttcgacgcaaacgcgaaatccacgaaacaaccccgactcccgaccaaatcctaaccgcgactacctcaacgcccacgccgcccgcgaaaatcaaaaaaaccgacgaacctcgccccacgattacgcccgccccaaccaaccgaacctcccgaactaaacaaaaaaattaaaacccgaaaaacgaacgctaaaacgaaacctcaaccgaaaaccgatcgacgacctacctaaaatcacaaaaaaaaaatcgcgaaacgaaccgtaccgccgctaaccctaatcttcctcgaaccctaccgacccaattaaatcactaaaccctcaaaaaaaaactaacgaaaataaaacg

SEQ ID NO: 3945 - DNA, 697 bp, Artificial Sequence
  chemically treated genomic DNA (Homo sapiens) CpG-island No: 3945
cgtcgtacggttttttgggattcgtagttttgtagtgttattcgggagttgtagttttttttttataatcggttgggcgaggcggcgttagcgattagagtagcgttgggtgtttaggggttaagatgcggcgcgtcggggacggagagacggagtcgcgtcgttttcgagtgggggtttcggttcggattttggcgggggagttcgcggtagtggttggggaagtcgaagttaagcgtcgtatgggattttgggcgttgtgagcggcggcgagtaggtgagaggttggttggcggttcgcgataggtagtaaagcggtgtgtgtcgggcggtgatacgtggacgttataggaaagagaggaagcgttttagagtcgatgtcgggtggtcgcgggagtcgggtcggagtaagtggttttaggtcgtttgttgggggtaggcgggtagaggtagcgtttttacggttatttttgggggacgtcggagggggagagcggggtgtcggaaatataattcgcggttgggggttaggggttcggatttggggtcgaaggttgagatttttatgtaaggatgtttagtgagtttttcgagttcggcgtcgtagtttttttttcggagttacgtggggtggggggagtaattttttcgggagaatttgtttgttttttttttttttttaggcggttcgggtatt

SEQ ID NO: 3946 - DNA, 697 bp, Artificial Sequence
  chemically treated genomic DNA (Homo sapiens) CpG-island No: 3946
aatacccgaaccgcctaaaaaaaaaaaaaaaacaaacaaattctcccgaaaaaattactccccccaccccacgtaactccgaaaaaaaaactacgacgccgaactcgaaaaactcactaaacatccttacataaaaatctcaaccttcgaccccaaatccgaacccctaacccccaaccgcgaattatatttccgacaccccgctctccccctccgacgtcccccaaaaataaccgtaaaaacgctacctctacccgcctacccccaacaaacgacctaaaaccacttactccgacccgactcccgcgaccacccgacatcgactctaaaacgcttcctctctttcctataacgtccacgtatcaccgcccgacacacaccgctttactacctatcgcgaaccgccaaccaacctctcacctactcgccgccgctcacaacgcccaaaatcccatacgacgcttaacttcgacttccccaaccactaccgcgaactcccccgccaaaatccgaaccgaaacccccactcgaaaacgacgcgactccgtctctccgtccccgacgcgccgcatcttaacccctaaacacccaacgctactctaatcgctaacgccgcctcgcccaaccgattataaaaaaaaaactacaactcccgaataacactacaaaactacgaatcccaaaaaaccgtacgacg

SEQ ID NO: 3947 - DNA, 697 bp, Artificial Sequence
  chemically treated genomic DNA (Homo sapiens) CpG-island No: 3947
gatgttcgggtcgtttagagggggaggggaggtagataagttttttcgggaaaattgttttttttattttacgtggtttcgaaaagggaattgcggcgtcgggttcggggagtttattgggtatttttatatggaggttttagttttcgattttaagttcgaatttttgatttttagtcgcgggttatgttttcgatatttcgtttttttttttcggcgttttttaggaatggtcgtagagacgttgtttttgttcgtttatttttagtaaacggtttagggttatttgtttcggttcggttttcgcggttattcggtatcgattttaaggcgtttttttttttttttgtggcgtttacgtgttatcgttcggtatatatcgttttgttgtttgtcgcgggtcgttagttaattttttatttgttcgtcgtcgtttatagcgtttaaagttttatacggcgtttggtttcgatttttttaattattgtcgcgggttttttcgttagggttcggatcggggtttttattcgggggcggcgcgatttcgttttttcgttttcggcgcgtcgtattttggtttttgaatatttagcgttgttttgatcgttggcgtcgtttcgtttagtcgattgtgggaaaggaattataattttcgaatgatattgtaagattacgaattttagagagtcgtgcggcg

SEQ ID NO: 3948 - DNA, 697 bp, Artificial Sequence
  chemically treated genomic DNA (Homo sapiens) CpG-island No: 3948
cgccgcacgactctctaaaattcgtaatcttacaatatcattcgaaaattataattcctttcccacaatcgactaaacgaaacgacgccaacgatcaaaacaacgctaaatattcaaaaaccaaaatacgacgcgccgaaaacgaaaaaacgaaatcgcgccgcccccgaataaaaaccccgatccgaaccctaacgaaaaaacccgcgacaataattaaaaaaatcgaaaccaaacgccgtataaaactttaaacgctataaacgacgacgaacaaataaaaaattaactaacgacccgcgacaaacaacaaaacgatatataccgaacgataacacgtaaacgccacaaaaaaaaaaaaaaacgccttaaaatcgataccgaataaccgcgaaaaccgaaccgaaacaaataaccctaaaccgtttactaaaaataaacgaacaaaaacaacgtctctacgaccattcctaaaaaacgccgaaaaaaaaaaacgaaatatcgaaaacataacccgcgactaaaaatcaaaaattcgaacttaaaatcgaaaactaaaacctccatataaaaatacccaataaactccccgaacccgacgccgcaattcccttttcgaaaccacgtaaaataaaaaaaacaattttcccgaaaaaacttatctacctcccctccccctctaaacgacccgaacatc

SEQ ID NO: 3949 - DNA, 815 bp, Artificial Sequence
  chemically treated genomic DNA (Homo sapiens) CpG-island No: 3949
  unsure (733, 751)
gttgtatacgtttgatttcgggttatttgtttattcgattattaagcgaaatatcgtatcgagcgagtacgtattcggatggaagtcggttttgtcgattaggatgatttggacgaagagtattaggggttcgcgttatcgaattgttcgttaggtttaaggcgcgtatgttcgacggcgaggatttcgtcgtgatttatggcgatgtttgtttgtcgaatattatggtggaaaatggtcgtttttttggatttatcgattgtggtcggttgggtgtggcggatcgttattaggatatagcgttggttattcgtgatattgttgaagagtttggcggcgaatgggttgatcgttttttcgtgttttacggtatggtcgttttcgattcgtagcgatcgttttttatcgtttttttgacgagtttttttgagcgggattttggggttcgaaatgatcgattaagcgacgtttaatttgttattacgagatttcgattttatcgtcgttttttatgaaaggttgggtttcggaatcgtttttcgggacgtcggttggatgattttttagcgcggggattttatgttggagtttttcgtttatttcgggttcgattttttcgcgagttggtttagttgttgtttgaggttggacgattcgcggagttttatcggtagtgtaaattcgtcggtatttaggaaattagtagcggttattcgcgtatttatgttttcgnattgtaggagtggggagntacgatggtcgttttggttcgggatttttgtgaaggaattttatttttgtggtgtgaatataat

SEQ ID NO: 3950 - DNA, 815 bp, Artificial Sequence
  chemically treated genomic DNA (Homo sapiens) CpG-island No: 3950
  unsure (65, 83)
attatattcacaccacaaaaataaaattccttcacaaaaatcccgaaccaaaacgaccatcgtanctccccactcctacaatncgaaaacataaatacgcgaataaccgctactaatttcctaaataccgacgaatttacactaccgataaaactccgcgaatcgtccaacctcaaacaacaactaaaccaactcgcgaaaaaatcgaacccgaaataaacgaaaaactccaacataaaatccccgcgctaaaaaatcatccaaccgacgtcccgaaaaacgattccgaaacccaacctttcataaaaaacgacgataaaatcgaaatctcgtaataacaaattaaacgtcgcttaatcgatcatttcgaaccccaaaatcccgctcaaaaaaactcgtcaaaaaaacgataaaaaacgatcgctacgaatcgaaaacgaccataccgtaaaacacgaaaaaacgatcaacccattcgccgccaaactcttcaacaatatcacgaataaccaacgctatatcctaataacgatccgccacacccaaccgaccacaatcgataaatccaaaaaaacgaccattttccaccataatattcgacaaacaaacatcgccataaatcacgacgaaatcctcgccgtcgaacatacgcgccttaaacctaacgaacaattcgataacgcgaacccctaatactcttcgtccaaatcatcctaatcgacaaaaccgacttccatccgaatacgtactcgctcgatacgatatttcgcttaataatcgaataaacaaataacccgaaatcaaacgtatacaac

SEQ ID NO: 3951 - DNA, 815 bp, Artificial Sequence
  chemically treated genomic DNA (Homo sapiens) CpG-island No: 3951
  unsure (65, 83)
attatgtttatattatagaagtaaggtttttttataaagatttcggattaaagcggttatcgtgnttttttatttttgtagtncgggggtatggatgcgcggatagtcgttgttggttttttggatgtcgacggatttgtattgtcggtagaatttcgcgagtcgtttagttttaggtagtagttgaattaattcgcgaggggatcgagttcggggtgggcgaagaattttagtatgagattttcgcgttggaggattatttagtcggcgtttcggaaaacgatttcgaagtttaattttttatagaaggcggcggtggaatcgaaatttcgtgatggtaggttgggcgtcgtttggtcggttatttcgaattttagagtttcgtttagaagaattcgttaagaaggcgatagaaggcgatcgttgcgaatcgggagcggttatatcgtaaagtacgaggaagcggttagtttattcgtcgttaagttttttagtaatattacgggtagttaacgttatgttttgatagcggttcgttatatttagtcggttatagtcgatgaatttagaaaagcggttattttttattatgatattcggtaagtaggtatcgttatgggttacgacgagattttcgtcgtcgggtatgcgcgttttgagtttggcgaatagttcggtggcgcgagtttttgatgtttttcgtttagattattttgatcgataagatcggtttttattcgagtacgtgttcgttcgatgcgatgtttcgtttggtggtcgaatgggtaggtagttcggaattaagcgtatgtagt

SEQ ID NO: 3952 - DNA, 815 bp, Artificial Sequence
  chemically treated genomic DNA (Homo sapiens) CpG-island No: 3952
  unsure (733, 751)
actacatacgcttaattccgaactacctacccattcgaccaccaaacgaaacatcgcatcgaacgaacacgtactcgaataaaaaccgatcttatcgatcaaaataatctaaacgaaaaacatcaaaaactcgcgccaccgaactattcgccaaactcaaaacgcgcatacccgacgacgaaaatctcgtcgtaacccataacgatacctacttaccgaatatcataataaaaaataaccgcttttctaaattcatcgactataaccgactaaatataacgaaccgctatcaaaacataacgttaactacccgtaatattactaaaaaacttaacgacgaataaactaaccgcttcctcgtactttacgatataaccgctcccgattcgcaacgatcgccttctatcgccttcttaacgaattcttctaaacgaaactctaaaattcgaaataaccgaccaaacgacgcccaacctaccatcacgaaatttcgattccaccgccgccttctataaaaaattaaacttcgaaatcgttttccgaaacgccgactaaataatcctccaacgcgaaaatctcatactaaaattcttcgcccaccccgaactcgatcccctcgcgaattaattcaactactacctaaaactaaacgactcgcgaaattctaccgacaatacaaatccgtcgacatccaaaaaaccaacaacgactatccgcgcatccatacccccgnactacaaaaataaaaaancacgataaccgctttaatccgaaatctttataaaaaaaccttacttctataatataaacataat

SEQ ID NO: 3953 - DNA, 708 bp, Artificial Sequence
  chemically treated genomic DNA (Homo sapiens) CpG-island No: 3953
  unsure (13, 20, 23, 48, 64..65, 70, 73, 114, 118..119, 160, 203, 205)
  unsure (210, 483, 606..)
tagttagtttttncggtggncgnggggtatgattatcgtcgtcgtatntatgattgtttttttnnttatntanttcgtaggataggtgtcggtagcgttttgggttattttcgngagnnattcgtttgttggagcgcgacgatgatcggtttgtcgtttncggtattcggaattttgtacgttttcgtttaaagttttcgttnantggtntcgttatttaaacgtttcggcgagaagtaggttattatcgcggtatggcggtcgatcgcgttgggttacgttttgttggcgttcgcgacgcgaggttggatggttttttttattatgatttttttcgttttcggcggtatcgggatgtcgcgttgtaggttatgttgtttaggtaggtagatgacgattattagggatagttttaaggatcgttcgcggtttttattagtttaatttcgattattggatcgttgatcgttacggcgatttatngcgtttcggcgagtatatggaacgggttggtatggattgtaggcgtcgtttatattttgtttgtttttttcgcgttgcgtcgcggtgtaatggagtcgggttattttttatttgaatggaganncggcggtatttcgtttaacggatttattattttaagaattggagttaattaatttttgcggagaattgtgaatgcgtaaattaatttttggtagaatatat

SEQ ID NO: 3954 - DNA, 708 bp, Artificial Sequence
  chemically treated genomic DNA (Homo sapiens) CpG-island No: 3954
  unsure (102..103, 226, 499, 504, 506, 549, 590..591, 595, 636, 639)
  unsure (644..645, 661, 686, 689, 696)
atatattctaccaaaaattaatttacgcattcacaattctccgcaaaaattaattaactccaattcttaaaataataaatccgttaaacgaaataccgccgnntctccattcaaataaaaaataacccgactccattacaccgcgacgcaacgcgaaaaaaacaaacaaaatataaacgacgcctacaatccataccaacccgttccatatactcgccgaaacgcnataaatcgccgtaacgatcaacgatccaataatcgaaattaaactaataaaaaccgcgaacgatccttaaaactatccctaataatcgtcatctacctacctaaacaacataacctacaacgcgacatcccgataccgccgaaaacgaaaaaaatcataataaaaaaaaccatccaacctcgcgtcgcgaacgccaacaaaacgtaacccaacgcgatcgaccgccataccgcgataataacctacttctcgccgaaacgtttaaataacganaccantnaacgaaaactttaaacgaaaacgtacaaaattccgaataccgnaaacgacaaaccgatcatcgtcgcgctccaacaaacgaatnnctcncgaaaataacccaaaacgctaccgacacctatcctacgaantanataannaaaaaaacaatcatanatacgacgacgataatcataccccncgnccaccgnaaaaactaacta

SEQ ID NO: 3955 - DNA, 708 bp, Artificial Sequence
  chemically treated genomic DNA (Homo sapiens) CpG-island No: 3955
  unsure (102..103, 226, 499, 504, 506, 549, 590..591, 595, 636, 639)
  unsure (644..645, 661, 686, 689, 696)
atatgttttgttaagggttggtttgcgtatttatagtttttcgtaagaattgattggttttaatttttggagtggtgaattcgttaggcgaggtgtcgtcgnntttttatttaggtgggaggtggttcggttttattgtatcgcgacgtaacgcggggagggtagataaggtataggcggcgtttataatttatgttaattcgttttatgtgttcgtcgaggcgtnataaatcgtcgtgacgattagcggtttaatgatcgaagttaggttggtaagagtcgcgagcgatttttgaagttgtttttgatggtcgttatttatttgtttggatagtatggtttgtaacgcggtatttcgatgtcgtcggaagcgagaagaattataatggggaaggttatttagtttcgcgtcgcgaacgttagtaagacgtagtttagcgcggtcggtcgttatgtcgcgataatggtttgtttttcgtcgaaacgtttgggtggcggnattantnaacgaaggttttgagcgagggcgtgtaagatttcgaatatcgnaagcgataggtcgattatcgtcgcgttttagtaaacgggtnntttncgaaaataatttagagcgttgtcggtatttgttttgcgggntgnatgannaagaagatagttatangtgcggcgacgatagttatgttttncgnttatcgnaagagttgattg

SEQ ID NO: 3956 - DNA, 708 bp, Artificial Sequence
  chemically treated genomic DNA (Homo sapiens) CpG-island No: 3956
  unsure (13, 20, 23, 48, 64..65, 70, 73, 114, 118..119, 160, 203, 205)
  unsure (210, 483, 606..)
caatcaactcttncgataancgnaaaacataactatcgtcgccgcacntataactatcttcttnntcatncancccgcaaaacaaataccgacaacgctctaaattattttcgnaaannacccgtttactaaaacgcgacgataatcgacctatcgcttncgatattcgaaatcttacacgccctcgctcaaaaccttcgttnantaatnccgccacccaaacgtttcgacgaaaaacaaaccattatcgcgacataacgaccgaccgcgctaaactacgtcttactaacgttcgcgacgcgaaactaaataaccttccccattataattcttctcgcttccgacgacatcgaaataccgcgttacaaaccatactatccaaacaaataaataacgaccatcaaaaacaacttcaaaaatcgctcgcgactcttaccaacctaacttcgatcattaaaccgctaatcgtcacgacgatttatnacgcctcgacgaacacataaaacgaattaacataaattataaacgccgcctataccttatctaccctccccgcgttacgtcgcgatacaataaaaccgaaccacctcccacctaaataaaaanncgacgacacctcgcctaacgaattcaccactccaaaaattaaaaccaatcaattcttacgaaaaactataaatacgcaaaccaacccttaacaaaacatat

SEQ ID NO: 3957 - DNA, 702 bp, Artificial Sequence
  chemically treated genomic DNA (Homo sapiens) CpG-island No: 3957
  unsure (46, 59, 255..256, 316)
gtcgtcgtttttattttaggtcgaggtggttcggttttatgtattncgacgtaacgcgnaggtagataaggtatagggcggcgttataatttatgttaattcgttttatgtgttcgtcgaggggtataaaaatcgtcgtgacgattagcggtttaatgatcgaagttaggttggtaagagtcgcgagcgatttttgaagttgtttttgatggtcgttatttatttttttggataagtatggtttgtaacgcgggnntttcgatgtcgtcggaagcgagaagaattataatggggaaggttatttagtttcgcgttngtaacgttagtaagacgtagtttagcgcgtcggtcgttatgtcggcgataatggtttgtttttcgtcgaaacgtttggtggcgggattagtgacgaaggtttgagcgagggcgtgtaagatttcgaatatcggtaagcgataggtcgattatcgtcgcgttttagcgaaacgtttttcgtcgaaaatgatttagagcgttgtcggtatttgttttacgagttgtatgataaagaagatagttataagtgcggcgacgatagttatgtttcgcgtttatcggaaggagttgattgggttgaaggtttttaagggtatcggtcgaggaattttcggcggttttgttgtgcgataggtttacgtttaaaaggaaataaattatgggtta

SEQ ID NO: 3958 - DNA, 702 bp, Artificial Sequence
  chemically treated genomic DNA (Homo sapiens) CpG-island No: 3958
  unsure (387, 447..448, 644, 657)
taacccataatttatttccttttaaacgtaaacctatcgcacaacaaaaccgccgaaaattcctcgaccgatacccttaaaaaccttcaacccaatcaactccttccgataaacgcgaaacataactatcgtcgccgcacttataactatcttctttatcatacaactcgtaaaacaaataccgacaacgctctaaatcattttcgacgaaaaacgtttcgctaaaacgcgacgataatcgacctatcgcttaccgatattcgaaatcttacacgccctcgctcaaaccttcgtcactaatcccgccaccaaacgtttcgacgaaaaacaaaccattatcgccgacataacgaccgacgcgctaaactacgtcttactaacgttacnaacgcgaaactaaataaccttccccattataattcttctcgcttccgacgacatcgaaanncccgcgttacaaaccatacttatccaaaaaaataaataacgaccatcaaaaacaacttcaaaaatcgctcgcgactcttaccaacctaacttcgatcattaaaccgctaatcgtcacgacgatttttatacccctcgacgaacacataaaacgaattaacataaattataacgccgccctataccttatctacctncgcgttacgtcgnaatacataaaaccgaaccacctcgacctaaaataaaaacgacgac

SEQ ID NO: 3959 - DNA, 702 bp, Artificial Sequence
  chemically treated genomic DNA (Homo sapiens) CpG-island No: 3959
  unsure (387, 447..448, 644, 657)
tgatttatgatttatttttttttagacgtgagtttgtcgtatagtaaagtcgtcgaaagtttttcgatcgatgtttttgagagtttttaatttagttagtttttttcggtgggcgcggggtatgattatcgtcgtcgtatttatgattgttttttttattatgtaattcgtaggataggtgtcggtagcgttttgggttattttcggcgaggaacgtttcgttggagcgcgacgatgatcggtttgtcgtttgtcggtattcggaattttgtacgttttcgtttaagttttcgttattggtttcgttattaaacgtttcggcgagaagtaggttattatcgtcggtatggcggtcgacgcgttgggttacgttttgttggcgttgtngacgcgaggttggatggttttttttattatgatttttttcgttttcggcggtatcgggannttcgcgttgtaggttatgtttgtttaggaaggtagatgacgattattagggatagttttaaggatcgttcgcggtttttattagtttaatttcgattattggatcgttgatcgttacggcgatttttatgtttttcggcgagtatatggaacgggttggtatggattgtagcgtcgttttatattttgtttgtttncgcgttgcgtcgnggtgtatggagtcgggttatttcgatttgaaatggaagcggcggt

SEQ ID NO: 3960 - DNA, 702 bp, Artificial Sequence
  chemically treated genomic DNA (Homo sapiens) CpG-island No: 3960
  unsure (46, 59, 255..256, 316)
accgccgcttccatttcaaatcgaaataacccgactccatacaccncgacgcaacgcgnaaacaaacaaaatataaaacgacgctacaatccataccaacccgttccatatactcgccgaaaaacataaaaatcgccgtaacgatcaacgatccaataatcgaaattaaactaataaaaaccgcgaacgatccttaaaactatccctaataatcgtcatctaccttcctaaacaaacataacctacaacgcgaanntcccgataccgccgaaaacgaaaaaaatcataataaaaaaaaccatccaacctcgcgtcnacaacgccaacaaaacgtaacccaacgcgtcgaccgccataccgacgataataacctacttctcgccgaaacgtttaataacgaaaccaataacgaaaacttaaacgaaaacgtacaaaattccgaataccgacaaacgacaaaccgatcatcgtcgcgctccaacgaaacgttcctcgccgaaaataacccaaaacgctaccgacacctatcctacgaattacataataaaaaaaacaatcataaatacgacgacgataatcataccccgcgcccaccgaaaaaaactaactaaattaaaaactctcaaaaacatcgatcgaaaaactttcgacgactttactatacgacaaactcacgtctaaaaaaaaataaatcataaatca

SEQ ID NO: 3961 - DNA, 738 bp, Artificial Sequence
  chemically treated genomic DNA (Homo sapiens) CpG-island No: 3961
aggtcgcgttttttttttttggttttttcggttttcggcgtggggagcgcgcgggggacgtaggtttcgttttatttgagtcggttcggcgtgcgcgtttggggcggggtttttttcgttttatatcggtatagacgaggaaatttgtgggggcggcgattttcggtttgggttttgagtcgggtagcgaggtcgtcgggaagtgattatttattttcggggttttttttaatttcgtttttttcgtttgtcgtgggcgcgtgttcgtttcgaggaggcggtcgcgtacggatagttatgtattaggtagggtttttttacgcgttcggagagcgcggatcgttgtttcgggtcgtcgtcgtcgtttgtcgtttgtcgtcgttcgcggagttcgagttttagttcgagtcgtcgtttattttaggtcggggcgtcgagtagtcggcggtttggttatgtggggttagttttcgcgtttggtttgtagtaggattagtaatatggaggcggtcgtcggcgttttcgacggcgaggattagggcggcgcggggtttcgcgaggacgcgacgtttatggacgtttatttgcggaaattgggtttgtatcggaaattggtcgttaaggacgggtcgtgtttgtttcgggtcgtggcggagtaggtattgtatttttagtttcgttatgttgaagttagaatggtttgtatttattgttttcgagagaatagagagaaatttg

SEQ ID NO: 3962 - DNA, 738 bp, Artificial Sequence
  chemically treated genomic DNA (Homo sapiens) CpG-island No: 3962
caaatttctctctattctctcgaaaacaataaatacaaaccattctaacttcaacataacgaaactaaaaatacaatacctactccgccacgacccgaaacaaacacgacccgtccttaacgaccaatttccgatacaaacccaatttccgcaaataaacgtccataaacgtcgcgtcctcgcgaaaccccgcgccgccctaatcctcgccgtcgaaaacgccgacgaccgcctccatattactaatcctactacaaaccaaacgcgaaaactaaccccacataaccaaaccgccgactactcgacgccccgacctaaaataaacgacgactcgaactaaaactcgaactccgcgaacgacgacaaacgacaaacgacgacgacgacccgaaacaacgatccgcgctctccgaacgcgtaaaaaaaccctacctaatacataactatccgtacgcgaccgcctcctcgaaacgaacacgcgcccacgacaaacgaaaaaaacgaaattaaaaaaaaccccgaaaataaataatcacttcccgacgacctcgctacccgactcaaaacccaaaccgaaaatcgccgcccccacaaatttcctcgtctataccgatataaaacgaaaaaaaccccgccccaaacgcgcacgccgaaccgactcaaataaaacgaaacctacgtcccccgcgcgctccccacgccgaaaaccgaaaaaaccaaaaaaaaaaaacgcgacct

SEQ ID NO: 3963 - DNA, 738 bp, Artificial Sequence
  chemically treated genomic DNA (Homo sapiens) CpG-island No: 3963
taaatttttttttgttttttcgaagatagtgaatataggttattttgattttaatatggcgagattgagagtgtaatatttgtttcgttacggttcggaataggtacgattcgtttttggcgattagttttcgatataagtttagttttcgtagataggcgtttatgggcgtcgcgttttcgcggggtttcgcgtcgttttggttttcgtcgtcggggacgtcgacggtcgtttttatgttgttggttttgttgtaggttaggcgcgagggttagttttatatggttaggtcgtcggttgttcgacgtttcggtttggggtaggcggcggttcgggttggggttcgggtttcgcgagcggcggtaggcggtaggcggcggcggcggttcgaggtagcggttcgcgtttttcgggcgcgtaggggagttttgtttaatgtatggttgttcgtacgcggtcgttttttcggagcgaatacgcgtttacgataaacggggggagcgggattaaggaaaatttcgagagtgagtagttatttttcgacggtttcgttgttcgatttaggatttaggtcgggggtcgtcgtttttataagttttttcgtttgtatcggtgtgaagcgagaaaagtttcgttttaggcgcgtacgtcgggtcggtttaggtgaagcggggtttgcgtttttcgcgcgttttttacgtcgggagtcgaggaaattaaaaaagaaagacgcggttt

SEQ ID NO: 3964 - DNA, 738 bp, Artificial Sequence
  chemically treated genomic DNA (Homo sapiens) CpG-island No: 3964
aaaccgcgtctttcttttttaatttcctcgactcccgacgtaaaaaacgcgcgaaaaacgcaaaccccgcttcacctaaaccgacccgacgtacgcgcctaaaacgaaacttttctcgcttcacaccgatacaaacgaaaaaacttataaaaacgacgacccccgacctaaatcctaaatcgaacaacgaaaccgtcgaaaaataactactcactctcgaaattttccttaatcccgctccccccgtttatcgtaaacgcgtattcgctccgaaaaaacgaccgcgtacgaacaaccatacattaaacaaaactcccctacgcgcccgaaaaacgcgaaccgctacctcgaaccgccgccgccgcctaccgcctaccgccgctcgcgaaacccgaaccccaacccgaaccgccgcctaccccaaaccgaaacgtcgaacaaccgacgacctaaccatataaaactaaccctcgcgcctaacctacaacaaaaccaacaacataaaaacgaccgtcgacgtccccgacgacgaaaaccaaaacgacgcgaaaccccgcgaaaacgcgacgcccataaacgcctatctacgaaaactaaacttatatcgaaaactaatcgccaaaaacgaatcgtacctattccgaaccgtaacgaaacaaatattacactctcaatctcgccatattaaaatcaaaataacctatattcactatcttcgaaaaaacaaaaaaaaattta

SEQ ID NO: 3965 - DNA, 1006 bp, Artificial Sequence
  chemically treated genomic DNA (Homo sapiens) CpG-island No: 3965
gcgttattcgttcgcgtcggcggtagacgttattaaggcgcgacggttttgtttcgtttttgggttcgtttttcgtttgtcggatagtagatgcgggtatgcgttcgaaggcgaacgcgtacgcgcggagggacgggggcgaaggggagggacgggggcgaaggggaggggcggggcgggacgggacgggggcgaaggggaggggcggggcgggacgggggcgaaggggagggtcgggacgaggcgggcgaagggaagagggggttcgggcgatgttgagcgttgaggttcgagaggaggggcgggacgggtagtattaggttcgggtgttgcgaggggaggggcggagcgggcgaggggaaaaggcggggtcgggaagtgttgggcgtaggtggggcgagaggaggggcggggtaggttaggggaaaaggcggggatgggcggggttgggcgcggatggtgggagaggagggacggggcggggcggcgaacggaaggggcgggggcgggtgttgggcgttgaggcgcgagaggaggggatgggcggggcgcgcggtcgttagcgcgcggtcgttagcggtcggtttttattaacggtaggcgtcgtcgcgattttcgaaggttatagttcgcgtgatttattttcgtttgcgcgttcgtagttttcgtcggcgtagttatcgcgtagggcggtcgttcggaggtagttattacggtttgtgttaacgattaaagttttagtatagcggcgtttttagatagttgggagggtggttttggtcgggagcggcggtcggtgagttatcgcgaggaggagcggcggaggcgatttcggttcggttttgtattggtcgttcggtaggcgcgatatgagtttggtttggtattcgcgggatgttttttaagtttttttttcggttgttaattttcggggaacggttgtgattatatcgatacgtattttatagataaattatttttgcggcggcgggtcgaatacgtttat

SEQ ID NO: 3966 - DNA, 1006 bp, Artificial Sequence
  chemically treated genomic DNA (Homo sapiens) CpG-island No: 3966
ataaacgtattcgacccgccgccgcaaaaataatttatctataaaatacgtatcgatataatcacaaccgttccccgaaaattaacaaccgaaaaaaaaacttaaaaaacatcccgcgaataccaaaccaaactcatatcgcgcctaccgaacgaccaatacaaaaccgaaccgaaatcgcctccgccgctcctcctcgcgataactcaccgaccgccgctcccgaccaaaaccaccctcccaactatctaaaaacgccgctatactaaaactttaatcgttaacacaaaccgtaataactacctccgaacgaccgccctacgcgataactacgccgacgaaaactacgaacgcgcaaacgaaaataaatcacgcgaactataaccttcgaaaatcgcgacgacgcctaccgttaataaaaaccgaccgctaacgaccgcgcgctaacgaccgcgcgccccgcccatcccctcctctcgcgcctcaacgcccaacacccgcccccgccccttccgttcgccgccccgccccgtccctcctctcccaccatccgcgcccaaccccgcccatccccgccttttcccctaacctaccccgcccctcctctcgccccacctacgcccaacacttcccgaccccgccttttcccctcgcccgctccgcccctcccctcgcaacacccgaacctaatactacccgtcccgcccctcctctcgaacctcaacgctcaacatcgcccgaaccccctcttcccttcgcccgcctcgtcccgaccctccccttcgcccccgtcccgccccgcccctccccttcgcccccgtcccgtcccgccccgcccctccccttcgcccccgtccctccccttcgcccccgtccctccgcgcgtacgcgttcgccttcgaacgcatacccgcatctactatccgacaaacgaaaaacgaacccaaaaacgaaacaaaaccgtcgcgccttaataacgtctaccgccgacgcgaacgaataacgc

SEQ ID NO: 3967 - DNA, 1006 bp, Artificial Sequence
  chemically treated genomic DNA (Homo sapiens) CpG-island No: 3967
ataaacgtgttcgattcgtcgtcgtaagaatgatttatttgtaaaatacgtgtcggtgtggttataatcgtttttcggaggttaatagtcggagaaggggtttaaggagtatttcgcggatgttagattaggtttatgtcgcgtttgtcgggcggttagtgtagggtcgggtcgaggtcgttttcgtcgttttttttcgcggtagtttatcggtcgtcgttttcggttagagttatttttttagttgtttgagggcgtcgttgtattggagttttagtcgttgatataggtcgtggtagttattttcgggcggtcgttttgcgcggtgattgcgtcggcgaagattgcgagcgcgtaaacgggggtgggttacgcggattatgattttcgggaatcgcggcgacgtttatcgttagtagaaatcgatcgttaacggtcgcgcgttaacggtcgcgcgtttcgtttatttttttttttcgcgttttagcgtttaatattcgttttcgtttttttcgttcgtcgtttcgtttcgtttttttttttttattattcgcgtttagtttcgtttattttcgtttttttttttagtttgtttcgttttttttttcgttttatttgcgtttagtatttttcggtttcgtttttttttttcgttcgtttcgttttttttttcgtagtattcgggtttagtattgttcgtttcgttttttttttcgagttttagcgtttagtatcgttcggattttttttttttttcgttcgtttcgtttcgattttttttttcgttttcgtttcgtttcgtttttttttttcgttttcgtttcgtttcgtttcgtttttttttttcgttttcgtttttttttttcgttttcgttttttcgcgcgtgcgcgttcgttttcgagcgtatgttcgtatttgttgttcgataggcggaagacgagtttagaggcggagtagggtcgtcgcgttttggtgacgtttgtcgtcggcgcgggcgggtgacgt

SEQ ID NO: 3968 - DNA, 1006 bp, Artificial Sequence
  chemically treated genomic DNA (Homo sapiens) CpG-island No: 3968
acgtcacccgcccgcgccgacgacaaacgtcaccaaaacgcgacgaccctactccgcctctaaactcgtcttccgcctatcgaacaacaaatacgaacatacgctcgaaaacgaacgcgcacgcgcgaaaaaacgaaaacgaaaaaaaaaaacgaaaacgaaaaaaaaaaacgaaacgaaacgaaacgaaaacgaaaaaaaaaaacgaaacgaaacgaaaacgaaaaaaaaaatcgaaacgaaacgaacgaaaaaaaaaaaaaatccgaacgatactaaacgctaaaactcgaaaaaaaaaacgaaacgaacaatactaaacccgaatactacgaaaaaaaaaacgaaacgaacgaaaaaaaaaaacgaaaccgaaaaatactaaacgcaaataaaacgaaaaaaaaaacgaaacaaactaaaaaaaaaaacgaaaataaacgaaactaaacgcgaataataaaaaaaaaaaaacgaaacgaaacgacgaacgaaaaaaacgaaaacgaatattaaacgctaaaacgcgaaaaaaaaaaataaacgaaacgcgcgaccgttaacgcgcgaccgttaacgatcgatttctactaacgataaacgtcgccgcgattcccgaaaatcataatccgcgtaacccacccccgtttacgcgctcgcaatcttcgccgacgcaatcaccgcgcaaaacgaccgcccgaaaataactaccacgacctatatcaacgactaaaactccaatacaacgacgccctcaaacaactaaaaaaataactctaaccgaaaacgacgaccgataaactaccgcgaaaaaaaacgacgaaaacgacctcgacccgaccctacactaaccgcccgacaaacgcgacataaacctaatctaacatccgcgaaatactccttaaaccccttctccgactattaacctccgaaaaacgattataaccacaccgacacgtattttacaaataaatcattcttacgacgacgaatcgaacacgtttat

SEQ ID NO: 3969 - DNA, 644 bp, Artificial Sequence
  chemically treated genomic DNA (Homo sapiens) CpG-island No: 3969
gcgttacgtaggtagattacgtaagcgagtatttcgtacgcgcgttttgagtggtttttgttagttacgcgcgggggcggggcgagggcgtaggaagaaggcggggttaagatggcggcgtagcgcgcggcgggggcgacgggcggcgggggtcggggggcggtgggacgttgatttcgttttttgttgttgttagtttgcgtcgggcggcggtggcggcggagattcgaatatggcgatcgcgcgtattttcgggttcgagcgggaagtcgagtcggttaaggaagcgcgcgtcgtgggttcggagtttgtggatatttatacggtgtgttgggggcgcgggtattcgaagcgggggtggtggttggaatcgggagttcgattcgggggtttggggaggggttcgggatttgtagtttcgaggagcgggtagaagggtttgcgattgcgaggagggggttgggacgggggatttaggaaagggatttgggtttcgtaggttcgggagaagggttgttcggggttcggggaggcggtttggaaaagggtacgcgattagaaagggaggttcgggttgggggcggtatttggggataaagggggtttggggaggggggtgtttagatgaggcggaatttttttag

SEQ ID NO: 3970 - DNA, 644 bp, Artificial Sequence
  chemically treated genomic DNA (Homo sapiens) CpG-island No: 3970
ctaaaaaaattccgcctcatctaaacacccccctccccaaaccccctttatccccaaataccgcccccaacccgaacctccctttctaatcgcgtacccttttccaaaccgcctccccgaaccccgaacaacccttctcccgaacctacgaaacccaaatccctttcctaaatcccccgtcccaaccccctcctcgcaatcgcaaacccttctacccgctcctcgaaactacaaatcccgaacccctccccaaacccccgaatcgaactcccgattccaaccaccacccccgcttcgaatacccgcgcccccaacacaccgtataaatatccacaaactccgaacccacgacgcgcgcttccttaaccgactcgacttcccgctcgaacccgaaaatacgcgcgatcgccatattcgaatctccgccgccaccgccgcccgacgcaaactaacaacaacaaaaaacgaaatcaacgtcccaccgccccccgacccccgccgcccgtcgcccccgccgcgcgctacgccgccatcttaaccccgccttcttcctacgccctcgccccgcccccgcgcgtaactaacaaaaaccactcaaaacgcgcgtacgaaatactcgcttacgtaatctacctacgtaacgc

SEQ ID NO: 3971 - DNA, 644 bp, Artificial Sequence
  chemically treated genomic DNA (Homo sapiens) CpG-island No: 3971
ttagaggggtttcgttttatttagatatttttttttttaagttttttttatttttagatgtcgtttttaattcgagtttttttttttgatcgcgtatttttttttaaatcgttttttcgggtttcgagtaatttttttttcggatttgcggggtttagattttttttttagatttttcgttttagtttttttttcgtaatcgtagatttttttattcgtttttcggggttgtagatttcggatttttttttaagttttcgagtcggattttcggttttagttattattttcgtttcgggtgttcgcgtttttaatatatcgtataagtgtttataagtttcgagtttacgacgcgcgtttttttggtcggttcggtttttcgttcgggttcgaaggtgcgcgcggtcgttatgttcgggttttcgtcgttatcgtcgttcggcgtagattagtagtagtagggggcggggttaacgttttatcgtttttcggttttcgtcgttcgtcgttttcgtcgcgcgttgcgtcgttattttggtttcgttttttttttgcgttttcgtttcgttttcgcgcgtgattgataggggttatttagggcgcgcgtgcgaggtgttcgtttgcgtaatttatttgcgtggcgt

SEQ ID NO: 3972 - DNA, 644 bp, Artificial Sequence
  chemically treated genomic DNA (Homo sapiens) CpG-island No: 3972
acgccacgcaaataaattacgcaaacgaacacctcgcacgcgcgccctaaataacccctatcaatcacgcgcgaaaacgaaacgaaaacgcaaaaaaaaaacgaaaccaaaataacgacgcaacgcgcgacgaaaacgacgaacgacgaaaaccgaaaaacgataaaacgttaaccccgccccctactactactaatctacgccgaacgacgataacgacgaaaacccgaacataacgaccgcgcgcaccttcgaacccgaacgaaaaaccgaaccgaccaaaaaaacgcgcgtcgtaaactcgaaacttataaacacttatacgatatattaaaaacgcgaacacccgaaacgaaaataataactaaaaccgaaaatccgactcgaaaacttaaaaaaaaatccgaaatctacaaccccgaaaaacgaataaaaaaatctacgattacgaaaaaaaaactaaaacgaaaaatctaaaaaaaaaatctaaaccccgcaaatccgaaaaaaaaattactcgaaacccgaaaaaacgatttaaaaaaaaatacgcgatcaaaaaaaaaaactcgaattaaaaacgacatctaaaaataaaaaaaacttaaaaaaaaaaatatctaaataaaacgaaacccctctaa

SEQ ID NO: 3973 - DNA, 517 bp, Artificial Sequence
  chemically treated genomic DNA (Homo sapiens) CpG-island No: 3973
  unsure (374, 406, 420..421, 469)
ttgaatttcgaagatcgttattcggcgcggaacgcgggtatcgtcgacgttaaaatatcgggtttgggggtcgcggtttacgcgtttttcgggtttcgcgtttttcgttcgatttgattggatggtggcgggaagaaggcggggagattttcggaggaggggcgcgtaggtcggtcgggggtttttacggaggcgtttagggggcgaaggggcgggagcgggtttcggagcgtcgcgcgtgcgtaattgggatatagtcggttggggattgttgggagggtcggattttgcgagaacgggtgggcgtgtgttcggtgggcgcgggaggggtttcggttgtacgagcgcgcgtgcgcgtcggaattggagtcgtngggagggaggcggaagttgaaggaaggcggtnggaggggggtcggnntcgcggtcggggtcgtttaacgtttcggtaagtttaggagggtttttntcgggtttttttaatttaattcggggtttcggggggttttttttaaaa

SEQ ID NO: 3974 - DNA, 517 bp, Artificial Sequence
  chemically treated genomic DNA (Homo sapiens) CpG-island No: 3974
  unsure (49, 97..98, 112, 144)
ttttaaaaaaaaccccccgaaaccccgaattaaattaaaaaaacccganaaaaaccctcctaaacttaccgaaacgttaaacgaccccgaccgcgannccgacccccctccnaccgccttccttcaacttccgcctccctcccnacgactccaattccgacgcgcacgcgcgctcgtacaaccgaaacccctcccgcgcccaccgaacacacgcccacccgttctcgcaaaatccgaccctcccaacaatccccaaccgactatatcccaattacgcacgcgcgacgctccgaaacccgctcccgccccttcgccccctaaacgcctccgtaaaaacccccgaccgacctacgcgcccctcctccgaaaatctccccgccttcttcccgccaccatccaatcaaatcgaacgaaaaacgcgaaacccgaaaaacgcgtaaaccgcgacccccaaacccgatattttaacgtcgacgatacccgcgttccgcgccgaataacgatcttcgaaattcaa

SEQ ID NO: 3975 - DNA, 517 bp, Artificial Sequence
  chemically treated genomic DNA (Homo sapiens) CpG-island No: 3975
  unsure (49, 97..98, 112, 144)
ttttggggggggtttttcggggtttcgggttgggttgggaaggttcggnaagggtttttttgggtttgtcgggacgttgggcggtttcgatcgcganntcggtttttttttngtcgtttttttttagttttcgttttttttttngcggttttagtttcgacgcgtacgcgcgttcgtgtagtcggggtttttttcgcgtttatcgggtatacgtttattcgttttcgtagggttcggtttttttagtagtttttagtcggttgtgttttaattgcgtacgcgcgacgtttcgaggttcgttttcgttttttcgttttttggacgttttcgtgggaattttcggtcggtttgcgcgtttttttttcgggggttttttcgtttttttttcgttattatttaattaaatcgggcgaggggcgcgaagttcgggagacgcgtaggtcgcggtttttaggttcggtgttttgacgtcggcggtgttcgcgtttcgcgtcgagtaacggttttcggaatttag

SEQ ID NO: 3976 - DNA, 517 bp, Artificial Sequence
  chemically treated genomic DNA (Homo sapiens) CpG-island No: 3976
  unsure (374, 406, 420..421, 469)
ctaaattccgaaaaccgttactcgacgcgaaacgcgaacaccgccgacgtcaaaacaccgaacctaaaaaccgcgacctacgcgtctcccgaacttcgcgcccctcgcccgatttaattaaataataacgaaaaaaaaacgaaaaaacccccgaaaaaaaaacgcgcaaaccgaccgaaaattcccacgaaaacgtccaaaaaacgaaaaaacgaaaacgaacctcgaaacgtcgcgcgtacgcaattaaaacacaaccgactaaaaactactaaaaaaaccgaaccctacgaaaacgaataaacgtatacccgataaacgcgaaaaaaaccccgactacacgaacgcgcgtacgcgtcgaaactaaaaccgcnaaaaaaaaaacgaaaactaaaaaaaaacgacnaaaaaaaaaccganntcgcgatcgaaaccgcccaacgtcccgacaaacccaaaaaaacccttnccgaaccttcccaacccaacccgaaaccccgaaaaaccccccccaaaa

SEQ ID NO: 3977 - DNA, 558 bp, Artificial Sequence
  chemically treated genomic DNA (Homo sapiens) CpG-island No: 3977
ggggtcgttagggaggattacggcgttgggggaaggtaggttaaagtgtcgcgggagagtcggggggacgttagaaaagtcgtggaaaaggagtattggggattttcggggtgggaggcgggttatggaaaggaattagagtcgttttcgtcggagttcgaataatgcggggagtttatttcggtagatattcggttttgcgttagaattattttcgaaatatagagttttttatttattttcgggaggtttattataatagatagcgcgtgtttttagatttgttagtttttttaagggtcggtacggtttttacggggcgtttcggacgtttttcgcgcgtttttttttagggttaattttttgtttcgagtttttttttcgtttcgcggggaggggtttttagggcgttttattaataacgattattagttgattcgagttttaagtttaattttattttcgttgggaaagtttggaggtagagggaagtttcgcgcgttttagggttttttatagaaacgtagtcgaaggaatttcgttggttttgaggttatt

SEQ ID NO: 3978 - DNA, 558 bp, Artificial Sequence
  chemically treated genomic DNA (Homo sapiens) CpG-island No: 3978
aataacctcaaaaccaacgaaattccttcgactacgtttctataaaaaaccctaaaacgcgcgaaacttccctctacctccaaactttcccaacgaaaataaaattaaacttaaaactcgaatcaactaataatcgttattaataaaacgccctaaaaacccctccccgcgaaacgaaaaaaaaactcgaaacaaaaaattaaccctaaaaaaaaacgcgcgaaaaacgtccgaaacgccccgtaaaaaccgtaccgacccttaaaaaaactaacaaatctaaaaacacgcgctatctattataataaacctcccgaaaataaataaaaaactctatatttcgaaaataattctaacgcaaaaccgaatatctaccgaaataaactccccgcattattcgaactccgacgaaaacgactctaattcctttccataacccgcctcccaccccgaaaatccccaatactccttttccacgacttttctaacgtccccccgactctcccgcgacactttaacctaccttcccccaacgccgtaatcctccctaacgacccc

SEQ ID NO: 3979 - DNA, 558 bp, Artificial Sequence
  chemically treated genomic DNA (Homo sapiens) CpG-island No: 3979
ggtagttttaaggttagcggggttttttcggttgcgtttttgtgggaggttttgaaacgcgcggagtttttttttgtttttaggtttttttagcgagagtgaaattaaatttgaaattcggattaattggtagtcgttgttggtagaacgttttaaggattttttttcgcgggacggagggaggattcgggatagggaattggttttgggagaaaacgcgcggggggcgttcgagacgtttcgtgaaagtcgtgtcgatttttgggaggattgataggtttagagatacgcgttgtttgttgtggtgggtttttcgggaataagtgaggggttttgtgtttcgaggatggttttagcgtagagtcgggtgtttgtcggggtgggtttttcgtattgttcgggtttcggcgggggcggttttgatttttttttatggttcgttttttatttcgggaatttttagtgttttttttttacggtttttttggcgttttttcgattttttcgcggtattttggtttatttttttttagcgtcgtggttttttttggcgatttt

SEQ ID NO: 3980 - DNA, 558 bp, Artificial Sequence
  chemically treated genomic DNA (Homo sapiens) CpG-island No: 3980
aaaatcgccaaaaaaaaccacgacgctaaaaaaaaataaaccaaaataccgcgaaaaaatcgaaaaaacgccaaaaaaaccgtaaaaaaaaaacactaaaaattcccgaaataaaaaacgaaccataaaaaaaaatcaaaaccgcccccgccgaaacccgaacaatacgaaaaacccaccccgacaaacacccgactctacgctaaaaccatcctcgaaacacaaaacccctcacttattcccgaaaaacccaccacaacaaacaacgcgtatctctaaacctatcaatcctcccaaaaatcgacacgactttcacgaaacgtctcgaacgccccccgcgcgttttctcccaaaaccaattccctatcccgaatcctccctccgtcccgcgaaaaaaaatccttaaaacgttctaccaacaacgactaccaattaatccgaatttcaaatttaatttcactctcgctaaaaaaacctaaaaacaaaaaaaaactccgcgcgtttcaaaacctcccacaaaaacgcaaccgaaaaaaccccgctaaccttaaaactacc

SEQ ID NO: 3981 - DNA, 505 bp, Artificial Sequence
  chemically treated genomic DNA (Homo sapiens) CpG-island No: 3981
tacggcggtttcgcggtttcggtcgtttgggttcggatcgggaaaaacgaggggttgggttttttttattcggattttatatttttagtacgcgagaaagagcgagaagttacgcggcggttgggtcgagcgtggggtgtcggcggagataatgaaatttgtaggcgtataaataaggcgttgagcgtgttttttgataacgtgttagtagcgtggagaggttcgttttataatagtttttcgtgttgtgtttagtaggaaaatagtcgttgtcgttttagacgtagttttaataaagagtacggtcgttattttagtatgagagtttttgggcggaaaagtttattaagtgatttcgcgcggcgcggttcggttagtacgttttttcggattcgcgttttttggtgcgcgtagttcgcggtcgttttattttttttgttttttattttggatttttttttttagcgcgaggtaaggttggggtttggaggggttaggagcgggg

SEQ ID NO: 3982 - DNA, 505 bp, Artificial Sequence
  chemically treated genomic DNA (Homo sapiens) CpG-island No: 3982
ccccgctcctaacccctccaaaccccaaccttacctcgcgctaaaaaaaaaaatccaaaataaaaaacaaaaaaaataaaacgaccgcgaactacgcgcaccaaaaaacgcgaatccgaaaaaacgtactaaccgaaccgcgccgcgcgaaatcacttaataaacttttccgcccaaaaactctcatactaaaataacgaccgtactctttattaaaactacgtctaaaacgacaacgactattttcctactaaacacaacacgaaaaactattataaaacgaacctctccacgctactaacacgttatcaaaaaacacgctcaacgccttatttatacgcctacaaatttcattatctccgccgacaccccacgctcgacccaaccgccgcgtaacttctcgctctttctcgcgtactaaaaatataaaatccgaataaaaaaaacccaacccctcgtttttcccgatccgaacccaaacgaccgaaaccgcgaaaccgccgta

SEQ ID NO: 3983 - DNA, 505 bp, Artificial Sequence
  chemically treated genomic DNA (Homo sapiens) CpG-island No: 3983
tttcgtttttggtttttttagattttagttttgtttcgcgttgggaggggagatttagaatgaaaggtaagaaaggtaaggcggtcgcgggttgcgcgtattagaagacgcgagttcggggaaacgtgttggtcgggtcgcgtcgcgcggagttatttggtggattttttcgtttaggggtttttatgttggagtggcggtcgtgttttttgttgaggttgcgtttgaaacggtagcggttgtttttttgttagatataatacgaggggttgttgtggggcgagtttttttacgttgttggtacgttgttaagaaatacgtttagcgttttgtttgtgcgtttgtaagttttattgttttcgtcgatattttacgttcggtttagtcgtcgcgtggtttttcgttttttttcgcgtgttggggatatggggttcgagtagggaggatttagtttttcgtttttttcgattcggatttaggcggtcggggtcgcgggatcgtcgtg

SEQ ID NO: 3984 - DNA, 505 bp, Artificial Sequence
  chemically treated genomic DNA (Homo sapiens) CpG-island No: 3984
cacgacgatcccgcgaccccgaccgcctaaatccgaatcgaaaaaaacgaaaaactaaatcctccctactcgaaccccatatccccaacacgcgaaaaaaaacgaaaaaccacgcgacgactaaaccgaacgtaaaatatcgacgaaaacaataaaacttacaaacgcacaaacaaaacgctaaacgtatttcttaacaacgtaccaacaacgtaaaaaaactcgccccacaacaacccctcgtattatatctaacaaaaaaacaaccgctaccgtttcaaacgcaacctcaacaaaaaacacgaccgccactccaacataaaaacccctaaacgaaaaaatccaccaaataactccgcgcgacgcgacccgaccaacacgtttccccgaactcgcgtcttctaatacgcgcaacccgcgaccgccttacctttcttacctttcattctaaatctcccctcccaacgcgaaacaaaactaaaatctaaaaaaaccaaaaacgaaa

SEQ ID NO: 3985 - DNA, 534 bp, Artificial Sequence
  chemically treated genomic DNA (Homo sapiens) CpG-island No: 3985
tagtcgtacgagatagtcgtttttgatttaaggggcggggtacgggaggaaaagtattcgagataagaattaattttttttagaatgcgcggttgttattgatacgcgggcgcggcgcggcgtattttttttttttcggggttttttttttagtagcgatagtgggaggtcggcgggggtggggcgggggggaatgatgagatatagtttaaacgaacgtttgttttttcgggttaaagttgcgagtttcggattggattgtaaggtagtttcgaaatttgatacgttgcggatagatatttgttacgtttatatgttttttaaacgtttttgttcggggacggtcgggcgcgcgtttgttttattaagatttcgtttgatatttcgagtcgtcgaatttcggtagcggttatttttatagttaaggggtgattacgtcgtggttgttcgtttgtttcggttaatagtgtttatttttcggattggaattttgttaggggatttttttttttattttaaatagaaattagttat

SEQ ID NO: 3986 - DNA, 534 bp, Artificial Sequence
  chemically treated genomic DNA (Homo sapiens) CpG-island No: 3986
ataactaatttctatttaaaataaaaaaaaaaatcccctaacaaaattccaatccgaaaaataaacactattaaccgaaacaaacgaacaaccacgacgtaatcaccccttaactataaaaataaccgctaccgaaattcgacgactcgaaatatcaaacgaaatcttaataaaacaaacgcgcgcccgaccgtccccgaacaaaaacgtttaaaaaacatataaacgtaacaaatatctatccgcaacgtatcaaatttcgaaactaccttacaatccaatccgaaactcgcaactttaacccgaaaaaacaaacgttcgtttaaactatatctcatcattcccccccgccccacccccgccgacctcccactatcgctactaaaaaaaaaaccccgaaaaaaaaaaaatacgccgcgccgcgcccgcgtatcaataacaaccgcgcattctaaaaaaaattaattcttatctcgaatacttttcctcccgtaccccgccccttaaatcaaaaacgactatctcgtacgacta

SEQ ID NO: 3987 - DNA, 534 bp, Artificial Sequence
  chemically treated genomic DNA (Homo sapiens) CpG-island No: 3987
atggttagtttttgtttgaaatgggaggagggattttttagtagggttttaattcgaagagtagatattgttgatcgaaatagacgagtagttacggcgtggttattttttagttataaaagtggtcgttgtcggggttcggcgattcggggtgttaggcggagttttggtgaggtaggcgcgcgttcggtcgttttcgggtagagacgtttaaagagtatgtgagcgtgataagtgtttgttcgtaacgtgttagatttcgaaattgttttgtaatttagttcggaattcgtagttttagttcgggggaatagacgttcgtttaggttgtgttttattattttttttcgttttattttcgtcgattttttattgtcgttgttggaggaagagtttcgggaggagaagggtgcgtcgcgtcgcgttcgcgtgttaatggtagtcgcgtattttggaagaagttggtttttgtttcgaatattttttttttcgtgtttcgttttttgaattagaggcggttgtttcgtgcggtta

SEQ ID NO: 3988 - DNA, 534 bp, Artificial Sequence
  chemically treated genomic DNA (Homo sapiens) CpG-island No: 3988
taaccgcacgaaacaaccgcctctaattcaaaaaacgaaacacgaaaaaaaaaatattcgaaacaaaaaccaacttcttccaaaatacgcgactaccattaacacgcgaacgcgacgcgacgcacccttctcctcccgaaactcttcctccaacaacgacaataaaaaatcgacgaaaataaaacgaaaaaaaataataaaacacaacctaaacgaacgtctattcccccgaactaaaactacgaattccgaactaaattacaaaacaatttcgaaatctaacacgttacgaacaaacacttatcacgctcacatactctttaaacgtctctacccgaaaacgaccgaacgcgcgcctacctcaccaaaactccgcctaacaccccgaatcgccgaaccccgacaacgaccacttttataactaaaaaataaccacgccgtaactactcgtctatttcgatcaacaatatctactcttcgaattaaaaccctactaaaaaatccctcctcccatttcaaacaaaaactaaccat

SEQ ID NO: 3989 - DNA, 698 bp, Artificial Sequence
  chemically treated genomic DNA (Homo sapiens) CpG-island No: 3989
tgtaagttggcgcggaattcgatcgtattcgtgtttcgggggttgttcggtaggacgtatcgtgaagtcggtttattttttagtttcgtagtgcggcggtggtttggtagcgcggtgcgggtttcgagaagaaagagtgtggttcggggcgggcgtattaggaggtgtcgaggtcgtggttcggaagtggtcggggtcgttgcgggcggaagggcgtttgtgtttcgttcgttcggcggtggtttagttaggttcgcgggatttagattagcggggagcgcgattttcgtttttggggttttttcgttgggtcggagatttaagtttttaacgttaggttttgttttggaagcgttcgcggttcggcgtttggacggggaagttgtgagtgaacgcggacgggtagcggtaaggtcggcgtgtcgggtcggtgtcggcgggcgcggagtttttttgtgggatgcggtggaaggtcggttgatttttttttcggagttattaatttaaacgtgtatttcgcgaacgtttttcggattttcgtgtgtaattatcgacgttaggttttggggatacggtttattatggatcgagtacggtggtcgagtttagtttgatgggttattttagaggggcggatacgggaagattaaggttgttggaggagaaacgtggagtaggttttttgttttgatttcgta

SEQ ID NO: 3990 - DNA, 698 bp, Artificial Sequence
  chemically treated genomic DNA (Homo sapiens) CpG-island No: 3990
tacgaaatcaaaacaaaaaacctactccacgtttctcctccaacaaccttaatcttcccgtatccgcccctctaaaataacccatcaaactaaactcgaccaccgtactcgatccataataaaccgtatccccaaaacctaacgtcgataattacacacgaaaatccgaaaaacgttcgcgaaatacacgtttaaattaataactccgaaaaaaaaatcaaccgaccttccaccgcatcccacaaaaaaactccgcgcccgccgacaccgacccgacacgccgaccttaccgctacccgtccgcgttcactcacaacttccccgtccaaacgccgaaccgcgaacgcttccaaaacaaaacctaacgttaaaaacttaaatctccgacccaacgaaaaaaccccaaaaacgaaaatcgcgctccccgctaatctaaatcccgcgaacctaactaaaccaccgccgaacgaacgaaacacaaacgcccttccgcccgcaacgaccccgaccacttccgaaccacgacctcgacacctcctaatacgcccgccccgaaccacactctttcttctcgaaacccgcaccgcgctaccaaaccaccgccgcactacgaaactaaaaaataaaccgacttcacgatacgtcctaccgaacaacccccgaaacacgaatacgatcgaattccgcgccaacttaca

SEQ ID NO: 3991 - DNA, 698 bp, Artificial Sequence
  chemically treated genomic DNA (Homo sapiens) CpG-island No: 3991
tgcggaattaagataaaaagtttattttacgttttttttttaataattttaattttttcgtattcgtttttttggggtaatttattaaattgagttcggttatcgtgttcggtttatagtgggtcgtatttttaaggtttagcgtcgataattgtatacgggagttcgggaaacgttcgcggagtatacgtttgaattaatgatttcgaaggggggattagtcgattttttatcgtattttataaagaaatttcgcgttcgtcgatatcggttcgatacgtcgattttgtcgttattcgttcgcgtttatttataattttttcgtttaggcgtcgggtcgcgagcgtttttagggtagggtttagcgttgggggtttgggttttcggtttagcgggagagttttaagggcggaggtcgcgtttttcgttggtttgagtttcgcgggtttggttgggttatcgtcgagcggacgaagtataggcgttttttcgttcgtagcggtttcgattattttcgggttacggtttcgatattttttaatgcgttcgtttcgggttatatttttttttttcggagttcgtatcgcgttgttagattatcgtcgtattgcggggttgaggagtggatcggttttacgatgcgttttgtcgggtagttttcgaaatacggatgcggtcggatttcgcgttaatttata

SEQ ID NO: 3992 - DNA, 698 bp, Artificial Sequence
  chemically treated genomic DNA (Homo sapiens) CpG-island No: 3992
tataaattaacgcgaaatccgaccgcatccgtatttcgaaaactacccgacaaaacgcatcgtaaaaccgatccactcctcaaccccgcaatacgacgataatctaacaacgcgatacgaactccgaaaaaaaaaaatataacccgaaacgaacgcattaaaaaatatcgaaaccgtaacccgaaaataatcgaaaccgctacgaacgaaaaaacgcctatacttcgtccgctcgacgataacccaaccaaacccgcgaaactcaaaccaacgaaaaacgcgacctccgcccttaaaactctcccgctaaaccgaaaacccaaacccccaacgctaaaccctaccctaaaaacgctcgcgacccgacgcctaaacgaaaaaattataaataaacgcgaacgaataacgacaaaatcgacgtatcgaaccgatatcgacgaacgcgaaatttctttataaaatacgataaaaaatcgactaatccccccttcgaaatcattaattcaaacgtatactccgcgaacgtttcccgaactcccgtatacaattatcgacgctaaaccttaaaaatacgacccactataaaccgaacacgataaccgaactcaatttaataaattaccccaaaaaaacgaatacgaaaaaattaaaattattaaaaaaaaaacgtaaaataaactttttatcttaattccgca

SEQ ID NO: 3993 - DNA, 578 bp, Artificial Sequence
  chemically treated genomic DNA (Homo sapiens) CpG-island No: 3993
atttgcgttttgttatttttttatttcgcgcgcgtcgtatttatttgagtcgcgtttttgtttagttcgttcggcgttttaaataggtttttaggttgggttatgggtagtattgtcgagtattcgcggcgggtagagtaagtttttggatggttcggggtaggcgggcggggagaaggcgtaggtatttattgagattcggttgtcgtggcggcgatttttggttgttagggcgtagaggattttgtaggcgggcgttttggtgtttaatttcgaggagggggaggagcgggaggaggagcgggagtaaaaggaggggacggaggaggtcgggttcggagggagagcgcgttgggtagaggaggatcgcgagcgtttattgttgttcggttcgttcgggtgtcgtttagagttcggttcgttaggtgtttggtgtttcgttttgcgtttagttgtttcgtatagtttcgtttggtacgtagttttagcggttggtcgggtagtagtcggtttcgtttattcggtgcggtggtttttggggttttagtttaaggggagggattagcgttttaagaagg

SEQ ID NO: 3994 - DNA, 578 bp, Artificial Sequence
  chemically treated genomic DNA (Homo sapiens) CpG-island No: 3994
ccttcttaaaacgctaatccctccccttaaactaaaaccccaaaaaccaccgcaccgaataaacgaaaccgactactacccgaccaaccgctaaaactacgtaccaaacgaaactatacgaaacaactaaacgcaaaacgaaacaccaaacacctaacgaaccgaactctaaacgacacccgaacgaaccgaacaacaataaacgctcgcgatcctcctctacccaacgcgctctccctccgaacccgacctcctccgtcccctccttttactcccgctcctcctcccgctcctccccctcctcgaaattaaacaccaaaacgcccgcctacaaaatcctctacgccctaacaaccaaaaatcgccgccacgacaaccgaatctcaataaatacctacgccttctccccgcccgcctaccccgaaccatccaaaaacttactctacccgccgcgaatactcgacaatactacccataacccaacctaaaaacctatttaaaacgccgaacgaactaaacaaaaacgcgactcaaataaatacgacgcgcgcgaaataaaaaaataacaaaacgcaaat

SEQ ID NO: 3995 - DNA, 578 bp, Artificial Sequence
  chemically treated genomic DNA (Homo sapiens) CpG-island No: 3995
tttttttggagcgttggtttttttttttggattgaaattttaggggttatcgtatcgggtgggcgggatcgattattattcgattagtcgttggagttgcgtgttaggcggggttgtgcggagtagttgagcgtagagcggagtattaggtatttagcgggtcggattttgggcggtattcgagcgggtcgggtagtagtgggcgttcgcgatttttttttgtttaacgcgtttttttttcgggttcggtttttttcgttttttttttttgttttcgttttttttttcgttttttttttttttcgggattgagtattaaaacgttcgtttgtaaggttttttgcgttttggtagttaggagtcgtcgttacgatagtcgggttttagtgggtgtttgcgtttttttttcgttcgtttgtttcgggttatttagaaatttgttttattcgtcgcgggtgttcggtagtgttgtttatggtttagtttaggagtttatttagggcgtcggacgggttggatagaggcgcggtttaggtgagtgcggcgcgcgcggggtgggagagtggtaggacgtaggt

SEQ ID NO: 3996 - DNA, 578 bp, Artificial Sequence
  chemically treated genomic DNA (Homo sapiens) CpG-island No: 3996
acctacgtcctaccactctcccaccccgcgcgcgccgcactcacctaaaccgcgcctctatccaacccgtccgacgccctaaataaactcctaaactaaaccataaacaacactaccgaacacccgcgacgaataaaacaaatttctaaataacccgaaacaaacgaacgaaaaaaaaacgcaaacacccactaaaacccgactatcgtaacgacgactcctaactaccaaaacgcaaaaaaccttacaaacgaacgttttaatactcaatcccgaaaaaaaaaaaaaacgaaaaaaaaaacgaaaacaaaaaaaaaaaacgaaaaaaaccgaacccgaaaaaaaaacgcgttaaacaaaaaaaaatcgcgaacgcccactactacccgacccgctcgaataccgcccaaaatccgacccgctaaatacctaatactccgctctacgctcaactactccgcacaaccccgcctaacacgcaactccaacgactaatcgaataataatcgatcccgcccacccgatacgataacccctaaaatttcaatccaaaaaaaaaaaccaacgctccaaaaaaa

SEQ ID NO: 3997 - DNA, 1426 bp, Artificial Sequence
  chemically treated genomic DNA (Homo sapiens) CpG-island No: 3997
aagtttcgttattatgaatttataatttttcgtttgcggttgacgtatcgtttttgttcgtacgtatttgggttcgtgttaatagtatcgggtagttttcgttaggtatttttaaggattttttattttttcggcgcgttttatatttgacggtcgagttttaaatttggcggaaaggtgataagcgacgtttttcgcggaattcgagggtcggttgtagcgagtttttttcgggtcggggtaggggtcggggggcggtttttatttttaaggggtttcgcgtcgtgttttagttttttcgcgtcgttgatagtcgggagcgggcgatagacgtagtttgcgttatttttagagtttatttttcgtcgtagtttagagcgtacgttttcgggtgtttagtcgtttacgtttcgtcgaagtacgtcgtcggtttttggggttaaggacgcgggtttaggcggatcgcggcgcgggcgggatcggacgtttaggaggcgttttcgcgggatcgtaagatggcggcggcggcggcgttagggtcgggttttttttcgtttcgtttcggtcggcgcgcgtatcgtagcgagggcgggcgggaggggatgaagcgggtcggagtaaggggtaggtcggtcgaggtggcggtaagaaagtagtcgggaaagggaaggcgtcggggcgtgggggagggggcgttttttcgggttagggtcgcggacgtgtttttcgcgttttttcgtcgatagttagcggttcgcgcgttttattttattcgggggtgttttcgttttgtttatttttgaatttgaggtttgtgggcggatcgaggattaggatttgttcgtgtttcgttatggtttttgaggcggacgttatcggagagatagcgtagagcgggggcgcgttcgcggcggcggtttgttgattgggggcgggggacgacggcggcgacggttcggtcgagttttaggacgaggttaggttcgcggttttcgagttttaacgtttgtcgttgtgttatcggttcggtgggttattcgttgggttagtagtttcgggttttataattgatttaattttatattagtcgttacggttacgcgtatttgcgagtttcggcgatttacgtgacggtttttgcgtgtttacgtgcgcgttttcggtcgggagtttttagcgtttgtttcgttttttaggtcggtttagcgcggcgcggggttgttgcgtttgcgcgttcgcggtttgtcgcggttcggagcgtagtttagttgttaagggaacgggtgtggaaggaggcggggtaaaggttcgcgggatcgacgcgatgcgtagcgtagggttggaagcgtagttttttgttattttgagtttcgagtacggaattagagaaattgttttggtagcgtattatatttttttaagtggg

SEQ ID NO: 3998 - DNA, 1426 bp, Artificial Sequence
  chemically treated genomic DNA (Homo sapiens) CpG-island No: 3998
cccacttaaaaaaatataatacgctaccaaaacaatttctctaattccgtactcgaaactcaaaataacaaaaaactacgcttccaaccctacgctacgcatcgcgtcgatcccgcgaacctttaccccgcctccttccacacccgttcccttaacaactaaactacgctccgaaccgcgacaaaccgcgaacgcgcaaacgcaacaaccccgcgccgcgctaaaccgacctaaaaaacgaaacaaacgctaaaaactcccgaccgaaaacgcgcacgtaaacacgcaaaaaccgtcacgtaaatcgccgaaactcgcaaatacgcgtaaccgtaacgactaatataaaattaaatcaattataaaacccgaaactactaacccaacgaataacccaccgaaccgataacacaacgacaaacgttaaaactcgaaaaccgcgaacctaacctcgtcctaaaactcgaccgaaccgtcgccgccgtcgtcccccgcccccaatcaacaaaccgccgccgcgaacgcgcccccgctctacgctatctctccgataacgtccgcctcaaaaaccataacgaaacacgaacaaatcctaatcctcgatccgcccacaaacctcaaattcaaaaataaacaaaacgaaaacacccccgaataaaataaaacgcgcgaaccgctaactatcgacgaaaaaacgcgaaaaacacgtccgcgaccctaacccgaaaaaacgccccctcccccacgccccgacgccttccctttcccgactactttcttaccgccacctcgaccgacctaccccttactccgacccgcttcatcccctcccgcccgccctcgctacgatacgcgcgccgaccgaaacgaaacgaaaaaaaacccgaccctaacgccgccgccgccgccatcttacgatcccgcgaaaacgcctcctaaacgtccgatcccgcccgcgccgcgatccgcctaaacccgcgtccttaaccccaaaaaccgacgacgtacttcgacgaaacgtaaacgactaaacacccgaaaacgtacgctctaaactacgacgaaaaataaactctaaaaataacgcaaactacgtctatcgcccgctcccgactatcaacgacgcgaaaaaactaaaacacgacgcgaaaccccttaaaaataaaaaccgccccccgacccctaccccgacccgaaaaaaactcgctacaaccgaccctcgaattccgcgaaaaacgtcgcttatcacctttccgccaaatttaaaactcgaccgtcaaatataaaacgcgccgaaaaaataaaaaatccttaaaaatacctaacgaaaactacccgatactattaacacgaacccaaatacgtacgaacaaaaacgatacgtcaaccgcaaacgaaaaattataaattcataataacgaaactt

SEQ ID NO: 3999 - DNA, 1426 bp, Artificial Sequence
  chemically treated genomic DNA (Homo sapiens) CpG-island No: 3999
tttatttggaagagtgtgatgcgttgttagagtagtttttttagtttcgtattcggagtttaaggtgatagaggattgcgtttttagttttgcgttgcgtatcgcgtcggtttcgcggatttttgtttcgtttttttttatattcgtttttttgatagttgggttgcgtttcgggtcgcggtaagtcgcgagcgcgtaggcgtagtagtttcgcgtcgcgttaggtcggtttggagggcgggataagcgttagaagttttcggtcgggggcgcgtacgtaggtacgtagaggtcgttacgtgggtcgtcgaggttcgtaagtgcgcgtggtcgtggcggttggtgtggggttgagttagttgtgggattcggagttgttgatttagcgggtggtttatcgaatcggtgatatagcggtaggcgttagggttcgggagtcgcgagtttggtttcgttttagagttcggtcgagtcgtcgtcgtcgtcgtttttcgtttttagttagtaaatcgtcgtcgcgggcgcgttttcgttttgcgttgttttttcgatggcgttcgttttaggggttatggcgaagtacgagtagattttggttttcgattcgtttatagattttaaatttaaaggtaggtagaacggggatattttcgggtggggtggggcgcgcggatcgttggttgtcggcgggggggcgcggagggtacgttcgcggttttggttcgagggagcgtttttttttttacgtttcggcgttttttttttttcggttgtttttttgtcgttatttcggtcggtttgttttttgtttcggttcgttttattttttttcgttcgttttcgttgcggtgcgcgcgtcggtcggggcgaggcggaggggagttcggttttggcgtcgtcgtcgtcgttattttgcggtttcgcgggggcgttttttgggcgttcggtttcgttcgcgtcgcggttcgtttgggttcgcgtttttggttttagaggtcgacggcgtgtttcggcggggcgtgggcggttgggtattcgagggcgtgcgttttgggttgcggcggggagtgggttttggaggtggcgtaagttgcgtttgtcgttcgttttcggttgttagcggcgcggggaggttagggtacggcgcgggattttttgggagtgagagtcgtttttcgatttttgtttcggttcggggagagttcgttgtagtcggttttcgggtttcgcggagggcgtcgtttgttattttttcgttaggtttagaattcggtcgttaggtgtaggacgcgtcggggaggtggagagtttttggaggtgtttggcgagggttgttcggtgttgttggtacggatttaggtgcgtgcgggtaggagcgatgcgttagtcgtaaacggagagttgtaggtttatagtagcggggttt

SEQ ID NO: 4000 - DNA, 1426 bp, Artificial Sequence
  chemically treated genomic DNA (Homo sapiens) CpG-island No: 4000
aaaccccgctactataaacctacaactctccgtttacgactaacgcatcgctcctacccgcacgcacctaaatccgtaccaacaacaccgaacaaccctcgccaaacacctccaaaaactctccacctccccgacgcgtcctacacctaacgaccgaattctaaacctaacgaaaaaataacaaacgacgccctccgcgaaacccgaaaaccgactacaacgaactctccccgaaccgaaacaaaaatcgaaaaacgactctcactcccaaaaaatcccgcgccgtaccctaacctccccgcgccgctaacaaccgaaaacgaacgacaaacgcaacttacgccacctccaaaacccactccccgccgcaacccaaaacgcacgccctcgaatacccaaccgcccacgccccgccgaaacacgccgtcgacctctaaaaccaaaaacgcgaacccaaacgaaccgcgacgcgaacgaaaccgaacgcccaaaaaacgcccccgcgaaaccgcaaaataacgacgacgacgacgccaaaaccgaactcccctccgcctcgccccgaccgacgcgcgcaccgcaacgaaaacgaacgaaaaaaaataaaacgaaccgaaacaaaaaacaaaccgaccgaaataacgacaaaaaaacaaccgaaaaaaaaaaaacgccgaaacgtaaaaaaaaaaacgctccctcgaaccaaaaccgcgaacgtaccctccgcgcccccccgccgacaaccaacgatccgcgcgccccaccccacccgaaaatatccccgttctacctacctttaaatttaaaatctataaacgaatcgaaaaccaaaatctactcgtacttcgccataacccctaaaacgaacgccatcgaaaaaacaacgcaaaacgaaaacgcgcccgcgacgacgatttactaactaaaaacgaaaaacgacgacgacgacgactcgaccgaactctaaaacgaaaccaaactcgcgactcccgaaccctaacgcctaccgctatatcaccgattcgataaaccacccgctaaatcaacaactccgaatcccacaactaactcaaccccacaccaaccgccacgaccacgcgcacttacgaacctcgacgacccacgtaacgacctctacgtacctacgtacgcgcccccgaccgaaaacttctaacgcttatcccgccctccaaaccgacctaacgcgacgcgaaactactacgcctacgcgctcgcgacttaccgcgacccgaaacgcaacccaactatcaaaaaaacgaatataaaaaaaaacgaaacaaaaatccgcgaaaccgacgcgatacgcaacgcaaaactaaaaacgcaatcctctatcaccttaaactccgaatacgaaactaaaaaaactactctaacaacgcatcacactcttccaaataaa

SEQ ID NO: 4001 - DNA, 1095 bp, Artificial Sequence
  chemically treated genomic DNA (Homo sapiens) CpG-island No: 4001
tcgaaagaataagtgcgttcggagtcgttacgggttagaagttttcgtttttagagcgaagatcgtattttcgttttagtattttaaaattcgattttcggcgttcgtttcggtcgtttcgttttcggggaagtgttcgattcgttagcgttttcgcggagttaggatagaattcgcggtcggggcgtttcgagatttaacgtagcgtcgcgtagtcggggtttttacgtttttacgttcggtttcggtttttttcgggtattcgcggttcgtttcgggggattagggttcggttcgatatatacggttcgtttcggggcgtcggggatagggaggttcgttcgcgtcgttttttaggtcgtcggggattcgtattaatttttttcgttttcgaaggataagtcggttcgtattttttgttcgggttaaggcggacgaggggtattggaatttcgttttttttttaggtcgcgaggatttcgattagcgcgttttcgttttcgtttagtagcgcggttcgcgttttttttttaggtcgcggggaaacgtagcgcgcgtttcgtatttgttcgcgggtttagttttttatttatttagagttcggtgttttagtttatggtgtaggggacgcgaaggggcgtttcgcgcggcgggcgcggttttttggttttttttttcggcgatttttttgtttttcgagattttcgcgacggcggaaagttcggagttcgcgcggtttttttcggttcgtagtttttcgttcggggttttttcggcggtttttttttttcgtcgttttatagtaaaatggttcgaggaagtagtagtcgcggtcgtcgtagcgttcgttcgttttatattcggagagcgggggaggggcgggaggggaggggcggggtcggtttgatagttcgcgtacgcgcgttcgttttatttcggttcggttttttttttcgggttttttcggtcgggttcgcgtcgttttggggttcggaaggacgcggagggaggtgtgagggacggcgggattcggatttttaggattttttttgttaatttggtaatgattttttagtgattattgtttgttcgtag

SEQ ID NO: 4002 - DNA, 1095 bp, Artificial Sequence
  chemically treated genomic DNA (Homo sapiens) CpG-island No: 4002
ctacgaacaaacaataatcactaaaaaatcattaccaaattaacaaaaaaaatcctaaaaatccgaatcccgccgtccctcacacctccctccgcgtccttccgaaccccaaaacgacgcgaacccgaccgaaaaaacccgaaaaaaaaaaccgaaccgaaataaaacgaacgcgcgtacgcgaactatcaaaccgaccccgcccctcccctcccgcccctcccccgctctccgaatataaaacgaacgaacgctacgacgaccgcgactactacttcctcgaaccattttactataaaacgacgaaaaaaaaaaaccgccgaaaaaaccccgaacgaaaaactacgaaccgaaaaaaaccgcgcgaactccgaactttccgccgtcgcgaaaatctcgaaaaacaaaaaaatcgccgaaaaaaaaaaccaaaaaaccgcgcccgccgcgcgaaacgccccttcgcgtcccctacaccataaactaaaacaccgaactctaaataaataaaaaactaaacccgcgaacaaatacgaaacgcgcgctacgtttccccgcgacctaaaaaaaaaacgcgaaccgcgctactaaacgaaaacgaaaacgcgctaatcgaaatcctcgcgacctaaaaaaaaaacgaaattccaatacccctcgtccgccttaacccgaacaaaaaatacgaaccgacttatccttcgaaaacgaaaaaaattaatacgaatccccgacgacctaaaaaacgacgcgaacgaacctccctatccccgacgccccgaaacgaaccgtatatatcgaaccgaaccctaatcccccgaaacgaaccgcgaatacccgaaaaaaaccgaaaccgaacgtaaaaacgtaaaaaccccgactacgcgacgctacgttaaatctcgaaacgccccgaccgcgaattctatcctaactccgcgaaaacgctaacgaatcgaacacttccccgaaaacgaaacgaccgaaacgaacgccgaaaatcgaattttaaaatactaaaacgaaaatacgatcttcgctctaaaaacgaaaacttctaacccgtaacgactccgaacgcacttattctttcga

SEQ ID NO: 4003 - DNA, 1095 bp, Artificial Sequence
  chemically treated genomic DNA (Homo sapiens) CpG-island No: 4003
ttgcgagtagatagtggttattaagaagttattattagattggtagggggagttttagggattcgggtttcgtcgttttttatattttttttcgcgttttttcggattttagggcgacgcggattcggtcgggggagttcgggggagggggtcgggtcggggtggggcgggcgcgcgtgcgcgagttgttagatcggtttcgttttttttttttcgtttttttttcgtttttcgggtgtagggcgggcgggcgttgcggcggtcgcggttgttgttttttcgggttattttgttgtggagcggcggggaggaggagtcgtcgaggagatttcgggcgaggagttgcgagtcggaggaggtcgcgcggatttcgggtttttcgtcgtcgcggggatttcggggggtaaagggatcgtcggggagggggattagagagtcgcgttcgtcgcgcggagcgttttttcgcgttttttgtattatgagttggggtatcgagttttgggtgagtgaggggttgggttcgcgggtagatgcggggcgcgcgttgcgttttttcgcggtttggggagggggcgcgggtcgcgttgttgggcggaggcgagggcgcgttggtcggggttttcgcggtttggggaggaggcggggttttaatgtttttcgttcgttttggttcgagtaggaggtgcgggtcggtttgtttttcggaggcgaggggagttggtgcgggttttcggcggtttgaggaacggcgcgggcgggtttttttgttttcggcgtttcggagcgggtcgtgtgtgtcgggtcgagttttaatttttcggggcgagtcgcggatgttcggggagggtcgggatcgggcgtgggggcgtggaggtttcggttgcgcggcgttgcgttgggtttcggggcgtttcggtcgcgagttttgttttggtttcgcggaggcgttggcggatcgggtattttttcgggagcggggcggtcggggcgagcgtcgggggtcgggttttggggtgttggggcgagagtgcggttttcgttttggaggcgaggatttttggttcgtggcggtttcgggcgtatttgttttttcgg

SEQ ID NO: 4004 - DNA, 1095 bp, Artificial Sequence
  chemically treated genomic DNA (Homo sapiens) CpG-island No: 4004
ccgaaaaaacaaatacgcccgaaaccgccacgaaccaaaaatcctcgcctccaaaacgaaaaccgcactctcgccccaacaccccaaaacccgacccccgacgctcgccccgaccgccccgctcccgaaaaaatacccgatccgccaacgcctccgcgaaaccaaaacaaaactcgcgaccgaaacgccccgaaacccaacgcaacgccgcgcaaccgaaacctccacgcccccacgcccgatcccgaccctccccgaacatccgcgactcgccccgaaaaattaaaactcgacccgacacacacgacccgctccgaaacgccgaaaacaaaaaaacccgcccgcgccgttcctcaaaccgccgaaaacccgcaccaactcccctcgcctccgaaaaacaaaccgacccgcacctcctactcgaaccaaaacgaacgaaaaacattaaaaccccgcctcctccccaaaccgcgaaaaccccgaccaacgcgccctcgcctccgcccaacaacgcgacccgcgccccctccccaaaccgcgaaaaaacgcaacgcgcgccccgcatctacccgcgaacccaacccctcactcacccaaaactcgataccccaactcataatacaaaaaacgcgaaaaaacgctccgcgcgacgaacgcgactctctaatccccctccccgacgatccctttaccccccgaaatccccgcgacgacgaaaaacccgaaatccgcgcgacctcctccgactcgcaactcctcgcccgaaatctcctcgacgactcctcctccccgccgctccacaacaaaataacccgaaaaaacaacaaccgcgaccgccgcaacgcccgcccgccctacacccgaaaaacgaaaaaaaaacgaaaaaaaaaaaacgaaaccgatctaacaactcgcgcacgcgcgcccgccccaccccgacccgaccccctcccccgaactcccccgaccgaatccgcgtcgccctaaaatccgaaaaaacgcgaaaaaaaatataaaaaacgacgaaacccgaatccctaaaactccccctaccaatctaataataacttcttaataaccactatctactcgcaa

SEQ ID NO: 4005 - DNA, 509 bp, Artificial Sequence
  chemically treated genomic DNA (Homo sapiens) CpG-island No: 4005
ggttcgatatcgtgcggttgatatagtttatttttcgattttgagattaggggttttcggagtttaaggtcgtttttaaagtttagcgaggcggaggtgcggttcgggttggtttggttcggttatcgttgttatggtaatcgttaataggttggttttatttttaattgaaagtttgtataggagcggtcgatcgaagggtttcgaggtgggtagtataggtttttcgacgattttttaggtcgtaatttttaggaaaacgattatagggttagcggagttagtcgtcgagtttcgtttttcgggttttttcggcggttgcgtttttttatttcggacgtgggcgggagaggaagcggttggtgatgttggaataaatatggtcgttttggcgttcgtcggttttttcgtttttcgcggttttaggttggtcgcgggttttcggttgtttttaatgttgggtttgttgtagttgttggtcgagtttggtttgggtcgcgtttattatt

SEQ ID NO: 4006 - DNA, 509 bp, Artificial Sequence
  chemically treated genomic DNA (Homo sapiens) CpG-island No: 4006
aataataaacgcgacccaaaccaaactcgaccaacaactacaacaaacccaacattaaaaacaaccgaaaacccgcgaccaacctaaaaccgcgaaaaacgaaaaaaccgacgaacgccaaaacgaccatatttattccaacatcaccaaccgcttcctctcccgcccacgtccgaaataaaaaaacgcaaccgccgaaaaaacccgaaaaacgaaactcgacgactaactccgctaaccctataatcgttttcctaaaaattacgacctaaaaaatcgtcgaaaaacctatactacccacctcgaaacccttcgatcgaccgctcctatacaaactttcaattaaaaataaaaccaacctattaacgattaccataacaacgataaccgaaccaaaccaacccgaaccgcacctccgcctcgctaaactttaaaaacgaccttaaactccgaaaacccctaatctcaaaatcgaaaaataaactatatcaaccgcacgatatcgaacc

SEQ ID NO: 4007 - DNA, 509 bp, Artificial Sequence
  chemically treated genomic DNA (Homo sapiens) CpG-island No: 4007
ggtgatggacgcggtttaggttaggttcggttagtaattgtagtaaatttagtattgggagtagtcggaggttcgcggttagtttaggatcgcgggaggcgggggagtcgacgggcgttagagcggttatgtttgttttagtattattagtcgttttttttttcgtttacgttcggggtgaaagggcgtagtcgtcggaagggttcggggagcggggttcggcggttagtttcgttgattttgtggtcgtttttttggagattgcgatttaggaagtcgtcgaggagtttgtgttgtttatttcggggtttttcgatcggtcgtttttgtgtagatttttagttagagatgaagttaatttattggcggttgttataataacggtggtcgaattagattagttcgggtcgtattttcgtttcgttgagttttggaagcgattttgggtttcggggatttttgattttagggtcgggggataagttgtgttagtcgtacggtgtcgggtt

SEQ ID NO: 4008 - DNA, 509 bp, Artificial Sequence
  chemically treated genomic DNA (Homo sapiens) CpG-island No: 4008
aacccgacaccgtacgactaacacaacttatcccccgaccctaaaatcaaaaatccccgaaacccaaaatcgcttccaaaactcaacgaaacgaaaatacgacccgaactaatctaattcgaccaccgttattataacaaccgccaataaattaacttcatctctaactaaaaatctacacaaaaacgaccgatcgaaaaaccccgaaataaacaacacaaactcctcgacgacttcctaaatcgcaatctccaaaaaaacgaccacaaaatcaacgaaactaaccgccgaaccccgctccccgaacccttccgacgactacgccctttcaccccgaacgtaaacgaaaaaaaaaacgactaataatactaaaacaaacataaccgctctaacgcccgtcgactcccccgcctcccgcgatcctaaactaaccgcgaacctccgactactcccaatactaaatttactacaattactaaccgaacctaacctaaaccgcgtccatcacc

SEQ ID NO: 4009 - DNA, 733 bp, Artificial Sequence
  chemically treated genomic DNA (Homo sapiens) CpG-island No: 4009
tcgtcgtgttttcggtattttatgaattcgtgtcgaatgaatgaatgttttcgggtcgggatttggttttatttatattcgatttttcgggtttttttcgtcgcggcgggggtcggagcgttagggttggattcggggagggggtggcgggggtggttgtttcgttttggggtcgcgttgagtcgaggggacgttttttcggttggttggcgaggtcggggtttagttggcggaggtcgcggttaggcgggtgcggggcgggaggtggcgtcgggcgttgagtggcggtttcgggtttatttttggcgcgcgggtgcgggcgggaggggggaggcgggaggcggggagcgtaggggcggcggtaggcgggaggtagtagcgagtatgtgtcgcggagtttagtaattagggacgatcgcggttatatcgcgtcggcgtcggcgtttagtttaggtagtttcgcgtcgcggcgttcggatcgttcgggtttgtttagcggtcgttttacgtttcgggcgtttcggcgtcgatagtcgcgtagcgtagcgcgggcgtcgtagataaaggcgcggtttcggttcggttcgttcggtttagtcgtttttgttgggcgttttaatcgggttcggttcgggggggcgggggtcgcggtcgtcgaggatggggaaatttaatagtaagttgaagttcgaagttgtggaggagttgattaggaagatttattgtgagtgtt

SEQ ID NO: 4010 - DNA, 733 bp, Artificial Sequence
  chemically treated genomic DNA (Homo sapiens) CpG-island No: 4010
aacactcacaataaatcttcctaatcaactcctccacaacttcgaacttcaacttactattaaatttccccatcctcgacgaccgcgacccccgcccccccgaaccgaacccgattaaaacgcccaacaaaaacgactaaaccgaacgaaccgaaccgaaaccgcgcctttatctacgacgcccgcgctacgctacgcgactatcgacgccgaaacgcccgaaacgtaaaacgaccgctaaacaaacccgaacgatccgaacgccgcgacgcgaaactacctaaactaaacgccgacgccgacgcgatataaccgcgatcgtccctaattactaaactccgcgacacatactcgctactacctcccgcctaccgccgcccctacgctccccgcctcccgcctcccccctcccgcccgcacccgcgcgccaaaaataaacccgaaaccgccactcaacgcccgacgccacctcccgccccgcacccgcctaaccgcgacctccgccaactaaaccccgacctcgccaaccaaccgaaaaaacgtcccctcgactcaacgcgaccccaaaacgaaacaaccacccccgccaccccctccccgaatccaaccctaacgctccgacccccgccgcgacgaaaaaaacccgaaaaatcgaatataaataaaaccaaatcccgacccgaaaacattcattcattcgacacgaattcataaaataccgaaaacacgacga

SEQ ID NO: 4011 - DNA, 733 bp, Artificial Sequence
  chemically treated genomic DNA (Homo sapiens) CpG-island No: 4011
agtatttatagtaggtttttttggttagtttttttataatttcgggttttaatttgttgttggatttttttattttcggcggtcgcggttttcgttttttcgggtcggattcggttggggcgtttagtaggagcggttgggtcgggcgggtcgggtcggggtcgcgtttttgtttgcggcgttcgcgttgcgttgcgcggttgtcggcgtcggggcgttcggggcgtggggcggtcgttgggtaggttcgggcggttcgggcgtcgcggcgcggggttgtttgggttgggcgtcggcgtcggcgcggtgtggtcgcggtcgtttttggttattgggtttcgcggtatatgttcgttgttgtttttcgtttgtcgtcgtttttgcgtttttcgtttttcgttttttttttttcgttcgtattcgcgcgttaggggtggattcggagtcgttatttagcgttcggcgttatttttcgtttcgtattcgtttggtcgcggttttcgttagttggatttcggtttcgttagttagtcggaggggcgttttttcggtttaacgcggttttagggcggggtagttattttcgttatttttttttcgaatttagttttggcgtttcggttttcgtcgcggcggggagggttcggaagatcggatgtgaatgaggttaggtttcggttcggagatatttatttattcgatacggatttatggggtgtcggggatacggcgg

SEQ ID NO: 4012 - DNA, 733 bp, Artificial Sequence
  chemically treated genomic DNA (Homo sapiens) CpG-island No: 4012
ccgccgtatccccgacaccccataaatccgtatcgaataaataaatatctccgaaccgaaacctaacctcattcacatccgatcttccgaaccctccccgccgcgacgaaaaccgaaacgccaaaactaaattcgaaaaaaaaataacgaaaataactaccccgccctaaaaccgcgttaaaccgaaaaaacgcccctccgactaactaacgaaaccgaaatccaactaacgaaaaccgcgaccaaacgaatacgaaacgaaaaataacgccgaacgctaaataacgactccgaatccacccctaacgcgcgaatacgaacgaaaaaaaaaaaacgaaaaacgaaaaacgcaaaaacgacgacaaacgaaaaacaacaacgaacatataccgcgaaacccaataaccaaaaacgaccgcgaccacaccgcgccgacgccgacgcccaacccaaacaaccccgcgccgcgacgcccgaaccgcccgaacctacccaacgaccgccccacgccccgaacgccccgacgccgacaaccgcgcaacgcaacgcgaacgccgcaaacaaaaacgcgaccccgacccgacccgcccgacccaaccgctcctactaaacgccccaaccgaatccgacccgaaaaaacgaaaaccgcgaccgccgaaaataaaaaaatccaacaacaaattaaaacccgaaattataaaaaaactaaccaaaaaaacctactataaatact

SEQ ID NO: 4013 - DNA, 1078 bp, Artificial Sequence
  chemically treated genomic DNA (Homo sapiens) CpG-island No: 4013
ttgtcggggcggtgttcggcgtattttaggttttttttcggcgatttttcgcgggttgtagtaaaatacggggcgtttcggcggggcgggggcgggcggttgtcgcggattcggtcggttatagtcgtagtttggtggttttcgattggttacgacgcgggcggggaggttcggcggaggagggaggcgggggcgagggcggcggcggcggcgggaggaataggagaggggagcgggtcgcgtagttaggtagcgcgtggggcgagcgcggggagagcggcggcggttcgtttaggtcgcgtagcggaggtcgagcggggtgcgcggtcggcgacggagggcggcgcgcgcgagtgagcggcgtagggcgaggatcggcgggcgggtgtcggtgcgcgggtagtaggggcggttgcggtagtagttgcgcgggacggagtcgcggcgggagagatcgcgtcggtttttcgttttatttttttgcggtcgaggtcggagaatagtttttaattcgtcgggggatcggaaagaggagtcgagaagcgtttttcggtttttacgtagcggaggcgcggagtggcgggattgttgttttttgtgggtgtagtacgtacgattcggagcgtttttttcgcggcgttgttttcggcgttttcgtcgcgtcgagcggttttggagcggggattcggaggaagtaaaattacgagttcgaaatttcgcgtggcggagtttttggggagcgttattcgttttatttttatttttatattttttatcggttaaggttttcgtcgttgtatttttcgcggttttcgttgcgtttcgggtcggagtcgagtcgtttgcgttgttatagtagtcgtttttatatattcgtagacgtttatacgttttttttttttgttttttcgttttttttttagttttttgatttttgggtttgttttattatttttggtgcgagtttcgcggatttcgcggttcgttatttgttattagttcgttttttattggcggggagcggagagtagcgaagaagggggtggggaggggaggggaagggaagggggtggaaatt

SEQ ID NO: 4014 - DNA, 1078 bp, Artificial Sequence
  chemically treated genomic DNA (Homo sapiens) CpG-island No: 4014
aatttccacccccttcccttcccctcccctccccacccccttcttcgctactctccgctccccgccaataaaaaacgaactaataacaaataacgaaccgcgaaatccgcgaaactcgcaccaaaaataataaaacaaacccaaaaatcaaaaaactaaaaaaaaaacgaaaaaacaaaaaaaaaaaacgtataaacgtctacgaatatataaaaacgactactataacaacgcaaacgactcgactccgacccgaaacgcaacgaaaaccgcgaaaaatacaacgacgaaaaccttaaccgataaaaaatataaaaataaaaataaaacgaataacgctccccaaaaactccgccacgcgaaatttcgaactcgtaattttacttcctccgaatccccgctccaaaaccgctcgacgcgacgaaaacgccgaaaacaacgccgcgaaaaaaacgctccgaatcgtacgtactacacccacaaaaaacaacaatcccgccactccgcgcctccgctacgtaaaaaccgaaaaacgcttctcgactcctctttccgatcccccgacgaattaaaaactattctccgacctcgaccgcaaaaaaataaaacgaaaaaccgacgcgatctctcccgccgcgactccgtcccgcgcaactactaccgcaaccgcccctactacccgcgcaccgacacccgcccgccgatcctcgccctacgccgctcactcgcgcgcgccgccctccgtcgccgaccgcgcaccccgctcgacctccgctacgcgacctaaacgaaccgccgccgctctccccgcgctcgccccacgcgctacctaactacgcgacccgctcccctctcctattcctcccgccgccgccgccgccctcgcccccgcctccctcctccgccgaacctccccgcccgcgtcgtaaccaatcgaaaaccaccaaactacgactataaccgaccgaatccgcgacaaccgcccgcccccgccccgccgaaacgccccgtattttactacaacccgcgaaaaatcgccgaaaaaaaacctaaaatacgccgaacaccgccccgacaa

SEQ ID NO: 4015 - DNA, 1078 bp, Artificial Sequence
  chemically treated genomic DNA (Homo sapiens) CpG-island No: 4015
agtttttattttttttttttttttttttttttttattttttttttcgttgtttttcgtttttcgttaatggagagcgagttgatgataaatagcgggtcgcggagttcgcgggattcgtattaggagtaataaaatagatttagagattaaggagttggggagggggcgggggaatagggagggagagcgtgtgagcgtttgcgagtgtgtggaggcggttgttgtggtagcgtaggcggttcggtttcggttcggagcgtagcggaagtcgcgagggatgtagcggcggggattttggtcggtggaggatgtggaggtggaagtggagcggatggcgttttttaagagtttcgttacgcgaggtttcgggttcgtggttttgtttttttcgggttttcgttttagggtcgttcggcgcgacgaagacgtcggggatagcgtcgcggggagggcgtttcgggtcgtgcgtgttgtatttataaagagtagtagtttcgttatttcgcgttttcgttgcgtgggggtcgaggggcgtttttcggttttttttttcggtttttcggcgagttggagattgtttttcggtttcggtcgtaagggggtgaggcgaggggtcggcgcggtttttttcgtcgcggtttcgtttcgcgtagttgttgtcgtagtcgtttttgttgttcgcgtatcggtattcgttcgtcggttttcgttttgcgtcgtttattcgcgcgcgtcgtttttcgtcgtcgatcgcgtatttcgttcggttttcgttgcgcgatttgggcgagtcgtcgtcgtttttttcgcgttcgttttacgcgttgtttggttgcgcggttcgttttttttttttatttttttcgtcgtcgtcgtcgttttcgttttcgtttttttttttcgtcgagttttttcgttcgcgtcgtggttaatcggaggttattaagttgcggttgtagtcggtcggattcgcggtagtcgttcgttttcgtttcgtcgaagcgtttcgtattttgttgtagttcgcggggggtcgtcggagggaagtttagagtgcgtcgagtatcgtttcggtag

SEQ ID NO: 4016 - DNA, 1078 bp, Artificial Sequence
  chemically treated genomic DNA (Homo sapiens) CpG-island No: 4016
ctaccgaaacgatactcgacgcactctaaacttccctccgacgaccccccgcgaactacaacaaaatacgaaacgcttcgacgaaacgaaaacgaacgactaccgcgaatccgaccgactacaaccgcaacttaataacctccgattaaccacgacgcgaacgaaaaaactcgacgaaaaaaaaaaacgaaaacgaaaacgacgacgacgacgaaaaaaataaaaaaaaaaaacgaaccgcgcaaccaaacaacgcgtaaaacgaacgcgaaaaaaacgacgacgactcgcccaaatcgcgcaacgaaaaccgaacgaaatacgcgatcgacgacgaaaaacgacgcgcgcgaataaacgacgcaaaacgaaaaccgacgaacgaataccgatacgcgaacaacaaaaacgactacgacaacaactacgcgaaacgaaaccgcgacgaaaaaaaccgcgccgacccctcgcctcacccccttacgaccgaaaccgaaaaacaatctccaactcgccgaaaaaccgaaaaaaaaaaccgaaaaacgcccctcgacccccacgcaacgaaaacgcgaaataacgaaactactactctttataaatacaacacgcacgacccgaaacgccctccccgcgacgctatccccgacgtcttcgtcgcgccgaacgaccctaaaacgaaaacccgaaaaaaacaaaaccacgaacccgaaacctcgcgtaacgaaactcttaaaaaacgccatccgctccacttccacctccacatcctccaccgaccaaaatccccgccgctacatccctcgcgacttccgctacgctccgaaccgaaaccgaaccgcctacgctaccacaacaaccgcctccacacactcgcaaacgctcacacgctctccctccctattcccccgccccctccccaactccttaatctctaaatctattttattactcctaatacgaatcccgcgaactccgcgacccgctatttatcatcaactcgctctccattaacgaaaaacgaaaaacaacgaaaaaaaaaataaaaaaaaaaaaaaaaaaaaaaaaaataaaaact

SEQ ID NO: 4017 - DNA, 558 bp, Artificial Sequence
  chemically treated genomic DNA (Homo sapiens) CpG-island No: 4017
ttcgagcgtgacgggaagttggggtaatttgttagttattcgtcgttattaagacgcggtacggcgtttggatcggaggggtttcgcgcgggcgcgaattttgggttcgggcgagtgggtggtgtttcgtttagttcgagacgggcgggcgcgcgggttaatgggtgtcgttttttggtcgcggggggtttcgattcgtgggtttcggttattagcgttttagtttcgaggtttagaagcggtaggcggaggcgcggttcgggcgttatggttatgttcggcgggttttacgcggttgtttttcgttcggcgcgttttcggtagggggcgttcggggtttagttggttcggttatgttgttggagatataggacgcgttgtacgtggcgttggagttggttatcgtcgcgttttcggtggcgggtaacgtgttggtgtgcgtcgcggtgggtacggcgaatattttgtagacgtttattaattattttttggtgtttttggttgcggtcgacgtggtcgtggggtttttcgttattttttttgttattattattagtt

SEQ ID NO: 4018 - DNA, 558 bp, Artificial Sequence
  chemically treated genomic DNA (Homo sapiens) CpG-island No: 4018
aactaataataataacaaaaaaaataacgaaaaaccccacgaccacgtcgaccgcaaccaaaaacaccaaaaaataattaataaacgtctacaaaatattcgccgtacccaccgcgacgcacaccaacacgttacccgccaccgaaaacgcgacgataaccaactccaacgccacgtacaacgcgtcctatatctccaacaacataaccgaaccaactaaaccccgaacgccccctaccgaaaacgcgccgaacgaaaaacaaccgcgtaaaacccgccgaacataaccataacgcccgaaccgcgcctccgcctaccgcttctaaacctcgaaactaaaacgctaataaccgaaacccacgaatcgaaaccccccgcgaccaaaaaacgacacccattaacccgcgcgcccgcccgtctcgaactaaacgaaacaccacccactcgcccgaacccaaaattcgcgcccgcgcgaaacccctccgatccaaacgccgtaccgcgtcttaataacgacgaataactaacaaattaccccaacttcccgtcacgctcgaa

SEQ ID NO: 4019 - DNA, 558 bp, Artificial Sequence
  chemically treated genomic DNA (Homo sapiens) CpG-island No: 4019
ggttgatggtgatggtaaaggggatggcgaagagttttacggttacgtcggtcgtagttagggatattaggaagtagttggtgggcgtttgtagagtgttcgtcgtgtttatcgcggcgtatattagtacgttgttcgttatcgaaagcgcggcgatgattagttttagcgttacgtatagcgcgttttgtgtttttagtagtatggtcgggttagttgggtttcgggcgttttttatcgaaggcgcgtcgggcgaggggtagtcgcgtgagattcgtcgggtatggttatagcgttcggatcgcgttttcgtttgtcgtttttgagtttcggggttggggcgttggtggtcgggatttacgggtcggggtttttcgcggttaagaggcggtatttattggttcgcgcgttcgttcgtttcgggttgggcggagtattatttattcgttcgagtttaaagttcgcgttcgcgcggggttttttcggtttaggcgtcgtgtcgcgttttggtggcggcggataattaataaattgttttaatttttcgttacgttcgag

SEQ ID NO: 4020 - DNA, 558 bp, Artificial Sequence
  chemically treated genomic DNA (Homo sapiens) CpG-island No: 4020
ctcgaacgtaacgaaaaattaaaacaatttattaattatccgccgccaccaaaacgcgacacgacgcctaaaccgaaaaaaccccgcgcgaacgcgaactttaaactcgaacgaataaataatactccgcccaacccgaaacgaacgaacgcgcgaaccaataaataccgcctcttaaccgcgaaaaaccccgacccgtaaatcccgaccaccaacgccccaaccccgaaactcaaaaacgacaaacgaaaacgcgatccgaacgctataaccatacccgacgaatctcacgcgactacccctcgcccgacgcgccttcgataaaaaacgcccgaaacccaactaacccgaccatactactaaaaacacaaaacgcgctatacgtaacgctaaaactaatcatcgccgcgctttcgataacgaacaacgtactaatatacgccgcgataaacacgacgaacactctacaaacgcccaccaactacttcctaatatccctaactacgaccgacgtaaccgtaaaactcttcgccatcccctttaccatcaccatcaacc

SEQ ID NO: 4021 - DNA, 1006 bp, Artificial Sequence
  chemically treated genomic DNA (Homo sapiens) CpG-island No: 4021
ttcggttcggcggtgttcggatgtttcgttcgcgtttatggcgtagttatatacgatttcggtttcgtatttcgcgcgtttttttgtatcgtcgtcgttatttcgtttaggagtttttttataatcgtcggtaatattacggttatcgcgtcgtaggatacgttttttacgatcggcggatcgtcgcgacgttttagttgattgcgtttatttgtggaggattttgatttttcgtcggggtagggcgagacggagtgacgtcggggcgcgttatcgcgcgtgcggacgtagggatgttttgtttagtcgttagggttcggttaattcggagggcgttcggcgcgtggtcgggggttaggagcgcgtttggtttgtagtgcgtagaggacgcggcgggagtatgtttcggtttttgagttggagtttgggtcgaggttttttgcgggtcgcggggcggcggtgtcggggttgtttcgcgcgtttgttttcggggttggtaggaggttcggggttcgaggtgtaggtgtcgttatttcgagtcgcgtcgtacggtcggggtttaggtttgttgtcgttgttggtaggtgaggggcgcgggtcgggcggggtcggtcgggcggggataggggcgcgggtcgggttcgatgattttagagttttttttcgtagcgttcgtttggttttcgaggttcgttgcggtagaggaggaggagtagtagggagtcgacggggtcgttgtcgaggacggggcggacgaggtcgaggtagagattatttagttgttgaagcgagttaaggtgaggcggtttcgggttttgcgttcggtcgagcgcggtagtttttgtgagcggggttttggcgttgttgcgtattatttttttcgtttcgtcgaagagtggatggaggtttcgcgggtaaaattgtcgagaatgaggtgggttattcgagaggggattggaatttatttaggttttttcgattttaaggtttgtagtaaaatttttgt

SEQ ID NO: 4022 - DNA, 1006 bp, Artificial Sequence
  chemically treated genomic DNA (Homo sapiens) CpG-island No: 4022
acaaaaattttactacaaaccttaaaatcgaaaaaacctaaataaattccaatcccctctcgaataacccacctcattctcgacaattttacccgcgaaacctccatccactcttcgacgaaacgaaaaaaataatacgcaacaacgccaaaaccccgctcacaaaaactaccgcgctcgaccgaacgcaaaacccgaaaccgcctcaccttaactcgcttcaacaactaaataatctctacctcgacctcgtccgccccgtcctcgacaacgaccccgtcgactccctactactcctcctcctctaccgcaacgaacctcgaaaaccaaacgaacgctacgaaaaaaaactctaaaatcatcgaacccgacccgcgcccctatccccgcccgaccgaccccgcccgacccgcgcccctcacctaccaacaacgacaacaaacctaaaccccgaccgtacgacgcgactcgaaataacgacacctacacctcgaaccccgaacctcctaccaaccccgaaaacaaacgcgcgaaacaaccccgacaccgccgccccgcgacccgcaaaaaacctcgacccaaactccaactcaaaaaccgaaacatactcccgccgcgtcctctacgcactacaaaccaaacgcgctcctaacccccgaccacgcgccgaacgccctccgaattaaccgaaccctaacgactaaacaaaacatccctacgtccgcacgcgcgataacgcgccccgacgtcactccgtctcgccctaccccgacgaaaaatcaaaatcctccacaaataaacgcaatcaactaaaacgtcgcgacgatccgccgatcgtaaaaaacgtatcctacgacgcgataaccgtaatattaccgacgattataaaaaaactcctaaacgaaataacgacgacgatacaaaaaaacgcgcgaaatacgaaaccgaaatcgtatataactacgccataaacgcgaacgaaacatccgaacaccgccgaaccgaa

SEQ ID NO: 4023 - DNA, 1006 bp, Artificial Sequence
  chemically treated genomic DNA (Homo sapiens) CpG-island No: 4023
gtagaggttttattgtaggttttagagtcggaaaagtttggatggattttaattttttttcggatgatttattttattttcggtaattttattcgcggagtttttatttatttttcggcgaggcggagagagtaatgcgtagtaacgttaagatttcgtttataaaggttatcgcgttcggtcgggcgtagggttcggagtcgttttattttggttcgttttagtagttggatgatttttgtttcggtttcgttcgtttcgttttcggtagcggtttcgtcggttttttgttgtttttttttttttgtcgtagcgggtttcgagaattaggcgagcgttgcgggaaggggttttgaggttatcgggttcggttcgcgtttttgttttcgttcggtcggtttcgttcggttcgcgttttttatttgttagtagcggtagtaggtttgggtttcggtcgtgcggcgcgattcgggatggcggtatttgtatttcgggtttcggattttttgttagtttcgggagtaggcgcgcggagtagtttcggtatcgtcgtttcgcggttcgtaggaagtttcggtttaggttttagtttaggagtcggaatatgttttcgtcgcgttttttgcgtattgtaggttagacgcgtttttggttttcgattacgcgtcgagcgtttttcggattggtcgggttttgacgattgagtaggatatttttgcgttcgtacgcgcgatgacgcgtttcgacgttatttcgtttcgttttgtttcggcggggggttaggattttttataggtaggcgtagttagttggagcgtcgcggcggttcgtcggtcgtggagggcgtgttttgcggcgcgatggtcgtagtgttgtcggcggttgtggaggagtttttgagcgagatggcggcggcggtgtaggagagcgcgcgaagtacgggatcgaggtcgtgtgtggttgcgttatgggcgcgggcggggtattcgggtatcgtcgggtcggg

SEQ ID NO: 4024 - DNA, 1006 bp, Artificial Sequence
  chemically treated genomic DNA (Homo sapiens) CpG-island No: 4024
cccgacccgacgatacccgaataccccgcccgcgcccataacgcaaccacacacgacctcgatcccgtacttcgcgcgctctcctacaccgccgccgccatctcgctcaaaaactcctccacaaccgccgacaacactacgaccatcgcgccgcaaaacacgccctccacgaccgacgaaccgccgcgacgctccaactaactacgcctacctataaaaaatcctaaccccccgccgaaacaaaacgaaacgaaataacgtcgaaacgcgtcatcgcgcgtacgaacgcaaaaatatcctactcaatcgtcaaaacccgaccaatccgaaaaacgctcgacgcgtaatcgaaaaccaaaaacgcgtctaacctacaatacgcaaaaaacgcgacgaaaacatattccgactcctaaactaaaacctaaaccgaaacttcctacgaaccgcgaaacgacgataccgaaactactccgcgcgcctactcccgaaactaacaaaaaatccgaaacccgaaatacaaataccgccatcccgaatcgcgccgcacgaccgaaacccaaacctactaccgctactaacaaataaaaaacgcgaaccgaacgaaaccgaccgaacgaaaacaaaaacgcgaaccgaacccgataacctcaaaaccccttcccgcaacgctcgcctaattctcgaaacccgctacgacaaaaaaaaaaaaacaacaaaaaaccgacgaaaccgctaccgaaaacgaaacgaacgaaaccgaaacaaaaatcatccaactactaaaacgaaccaaaataaaacgactccgaaccctacgcccgaccgaacgcgataacctttataaacgaaatcttaacgttactacgcattactctctccgcctcgccgaaaaataaataaaaactccgcgaataaaattaccgaaaataaaataaatcatccgaaaaaaaattaaaatccatccaaacttttccgactctaaaacctacaataaaacctctac

SEQ ID NO: 4025 - DNA, 525 bp, Artificial Sequence
  chemically treated genomic DNA (Homo sapiens) CpG-island No: 4025
agatcgggcgcgcgcgtacgattcgttttatttatagattatcgtgattagggcgtatagatatatacgcgcgtttttttacgtacgttcggttatacgtaggttttttttttttgttatagaggaacgcgttggcgtgcgtacggcggattaattattatttttagatttattcggatcgaggcgtaggttgcgcgtacgcgcggtttcgagttttcgtttttttgtcgcgtttgtcgggggcggggcgtcgttgggggcgggttttgcggtatcgttcgggaagttgcgcgagggtcgatagttttcgttatattttttattttttttggtttagcgagcgttgtcgggttagggttaagcggagggtttcgacggcgcggacggagcgaagcgtcgagttatggcgtattaaacgggtatttacggtgagggcggatggcgggcgggtagggggtttcggtttgggttttcggaagcgttttttttcggttttcggtttttttttttattttatattagtcg

SEQ ID NO: 4026 - DNA, 525 bp, Artificial Sequence
  chemically treated genomic DNA (Homo sapiens) CpG-island No: 4026
cgactaatataaaataaaaaaaaaaaccgaaaaccgaaaaaaaacgcttccgaaaacccaaaccgaaaccccctacccgcccgccatccgccctcaccgtaaatacccgtttaatacgccataactcgacgcttcgctccgtccgcgccgtcgaaaccctccgcttaaccctaacccgacaacgctcgctaaaccaaaaaaaataaaaaatataacgaaaactatcgaccctcgcgcaacttcccgaacgataccgcaaaacccgcccccaacgacgccccgcccccgacaaacgcgacaaaaaaacgaaaactcgaaaccgcgcgtacgcgcaacctacgcctcgatccgaataaatctaaaaataataattaatccgccgtacgcacgccaacgcgttcctctataacaaaaaaaaaaaacctacgtataaccgaacgtacgtaaaaaaacgcgcgtatatatctatacgccctaatcacgataatctataaataaaacgaatcgtacgcgcgcgcccgatct

SEQ ID NO: 4027 - DNA, 525 bp, Artificial Sequence
  chemically treated genomic DNA (Homo sapiens) CpG-island No: 4027
cggttggtgtggggtggagggaggggtcgagagtcgggggggggcgttttcgagagtttagatcgaggttttttgttcgttcgttattcgtttttatcgtggatgttcgtttggtgcgttatggttcggcgtttcgtttcgttcgcgtcgtcggagtttttcgtttgattttggttcggtaacgttcgttggattaagagaggtggaggatgtggcggaggttgtcgattttcgcgtagtttttcgggcggtgtcgtaggattcgtttttagcggcgtttcgttttcgataggcgcggtagggaggcggggattcggggtcgcgcgtgcgcgtagtttgcgtttcggttcgggtgggtttaaggatgatgattgattcgtcgtgcgtacgttagcgcgtttttttgtggtaggagaggggggtttgcgtgtgatcgagcgtgcgtgggaggacgcgcgtgtgtgtttgtgcgttttgattacggtggtttgtgggtggggcggatcgtgcgcgcgcgttcgattt

SEQ ID NO: 4028 - DNA, 525 bp, Artificial Sequence
  chemically treated genomic DNA (Homo sapiens) CpG-island No: 4028
aaatcgaacgcgcgcgcacgatccgccccacccacaaaccaccgtaatcaaaacgcacaaacacacacgcgcgtcctcccacgcacgctcgatcacacgcaaacccccctctcctaccacaaaaaaacgcgctaacgtacgcacgacgaatcaatcatcatccttaaacccacccgaaccgaaacgcaaactacgcgcacgcgcgaccccgaatccccgcctccctaccgcgcctatcgaaaacgaaacgccgctaaaaacgaatcctacgacaccgcccgaaaaactacgcgaaaatcgacaacctccgccacatcctccacctctcttaatccaacgaacgttaccgaaccaaaatcaaacgaaaaactccgacgacgcgaacgaaacgaaacgccgaaccataacgcaccaaacgaacatccacgataaaaacgaataacgaacgaacaaaaaacctcgatctaaactctcgaaaacgcccccccccgactctcgacccctccctccaccccacaccaaccg

SEQ ID NO: 4029 - DNA, 943 bp, Artificial Sequence
  chemically treated genomic DNA (Homo sapiens) CpG-island No: 4029
gcgcgcgcgggggacgtgtgcgggcgttttcgttattttgtgagtttataattcggagtcgttgggtcggtttttgttatttcggcgtttttatttcgtttttcgcgggtttgttttgtgtgttatggacgggtgagtcgtacgtcgtttcgcgttttatcgtttttttcgcgtcgtagttttgttttcgtcgtcgcgtcggttttttcggggtcgatttcgttttttttcgggcgggagggggcggcgggttttttttttttttttcgcgtggcgggcgcgggtgcggggcgggttaggggtttttcgggggtttggtcgcgtttttatttttcgttcggttcgttttcggttttcgcgcgtttcgtttttagcgtacgcggtttttcgcgttttttttttttcgcgcgcgttttcgtatttcgtttttgtttcgtttcggcggcgcgcggtttttttcgtttttcgttcggttttcgcgcgttcggatggtttttttcgtttttcgttcgtttttttcgtgcgtttgcgtagttcgtcgcgcgttttcgttggttttagcgcgcgtgcgcggtcgttatcgggggcgcgcgtttttttcgtcgttcggattttgttttcggcgtagtttcggaagcgtaggcggggttggggcggtcgtcgggagggaaagttggcgtcggggtttcgtcgcgggttcgagtttttgcgtttttcgttttatttttgtttttcgtgcgtttcgggtcgcggttaaggggtttcggtgatttcgggagagaagcggtcgtttcgagggtttgtttttcgtttcggggtcggaggggtttttttagggattttcgcgggcgtcgttatggggaggggttttttcggttttcgggtcggggtagttttttcgggcggttttgttgggcgggttttttttgggagaggtgggagt

SEQ ID NO: 4030 - DNA, 943 bp, Artificial Sequence
  chemically treated genomic DNA (Homo sapiens) CpG-island No: 4030
actcccacctctcccaaaaaaaacccgcccaacaaaaccgcccgaaaaaactaccccgacccgaaaaccgaaaaaacccctccccataacgacgcccgcgaaaatccctaaaaaaacccctccgaccccgaaacgaaaaacaaaccctcgaaacgaccgcttctctcccgaaatcaccgaaaccccttaaccgcgacccgaaacgcacgaaaaacaaaaataaaacgaaaaacgcaaaaactcgaacccgcgacgaaaccccgacgccaactttccctcccgacgaccgccccaaccccgcctacgcttccgaaactacgccgaaaacaaaatccgaacgacgaaaaaaacgcgcgcccccgataacgaccgcgcacgcgcgctaaaaccaacgaaaacgcgcgacgaactacgcaaacgcacgaaaaaaacgaacgaaaaacgaaaaaaaccatccgaacgcgcgaaaaccgaacgaaaaacgaaaaaaaccgcgcgccgccgaaacgaaacaaaaacgaaatacgaaaacgcgcgcgaaaaaaaaaaaacgcgaaaaaccgcgtacgctaaaaacgaaacgcgcgaaaaccgaaaacgaaccgaacgaaaaataaaaacgcgaccaaacccccgaaaaacccctaacccgccccgcacccgcgcccgccacgcgaaaaaaaaaaaaaaaacccgccgccccctcccgcccgaaaaaaaacgaaatcgaccccgaaaaaaccgacgcgacgacgaaaacaaaactacgacgcgaaaaaaacgataaaacgcgaaacgacgtacgactcacccgtccataacacacaaaacaaacccgcgaaaaacgaaataaaaacgccgaaataacaaaaaccgacccaacgactccgaattataaactcacaaaataacgaaaacgcccgcacacgtcccccgcgcgcgc

SEQ ID NO: 4031 - DNA, 943 bp, Artificial Sequence
  chemically treated genomic DNA (Homo sapiens) CpG-island No: 4031
gtttttattttttttaagggaagttcgtttagtaaagtcgttcggaaaggttgtttcggttcgagagtcgggaaggtttttttttatgacggcgttcgcgggggtttttggagaggttttttcggtttcggggcggaggatagattttcggggcggtcgtttttttttcgagattatcgaaattttttggtcgcggttcggggcgtacggggggtaggggtagggcggggagcgtagagattcgggttcgcggcgaggtttcggcgttagttttttttttcggcggtcgttttagtttcgtttgcgttttcggggttgcgtcgggggtagagttcgggcggcgggaaaggcgcgcgttttcgatggcggtcgcgtacgcgcgttggggttaacggggacgcgcgacgggttacgtaggcgtacgaggggagcggacgggaggcgggaagggttattcgggcgcgcgagggtcggacgggaagcgggaagggtcgcgcgtcgtcgaggcggggtaaaggcgaagtgcggggacgcgcgcggagggggaggggcgcgggaggtcgcgtgcgttagggacggggcgcgcgggggtcggaagcgggtcggacgggggatggggacgcggttagattttcgggaagtttttgattcgtttcgtattcgcgttcgttacgcggagaggaaggggagagttcgtcgttttttttcgttcgagagggggcgagatcggtttcggggaggtcggcgcggcggcgggggtagggttgcggcgcggggagggcggtggggcgcggggcgacgtgcgatttattcgtttatggtatatagagtagattcgcgggggacggagtggaggcgtcggaatagtaggaatcgatttaacggtttcgagttatagatttataaaatggcggagacgttcgtatacgtttttcgcgcgcgt

SEQ ID NO: 4032 - DNA, 943 bp, Artificial Sequence
  chemically treated genomic DNA (Homo sapiens) CpG-island No: 4032
acgcgcgcgaaaaacgtatacgaacgtctccgccattttataaatctataactcgaaaccgttaaatcgattcctactattccgacgcctccactccgtcccccgcgaatctactctatataccataaacgaataaatcgcacgtcgccccgcgccccaccgccctccccgcgccgcaaccctacccccgccgccgcgccgacctccccgaaaccgatctcgccccctctcgaacgaaaaaaaacgacgaactctccccttcctctccgcgtaacgaacgcgaatacgaaacgaatcaaaaacttcccgaaaatctaaccgcgtccccatcccccgtccgacccgcttccgacccccgcgcgccccgtccctaacgcacgcgacctcccgcgcccctccccctccgcgcgcgtccccgcacttcgcctttaccccgcctcgacgacgcgcgacccttcccgcttcccgtccgaccctcgcgcgcccgaataacccttcccgcctcccgtccgctcccctcgtacgcctacgtaacccgtcgcgcgtccccgttaaccccaacgcgcgtacgcgaccgccatcgaaaacgcgcgcctttcccgccgcccgaactctacccccgacgcaaccccgaaaacgcaaacgaaactaaaacgaccgccgaaaaaaaaaactaacgccgaaacctcgccgcgaacccgaatctctacgctccccgccctacccctaccccccgtacgccccgaaccgcgaccaaaaaatttcgataatctcgaaaaaaaaacgaccgccccgaaaatctatcctccgccccgaaaccgaaaaaacctctccaaaaacccccgcgaacgccgtcataaaaaaaaaccttcccgactctcgaaccgaaacaacctttccgaacgactttactaaacgaacttcccttaaaaaaaataaaaac

SEQ ID NO: 4033 - DNA, 1370 bp, Artificial Sequence
  chemically treated genomic DNA (Homo sapiens) CpG-island No: 4033
cgtttcgtttcgttttcgttgttggttttttttttttgtgtcgcgggcggtttcgattttcgttcgggtgttcgtcgaagcgttaggtggggttacgggcggggtgggttcggttttgagagtgggggtttttgcgtggggcgtgcgggttagagcgaatgattaagagtcggatttcggtttttgtcgttttattgagtattcgcgcggtcgttcgcgttttcggttcgtttttcgttcgttttcggtttcgtcgcgttagtcggggaagcggcgcgtttgtattttgcggaagtagttttcggttttcgttttcgtttcgcgtttcgttagttttaggtcgttcgcgtggcgtcgtagcgtggattttcggttgttcgggtttagcgttttatcggtcgcgtttagcgggggtagtttttcgttcgtggttaggttgacggtggttacggtttcgaatcgcggttttttttggtttacgtcgttgatcgacgagtcgggggatacgttcgggggtttggtttcgtcgcggaagtcgcgcgttaggttttttagttcgtagtcgtcgtcggttttcgttttggtttcgtcgttcgtcgttttttatttttagggcgcgtcgtcggtcgataggtgtattacggggtggtgcggcgcgtgcgcgtcgatggttacgatgttggcggagtcgcggttcgacggcgatcggtattgcgaggagtcggagttggcgttggacgacgacgtcgtttcggtcgttttggggttcggcgcgttcggagttttggatatggcgatgatttgtagtagtcgcggagggttggttattgtcgtttcgtttttttcggttattatgagttatttggcgcgtatttcggcgtcgtttttgggggataggtcggttttcgtttgcgcgttttttttcgggatgtgtattagcggcggcggtttcgcgcgcggtgggaggatgattcgaggttttagtttcggtcgcgtttgtacggtggggtagagcgagggcggggtcgggttttcgttttttttttttttttttttttttttttttttttcgtttttttttttttttttttttttcgttatgggttcggcgggcgcgcgtaggtgttcggggttggcgtcgtcgggtagttttaggtcgcggttttttaggtttttttgtttttattcgttgatgagttgtttggagcgcgaggcgtttagcggtacgtggatggttatgtggcggcgcgcggggtcgtttagcgagggcgcgttggttttgggtagcgtgtggttgaaggttattatgttttttttggttatggggttgcgcggggttagtaggtttacgtttacgttggcgcgtttta

SEQ ID NO: 4034 - DNA, 1370 bp, Artificial Sequence
  chemically treated genomic DNA (Homo sapiens) CpG-island No: 4034
taaaacgcgccaacgtaaacgtaaacctactaaccccgcgcaaccccataaccaaaaaaaacataataaccttcaaccacacgctacccaaaaccaacgcgccctcgctaaacgaccccgcgcgccgccacataaccatccacgtaccgctaaacgcctcgcgctccaaacaactcatcaacgaataaaaacaaaaaaacctaaaaaaccgcgacctaaaactacccgacgacgccaaccccgaacacctacgcgcgcccgccgaacccataacgaaaaaaaaaaaaaaaaaaaaaaacgaaaaaaaaaaaaaaaaaaaaaaaaaaaaaaaaaacgaaaacccgaccccgccctcgctctaccccaccgtacaaacgcgaccgaaactaaaacctcgaatcatcctcccaccgcgcgcgaaaccgccgccgctaatacacatcccgaaaaaaaacgcgcaaacgaaaaccgacctatcccccaaaaacgacgccgaaatacgcgccaaataactcataataaccgaaaaaaacgaaacgacaataaccaaccctccgcgactactacaaatcatcgccatatccaaaactccgaacgcgccgaaccccaaaacgaccgaaacgacgtcgtcgtccaacgccaactccgactcctcgcaataccgatcgccgtcgaaccgcgactccgccaacatcgtaaccatcgacgcgcacgcgccgcaccaccccgtaatacacctatcgaccgacgacgcgccctaaaaataaaaaacgacgaacgacgaaaccaaaacgaaaaccgacgacgactacgaactaaaaaacctaacgcgcgacttccgcgacgaaaccaaacccccgaacgtatcccccgactcgtcgatcaacgacgtaaaccaaaaaaaaccgcgattcgaaaccgtaaccaccgtcaacctaaccacgaacgaaaaactacccccgctaaacgcgaccgataaaacgctaaacccgaacaaccgaaaatccacgctacgacgccacgcgaacgacctaaaactaacgaaacgcgaaacgaaaacgaaaaccgaaaactacttccgcaaaatacaaacgcgccgcttccccgactaacgcgacgaaaccgaaaacgaacgaaaaacgaaccgaaaacgcgaacgaccgcgcgaatactcaataaaacgacaaaaaccgaaatccgactcttaatcattcgctctaacccgcacgccccacgcaaaaacccccactctcaaaaccgaacccaccccgcccgtaaccccacctaacgcttcgacgaacacccgaacgaaaatcgaaaccgcccgcgacacaaaaaaaaaaaaccaacaacgaaaacgaaacgaaacg

SEQ ID NO: 4035 - DNA, 1370 bp, Artificial Sequence
  chemically treated genomic DNA (Homo sapiens) CpG-island No: 4035
tgaagcgcgttagcgtggacgtggatttgttggtttcgcgtagttttatggttaaggagaatatggtgatttttagttatacgttgtttagggttagcgcgttttcgttggacgatttcgcgcgtcgttatatgattatttacgtgtcgttggacgtttcgcgttttaagtagtttattagcgagtggaagtagaagagtttggagggtcgcggtttggggttgttcgacgacgttagtttcgggtatttgcgcgcgttcgtcgaatttatggcggaggaggaggaagaggaggaggacgaagaggaagaggaggaggaggaagaggaggaggacgagggttcggtttcgttttcgttttattttatcgtgtaggcgcggtcggggttggggtttcgggttatttttttatcgcgcgcggggtcgtcgtcgttggtgtatatttcggaggagggcgcgtagacgggggtcggtttgttttttaaaagcggcgtcggggtgcgcgttaagtggtttatgatggtcgagaagagcggggcggtagtggttaatttttcgcggttgttgtaggttatcgttatgtttaaggtttcgggcgcgtcgggttttaaggcggtcgagacggcgtcgtcgtttagcgttagtttcgatttttcgtagtatcggtcgtcgtcggatcgcgatttcgttagtatcgtgattatcgacgcgtacgcgtcgtattatttcgtggtgtatttgtcggtcggcggcgcgttttgggagtggaaggcggcgggcggcggggttaaggcggaggtcgacggcggttacgagttgggggatttggcgcgcggttttcgcggcggggttaagttttcgggcgtgtttttcggttcgtcggttagcgacgtggattaggaggagtcgcggttcggggtcgtggttatcgttaatttggttacgggcgaggggttgttttcgttgggcgcggtcgatggggcgttgggttcgggtagtcgggagtttacgttgcggcgttacgcgggcggtttggggttggcggagcgcgaggcggaggcggaggtcgagggttattttcgtaagatgtaggcgcgtcgttttttcgattagcgcggcggggtcgggggcgggcggggggcgggtcgagggcgcgggcggtcgcgcggatgtttaataaagcggtagaaatcgaggttcggtttttggttattcgttttggttcgtacgttttacgtagggatttttatttttagggtcgggtttatttcgttcgtggttttatttggcgtttcggcggatattcgggcgggagtcggggtcgttcgcggtatagaaagaggaagttagtaacgaaggcggaacggagcg

SEQ ID NO: 4036 - DNA, 1370 bp, Artificial Sequence
  chemically treated genomic DNA (Homo sapiens) CpG-island No: 4036
cgctccgttccgccttcgttactaacttcctctttctataccgcgaacgaccccgactcccgcccgaatatccgccgaaacgccaaataaaaccacgaacgaaataaacccgaccctaaaaataaaaatccctacgtaaaacgtacgaaccaaaacgaataaccaaaaaccgaacctcgatttctaccgctttattaaacatccgcgcgaccgcccgcgccctcgacccgccccccgcccgcccccgaccccgccgcgctaatcgaaaaaacgacgcgcctacatcttacgaaaataaccctcgacctccgcctccgcctcgcgctccgccaaccccaaaccgcccgcgtaacgccgcaacgtaaactcccgactacccgaacccaacgccccatcgaccgcgcccaacgaaaacaacccctcgcccgtaaccaaattaacgataaccacgaccccgaaccgcgactcctcctaatccacgtcgctaaccgacgaaccgaaaaacacgcccgaaaacttaaccccgccgcgaaaaccgcgcgccaaatcccccaactcgtaaccgccgtcgacctccgccttaaccccgccgcccgccgccttccactcccaaaacgcgccgccgaccgacaaatacaccacgaaataatacgacgcgtacgcgtcgataatcacgatactaacgaaatcgcgatccgacgacgaccgatactacgaaaaatcgaaactaacgctaaacgacgacgccgtctcgaccgccttaaaacccgacgcgcccgaaaccttaaacataacgataacctacaacaaccgcgaaaaattaaccactaccgccccgctcttctcgaccatcataaaccacttaacgcgcaccccgacgccgcttttaaaaaacaaaccgacccccgtctacgcgccctcctccgaaatatacaccaacgacgacgaccccgcgcgcgataaaaaaataacccgaaaccccaaccccgaccgcgcctacacgataaaataaaacgaaaacgaaaccgaaccctcgtcctcctcctcttcctcctcctcctcttcctcttcgtcctcctcctcttcctcctcctccgccataaattcgacgaacgcgcgcaaatacccgaaactaacgtcgtcgaacaaccccaaaccgcgaccctccaaactcttctacttccactcgctaataaactacttaaaacgcgaaacgtccaacgacacgtaaataatcatataacgacgcgcgaaatcgtccaacgaaaacgcgctaaccctaaacaacgtataactaaaaatcaccatattctccttaaccataaaactacgcgaaaccaacaaatccacgtccacgctaacgcgcttca

SEQ ID NO: 4037 - DNA, 1832 bp, Artificial Sequence
  chemically treated genomic DNA (Homo sapiens) CpG-island No: 4037
ggagttggaagatttttggggcgttttaaggattttgagagatttggagaatgtttgaagttattttgtacggcgtcgaaggcggggggcgcgttggaacgtttttttttcggggggaggcggttcgggaagtcggattttttttttttcgtagtcggtgtaggcggtgcggttcgggagtttttgaagttcgtagcgcggtcgtcgtttcgtttcgtattaacgcggagtagatgttattcgcgcgttttttttcggttcgttcggtttcgattagcgtttgtagcgcgcggtatttttttcgcgtagataaaaggacgtttttttcgcgcgttttttattttaaatttcggcgttcgggtcgggtttttttttattcgagaaagggggcgtttcggggttttcgtgcgttcgggttgggggggacggttttcgcgtttaagttgtatagttcgttcggcgtttttcgcgttttcgttcggggttgtttaaagtttttcgaagtgttcggttcgacgggggcgacgcgggtttggcgagtttcgggtttttttacgtcgtcgttttttcggcgtcgcgcgaagttggagaataatgattttcgggtcgcggggcgtttttcgatatcgttttcgttttaatttttttcgcgtttttttttaataagcgcgcgcggggcgggtcggggttttttgggtataaagtacgggggtatcgggcgcgtttttcgtttttcgtcgggtttatttgttgggcgcggtcgggtacgcggcgcgtgggggggggcggcggtatgaagcgggggggttttttttcggataaaggtgcgtcgcggtcgggttttcgagggtcgcgcgtgggcggcggcggcggcgcgcgtggttcgggttttttttattttcgcgtggttcgtttcgcggggttcgtgcgcgcggtcggtcggggcgtttttggggtagcggcgtgcgcggtgttcgcggtgttcgtcgtcgcgtcggtttcggttcgttacgttcgtagtcgtcgtcgttgttttatttttttgcggcgggagatatgtttcgtttttcgttcgcgtcgtttcgtttcgtttcgtgtaggtttcgtttttgtttcgttttcgagtgtttcgttcggcggtttacgcggattttttcgttattttcgggcggttcgggttcgaacgttttagttcggtttttcgagtattttcgtgaggatttcgaatttcgtgaggtttagagtttgggagcggggacgcgtagaggaggcggtcgggttacggcgcggggagaaattacggattattttcgttcgcggaagtatatacgagttgtgcgtttagtttatgacgtaagcgagtaaggttcgtgagattgaaagttaaggtagagtagtttggttaatcggaagtcgcgaaagtttgatgggcggggattttagttattcgtggtgaggtttcgtttttttttttttcggtttcgttttttagtagaggcgggattttgcgagcgagaggtcgcgagaggcggtcggggtgggttttggagttttgtttttaggttggcgtggtcgttcgcgcggagttttttgtttggttatatttgcgtttttcgggtcggtttcgcgtgttgagtggtgcgagcgggtattacggtttcgagggggttacgttagatttattttttcggcgggaaaatcgattttggtttcggttttgggttagagagtttcgcggggagttttagcggtgtttttgtcgatttgagttttcgtttcggtatttgtgaatttggatttgattttggatagaatttaggttagatttggtt

SEQ ID NO: 4038 - DNA, 1832 bp, Artificial Sequence
  chemically treated genomic DNA (Homo sapiens) CpG-island No: 4038
aaccaaatctaacctaaattctatccaaaatcaaatccaaattcacaaataccgaaacgaaaactcaaatcgacaaaaacaccgctaaaactccccgcgaaactctctaacccaaaaccgaaaccaaaatcgattttcccgccgaaaaaataaatctaacgtaaccccctcgaaaccgtaatacccgctcgcaccactcaacacgcgaaaccgacccgaaaaacgcaaatataaccaaacaaaaaactccgcgcgaacgaccacgccaacctaaaaacaaaactccaaaacccaccccgaccgcctctcgcgacctctcgctcgcaaaatcccgcctctactaaaaaacgaaaccgaaaaaaaaaaaaacgaaacctcaccacgaataactaaaatccccgcccatcaaactttcgcgacttccgattaaccaaactactctaccttaactttcaatctcacgaaccttactcgcttacgtcataaactaaacgcacaactcgtatatacttccgcgaacgaaaataatccgtaatttctccccgcgccgtaacccgaccgcctcctctacgcgtccccgctcccaaactctaaacctcacgaaattcgaaatcctcacgaaaatactcgaaaaaccgaactaaaacgttcgaacccgaaccgcccgaaaataacgaaaaaatccgcgtaaaccgccgaacgaaacactcgaaaacgaaacaaaaacgaaacctacacgaaacgaaacgaaacgacgcgaacgaaaaacgaaacatatctcccgccgcaaaaaaataaaacaacgacgacgactacgaacgtaacgaaccgaaaccgacgcgacgacgaacaccgcgaacaccgcgcacgccgctaccccaaaaacgccccgaccgaccgcgcgcacgaaccccgcgaaacgaaccacgcgaaaataaaaaaaacccgaaccacgcgcgccgccgccgccgcccacgcgcgaccctcgaaaacccgaccgcgacgcacctttatccgaaaaaaaacccccccgcttcataccgccgcccccccccacgcgccgcgtacccgaccgcgcccaacaaataaacccgacgaaaaacgaaaaacgcgcccgatacccccgtactttatacccaaaaaaccccgacccgccccgcgcgcgcttattaaaaaaaaacgcgaaaaaaattaaaacgaaaacgatatcgaaaaacgccccgcgacccgaaaatcattattctccaacttcgcgcgacgccgaaaaaacgacgacgtaaaaaaacccgaaactcgccaaacccgcgtcgcccccgtcgaaccgaacacttcgaaaaactttaaacaaccccgaacgaaaacgcgaaaaacgccgaacgaactatacaacttaaacgcgaaaaccgtcccccccaacccgaacgcacgaaaaccccgaaacgccccctttctcgaataaaaaaaaacccgacccgaacgccgaaatttaaaataaaaaacgcgcgaaaaaaacgtccttttatctacgcgaaaaaaataccgcgcgctacaaacgctaatcgaaaccgaacgaaccgaaaaaaaacgcgcgaataacatctactccgcgttaatacgaaacgaaacgacgaccgcgctacgaacttcaaaaactcccgaaccgcaccgcctacaccgactacgaaaaaaaaaaaatccgacttcccgaaccgcctccccccgaaaaaaaaacgttccaacgcgccccccgccttcgacgccgtacaaaataacttcaaacattctccaaatctctcaaaatccttaaaacgccccaaaaatcttccaactcc

SEQ ID NO: 4039 - DNA, 1832 bp, Artificial Sequence
  chemically treated genomic DNA (Homo sapiens) CpG-island No: 4039
agttagatttggtttgagttttgtttaaagttaggtttaaatttatagatgtcgagacggagatttaagtcggtaaaggtatcgttgagatttttcgcggggttttttgatttagagtcggagttagagtcggttttttcgtcgggaaaatgggtttgacgtagttttttcggggtcgtgatattcgttcgtattatttagtacgcggggtcggttcgaggaacgtaaatataattaagtagaaggtttcgcgcgggcggttacgttaatttgagaataaaattttaggatttatttcggtcgtttttcgcggtttttcgttcgtagagtttcgtttttgttgaggggcggggtcgagaagaaaggaggcggggttttattacgaatggttaggattttcgtttattagattttcgcggttttcgattgattagattgttttgttttagtttttaattttacgggttttattcgtttgcgttatggattaagcgtatagttcgtgtgtgttttcgcggacggggatagttcgtgattttttttcgcgtcgtggttcgatcgttttttttgcgcgttttcgtttttaggttttggattttacgggattcggggtttttacgagggtgttcgagaggtcgagttagggcgttcgggttcgagtcgttcggaggtggcggagggattcgcgtgggtcgtcgggcggggtattcgggggcggggtaggggcggggtttgtacggggcggggcggggcggcgcgggcggggggcggaatatgtttttcgtcgtaggaagatgaggtagcggcggcggttgcgggcgtagcgggtcggagtcgacgcggcggcgggtatcgcgggtatcgcgtacgtcgttgttttaggggcgtttcggtcggtcgcgcgtacgggtttcgcgggacgggttacgcgggggtgggaggggttcgggttacgcgcgtcgtcgtcgtcgtttacgcgcgattttcgggggttcggtcgcgacgtatttttgttcgggggggggttttttcgttttatgtcgtcgtttttttttacgcgtcgcgtgttcggtcgcgtttagtaggtgagttcggcggggggcggggggcgcgttcggtattttcgtgttttgtgtttagggaatttcggttcgtttcgcgcgcgtttgttgggggggggcgcggaggaagttggggcgggggcggtgtcggggggcgtttcgcggttcgggagttattgttttttaatttcgcgcggcgtcgggggggcggcgacgtggaggagttcggagttcgttaggttcgcgtcgttttcgtcgggtcgggtatttcgggaaattttaagtagtttcgggcgggggcgcggggggcgtcggacgggttgtgtaatttaggcgcgaggatcgttttttttagttcgggcgtacggggatttcggggcgttttttttttcgggtagaggggggttcggttcgggcgtcggagtttggggtggggagcgcgcgggagggacgtttttttgtttgcgcggggaaggtgtcgcgcgttgtaggcgttggtcggggtcgggcgggtcgggggggggcgcgcgggtaatatttgtttcgcgttaatgcggggcgaggcggcggtcgcgttgcgagttttaaaggttttcgggtcgtatcgtttgtatcggttgcggggggaggggggttcggtttttcgggtcgttttttttcgggaaaaaggcgttttagcgcgtttttcgttttcggcgtcgtgtaaagtggttttaaatattttttaagttttttaaagtttttgggacgttttagaagttttttagtttt

SEQ ID NO: 4040 - DNA, 1832 bp, Artificial Sequence
  chemically treated genomic DNA (Homo sapiens) CpG-island No: 4040
aaaactaaaaaacttctaaaacgtcccaaaaactttaaaaaacttaaaaaatatttaaaaccactttacacgacgccgaaaacgaaaaacgcgctaaaacgcctttttcccgaaaaaaaacgacccgaaaaaccgaacccccctccccccgcaaccgatacaaacgatacgacccgaaaacctttaaaactcgcaacgcgaccgccgcctcgccccgcattaacgcgaaacaaatattacccgcgcgcccccccccgacccgcccgaccccgaccaacgcctacaacgcgcgacaccttccccgcgcaaacaaaaaaacgtccctcccgcgcgctccccaccccaaactccgacgcccgaaccgaacccccctctacccgaaaaaaaaaacgccccgaaatccccgtacgcccgaactaaaaaaaacgatcctcgcgcctaaattacacaacccgtccgacgccccccgcgcccccgcccgaaactacttaaaatttcccgaaatacccgacccgacgaaaacgacgcgaacctaacgaactccgaactcctccacgtcgccgcccccccgacgccgcgcgaaattaaaaaacaataactcccgaaccgcgaaacgccccccgacaccgcccccgccccaacttcctccgcgcccccccccaacaaacgcgcgcgaaacgaaccgaaattccctaaacacaaaacacgaaaataccgaacgcgccccccgccccccgccgaactcacctactaaacgcgaccgaacacgcgacgcgtaaaaaaaaacgacgacataaaacgaaaaaacccccccccgaacaaaaatacgtcgcgaccgaacccccgaaaatcgcgcgtaaacgacgacgacgacgcgcgtaacccgaacccctcccacccccgcgtaacccgtcccgcgaaacccgtacgcgcgaccgaccgaaacgcccctaaaacaacgacgtacgcgatacccgcgatacccgccgccgcgtcgactccgacccgctacgcccgcaaccgccgccgctacctcatcttcctacgacgaaaaacatattccgccccccgcccgcgccgccccgccccgccccgtacaaaccccgcccctaccccgcccccgaataccccgcccgacgacccacgcgaatccctccgccacctccgaacgactcgaacccgaacgccctaactcgacctctcgaacaccctcgtaaaaaccccgaatcccgtaaaatccaaaacctaaaaacgaaaacgcgcaaaaaaaacgatcgaaccacgacgcgaaaaaaaatcacgaactatccccgtccgcgaaaacacacacgaactatacgcttaatccataacgcaaacgaataaaacccgtaaaattaaaaactaaaacaaaacaatctaatcaatcgaaaaccgcgaaaatctaataaacgaaaatcctaaccattcgtaataaaaccccgcctcctttcttctcgaccccgcccctcaacaaaaacgaaactctacgaacgaaaaaccgcgaaaaacgaccgaaataaatcctaaaattttattctcaaattaacgtaaccgcccgcgcgaaaccttctacttaattatatttacgttcctcgaaccgaccccgcgtactaaataatacgaacgaatatcacgaccccgaaaaaactacgtcaaacccattttcccgacgaaaaaaccgactctaactccgactctaaatcaaaaaaccccgcgaaaaatctcaacgatacctttaccgacttaaatctccgtctcgacatctataaatttaaacctaactttaaacaaaactcaaaccaaatctaact

SEQ ID NO: 4041 - DNA, 516 bp, Artificial Sequence
  chemically treated genomic DNA (Homo sapiens) CpG-island No: 4041
ttttcgggggagagtaatgcgtattttcggaatgaggggggtggggaaggatgcgatgtgtaagtacggagggcggttcgggggtgcgatatcgtacgttcggggttaggattttttattttgtcgttgtaattttttaggattcgttcgatagtttttgtttcgtcggttcggacgatgtagagggcgcgttttttatttatggtcgtaggtgcgggggagtcgcggtcgttttgcgcgtttaagtcgttgtttttaggtaaacgtttcgcgttttcgttcgtttttttttagttttttttttttttttttttttttttttcgttttgtttttaattcgttagttttcgttcgggtcggttcgacgttatcgttttttaatttttatttcgcgacgttatcgtttttttagtaatcggcgttttacggtcgtttttgataaggtttaggattcggtcgaggtttggttagcggatcgaggcggagttaggtttaaggttttgtttgtttttttgt

SEQ ID NO: 4042 - DNA, 516 bp, Artificial Sequence
  chemically treated genomic DNA (Homo sapiens) CpG-island No: 4042
acaaaaaaacaaacaaaaccttaaacctaactccgcctcgatccgctaaccaaacctcgaccgaatcctaaaccttatcaaaaacgaccgtaaaacgccgattactaaaaaaacgataacgtcgcgaaataaaaattaaaaaacgataacgtcgaaccgacccgaacgaaaactaacgaattaaaaacaaaacgaaaaaaaaaaaaaaaaaaaaaaaaaaaactaaaaaaaaacgaacgaaaacgcgaaacgtttacctaaaaacaacgacttaaacgcgcaaaacgaccgcgactcccccgcacctacgaccataaataaaaaacgcgccctctacatcgtccgaaccgacgaaacaaaaactatcgaacgaatcctaaaaaattacaacgacaaaataaaaaatcctaaccccgaacgtacgatatcgcacccccgaaccgccctccgtacttacacatcgcatccttccccacccccctcattccgaaaatacgcattactctcccccgaaaa

SEQ ID NO: 4043 - DNA, 516 bp, Artificial Sequence
  chemically treated genomic DNA (Homo sapiens) CpG-island No: 4043
gtaggagagtaagtagggttttgggtttgatttcgtttcggttcgttagttaggtttcgatcgagttttgggttttgttaggggcggtcgtgaggcgtcggttgttgggggagcggtgacgtcgcggggtgaaagttgaggggcggtgacgtcgggtcggttcgggcggaggttggcgggttggaggtaggacggagggagggaaagagggaaggaaggaagttgggaaggagcgagcgggggcgcgaggcgtttatttggaggtagcggtttgggcgcgtagagcggtcgcggttttttcgtatttgcggttatggatgaggagcgcgttttttatatcgttcgggtcggcgaagtaggggttatcgagcgggttttgagggattatagcgataaggtaaagagttttggtttcgggcgtgcggtatcgtattttcgggtcgtttttcgtgtttgtatatcgtatttttttttattttttttatttcggggatgcgtattgttttttttcgaaaa

SEQ ID NO: 4044 - DNA, 516 bp, Artificial Sequence
  chemically treated genomic DNA (Homo sapiens) CpG-island No: 4044
ttttcgaaaaaaaacaatacgcatccccgaaataaaaaaaataaaaaaaaatacgatatacaaacacgaaaaacgacccgaaaatacgataccgcacgcccgaaaccaaaactctttaccttatcgctataatccctcaaaacccgctcgataacccctacttcgccgacccgaacgatataaaaaacgcgctcctcatccataaccgcaaatacgaaaaaaccgcgaccgctctacgcgcccaaaccgctacctccaaataaacgcctcgcgcccccgctcgctccttcccaacttccttccttccctctttccctccctccgtcctacctccaacccgccaacctccgcccgaaccgacccgacgtcaccgcccctcaactttcaccccgcgacgtcaccgctcccccaacaaccgacgcctcacgaccgcccctaacaaaacccaaaactcgatcgaaacctaactaacgaaccgaaacgaaatcaaacccaaaaccctacttactctcctac

SEQ ID NO: 4045 - DNA, 519 bp, Artificial Sequence
  chemically treated genomic DNA (Homo sapiens) CpG-island No: 4045
gttcgttcgcgtgtttttttgggtatgggtgcggttaggtcgggcgtcggatttttgttcgttcgcgtgtttttttgggtatgggtgcggttaggtcgggcgtcggattttgttcgttcgcgtttttttgggtatgggtgcgttaggtcgggcgtcggattttgttcgttttcgttttttttgggtatgggtgcgttaggtcgggcgtcggattttgttcgttttcgtgtttttttgggtatgggtgcggttaggcgggcgtcggattttgttcgttttcgtgtttttttggcgatgggtgcggttaggcgggcgtcggattttgttcgttttcgtgtttttttgggtatgggtgcggttaggcgggcgtcggattttgttcgttttcgtgtttttttgggtatgggtgcggttaggtcgggcgtcggattttgttcgttttcgtgtttttttgggtatgggtgcggttaggtcgggcgtcggattttgttcgtttttgtgtttttttgagtatgggtg

SEQ ID NO: 4046 - DNA, 519 bp, Artificial Sequence
  chemically treated genomic DNA (Homo sapiens) CpG-island No: 4046
cacccatactcaaaaaaacacaaaaacgaacaaaatccgacgcccgacctaaccgcacccatacccaaaaaaacacgaaaacgaacaaaatccgacgcccgacctaaccgcacccatacccaaaaaaacacgaaaacgaacaaaatccgacgcccgcctaaccgcacccatacccaaaaaaacacgaaaacgaacaaaatccgacgcccgcctaaccgcacccatcgccaaaaaaacacgaaaacgaacaaaatccgacgcccgcctaaccgcacccatacccaaaaaaacacgaaaacgaacaaaatccgacgcccgacctaacgcacccatacccaaaaaaaacgaaaacgaacaaaatccgacgcccgacctaacgcacccatacccaaaaaaacgcgaacgaacaaaatccgacgcccgacctaaccgcacccatacccaaaaaaacacgcgaacgaacaaaaatccgacgcccgacctaaccgcacccatacccaaaaaaacacgcgaacgaac

SEQ ID NO: 4047 - DNA, 519 bp, Artificial Sequence
  chemically treated genomic DNA (Homo sapiens) CpG-island No: 4047
tatttatgtttaggagggtataagagcgggtaggattcggcgttcggtttggtcgtatttatgtttaggagggtacgagagcgggtaggattcggcgttcggtttggtcgtatttatgtttaggagggtacgagagcgggtaggattcggcgttcgtttggtcgtatttatgtttaggagggtacgagagcgggtaggattcggcgttcgtttggtcgtatttatcgttaggagggtacgagagcgggtaggattcggcgttcgtttggtcgtatttatgtttaggagggtacgagagcgggtaggattcggcgttcggtttggcgtatttatgtttaggagggacgagagcgggtaggattcggcgttcggtttggcgtatttatgtttaggaggacgcgagcgggtaggattcggcgttcggtttggtcgtatttatgtttaggagggtacgcgagcgggtagggattcggcgttcggtttggtcgtatttatgtttaggagggtacgcgagcgggt

SEQ ID NO: 4048 - DNA, 519 bp, Artificial Sequence
  chemically treated genomic DNA (Homo sapiens) CpG-island No: 4048
acccgctcgcgtaccctcctaaacataaatacgaccaaaccgaacgccgaatccctacccgctcgcgtaccctcctaaacataaatacgaccaaaccgaacgccgaatcctacccgctcgcgtcctcctaaacataaatacgccaaaccgaacgccgaatcctacccgctctcgtccctcctaaacataaatacgccaaaccgaacgccgaatcctacccgctctcgtaccctcctaaacataaatacgaccaaacgaacgccgaatcctacccgctctcgtaccctcctaacgataaatacgaccaaacgaacgccgaatcctacccgctctcgtaccctcctaaacataaatacgaccaaacgaacgccgaatcctacccgctctcgtaccctcctaaacataaatacgaccaaaccgaacgccgaatcctacccgctctcgtaccctcctaaacataaatacgaccaaaccgaacgccgaatcctacccgctcttataccctcctaaacataaata

SEQ ID NO: 4049 - DNA, 1202 bp, Artificial Sequence
  chemically treated genomic DNA (Homo sapiens) CpG-island No: 4049
cgggaaggcggcgttcgatcgttacggttcgtattttgggagtagggcgagggcgtcgacgaggggtcggggtcggggtcggggttggcgggaggtttggttcgcgtcgttttcgtttttttttttatttttatttttcggtttttaagttcgggttcgtgaggtaatgttacgggtggcgacgcgggtttcgtttattgattatatattttttgtcgaggaaagtgaagagggattcgtttttttgcggggtgagtaatagggattttacgttggtgatttttcgcggcggcggcggttgttgttggacggagtttatggtttcgtcggcggggttgggagtttagggtcgttttttcggcgagtgggcgagagttcgttttttttttcggtgataggggcggggagaagtggagttagaggcgttatatttcgtagttttttcggagcggggaggaggacgaggtcgagggaagtaggcgttgacggcgagttattttcgcgtcgcgttgagaaagggaagttttcggtattcgtttcggttaggttagggtcggatggtcgttgttttcgtatttcggcgattgcgttaaatttttaattttttttttaattttttcgtagcggcggcggtcgtataatttaatatggtagcgggggcgggcgagattataggacggagggcgcgggggagtcggaaacgcgcgttttgcggttcgggagaaatttttttattcggcggcgggtttcgcgcgcgcgggttcgaagttacgttttttttcggtcgaggcgcggatcgcgcggagttaagtggaatttcggttggtttggggcgtaggtttttaatttcgtattttggtttttggcgtttcggttcgtcggttgggtattcgaatttagttattgttgtttgaagagaagatggatggggatttttcgtcgtcgttgcgtcgtcggttttttttgggcggacgtatatttttgcgaagcgttagtgaggatttagggtttttttttggaatagtttttattttttaagcgttgtagcgtgaagttcgttttgcgggttcgagaggtttgcgatttgaagattgaaaattgggaagagacgttttattttgtgtttttcgtcggtttcgataggagtcgtaggtgtttgggatttttttaaattttgttttaaattttagttgtgggagtgg

SEQ ID NO: 4050 - DNA, 1202 bp, Artificial Sequence
  chemically treated genomic DNA (Homo sapiens) CpG-island No: 4050
ccactcccacaactaaaatttaaaacaaaatttaaaaaaatcccaaacacctacgactcctatcgaaaccgacgaaaaacacaaaataaaacgtctcttcccaattttcaatcttcaaatcgcaaacctctcgaacccgcaaaacgaacttcacgctacaacgcttaaaaaataaaaactattccaaaaaaaaaccctaaatcctcactaacgcttcgcaaaaatatacgtccgcccaaaaaaaaccgacgacgcaacgacgacgaaaaatccccatccatcttctcttcaaacaacaataactaaattcgaatacccaaccgacgaaccgaaacgccaaaaaccaaaatacgaaattaaaaacctacgccccaaaccaaccgaaattccacttaactccgcgcgatccgcgcctcgaccgaaaaaaaacgtaacttcgaacccgcgcgcgcgaaacccgccgccgaataaaaaaatttctcccgaaccgcaaaacgcgcgtttccgactcccccgcgccctccgtcctataatctcgcccgcccccgctaccatattaaattatacgaccgccgccgctacgaaaaaattaaaaaaaaaattaaaaatttaacgcaatcgccgaaatacgaaaacaacgaccatccgaccctaacctaaccgaaacgaataccgaaaacttccctttctcaacgcgacgcgaaaataactcgccgtcaacgcctacttccctcgacctcgtcctcctccccgctccgaaaaaactacgaaatataacgcctctaactccacttctccccgcccctatcaccgaaaaaaaaaacgaactctcgcccactcgccgaaaaaacgaccctaaactcccaaccccgccgacgaaaccataaactccgtccaacaacaaccgccgccgccgcgaaaaatcaccaacgtaaaatccctattactcaccccgcaaaaaaacgaatccctcttcactttcctcgacaaaaaatatataatcaataaacgaaacccgcgtcgccacccgtaacattacctcacgaacccgaacttaaaaaccgaaaaataaaaataaaaaaaaaaacgaaaacgacgcgaaccaaacctcccgccaaccccgaccccgaccccgacccctcgtcgacgccctcgccctactcccaaaatacgaaccgtaacgatcgaacgccgccttcccg

SEQ ID NO: 4051 - DNA, 1202 bp, Artificial Sequence
  chemically treated genomic DNA (Homo sapiens) CpG-island No: 4051
ttatttttatagttgaagtttgggataaagtttgagaaaattttaggtatttgcggtttttatcgaagtcggcgaggagtatagggtagagcgtttttttttagtttttagtttttagatcgtaggtttttcggattcgtagagcgagttttacgttgtagcgtttgagaaataagagttattttaaggaggggttttgggtttttattgacgtttcgtaaaggtgtacgttcgtttagggaaggtcggcggcgtagcgacggcgaggagtttttatttattttttttttaagtagtagtagttgggttcgggtatttaatcgacgagtcgagacgttagaggttagagtacgaagttggaagtttgcgttttaagttaatcgggattttatttagtttcgcgcggttcgcgtttcggtcggaagggggcgtggtttcgggttcgcgcgcgcgaggttcgtcgtcgagtgggggggtttttttcgggtcgtaagacgcgcgttttcggttttttcgcgtttttcgttttgtggtttcgttcgttttcgttgttatgttggattgtgcggtcgtcgtcgttgcgggagggttgggggaggagttgggagtttagcgtagtcgtcggagtgcgaggataacgattattcggttttagtttggtcggggcgggtgtcgggagttttttttttttagcgcggcgcgaaggtggttcgtcgttagcgtttgtttttttcgatttcgttttttttttcgtttcggaggagttgcgagatgtggcgtttttgattttattttttttcgtttttgttatcgagagggggaacgagttttcgtttattcgtcggagagacggttttggatttttaatttcgtcggcgaaattatgagtttcgtttagtagtagtcgtcgtcgtcgcggagggttattaacgtggggtttttgttgtttatttcgtaggagaacgagtttttttttatttttttcggtaagaaatgtgtggttagtggacgagattcgcgtcgttattcgtgatattattttacgggttcgggtttgggggtcgggaagtgggagtggggaaggaggcgggagcggcgcgggttaggtttttcgttagtttcggtttcggtttcggtttttcgtcggcgttttcgttttgtttttagggtgcgggtcgtggcggtcgggcgtcgttttttcg

SEQ ID NO: 4052 - DNA, 1202 bp, Artificial Sequence
  chemically treated genomic DNA (Homo sapiens) CpG-island No: 4052
cgaaaaaacgacgcccgaccgccacgacccgcaccctaaaaacaaaacgaaaacgccgacgaaaaaccgaaaccgaaaccgaaactaacgaaaaacctaacccgcgccgctcccgcctccttccccactcccacttcccgacccccaaacccgaacccgtaaaataatatcacgaataacgacgcgaatctcgtccactaaccacacatttcttaccgaaaaaaataaaaaaaaactcgttctcctacgaaataaacaacaaaaaccccacgttaataaccctccgcgacgacgacgactactactaaacgaaactcataatttcgccgacgaaattaaaaatccaaaaccgtctctccgacgaataaacgaaaactcgttccccctctcgataacaaaaacgaaaaaaaataaaatcaaaaacgccacatctcgcaactcctccgaaacgaaaaaaaaaacgaaatcgaaaaaaacaaacgctaacgacgaaccaccttcgcgccgcgctaaaaaaaaaaaactcccgacacccgccccgaccaaactaaaaccgaataatcgttatcctcgcactccgacgactacgctaaactcccaactcctcccccaaccctcccgcaacgacgacgaccgcacaatccaacataacaacgaaaacgaacgaaaccacaaaacgaaaaacgcgaaaaaaccgaaaacgcgcgtcttacgacccgaaaaaaacccccccactcgacgacgaacctcgcgcgcgcgaacccgaaaccacgcccccttccgaccgaaacgcgaaccgcgcgaaactaaataaaatcccgattaacttaaaacgcaaacttccaacttcgtactctaacctctaacgtctcgactcgtcgattaaatacccgaacccaactactactacttaaaaaaaaaataaataaaaactcctcgccgtcgctacgccgccgaccttccctaaacgaacgtacacctttacgaaacgtcaataaaaacccaaaacccctccttaaaataactcttatttctcaaacgctacaacgtaaaactcgctctacgaatccgaaaaacctacgatctaaaaactaaaaactaaaaaaaaacgctctaccctatactcctcgccgacttcgataaaaaccgcaaatacctaaaattttctcaaactttatcccaaacttcaactataaaaataa

SEQ ID NO: 4053 - DNA, 520 bp, Artificial Sequence
  chemically treated genomic DNA (Homo sapiens) CpG-island No: 4053
agacgttttcgagtaaatagtattttcggattaaggtttttcggaatttttttttattcggtcgcgttcgaagttcgagaaacgggtcgttttttttggttttttatacggggttttttagttttaatcggtcgcgtttcgttttttattttttaggatatcggtttcgcggttcgggcggttataaagggtcgggttttgttcgcggtcgtttatgttcgcggtgtttttttggtttgttcggattttttattacgtatatacgttttttcgtcgtttcgttgtcgtcgcggttcgtagtttaggttttttttagattagtcgttgttttgttttcgatgtgaaatcgcggatttcggagttgtttgttttaggtttcgttcgagaatttttatcgttgtcgttattttcggttttggcgtcgttggcggtcggtttacggaggaggggaggagttaggaggaagggggcggggttttcggtttggagaaacgattgcggggagaatttagagttttat

SEQ ID NO: 4054 - DNA, 520 bp, Artificial Sequence
  chemically treated genomic DNA (Homo sapiens) CpG-island No: 4054
ataaaactctaaattctccccgcaatcgtttctccaaaccgaaaaccccgcccccttcctcctaactcctcccctcctccgtaaaccgaccgccaacgacgccaaaaccgaaaataacgacaacgataaaaattctcgaacgaaacctaaaacaaacaactccgaaatccgcgatttcacatcgaaaacaaaacaacgactaatctaaaaaaaacctaaactacgaaccgcgacgacaacgaaacgacgaaaaaacgtatatacgtaataaaaaatccgaacaaaccaaaaaaacaccgcgaacataaacgaccgcgaacaaaacccgaccctttataaccgcccgaaccgcgaaaccgatatcctaaaaaataaaaaacgaaacgcgaccgattaaaactaaaaaaccccgtataaaaaaccaaaaaaaacgacccgtttctcgaacttcgaacgcgaccgaataaaaaaaaattccgaaaaaccttaatccgaaaatactatttactcgaaaacgtct

SEQ ID NO: 4055 - DNA, 520 bp, Artificial Sequence
  chemically treated genomic DNA (Homo sapiens) CpG-island No: 4055
gtggagttttgggtttttttcgtaatcgtttttttaggtcggaggtttcgtttttttttttttggttttttttttttttcgtgggtcggtcgttaacgacgttagagtcggaaatgacgataacggtgagggttttcgggcggggtttgggataggtagtttcggggttcgcggttttatatcggaaataaaatagcggttggtttggaaggaatttgagttacgagtcgcggcggtagcggggcggcggggaagcgtatgtgcgtgatggggagttcgggtaagttaggaaggtatcgcggatatgggcggtcgcgggtagggttcggttttttgtggtcgttcgggtcgcgaagtcggtgttttaaaagatgaggggcggggcgcggtcggttggggttggggaatttcgtgtgggaaattaggaggggcggttcgtttttcgggtttcgggcgcggtcgggtggagagagatttcggggagttttggttcggaaatgttgtttgttcgaagacgttt

SEQ ID NO: 4056 - DNA, 520 bp, Artificial Sequence
  chemically treated genomic DNA (Homo sapiens) CpG-island No: 4056
aaacgtcttcgaacaaacaacatttccgaaccaaaactccccgaaatctctctccacccgaccgcgcccgaaacccgaaaaacgaaccgcccctcctaatttcccacacgaaattccccaaccccaaccgaccgcgccccgcccctcatcttttaaaacaccgacttcgcgacccgaacgaccacaaaaaaccgaaccctacccgcgaccgcccatatccgcgataccttcctaacttacccgaactccccatcacgcacatacgcttccccgccgccccgctaccgccgcgactcgtaactcaaattccttccaaaccaaccgctattttatttccgatataaaaccgcgaaccccgaaactacctatcccaaaccccgcccgaaaaccctcaccgttatcgtcatttccgactctaacgtcgttaacgaccgacccacgaaaaaaaaaaaaaaccaaaaaaaaaaaaacgaaacctccgacctaaaaaaacgattacgaaaaaaacccaaaactccac

SEQ ID NO: 4057 - DNA, 979 bp, Artificial Sequence
  chemically treated genomic DNA (Homo sapiens) CpG-island No: 4057
acggggttatttcgagggtcgtggaagttcgattttttttgtcgttcgagggtagggatcgggtggtttcgggtacgtagggtgggcgtttttaacgtgttgttttcggggaacgcgtttgttttgagttagggtcgaaggcggcgattttaggcgttagagggcgggaaggcgggtggtcgtcgattaagtttttttttatagggtttttagtcgatttcgggatcgtcgtagttcgtagacgttcgttttcgtggttttcgtttacggtttttttttgtatcggtttagttttgattaggtatttcgcgtttttattttaggaacgcgtcgcgtattttcgaggcggagaggcgcggtttttacgggaggttcggggtggtcgcgtaggtgtcggtagtcgttggggttttcggacgttttaggttcgcggtttagtggtatttttcgggaggggcgtacggtttttagggtttcgtttgtattacgcgtcgggagcggtattcgtttgaagggaaggttcgagcgggcggagggtgcgcgtcggggtcgtttcgtattagtttttcggttttttgtatttttttttttttaggtcggggggcgcgcggtgtcgagcgatgattttgcgtttattttcggagagcgagtcggggcggggttttttttgcggtttttatttttttcgatattttcgtcgtcgtgagttaggcgagtaaatttttgtagaagtttcggggtgcggggttttcgtcgttgggcgttcgggggtttttagttttttcgtttttttatttgttttcgttggcgtcgggaggttgtagttagggtcgtttcgtcggtgttcgtttaggtttaagttcgcgaggtcggtcgggtcgtaaggaacgttcgtaggggtgggatttttttttttcgtcgttgtttggttttattttttatttcgttttgttttatttatttatttttaattttcgtg

SEQ ID NO: 4058 - DNA, 979 bp, Artificial Sequence
  chemically treated genomic DNA (Homo sapiens) CpG-island No: 4058
cacgaaaattaaaaataaataaataaaacaaaacgaaataaaaaataaaaccaaacaacgacgaaaaaaaaaaatcccacccctacgaacgttccttacgacccgaccgacctcgcgaacttaaacctaaacgaacaccgacgaaacgaccctaactacaacctcccgacgccaacgaaaacaaataaaaaaacgaaaaaactaaaaacccccgaacgcccaacgacgaaaaccccgcaccccgaaacttctacaaaaatttactcgcctaactcacgacgacgaaaatatcgaaaaaaataaaaaccgcaaaaaaaaccccgccccgactcgctctccgaaaataaacgcaaaatcatcgctcgacaccgcgcgccccccgacctaaaaaaaaaaaaatacaaaaaaccgaaaaactaatacgaaacgaccccgacgcgcaccctccgcccgctcgaaccttcccttcaaacgaataccgctcccgacgcgtaatacaaacgaaaccctaaaaaccgtacgcccctcccgaaaaataccactaaaccgcgaacctaaaacgtccgaaaaccccaacgactaccgacacctacgcgaccaccccgaacctcccgtaaaaaccgcgcctctccgcctcgaaaatacgcgacgcgttcctaaaataaaaacgcgaaatacctaatcaaaactaaaccgatacaaaaaaaaaccgtaaacgaaaaccacgaaaacgaacgtctacgaactacgacgatcccgaaatcgactaaaaaccctataaaaaaaaacttaatcgacgaccacccgccttcccgccctctaacgcctaaaatcgccgccttcgaccctaactcaaaacaaacgcgttccccgaaaacaacacgttaaaaacgcccaccctacgtacccgaaaccacccgatccctaccctcgaacgacaaaaaaaatcgaacttccacgaccctcgaaataaccccgt

SEQ ID NO: 4059 - DNA, 979 bp, Artificial Sequence
  chemically treated genomic DNA (Homo sapiens) CpG-island No: 4059
tacggggattggaggtgggtaagtgagatagggcggggtggagggtgaggttaggtagcggcggagagagaaagttttatttttgcgggcgttttttgcggttcggtcgatttcgcgggtttgggtttgggcgggtatcgacggagcggttttggttgtagtttttcggcgttagcgaagataggtagggaggcggagggattggaagttttcgggcgtttagcggcggggatttcgtatttcggggtttttgtaggaatttgttcgtttggtttacggcgacgggggtgtcggagaaagtgggggtcgtagagaagatttcgtttcggttcgtttttcggaggtgggcgtagggttatcgttcggtatcgcgcgtttttcggtttggaggaaaggaaatgtagagagtcggggagttggtgcgggacggtttcggcgcgtatttttcgttcgttcggattttttttttaggcgaatgtcgttttcggcgcgtggtataagcgaggttttggagatcgtgcgtttttttcgggaggtgttattgggtcgcgggtttggagcgttcgggagttttagcggttgtcggtatttgcgcggttatttcgggtttttcgtgggaatcgcgttttttcgtttcgggggtgcgcggcgcgtttttggggtggggacgcggggtgtttggttagggttggatcgatgtagaggggggtcgtgggcgggggttacggggacgggcgtttgcggattgcggcggtttcggagtcggttggggattttgtagggggaggtttggtcggcggttattcgttttttcgttttttggcgtttagggtcgtcgttttcggttttagtttaaggtagacgcgtttttcgggaataatacgttgagggcgtttattttgcgtgttcggggttattcggtttttgttttcgggcggtaggagaggtcgagtttttacggttttcggagtagtttcgt

SEQ ID NO: 4060 - DNA, 979 bp, Artificial Sequence
  chemically treated genomic DNA (Homo sapiens) CpG-island No: 4060
acgaaactactccgaaaaccgtaaaaactcgacctctcctaccgcccgaaaacaaaaaccgaataaccccgaacacgcaaaataaacgccctcaacgtattattcccgaaaaacgcgtctaccttaaactaaaaccgaaaacgacgaccctaaacgccaaaaaacgaaaaaacgaataaccgccgaccaaacctccccctacaaaatccccaaccgactccgaaaccgccgcaatccgcaaacgcccgtccccgtaacccccgcccacgacccccctctacatcgatccaaccctaaccaaacaccccgcgtccccaccccaaaaacgcgccgcgcacccccgaaacgaaaaaacgcgattcccacgaaaaacccgaaataaccgcgcaaataccgacaaccgctaaaactcccgaacgctccaaacccgcgacccaataacacctcccgaaaaaaacgcacgatctccaaaacctcgcttataccacgcgccgaaaacgacattcgcctaaaaaaaaaatccgaacgaacgaaaaatacgcgccgaaaccgtcccgcaccaactccccgactctctacatttcctttcctccaaaccgaaaaacgcgcgataccgaacgataaccctacgcccacctccgaaaaacgaaccgaaacgaaatcttctctacgacccccactttctccgacacccccgtcgccgtaaaccaaacgaacaaattcctacaaaaaccccgaaatacgaaatccccgccgctaaacgcccgaaaacttccaatccctccgcctccctacctatcttcgctaacgccgaaaaactacaaccaaaaccgctccgtcgatacccgcccaaacccaaacccgcgaaatcgaccgaaccgcaaaaaacgcccgcaaaaataaaactttctctctccgccgctacctaacctcaccctccaccccgccctatctcacttacccacctccaatccccgta

SEQ ID NO: 4061 - DNA, 575 bp, Artificial Sequence
  chemically treated genomic DNA (Homo sapiens) CpG-island No: 4061
tttcgcggcgtttttatcggtgttggcgtggcgcggtggcgggggtagtatttcggcgcgtatggtttcgatgtcgtcggtcgacgaggcgcggcgtacgttggcgtagttttttcgggagcgcgttcgggttaggttgtagttggagttcgaggcgtcggggttgaggttgtgcgttcggggcgatgggagttggtcgggcgcgttgcggggcggagagtcgggatttattagcgtacgcgttttttcgcgggttcgagttttgttacgtggttgtttatggttgttatttcgtttagggttagcgattcgttgttgggtgtcgcgggcgttaggtttacgtttattattacggttttcgggcgttttcgtcgttcgcgtcgttcgatcgtatcgacgattttcgggtcgttatggttagtagcgcgggtagttttaggcggaaggttttggcgcggttgcgggagaggagaggtacgtggtcgtggggatcgcgagtagtttcggagcgggtaaggtttgggaaatggatttttagtcgttgggtaagggaaggaggggaacgggtaattttt

SEQ ID NO: 4062 - DNA, 575 bp, Artificial Sequence
  chemically treated genomic DNA (Homo sapiens) CpG-island No: 4062
aaaaattacccgttcccctccttcccttacccaacgactaaaaatccatttcccaaaccttacccgctccgaaactactcgcgatccccacgaccacgtacctctcctctcccgcaaccgcgccaaaaccttccgcctaaaactacccgcgctactaaccataacgacccgaaaatcgtcgatacgatcgaacgacgcgaacgacgaaaacgcccgaaaaccgtaataataaacgtaaacctaacgcccgcgacacccaacaacgaatcgctaaccctaaacgaaataacaaccataaacaaccacgtaacaaaactcgaacccgcgaaaaaacgcgtacgctaataaatcccgactctccgccccgcaacgcgcccgaccaactcccatcgccccgaacgcacaacctcaaccccgacgcctcgaactccaactacaacctaacccgaacgcgctcccgaaaaaactacgccaacgtacgccgcgcctcgtcgaccgacgacatcgaaaccatacgcgccgaaatactacccccgccaccgcgccacgccaacaccgataaaaacgccgcgaaa

SEQ ID NO: 4063 - DNA, 575 bp, Artificial Sequence
  chemically treated genomic DNA (Homo sapiens) CpG-island No: 4063
gggggttgttcgttttttttttttttttatttagcggttgggggtttattttttaggttttgttcgtttcggggttgttcgcgatttttacgattacgtgttttttttttttcgtagtcgcgttaagatttttcgtttgaagttgttcgcgttgttggttatgacggttcgggagtcgtcggtgcggtcgggcggcgcgggcggcgggggcgttcgggggtcgtggtggtggacgtggatttgacgttcgcggtatttagtagcgagtcgttggttttggacgaagtgatagttatggataattacgtggtagggttcgggttcgcggaggagcgcgtgcgttggtgggtttcggtttttcgtttcgtagcgcgttcggttagtttttatcgtttcgggcgtatagttttaatttcgacgtttcgggttttagttgtagtttggttcggacgcgttttcgagaaagttgcgttagcgtgcgtcgcgtttcgtcggtcgacgatatcgaggttatgcgcgtcggggtgttgttttcgttatcgcgttacgttagtatcggtgagggcgtcgcggga

SEQ ID NO: 4064 - DNA, 575 bp, Artificial Sequence
  chemically treated genomic DNA (Homo sapiens) CpG-island No: 4064
tcccgcgacgccctcaccgatactaacgtaacgcgataacgaaaacaacaccccgacgcgcataacctcgatatcgtcgaccgacgaaacgcgacgcacgctaacgcaactttctcgaaaacgcgtccgaaccaaactacaactaaaacccgaaacgtcgaaattaaaactatacgcccgaaacgataaaaactaaccgaacgcgctacgaaacgaaaaaccgaaacccaccaacgcacgcgctcctccgcgaacccgaaccctaccacgtaattatccataactatcacttcgtccaaaaccaacgactcgctactaaataccgcgaacgtcaaatccacgtccaccaccacgacccccgaacgcccccgccgcccgcgccgcccgaccgcaccgacgactcccgaaccgtcataaccaacaacgcgaacaacttcaaacgaaaaatcttaacgcgactacgaaaaaaaaaaaacacgtaatcgtaaaaatcgcgaacaaccccgaaacgaacaaaacctaaaaaataaacccccaaccgctaaataaaaaaaaaaaaaaaacgaacaaccccc

SEQ ID NO: 4065 - DNA, 504 bp, Artificial Sequence
  chemically treated genomic DNA (Homo sapiens) CpG-island No: 4065
gtgtgtgtcggtcgagggtggtcgggtagcgttattgttgttttagcggtggcgggattggtgtgacgggggttatcggtgggatcgtcgttagggtacggtattggagtcgtgaggcggggagtgtatcgacgagattttacggcgtaggttatcgtgagcgggtcgtggcgcgggtggttgtggcgggagggtgtataggttagagggacggtagagagtagggcggttataggcgtgtatatagtggagatatacgcgtatatatatcgacgatatagcgtatatatattcgatatagattttatatatattatatatatacgatatatatatacgatatatatatattatatagttatatatatattatatatattatatatatattatatatattatatatcgtatatatataatatatatttatatatatattatatattatatatatattatatatattatatattatatatatattatatatatatattatatata

SEQ ID NO: 4066 - DNA, 504 bp, Artificial Sequence
  chemically treated genomic DNA (Homo sapiens) CpG-island No: 4066
tatatataatatatatatataatatatatataatatataatatatataatatatatataatatataatatatatataaatatatattatatatatacgatatataatatatataatatatatataatatatataatatatatataactatataatatatatatatcgtatatatatatcgtatatatataatatatataaaatctatatcgaatatatatacgctatatcgtcgatatatatacgcgtatatctccactatatacacgcctataaccgccctactctctaccgtccctctaacctatacaccctcccgccacaaccacccgcgccacgacccgctcacgataacctacgccgtaaaatctcgtcgatacactccccgcctcacgactccaataccgtaccctaacgacgatcccaccgataacccccgtcacaccaatcccgccaccgctaaaacaacaataacgctacccgaccaccctcgaccgacacacac

SEQ ID NO: 4067 - DNA, 504 bp, Artificial Sequence
  chemically treated genomic DNA (Homo sapiens) CpG-island No: 4067
tgtgtgtggtgtgtgtgtgtggtgtgtgtgtggtgtgtggtgtgtgtggtgtgtgtgtggtgtgtggtgtgtgtgtgggtgtgtgttgtgtgtgtgcggtgtgtggtgtgtgtggtgtgtgtgtggtgtgtgtggtgtgtgtgtggttgtgtggtgtgtgtgtgtcgtgtgtgtgtgtcgtgtgtgtgtagtgtgtgtggggtttgtgtcgggtgtgtgtgcgttgtgtcgtcggtgtgtgtgcgcgtgtgtttttattgtgtgtacgtttgtgatcgttttgttttttatcgtttttttggtttgtgtattttttcgttataattattcgcgttacgattcgtttacgatggtttacgtcgtggagtttcgtcgatgtatttttcgttttacgattttaatgtcgtgttttgacgacggttttatcgatgattttcgttatattagtttcgttatcgttgaggtagtagtgacgttgttcgattattttcgatcggtatatat

SEQ ID NO: 4068 - DNA, 504 bp, Artificial Sequence
  chemically treated genomic DNA (Homo sapiens) CpG-island No: 4068
atatataccgatcgaaaataatcgaacaacgtcactactacctcaacgataacgaaactaatataacgaaaatcatcgataaaaccgtcgtcaaaacacgacattaaaatcgtaaaacgaaaaatacatcgacgaaactccacgacgtaaaccatcgtaaacgaatcgtaacgcgaataattataacgaaaaaatacacaaaccaaaaaaacgataaaaaacaaaacgatcacaaacgtacacacaataaaaacacacgcgcacacacaccgacgacacaacgcacacacacccgacacaaaccccacacacactacacacacacgacacacacacacgacacacacacaccacacaaccacacacacaccacacacaccacacacacaccacacacaccacacaccgcacacacacaacacacacccacacacacaccacacaccacacacacaccacacacaccacacaccacacacacaccacacacacacaccacacaca

SEQ ID NO: 4069 - DNA, 530 bp, Artificial Sequence
  chemically treated genomic DNA (Homo sapiens) CpG-island No: 4069
tcgggagacgtacgcgtgaatgcggagcgggttgagttagtcggcgtcggcgcgggcggtttaggcggaggaagtagcgtgcgcggcgggtgtggacgtttttggagcgaggcggggggcggcggcggtgaggtttagggagggcgcggtttagggtttcggtgtttggttgcggaatttagggtagagtttgttcggtagtttttaatcggagacgttacgtggtcgttttttaatgttgaaaaattattttggttgtagggagtggaggttgtcgtttagagagagcgtcgtcgggtgagaggagtagaaagtcggaagttaacgttggggtagtcgtggcgtttaggagagtgataggtagagtcgttcgcgaggtggttcgagacgtagatcggagggcggagggttgggggtgcgaggtagggagcgggtgcgaggtagggagtagttgtcgaagtcgagttagtggtgtgtagagatttcgtaagagtaggattggaaaagagttatggatgattttaggtttt

SEQ ID NO: 4070 - DNA, 530 bp, Artificial Sequence
  chemically treated genomic DNA (Homo sapiens) CpG-island No: 4070
aaaacctaaaatcatccataactcttttccaatcctactcttacgaaatctctacacaccactaactcgacttcgacaactactccctacctcgcacccgctccctacctcgcacccccaaccctccgccctccgatctacgtctcgaaccacctcgcgaacgactctacctatcactctcctaaacgccacgactaccccaacgttaacttccgactttctactcctctcacccgacgacgctctctctaaacgacaacctccactccctacaaccaaaataatttttcaacattaaaaaacgaccacgtaacgtctccgattaaaaactaccgaacaaactctaccctaaattccgcaaccaaacaccgaaaccctaaaccgcgccctccctaaacctcaccgccgccgccccccgcctcgctccaaaaacgtccacacccgccgcgcacgctacttcctccgcctaaaccgcccgcgccgacgccgactaactcaacccgctccgcattcacgcgtacgtctcccga

SEQ ID NO: 4071 - DNA, 530 bp, Artificial Sequence
  chemically treated genomic DNA (Homo sapiens) CpG-island No: 4071
gggatttggaattatttatgatttttttttagttttgtttttacggaatttttgtatattattaattcggtttcggtagttgttttttatttcgtattcgttttttatttcgtatttttagtttttcgtttttcggtttgcgtttcgggttatttcgcgggcggttttgtttgttatttttttaaacgttacggttgttttagcgttggttttcggttttttgttttttttattcgacggcgttttttttgggcgatagtttttattttttgtagttagagtgattttttagtattaaaaagcggttacgtgacgttttcgattaaaggttgtcgaatagattttattttaaatttcgtagttaggtatcgggattttggatcgcgttttttttaggttttatcgtcgtcgtttttcgtttcgttttaggagcgtttatattcgtcgcgtacgttgtttttttcgtttggatcgttcgcgtcggcgtcgattggtttagttcgtttcgtatttacgcgtgcgtttttcga

SEQ ID NO: 4072 - DNA, 530 bp, Artificial Sequence
  chemically treated genomic DNA (Homo sapiens) CpG-island No: 4072
tcgaaaaacgcacgcgtaaatacgaaacgaactaaaccaatcgacgccgacgcgaacgatccaaacgaaaaaaacaacgtacgcgacgaatataaacgctcctaaaacgaaacgaaaaacgacgacgataaaacctaaaaaaaacgcgatccaaaatcccgatacctaactacgaaatttaaaataaaatctattcgacaacctttaatcgaaaacgtcacgtaaccgctttttaatactaaaaaatcactctaactacaaaaaataaaaactatcgcccaaaaaaaacgccgtcgaataaaaaaaacaaaaaaccgaaaaccaacgctaaaacaaccgtaacgtttaaaaaaataacaaacaaaaccgcccgcgaaataacccgaaacgcaaaccgaaaaacgaaaaactaaaaatacgaaataaaaaacgaatacgaaataaaaaacaactaccgaaaccgaattaataatatacaaaaattccgtaaaaacaaaactaaaaaaaaatcataaataattccaaatccc

SEQ ID NO: 4073 - DNA, 544 bp, Artificial Sequence
  chemically treated genomic DNA (Homo sapiens) CpG-island No: 4073
ggacgcgtttcgttgtgttcgaaattcgcgagggttttatttcgggttgttttcgcgagcggcggggatttgttttgtttttttaggaagtttgcgggcgtttcggtggtcgttttatttttgagtttaggttgatttttttcgcgtcggggttcgaattcggaggttttgaatagatttcgttgtaagagaggtaaaggtttcggcgcgtttgggatcgggacgacggagagcgaggtagttttagggggtcgtagagattttcggtagcgttcgcgattttgttgcgttttgttttgcgcggttagttttaatgtttcgggtcggaaagttggtttcgaggagcgaggagcggagcggaggcgtggggagttgggtttcgggaagattgggggttgtcgagtatcgtttttttcgtaaggcggtataatgcgtttttattcgaggttcgagagtttgcgacgcgttggttttcgttgtttttttacgtaaaataaagtaaaacgtaacgaaaaatcgggggaattgttaagtttaaatagga

SEQ ID NO: 4074 - DNA, 544 bp, Artificial Sequence
  chemically treated genomic DNA (Homo sapiens) CpG-island No: 4074
tcctatttaaacttaacaattcccccgatttttcgttacgttttactttattttacgtaaaaaaacaacgaaaaccaacgcgtcgcaaactctcgaacctcgaataaaaacgcattataccgccttacgaaaaaaacgatactcgacaacccccaatcttcccgaaacccaactccccacgcctccgctccgctcctcgctcctcgaaaccaactttccgacccgaaacattaaaactaaccgcgcaaaacaaaacgcaacaaaatcgcgaacgctaccgaaaatctctacgaccccctaaaactacctcgctctccgtcgtcccgatcccaaacgcgccgaaacctttacctctcttacaacgaaatctattcaaaacctccgaattcgaaccccgacgcgaaaaaaatcaacctaaactcaaaaataaaacgaccaccgaaacgcccgcaaacttcctaaaaaaacaaaacaaatccccgccgctcgcgaaaacaacccgaaataaaaccctcgcgaatttcgaacacaacgaaacgcgtcc

SEQ ID NO: 4075 - DNA, 544 bp, Artificial Sequence
  chemically treated genomic DNA (Homo sapiens) CpG-island No: 4075
ttttgtttgagtttggtaattttttcgatttttcgttgcgttttattttgttttacgtggaaaggtaacgaaaattagcgcgtcgtaggttttcgggtttcgagtagggacgtattgtgtcgttttgcgaaaaggacggtgttcggtagtttttagttttttcggagtttagttttttacgttttcgtttcgtttttcgtttttcgaggttaatttttcggttcggggtattggggttggtcgcgtagggtagggcgtagtagggtcgcgagcgttgtcggggatttttgcggttttttaaggttgtttcgtttttcgtcgtttcggttttaagcgcgtcggggtttttgttttttttataacgaaatttgtttaaaattttcggattcgggtttcggcgcgggagaggttagtttgagtttagggatgggacggttatcggggcgttcgtaggttttttggggagatagagtaggttttcgtcgttcgcggaggtagttcggggtggggttttcgcgggtttcgggtatagcggagcgcgttt

SEQ ID NO: 4076 - DNA, 544 bp, Artificial Sequence
  chemically treated genomic DNA (Homo sapiens) CpG-island No: 4076
aaacgcgctccgctatacccgaaacccgcgaaaaccccaccccgaactacctccgcgaacgacgaaaacctactctatctccccaaaaaacctacgaacgccccgataaccgtcccatccctaaactcaaactaacctctcccgcgccgaaacccgaatccgaaaattttaaacaaatttcgttataaaaaaaacaaaaaccccgacgcgcttaaaaccgaaacgacgaaaaacgaaacaaccttaaaaaaccgcaaaaatccccgacaacgctcgcgaccctactacgccctaccctacgcgaccaaccccaataccccgaaccgaaaaattaacctcgaaaaacgaaaaacgaaacgaaaacgtaaaaaactaaactccgaaaaaactaaaaactaccgaacaccgtccttttcgcaaaacgacacaatacgtccctactcgaaacccgaaaacctacgacgcgctaattttcgttacctttccacgtaaaacaaaataaaacgcaacgaaaaatcgaaaaaattaccaaactcaaacaaaa

SEQ ID NO: 4077 - DNA, 691 bp, Artificial Sequence
  chemically treated genomic DNA (Homo sapiens) CpG-island No: 4077
cgatatatttttcggaaagtagcgcggggagaaggcggagaggttatttagggttttcgagttcgcgcgttttcgggttttagtatatagtggcgtttacgtgggagaggatggcggtcgttttagttgtcgcgatggtcgggttgtttgagttcgtgggggtgaaaaataaattttagttgattagcgcgggatttgggaattagataattttggatattagggatggggtcggagtcggaatagtatcgggttcgaggagtgcggattttatattaggtcggggtcgtagtggagtagcggtgttggggtttttcgatacggtcggcgattttgtattacgggtttcgatattttaaatttagtttttagtggggttttaatagagtgtcgtgtcgagttttgttcgacgcggggattggagaattgcgcggtcgttcgaaacgtttggggtcgaaattttgcggacgtcgaagtattttttcgggttttattattaggcgcgtcggtttaaggtttaggcggcgattttcggtttggtaggaattttttcgtttggaggtttggtttagtaagcgagagtcgacggcgcgggttttcggttgtcgttttttagttaggtagtagcgtaatttttttttatttattcgagttggtcgtttggttggtgtttagcggtttcgatgttttg

SEQ ID NO: 4078 - DNA, 691 bp, Artificial Sequence
  chemically treated genomic DNA (Homo sapiens) CpG-island No: 4078
caaaacatcgaaaccgctaaacaccaaccaaacgaccaactcgaataaataaaaaaaaattacgctactacctaactaaaaaacgacaaccgaaaacccgcgccgtcgactctcgcttactaaaccaaacctccaaacgaaaaaattcctaccaaaccgaaaatcgccgcctaaaccttaaaccgacgcgcctaataataaaacccgaaaaaatacttcgacgtccgcaaaatttcgaccccaaacgtttcgaacgaccgcgcaattctccaatccccgcgtcgaacaaaactcgacacgacactctattaaaaccccactaaaaactaaatttaaaatatcgaaacccgtaatacaaaatcgccgaccgtatcgaaaaaccccaacaccgctactccactacgaccccgacctaatataaaatccgcactcctcgaacccgatactattccgactccgaccccatccctaatatccaaaattatctaattcccaaatcccgcgctaatcaactaaaatttatttttcacccccacgaactcaaacaacccgaccatcgcgacaactaaaacgaccgccatcctctcccacgtaaacgccactatatactaaaacccgaaaacgcgcgaactcgaaaaccctaaataacctctccgccttctccccgcgctactttccgaaaaatatatcg

SEQ ID NO: 4079 - DNA, 691 bp, Artificial Sequence
  chemically treated genomic DNA (Homo sapiens) CpG-island No: 4079
tagagtatcggggtcgttggatattagttagacggttagttcgggtaggtgaggagaggttgcgttgttgtttgattggggggcgatagtcgggagttcgcgtcgtcggttttcgtttgttggattaggtttttaggcggaaaagtttttgttaggtcgggggtcgtcgtttgggttttgggtcgacgcgtttggtgatggggttcgggaggatgtttcggcgttcgtagggtttcggttttaagcgtttcgggcggtcgcgtagttttttagttttcgcgtcgggtagggttcggtacggtattttgttggagttttattgaaaattgggtttggggtgtcggagttcgtggtgtagagtcgtcggtcgtgtcggagggttttagtatcgttgttttattgcggtttcggtttggtgtaggattcgtatttttcgagttcgatgttgtttcggtttcggttttatttttggtgtttaaagttgtttgatttttaaatttcgcgttggttaattggggtttattttttatttttacgagtttagataattcggttatcgcggtagttaaagcggtcgttatttttttttacgtaagcgttattatatattggagttcggggacgcgcgggttcggggattttgggtgattttttcgtttttttttcgcgttgtttttcgggaggtgtgtcg

SEQ ID NO: 4080 - DNA, 691 bp, Artificial Sequence
  chemically treated genomic DNA (Homo sapiens) CpG-island No: 4080
cgacacacctcccgaaaaacaacgcgaaaaaaaaacgaaaaaatcacccaaaatccccgaacccgcgcgtccccgaactccaatatataataacgcttacgtaaaaaaaaataacgaccgctttaactaccgcgataaccgaattatctaaactcgtaaaaataaaaaataaaccccaattaaccaacgcgaaatttaaaaatcaaacaactttaaacaccaaaaataaaaccgaaaccgaaacaacatcgaactcgaaaaatacgaatcctacaccaaaccgaaaccgcaataaaacaacgatactaaaaccctccgacacgaccgacgactctacaccacgaactccgacaccccaaacccaattttcaataaaactccaacaaaataccgtaccgaaccctacccgacgcgaaaactaaaaaactacgcgaccgcccgaaacgcttaaaaccgaaaccctacgaacgccgaaacatcctcccgaaccccatcaccaaacgcgtcgacccaaaacccaaacgacgacccccgacctaacaaaaacttttccgcctaaaaacctaatccaacaaacgaaaaccgacgacgcgaactcccgactatcgccccccaatcaaacaacaacgcaacctctcctcacctacccgaactaaccgtctaactaatatccaacgaccccgatactcta

SEQ ID NO: 4081 - DNA, 1429 bp, Artificial Sequence
  chemically treated genomic DNA (Homo sapiens) CpG-island No: 4081
attcgcggcggtgggggtaaaaagttacggcggtgggggtaaaaatacgcgacggtagggtgaaaaagtcgtaggggtaaaaatttgtggcggcgggagtaaaaagtcgcgtcggtaaaaagtcgcggcggcgggggtaaaaagttataaaaagtcgcggcggcgggcgtaaaaagttataacggtggggtttaaaagtcggggcggtgggggaaaaagtcggggcgacgggggtaataagttatagcggcgggggtaataagttagggcggtcgaggtaaatagtcgcggcgataaaaagttgtggtgacgggggtaaaaagtcgtaaaaagttatagtatcggggttagaaagtcgcgacggtcgggataaaaatcgcggtggcggggtaagaagtcgcggcggtaaaaagatgcggcggcggtggaaaaaggcgcggcgggggtaaaacggtgtagcggtagtaaaaagtcgcggcgtcgggggtaaaaagttttaaaaagttacggcggagggggtaaaaagtcgtaaaaagtcgcgatagagggggtaaaaagtaggggcggtaaaaagttacgacggcggggatatgaaggcgtaaaaatttttcgcggtaggagtaaaaattcgtggcggcgggggtaaaaagcggttggggtgataaaaagtcgcggcggtgggggtaggaagtcgcgtagggggtaaggagtcgcggtagcggaggtaaaaagttgcggtggtaggggtaaatagtagtaaaaagtcgcggcggcggggggtaaaacgatataaaaagttttgatagtgggggtaagaagtcgcggttggaaaaatttgtggcggagggggaaaaaagtcgcggcggcgggggcggaaaggcgtaaaaagtcgcggtggtttcggttaaaagttatgacggtaaaatgtcggggcggtagggtaagaagttacggcgggaaaaatttgcggcggcgggggcgaaaagtagtaaaaagtatcggcgtcgggggttaaaagtcgtaaaaagtcgcggcggcggtgataaaaagtcgcggcggaaaaatttacggtggcgggggtaaaaagttgcggtagtagggggaaaaagtcgtaaaaagtcgtaaaggttagggtaaaaagtcgcggcggtggggggagaaagatttaaaaagttgcggcggtaaaaagttacggcggcgagggtaaagagttttaaaagtcgcggcggtaggggttaaatttcgcgaggtcgggggtagaaagtaatggcggcgggggtagaaagtcgtaaaaattcgtagcggcggggttaaaaatttacgatggtaaaaagtcgcgtcggcgggggtaaaatagtggaaatggggtagatagttagtatagtttggtatttttggagtgtgatgtggaaggaaaagtgtagaggaa

SEQ ID NO: 4082 - DNA, 1429 bp, Artificial Sequence
  chemically treated genomic DNA (Homo sapiens) CpG-island No: 4082
ttcctctacacttttccttccacatcacactccaaaaataccaaactatactaactatctaccccatttccactattttacccccgccgacgcgactttttaccatcgtaaatttttaaccccgccgctacgaatttttacgactttctacccccgccgccattactttctacccccgacctcgcgaaatttaacccctaccgccgcgacttttaaaactctttaccctcgccgccgtaactttttaccgccgcaactttttaaatctttctccccccaccgccgcgactttttaccctaacctttacgactttttacgactttttccccctactaccgcaactttttacccccgccaccgtaaatttttccgccgcgactttttatcaccgccgccgcgactttttacgacttttaacccccgacgccgatactttttactacttttcgcccccgccgccgcaaatttttcccgccgtaacttcttaccctaccgccccgacattttaccgtcataacttttaaccgaaaccaccgcgactttttacgcctttccgcccccgccgccgcgacttttttccccctccgccacaaatttttccaaccgcgacttcttacccccactatcaaaactttttatatcgttttaccccccgccgccgcgactttttactactatttacccctaccaccgcaactttttacctccgctaccgcgactccttaccccctacgcgacttcctacccccaccgccgcgactttttatcaccccaaccgctttttacccccgccgccacgaatttttactcctaccgcgaaaaatttttacgccttcatatccccgccgtcgtaactttttaccgcccctactttttaccccctctatcgcgactttttacgactttttaccccctccgccgtaactttttaaaactttttacccccgacgccgcgactttttactaccgctacaccgttttacccccgccgcgcctttttccaccgccgccgcatctttttaccgccgcgacttcttaccccgccaccgcgatttttatcccgaccgtcgcgactttctaaccccgatactataactttttacgactttttacccccgtcaccacaactttttatcgccgcgactatttacctcgaccgccctaacttattacccccgccgctataacttattacccccgtcgccccgactttttcccccaccgccccgacttttaaaccccaccgttataactttttacgcccgccgccgcgactttttataactttttacccccgccgccgcgactttttaccgacgcgactttttactcccgccgccacaaatttttacccctacgactttttcaccctaccgtcgcgtatttttacccccaccgccgtaactttttacccccaccgccgcgaat

SEQ ID NO: 4083 - DNA, 1429 bp, Artificial Sequence
  chemically treated genomic DNA (Homo sapiens) CpG-island No: 4083
tttttttgtatttttttttttatattatattttaggaatgttaagttgtgttggttgtttattttatttttattattttgttttcgtcgacgcggttttttgttatcgtggatttttgatttcgtcgttgcgggtttttgcggttttttgttttcgtcgttattgttttttgttttcggtttcgcggaatttagtttttgtcgtcgcggtttttggggttttttgttttcgtcgtcgtggttttttgtcgtcgtagttttttgggtttttttttttttatcgtcgcggttttttgttttagtttttgcggttttttgcggttttttttttttgttgtcgtagttttttgttttcgttatcgtgaattttttcgtcgcggttttttgttatcgtcgtcgcggttttttacggtttttggttttcggcgtcggtgttttttattgtttttcgttttcgtcgtcgtaggtttttttcgtcgtggttttttgttttgtcgtttcggtattttgtcgttatggtttttggtcgaggttatcgcggttttttacgttttttcgttttcgtcgtcgcggttttttttttttttcgttataggtttttttagtcgcggttttttgtttttattgttagggttttttgtgtcgttttgtttttcgtcgtcgcggttttttgttgttatttgtttttgttatcgtagttttttgttttcgttgtcgcggttttttgttttttacgcggttttttgtttttatcgtcgcggttttttattattttagtcgttttttgttttcgtcgttacgggtttttgtttttgtcgcggagggtttttgcgtttttatgttttcgtcgtcgtggttttttgtcgtttttgttttttgttttttttgtcgcggttttttgcggttttttatttttttcgtcgtggttttttgaggttttttgttttcgacgtcgcggttttttgttgtcgttgtatcgttttgttttcgtcgcgtttttttttatcgtcgtcgtatttttttgtcgtcgcggttttttatttcgttatcgcggtttttatttcggtcgtcgcggttttttgatttcgatgttgtggttttttacggttttttgttttcgttattatagttttttgtcgtcgcggttgtttgtttcggtcgttttggtttgttgttttcgtcgttgtggtttgttgttttcgtcgtttcggtttttttttttatcgtttcggtttttggattttatcgttgtggttttttgcgttcgtcgtcgcggttttttgtggttttttgttttcgtcgtcgcggttttttgtcgacgcggttttttattttcgtcgttataggtttttatttttgcggtttttttattttgtcgtcgcgtgtttttgtttttatcgtcgtgattttttatttttatcgtcgcgggt

SEQ ID NO: 4084 - DNA, 1429 bp, Artificial Sequence
  chemically treated genomic DNA (Homo sapiens) CpG-island No: 4084
acccgcgacgataaaaataaaaaatcacgacgataaaaacaaaaacacgcgacgacaaaataaaaaaaccgcaaaaataaaaacctataacgacgaaaataaaaaaccgcgtcgacaaaaaaccgcgacgacgaaaacaaaaaaccacaaaaaaccgcgacgacgaacgcaaaaaaccacaacgataaaatccaaaaaccgaaacgataaaaaaaaaaaccgaaacgacgaaaacaacaaaccacaacgacgaaaacaacaaaccaaaacgaccgaaacaaacaaccgcgacgacaaaaaactataataacgaaaacaaaaaaccgtaaaaaaccacaacatcgaaatcaaaaaaccgcgacgaccgaaataaaaaccgcgataacgaaataaaaaaccgcgacgacaaaaaaatacgacgacgataaaaaaaaacgcgacgaaaacaaaacgatacaacgacaacaaaaaaccgcgacgtcgaaaacaaaaaacctcaaaaaaccacgacgaaaaaaataaaaaaccgcaaaaaaccgcgacaaaaaaaacaaaaaacaaaaacgacaaaaaaccacgacgacgaaaacataaaaacgcaaaaaccctccgcgacaaaaacaaaaacccgtaacgacgaaaacaaaaaacgactaaaataataaaaaaccgcgacgataaaaacaaaaaaccgcgtaaaaaacaaaaaaccgcgacaacgaaaacaaaaaactacgataacaaaaacaaataacaacaaaaaaccgcgacgacgaaaaacaaaacgacacaaaaaaccctaacaataaaaacaaaaaaccgcgactaaaaaaacctataacgaaaaaaaaaaaaaaccgcgacgacgaaaacgaaaaaacgtaaaaaaccgcgataacctcgaccaaaaaccataacgacaaaataccgaaacgacaaaacaaaaaaccacgacgaaaaaaacctacgacgacgaaaacgaaaaacaataaaaaacaccgacgccgaaaaccaaaaaccgtaaaaaaccgcgacgacgataacaaaaaaccgcgacgaaaaaattcacgataacgaaaacaaaaaactacgacaacaaaaaaaaaaaaccgcaaaaaaccgcaaaaactaaaacaaaaaaccgcgacgataaaaaaaaaaaaacccaaaaaactacgacgacaaaaaaccacgacgacgaaaacaaaaaaccccaaaaaccgcgacgacaaaaactaaattccgcgaaaccgaaaacaaaaaacaataacgacgaaaacaaaaaaccgcaaaaacccgcaacgacgaaatcaaaaatccacgataacaaaaaaccgcgtcgacgaaaacaaaataataaaaataaaataaacaaccaacacaacttaacattcctaaaatataatataaaaaaaaaaatacaaaaaaa

SEQ ID NO: 4085 - DNA, 1039 bp, Artificial Sequence
  chemically treated genomic DNA (Homo sapiens) CpG-island No: 4085
gtcgtcgttgttttttgatttttcgtcgtcgcggttttttgttttttttgtcgtcgcggttttttttcgtttcgtcgtcgcggttttttttttttatcgcgttttcgttttttgttcgtcgcggttttttgttttttaagcgttaaggttttttgattatcgcggttttttgattttcgtttttgcgaattttgtcgtcgtggttttttgttcgtcgcggtttttttttttaattggtgtagcggttgtttgttttttgtcgttttttgtttttcgtcgttttttgtttttttcgtcgtcgcggttttttcgttgttatggtttttttttttttgttttcgcggttttttattcgtcgcggtttttcgttttttcgttatcgcggttttttattagtcgtagttttttgtttttcgtcgtcgcggttttttgttcgttgcggttttttggtttttttatcgtcgcggttttttgtttttcgtcgttttttgtatttcgtcgtcgtcgcggtttttttttttttgttttcgcggttttttattcgtcgcggttttttgttttaatttcgtttcggttttttatttttcgtcgtttcggttttttgtttttattttgtttcggttttttgattttcgcggttttttttttttcgtcgtcgcgatttttcgtttttcgtcgtcgcggttttttgtttttcgtcgttgtcgcggtttttttttcgattaggttttttgttttatcgtcgatatagttttttgtattttcgtcgttatggttttttgtcgtcgcggttttttgttcgtcgtggttttttgtttttacgtcgtcgcggttttttgttttcgtcgtcgcggttttttgttgtcgcgattttttgttttcgtcgtcgtcgttttttgttatcgcgattttttgttttcgtcgtcgaggatttttgttttcgtcgtcgcggttttgagggcgggagtagtagattcggttgtcggttttattggcgttttggtaagggtagcgattaggggtgtttttggtttagttt

SEQ ID NO: 4086 - DNA, 1039 bp, Artificial Sequence
  chemically treated genomic DNA (Homo sapiens) CpG-island No: 4086
aaactaaaccaaaaacacccctaatcgctacccttaccaaaacgccaataaaaccgacaaccgaatctactactcccgccctcaaaaccgcgacgacgaaaacaaaaatcctcgacgacgaaaacaaaaaatcgcgataacaaaaaacgacgacgacgaaaacaaaaaatcgcgacaacaaaaaaccgcgacgacgaaaacaaaaaaccgcgacgacgtaaaaacaaaaaaccacgacgaacaaaaaaccgcgacgacaaaaaaccataacgacgaaaatacaaaaaactatatcgacgataaaacaaaaaacctaatcgaaaaaaaaaccgcgacaacgacgaaaaacaaaaaaccgcgacgacgaaaaacgaaaaatcgcgacgacgaaaaaaaaaaaaccgcgaaaatcaaaaaaccgaaacaaaataaaaacaaaaaaccgaaacgacgaaaaataaaaaaccgaaacgaaattaaaacaaaaaaccgcgacgaataaaaaaccgcgaaaacaaaaaaaaaaaaaccgcgacgacgacgaaatacaaaaaacgacgaaaaacaaaaaaccgcgacgataaaaaaaccaaaaaaccgcaacgaacaaaaaaccgcgacgacgaaaaacaaaaaactacgactaataaaaaaccgcgataacgaaaaaacgaaaaaccgcgacgaataaaaaaccgcgaaaacaaaaaaaaaaaaaccataacaacgaaaaaaccgcgacgacgaaaaaaacaaaaaacgacgaaaaacaaaaaacgacaaaaaacaaacaaccgctacaccaattaaaaaaaaaaaccgcgacgaacaaaaaaccacgacgacaaaattcgcaaaaacgaaaatcaaaaaaccgcgataatcaaaaaaccttaacgcttaaaaaacaaaaaaccgcgacgaacaaaaaacgaaaacgcgataaaaaaaaaaaaccgcgacgacgaaacgaaaaaaaaccgcgacgacaaaaaaaacaaaaaaccgcgacgacgaaaaatcaaaaaacaacgacgac

SEQ ID NO: 4087 - DNA, 1039 bp, Artificial Sequence
  chemically treated genomic DNA (Homo sapiens) CpG-island No: 4087
gagttggattaggagtatttttggtcgttgtttttgttaggacgttagtagagtcggtagtcgagtttgttgttttcgtttttagagtcgcggcggcggggataaaaattttcggcggcgggggtaaaaagtcgcggtggtaaaaagcggcggcgacgggggtaaaaagtcgcggtagtaaaaagtcgcggcggcggggataaaaagtcgcggcggcgtgggggtagaaagttacggcgggtaaaaagtcgcggcggtaaaaagttatggcggcgagggtgtaaaaagttgtgtcggcggtggggtaaaaagtttggtcgggaaaaaagtcgcggtagcggcgaagggtaaaaagtcgcggcggcggagggcgaaaagtcgcggcggcgggaggaaaaaagtcgcggaggttaaaaagtcgaggtagggtgggggtaaaaagtcgaggcggcggggggtaaaaagtcgaggcggggttggggtaaaaagtcgcggcgggtaaaaagtcgcgggggtaggggggaaaaagtcgcggcggcggcggggtgtaaaaagcggcggggggtaaaaagtcgcggcggtgggggggttaaaaagtcgtagcgggtaaaaagtcgcggcggcgggggataaaaagttgcggttggtgaaaagtcgcggtggcgggggggcgaaaagtcgcggcgggtaaaaagtcgcgggggtaggggggaaaaagttatggtagcgaaaaagtcgcggcggcggggggggtaaaaagcggcggggggtaaaaagcggtagggggtaaatagtcgttgtattagttgggggaaaaagtcgcggcgggtaaaaagttacggcggtaaaattcgtagaggcgaaggttaaaaagtcgcggtggttaaaaagttttggcgtttggggggtaaaaagtcgcggcgggtaaaaagcggaggcgcggtggggggaaaaagtcgcggcggcggggcgggaaaaagtcgcggcggtagggggggtaaaaagtcgcggcggcggggggttaaaaagtagcggcggt

SEQ ID NO: 4088 - DNA, 1039 bp, Artificial Sequence
  chemically treated genomic DNA (Homo sapiens) CpG-island No: 4088
accgccgctactttttaaccccccgccgccgcgactttttaccccccctaccgccgcgactttttcccgccccgccgccgcgactttttccccccaccgcgcctccgctttttacccgccgcgactttttaccccccaaacgccaaaactttttaaccaccgcgactttttaaccttcgcctctacgaattttaccgccgtaactttttacccgccgcgactttttcccccaactaatacaacgactatttaccccctaccgctttttaccccccgccgctttttaccccccccgccgccgcgactttttcgctaccataactttttcccccctacccccgcgactttttacccgccgcgacttttcgcccccccgccaccgcgacttttcaccaaccgcaactttttatcccccgccgccgcgactttttacccgctacgactttttaacccccccaccgccgcgactttttaccccccgccgctttttacaccccgccgccgccgcgactttttcccccctacccccgcgactttttacccgccgcgactttttaccccaaccccgcctcgactttttaccccccgccgcctcgactttttacccccaccctacctcgactttttaacctccgcgacttttttcctcccgccgccgcgacttttcgccctccgccgccgcgactttttacccttcgccgctaccgcgacttttttcccgaccaaactttttaccccaccgccgacacaactttttacaccctcgccgccataactttttaccgccgcgactttttacccgccgtaactttctacccccacgccgccgcgactttttatccccgccgccgcgactttttactaccgcgactttttacccccgtcgccgccgctttttaccaccgcgactttttacccccgccgccgaaaatttttatccccgccgccgcgactctaaaaacgaaaacaacaaactcgactaccgactctactaacgtcctaacaaaaacaacgaccaaaaatactcctaatccaactc

SEQ ID NO: 4089 - DNA, 509 bp, Artificial Sequence
  chemically treated genomic DNA (Homo sapiens) CpG-island No: 4089
tagcgttttcgggatttttttttttagcgttcggtttggaatttcgcgtggacgttttttaggcgggaagggaggattggaagttattttatacgtgcgttttcgtacgcgcgtatttagggcgtacgtttttgatacgttcgtttacgcgttcgtcgtagttcggcgtgttcggttgtgagtttcgagggtcggcgcggtaagcgtttttttagtaagtttttagtttcgagtttagtgttaggagttgttttaatttcggagttcggtgcgagttcggggttttgttcgggtattcgtatattttaagtttgggtggtagcgtaggtggttaggtgcgttttaagcggtgcgcgggttgcgtttatttgtgtttgaaggcgacggtttttttgtttaggttttagttcgttcggtcgcggaggtttgggtgtttcgggatcgtttgtttttaggaaagtttttttttattttttcggttttcggtttagcgggtttgattttttttt

SEQ ID NO: 4090 - DNA, 509 bp, Artificial Sequence
  chemically treated genomic DNA (Homo sapiens) CpG-island No: 4090
aaaaaaaaatcaaacccgctaaaccgaaaaccgaaaaaataaaaaaaaactttcctaaaaacaaacgatcccgaaacacccaaacctccgcgaccgaacgaactaaaacctaaacaaaaaaaccgtcgccttcaaacacaaataaacgcaacccgcgcaccgcttaaaacgcacctaaccacctacgctaccacccaaacttaaaatatacgaatacccgaacaaaaccccgaactcgcaccgaactccgaaattaaaacaactcctaacactaaactcgaaactaaaaacttactaaaaaaacgcttaccgcgccgaccctcgaaactcacaaccgaacacgccgaactacgacgaacgcgtaaacgaacgtatcaaaaacgtacgccctaaatacgcgcgtacgaaaacgcacgtataaaataacttccaatcctcccttcccgcctaaaaaacgtccacgcgaaattccaaaccgaacgctaaaaaaaaaaatcccgaaaacgcta

SEQ ID NO: 4091 - DNA, 509 bp, Artificial Sequence
  chemically treated genomic DNA (Homo sapiens) CpG-island No: 4091
gagggaaggttaggttcgttgagtcgggagtcgggagggtagagaggggtttttttagggatagacggtttcggggtatttaggttttcgcggtcgagcgggttgaggtttaagtagggaggtcgtcgtttttaggtataggtaagcgtagttcgcgtatcgtttgggacgtatttggttatttgcgttgttatttaagtttggggtatgcgggtgttcgagtagaatttcgaattcgtatcgggtttcgaggttggagtaatttttaatattgggttcggagttaggggtttgttggaggggcgtttgtcgcgtcggttttcggggtttatagtcgggtacgtcggattgcggcgagcgcgtgggcgagcgtgttaggagcgtgcgttttgggtgcgcgcgtgcgagagcgtacgtgtagggtggtttttagtttttttttttcgtttgagaagcgtttacgcggagttttaggtcgggcgttggggaaggaggtttcggggacgttg

SEQ ID NO: 4092 - DNA, 509 bp, Artificial Sequence
  chemically treated genomic DNA (Homo sapiens) CpG-island No: 4092
caacgtccccgaaacctccttccccaacgcccgacctaaaactccgcgtaaacgcttctcaaacgaaaaaaaaaaactaaaaaccaccctacacgtacgctctcgcacgcgcgcacccaaaacgcacgctcctaacacgctcgcccacgcgctcgccgcaatccgacgtacccgactataaaccccgaaaaccgacgcgacaaacgcccctccaacaaacccctaactccgaacccaatattaaaaattactccaacctcgaaacccgatacgaattcgaaattctactcgaacacccgcataccccaaacttaaataacaacgcaaataaccaaatacgtcccaaacgatacgcgaactacgcttacctatacctaaaaacgacgacctccctacttaaacctcaacccgctcgaccgcgaaaacctaaataccccgaaaccgtctatccctaaaaaaacccctctctaccctcccgactcccgactcaacgaacctaaccttccctc

SEQ ID NO: 4093 - DNA, 636 bp, Artificial Sequence
  chemically treated genomic DNA (Homo sapiens) CpG-island No: 4093
acgcgttaggtgtgttttaagttggatacgataggaacgggcggcggtcgcgggtttgtttagcgcgggggtttcgggttcgcgtttttttcgtttcgttattcgcgtttcgtttcgttttcgggtttttttattcgcggttgtaggggattttcgggaggaggcgggttcggcgaggttttttgaggatttttcggtttcgggtcgtttttcggtttcgcgtcgattttatatttcgttcgcgtatttggcgttttttttcgagtatatacgtgcggataatgcgcgtttcgggtcggataaaggtgttttcgagacggcgagcgaggcggggcgcggtttatttagttgggggtaggaataaaggcgcggttttatcgttcgcgggtcggggcgggtcggggttaggtcgggggtcgcgggcggggtttttttagttcgggacggggtcgggggcgtcgtttaggtttgggttcggggtttgttgggtgggtttaggacgtagtgatttaggggttcggttcgaggcgttttattttcgatcgtcgttttgagggtgttcgggttcggaagaaattgttgaagtgggttttggaagcgaaagaatagggatttttggagattggaattgttgtt

SEQ ID NO: 4094 - DNA, 636 bp, Artificial Sequence
  chemically treated genomic DNA (Homo sapiens) CpG-island No: 4094
aacaacaattccaatctccaaaaatccctattctttcgcttccaaaacccacttcaacaatttcttccgaacccgaacaccctcaaaacgacgatcgaaaataaaacgcctcgaaccgaacccctaaatcactacgtcctaaacccacccaacaaaccccgaacccaaacctaaacgacgcccccgaccccgtcccgaactaaaaaaaccccgcccgcgacccccgacctaaccccgacccgccccgacccgcgaacgataaaaccgcgcctttattcctacccccaactaaataaaccgcgccccgcctcgctcgccgtctcgaaaacacctttatccgacccgaaacgcgcattatccgcacgtatatactcgaaaaaaaacgccaaatacgcgaacgaaatataaaatcgacgcgaaaccgaaaaacgacccgaaaccgaaaaatcctcaaaaaacctcgccgaacccgcctcctcccgaaaatcccctacaaccgcgaataaaaaaacccgaaaacgaaacgaaacgcgaataacgaaacgaaaaaaacgcgaacccgaaacccccgcgctaaacaaacccgcgaccgccgcccgttcctatcgtatccaacttaaaacacacctaacgcgt

SEQ ID NO: 4095 - DNA, 636 bp, Artificial Sequence
  chemically treated genomic DNA (Homo sapiens) CpG-island No: 4095
agtagtagttttagtttttaagagtttttgttttttcgtttttagggtttattttagtagtttttttcggattcggatatttttagggcggcgatcgggggtgaaacgtttcgggtcgagtttttgggttattgcgttttgagtttatttagtaaatttcgagtttaggtttgagcggcgttttcgatttcgtttcgggttggagaggtttcgttcgcggttttcggtttgatttcggttcgtttcggttcgcgggcgataaggtcgcgtttttgtttttgtttttagttgggtaaatcgcgtttcgtttcgttcgtcgtttcgggggtatttttgttcggttcggggcgcgtattgttcgtacgtgtgtattcggggaggggcgttaggtgcgcgggcggaatgtagggtcggcgcggggtcggggggcggttcggggtcggggggtttttaggaagtttcgtcgggttcgttttttttcgagggttttttgtagtcgcggatgggggagttcgggggcggagcggggcgcgggtggcggagcgggggaggcgcgaattcgggattttcgcgttggataaattcgcggtcgtcgttcgtttttgtcgtgtttagtttgagatatatttggcgcgt

SEQ ID NO: 4096 - DNA, 636 bp, Artificial Sequence
  chemically treated genomic DNA (Homo sapiens) CpG-island No: 4096
acgcgccaaatatatctcaaactaaacacgacaaaaacgaacgacgaccgcgaatttatccaacgcgaaaatcccgaattcgcgcctcccccgctccgccacccgcgccccgctccgcccccgaactcccccatccgcgactacaaaaaaccctcgaaaaaaaacgaacccgacgaaacttcctaaaaaccccccgaccccgaaccgccccccgaccccgcgccgaccctacattccgcccgcgcacctaacgcccctccccgaatacacacgtacgaacaatacgcgccccgaaccgaacaaaaatacccccgaaacgacgaacgaaacgaaacgcgatttacccaactaaaaacaaaaacaaaaacgcgaccttatcgcccgcgaaccgaaacgaaccgaaatcaaaccgaaaaccgcgaacgaaacctctccaacccgaaacgaaatcgaaaacgccgctcaaacctaaactcgaaatttactaaataaactcaaaacgcaataacccaaaaactcgacccgaaacgtttcacccccgatcgccgccctaaaaatatccgaatccgaaaaaaactactaaaataaaccctaaaaacgaaaaaacaaaaactcttaaaaactaaaactactact

SEQ ID NO: 4097 - DNA, 902 bp, Artificial Sequence
  chemically treated genomic DNA (Homo sapiens) CpG-island No: 4097
agatcgtcgcgtgtaaagtttagcggtacggagttgttgtcgtttttttttttgcgtttgtttaaatcgaggtaacgttttagttttcggatttttcggttttttttttcgttcgtcgttaaaagcgttcgttttcgggtagcggcggtggcggttgcggagggtttggtttttgcggtggcggtcgtggttttggttttgattcgggacggtcgcggttttttgggaggcgaggggtttcgattaggggttgggcgggcgcgttttttcgtgttttgtcggtgatcgttggttttttcggtttcgtttcggttttttaggcgggatttgttcggggtcgtcgttttttgtagtcggcgtgtttttcgtaggtgtcgtttttttttttttagttttttacggttttttttttttttcgggcgaaacgttatcgggcgtcgcgtttttcgtaattttcgggagtttcgtttttcgaagtcgcgtgtacgaatttttttatcgttagttttagtttttttagggttttttttttatcgttagtaggatcgcggcgttcgcgttcgttttttgcgttttatgcgattacgcgtttttgggagtcgttcgggtcggtttttttcgcgtttttggacgtcgttatttttcgaaacgcgtggacgtacgattttcggtcgaggcgggattttcggggaagaggcggttgcgcggggcgggcggcggcgttttttgttggtcggagggcgatagcgtgtagagttgcgcggagtcgggtgcgggggtagtcgggtaggtggcgttcggggtaggcgttcgcgggtgggcgtcgcgtggacgttaggttcgcgatgagtatggaggtgtttttatatttaaaagggaaattcggtcgggcgcggtggttt

SEQ ID NO: 4098 - DNA, 902 bp, Artificial Sequence
  chemically treated genomic DNA (Homo sapiens) CpG-island No: 4098
aaaccaccgcgcccgaccgaatttcccttttaaatataaaaacacctccatactcatcgcgaacctaacgtccacgcgacgcccacccgcgaacgcctaccccgaacgccacctacccgactacccccgcacccgactccgcgcaactctacacgctatcgccctccgaccaacaaaaaacgccgccgcccgccccgcgcaaccgcctcttccccgaaaatcccgcctcgaccgaaaatcgtacgtccacgcgtttcgaaaaataacgacgtccaaaaacgcgaaaaaaaccgacccgaacgactcccaaaaacgcgtaatcgcataaaacgcaaaaaacgaacgcgaacgccgcgatcctactaacgataaaaaaaaaaccctaaaaaaactaaaactaacgataaaaaaattcgtacacgcgacttcgaaaaacgaaactcccgaaaattacgaaaaacgcgacgcccgataacgtttcgcccgaaaaaaaaaaaaaaccgtaaaaaactaaaaaaaaaaaaacgacacctacgaaaaacacgccgactacaaaaaacgacgaccccgaacaaatcccgcctaaaaaaccgaaacgaaaccgaaaaaaccaacgatcaccgacaaaacacgaaaaaacgcgcccgcccaacccctaatcgaaacccctcgcctcccaaaaaaccgcgaccgtcccgaatcaaaaccaaaaccacgaccgccaccgcaaaaaccaaaccctccgcaaccgccaccgccgctacccgaaaacgaacgcttttaacgacgaacgaaaaaaaaaaccgaaaaatccgaaaactaaaacgttacctcgatttaaacaaacgcaaaaaaaaaaacgacaacaactccgtaccgctaaactttacacgcgacgatct

SEQ ID NO: 4099 - DNA, 902 bp, Artificial Sequence
  chemically treated genomic DNA (Homo sapiens) CpG-island No: 4099
gagttatcgcgttcggtcggattttttttttaaatgtgaaggtatttttatgtttatcgcgagtttgacgtttacgcggcgtttattcgcgggcgtttgtttcgggcgttatttgttcggttgttttcgtattcggtttcgcgtagttttgtacgttgtcgtttttcggttagtagggggcgtcgtcgttcgtttcgcgtagtcgtttttttttcggaagtttcgtttcggtcggaagtcgtgcgtttacgcgtttcgaaagatggcggcgtttaggagcgcgggagaggtcggttcgggcggtttttagggacgcgtggtcgtatgaagcgtagaaggcgggcgcgggcgtcgcggttttgttggcggtggggagaaggttttgaagaggttgaagttagcggtggaggagttcgtgtacgcgatttcggaaggcgaggttttcgggggttgcgaggggcgcggcgttcggtgacgtttcgttcgggagggagaaaaagtcgtaaggaattgaggaaggagaagcggtatttgcggaaagtacgtcggttgtagaggacggcggtttcgaataggtttcgtttgggaggtcgaagcggagtcgaagaagttagcggttatcggtaggatacggaggagcgcgttcgtttagtttttagtcgggatttttcgttttttaggaagtcgcggtcgtttcgggttaaggttaaggttacggtcgttatcgtaaagattagatttttcgtagtcgttatcgtcgttgttcggaaacgggcgtttttagcggcgaacgaggaggaggatcgagagattcgaaagttggagcgttgtttcggtttgaataagcgtaaaaagaaggacggtagtagtttcgtgtcgttgagttttgtacgcgacggttt

SEQ ID NO: 4100 - DNA, 902 bp, Artificial Sequence
  chemically treated genomic DNA (Homo sapiens) CpG-island No: 4100
aaaccgtcgcgtacaaaactcaacgacacgaaactactaccgtccttctttttacgcttattcaaaccgaaacaacgctccaactttcgaatctctcgatcctcctcctcgttcgccgctaaaaacgcccgtttccgaacaacgacgataacgactacgaaaaatctaatctttacgataacgaccgtaaccttaaccttaacccgaaacgaccgcgacttcctaaaaaacgaaaaatcccgactaaaaactaaacgaacgcgctcctccgtatcctaccgataaccgctaacttcttcgactccgcttcgacctcccaaacgaaacctattcgaaaccgccgtcctctacaaccgacgtactttccgcaaataccgcttctccttcctcaattccttacgactttttctccctcccgaacgaaacgtcaccgaacgccgcgcccctcgcaacccccgaaaacctcgccttccgaaatcgcgtacacgaactcctccaccgctaacttcaacctcttcaaaaccttctccccaccgccaacaaaaccgcgacgcccgcgcccgccttctacgcttcatacgaccacgcgtccctaaaaaccgcccgaaccgacctctcccgcgctcctaaacgccgccatctttcgaaacgcgtaaacgcacgacttccgaccgaaacgaaacttccgaaaaaaaaacgactacgcgaaacgaacgacgacgccccctactaaccgaaaaacgacaacgtacaaaactacgcgaaaccgaatacgaaaacaaccgaacaaataacgcccgaaacaaacgcccgcgaataaacgccgcgtaaacgtcaaactcgcgataaacataaaaataccttcacatttaaaaaaaaaatccgaccgaacgcgataactc

SEQ ID NO: 4101 - DNA, 1256 bp, Artificial Sequence
  chemically treated genomic DNA (Homo sapiens) CpG-island No: 4101
cgtttcgttatttaatcgcgtttcgttatttattcgcgtttcgttatttaatcgcgtttcgttatttagtcgcgtttcgttatttattcgcgtttcgttatttaatcgcgtttcgttatttaatcgcgtttcgttatttagttgcgtttcgttatttattcgcgtttcgttattcggtcgcgtttcgttatttaattgcgtttcgttatttattcgcgttttatttagtcgcgtttcgttatttaacgatatttcgttatttagcgtatatttttttatttagcgtgcgtttcgttatttattcgcgttttattatttagttgcgtttcgttattcgatatttcgttatttagtacgcgtttcgttatttagtatgtatttcgttatttaatcgcgtttcgttatttatttgcgtttcgttatttggttacgtttcgttatttattcgttatttagtcgcgtttcgttatttaacgatatttcgttatttagtcgtgttttattatttagtacgcgtttcgttatttagtatgcgtttcgttatttagtcgcgtttcgttatttagtcgtatttcgttatttattcgcgttttattatttagtcgcgttttattatttagtcgcgtttcgttatttaacgatatttcgttatttagcgtatatttttttatttagcgtatatttttttatttagcgtgtttttcgttatttaatcgcgtttcgttatttatttgcgtttcgttatttagtcgcgtttcgttatttagtacgtgtttcgttatttagtatgcgttttgttatttaatcgcgtttcgttatttattcgcgtttcgttatttaatgatatttcgttatttagcgtatatttttttatttagcgtgtttttcgttatttaatcgcgtttcgttatttagtcgcgttttgttatttagtcgcgtttcgttatttaatcgcgtttcgttatttattcgtatttcgttatttagtcgcgtttcgttatttaatcgcgtttcgttatttattcgcgtttcgttatttaacgatatttcgttatttagcgtatatttttttatttagcgtgtgtttcgttatttaatcgcgtttcgttatttattcgcgtttcgttattcggtcgcgtttcgttattcggtcgcgtttcgttattcggtcgcgttttattatttagtcgtatgggaaagagttttatttttatagttttgggtaaaggggttcggagtggggaaatgggaggttt

SEQ ID NO: 4102 - DNA, 1256 bp, Artificial Sequence
  chemically treated genomic DNA (Homo sapiens) CpG-island No: 4102
aaacctcccatttccccactccgaacccctttacccaaaactataaaaataaaactctttcccatacgactaaataataaaacgcgaccgaataacgaaacgcgaccgaataacgaaacgcgaccgaataacgaaacgcgaataaataacgaaacgcgattaaataacgaaacacacgctaaataaaaaaatatacgctaaataacgaaatatcgttaaataacgaaacgcgaataaataacgaaacgcgattaaataacgaaacgcgactaaataacgaaatacgaataaataacgaaacgcgattaaataacgaaacgcgactaaataacaaaacgcgactaaataacgaaacgcgattaaataacgaaaaacacgctaaataaaaaaatatacgctaaataacgaaatatcattaaataacgaaacgcgaataaataacgaaacgcgattaaataacaaaacgcatactaaataacgaaacacgtactaaataacgaaacgcgactaaataacgaaacgcaaataaataacgaaacgcgattaaataacgaaaaacacgctaaataaaaaaatatacgctaaataaaaaaatatacgctaaataacgaaatatcgttaaataacgaaacgcgactaaataataaaacgcgactaaataataaaacgcgaataaataacgaaatacgactaaataacgaaacgcgactaaataacgaaacgcatactaaataacgaaacgcgtactaaataataaaacacgactaaataacgaaatatcgttaaataacgaaacgcgactaaataacgaataaataacgaaacgtaaccaaataacgaaacgcaaataaataacgaaacgcgattaaataacgaaatacatactaaataacgaaacgcgtactaaataacgaaatatcgaataacgaaacgcaactaaataataaaacgcgaataaataacgaaacgcacgctaaataaaaaaatatacgctaaataacgaaatatcgttaaataacgaaacgcgactaaataaaacgcgaataaataacgaaacgcaattaaataacgaaacgcgaccgaataacgaaacgcgaataaataacgaaacgcaactaaataacgaaacgcgattaaataacgaaacgcgattaaataacgaaacgcgaataaataacgaaacgcgactaaataacgaaacgcgattaaataacgaaacgcgaataaataacgaaacgcgattaaataacgaaacg

SEQ ID NO: 4103 - DNA, 1256 bp, Artificial Sequence
  chemically treated genomic DNA (Homo sapiens) CpG-island No: 4103
gagttttttatttttttatttcgagtttttttatttaggattgtggaaataggatttttttttatgcgattgggtgatgaggcgcgatcgggtgacgaggcgcgatcgggtgacgaggcgcgatcgggtgacgaggcgcgaatgggtgacgaggcgcgattgggtgacgaggtatacgttgggtgaagaggtgtgcgttgggtgacgaggtgtcgttgggtgacgaggcgcgaatgggtgacgaggcgcgattgggtgacgaggcgcgattgggtgacgaggtgcgaatgggtgacgaggcgcgattgggtgacgaggcgcgattgggtgataaggcgcgattgggtgacgaggcgcgattgggtgacgaggagtacgttgggtgaagaggtgtgcgttgggtgacgaggtgttattgggtgacgaggcgcgaatgggtgacgaggcgcgattgggtgatagggcgtatgttgggtgacgaggtacgtgttgggtgacgaggcgcgattgggtgacgaggcgtaaatgggtgacgaggcgcgattgggtgacgaggagtacgttgggtgaagaggtgtgcgttgggtgaagaggtgtgcgttgggtgacgaggtgtcgttgggtgacgaggcgcgattgggtgatgaggcgcgattgggtgatgaggcgcgaatgggtgacgaggtgcgattgggtgacgaggcgcgattgggtgacgaggcgtatgttgggtgacgaggcgcgtgttgggtgatgaggtacgattgggtgacgaggtgtcgttgggtgacgaggcgcgattgggtgacgaatgggtgacgaggcgtgattaggtgacgaggcgtaaatgggtgacgaggcgcgattgggtgacgaggtgtatgttgggtgacgaggcgcgtgttgggtgacgaggtgtcgggtgacgaggcgtaattgggtgatgaggcgcgaatgggtgacgaggcgtacgttgggtgaagaggtgtgcgttgggtgacgaggtgtcgttgggtgacgaggcgcgattgggtgaggcgcgaatgggtgacgaggcgtaattgggtgacgaggcgcgatcgggtgacgaggcgcgaatgggtgacgaggcgtaattgggtgacgaggcgcgattgggtgacgaggcgcgattgggtgacgaggcgcgaatgggtgacgaggcgcgattgggtgacgaggcgcgattgggtgacgaggcgcgaatgggtgacgaggcgcgattgggtgacgaggcg

SEQ ID NO: 4104 - DNA, 1256 bp, Artificial Sequence
  chemically treated genomic DNA (Homo sapiens) CpG-island No: 4104
cgcctcgtcacccaatcgcgcctcgtcacccattcgcgcctcgtcacccaatcgcgcctcgtcacccaatcgcgcctcgtcacccattcgcgcctcgtcacccaatcgcgcctcgtcacccaatcgcgcctcgtcacccaattacgcctcgtcacccattcgcgcctcgtcacccgatcgcgcctcgtcacccaattacgcctcgtcacccattcgcgcctcacccaatcgcgcctcgtcacccaacgacacctcgtcacccaacgcacacctcttcacccaacgtacgcctcgtcacccattcgcgcctcatcacccaattacgcctcgtcacccgacacctcgtcacccaacacgcgcctcgtcacccaacatacacctcgtcacccaatcgcgcctcgtcacccatttacgcctcgtcacctaatcacgcctcgtcacccattcgtcacccaatcgcgcctcgtcacccaacgacacctcgtcacccaatcgtacctcatcacccaacacgcgcctcgtcacccaacatacgcctcgtcacccaatcgcgcctcgtcacccaatcgcacctcgtcacccattcgcgcctcatcacccaatcgcgcctcatcacccaatcgcgcctcgtcacccaacgacacctcgtcacccaacgcacacctcttcacccaacgcacacctcttcacccaacgtactcctcgtcacccaatcgcgcctcgtcacccatttacgcctcgtcacccaatcgcgcctcgtcacccaacacgtacctcgtcacccaacatacgccctatcacccaatcgcgcctcgtcacccattcgcgcctcgtcacccaataacacctcgtcacccaacgcacacctcttcacccaacgtactcctcgtcacccaatcgcgcctcgtcacccaatcgcgccttatcacccaatcgcgcctcgtcacccaatcgcgcctcgtcacccattcgcacctcgtcacccaatcgcgcctcgtcacccaatcgcgcctcgtcacccattcgcgcctcgtcacccaacgacacctcgtcacccaacgcacacctcttcacccaacgtatacctcgtcacccaatcgcgcctcgtcacccattcgcgcctcgtcacccgatcgcgcctcgtcacccgatcgcgcctcgtcacccgatcgcgcctcatcacccaatcgcataaaaaaaaatcctatttccacaatcctaaataaaaaaactcgaaataaaaaaataaaaaactc

SEQ ID NO: 4105 - DNA, 947 bp, Artificial Sequence
  chemically treated genomic DNA (Homo sapiens) CpG-island No: 4105
tcgcgtcgcggagtttatatttgcgtaggtggagtttgtcgagcgcggtcgtcggtgttgggaaggtgagcggcgtcggggggcggagtgggggcgggtcgcgggttttttttaatggcggtacggcggggaggacgcgggttacggtcggaggggggcgtttcgggtttaggcgttgtcgttttcgagttttcgggtttttttttacgttttttttcgggcgggtcgtattaaggcgcgggggggagcggcgcgttttattcgcggaggggtacgcgggtcgcgcggtatttgcggcggcggcggcggtttcgggcgggtgggggtagcgttttcgtttcgttttcggttttcgttgttcgcgttttttgttaggttttttttttcggcggcgcggtagagttaggttttagcgttcggtcggtcgcgagttcgtcggtcggggacgagcgtcgtagtttatgttgatcgttgtttttttttttttttttaggcggcgttggcggcggttttgggattcgcggaagtcggtatgttggagaagttggagttcgaggacgaaggtgagtgcgtttcgttcgttgtcggttcggcgtttttacggttcggtcgttcgaggatcgggattcgcggggatttcgcgttttattttcggcgttgttttacggcgagttgcgttttgcggaagtttaggggtcggggcgggaatcggggcggggatgcgggcgtcggcgagttcgggttgcggggtatcgggcgttcgcggaggggacgcgagttaggtttttagagcgtagttttgagttcggtatttatacggacgggcggtttttttgtttttattcgtcgaattcgaattatagtaaggtgttagggagcgttaattgtttgtgtttgttattatgtattcggaggtaatttcgaattatatttatagtttagatttt

SEQ ID NO: 4106 - DNA, 947 bp, Artificial Sequence
  chemically treated genomic DNA (Homo sapiens) CpG-island No: 4106
aaaatctaaactataaatataattcgaaattacctccgaatacataataacaaacacaaacaattaacgctccctaacaccttactataattcgaattcgacgaataaaaacaaaaaaaccgcccgtccgtataaataccgaactcaaaactacgctctaaaaacctaactcgcgtcccctccgcgaacgcccgataccccgcaacccgaactcgccgacgcccgcatccccgccccgattcccgccccgacccctaaacttccgcaaaacgcaactcgccgtaaaacaacgccgaaaataaaacgcgaaatccccgcgaatcccgatcctcgaacgaccgaaccgtaaaaacgccgaaccgacaacgaacgaaacgcactcaccttcgtcctcgaactccaacttctccaacataccgacttccgcgaatcccaaaaccgccgccaacgccgcctaaaaaaaaaaaaaaaaacaacgatcaacataaactacgacgctcgtccccgaccgacgaactcgcgaccgaccgaacgctaaaacctaactctaccgcgccgccgaaaaaaaaaacctaacaaaaaacgcgaacaacgaaaaccgaaaacgaaacgaaaacgctacccccacccgcccgaaaccgccgccgccgccgcaaataccgcgcgacccgcgtacccctccgcgaataaaacgcgccgctcccccccgcgccttaatacgacccgcccgaaaaaaaacgtaaaaaaaaacccgaaaactcgaaaacgacaacgcctaaacccgaaacgcccccctccgaccgtaacccgcgtcctccccgccgtaccgccattaaaaaaaacccgcgacccgcccccactccgccccccgacgccgctcaccttcccaacaccgacgaccgcgctcgacaaactccacctacgcaaatataaactccgcgacgcga

SEQ ID NO: 4107 - DNA, 947 bp, Artificial Sequence
  chemically treated genomic DNA (Homo sapiens) CpG-island No: 4107
agggtttggattgtgggtatgattcggggttgttttcgagtgtatggtgataagtataaataattagcgttttttgatattttgttgtaattcgagttcggcgagtaaggataaaagggtcgttcgttcgtgtggatgtcgggtttagggttgcgttttgggagtttggttcgcgtttttttcgcggacgttcggtatttcgtagttcgagttcgtcggcgttcgtattttcgtttcggttttcgtttcggtttttgggttttcgtaggacgtagttcgtcgtggggtagcgtcggagatggggcgcggggttttcgcgggtttcggttttcgggcggtcgggtcgtgggagcgtcgggtcggtagcgggcggggcgtatttattttcgttttcgaattttagtttttttagtatgtcggttttcgcgggttttagggtcgtcgttagcgtcgtttgagggggaggaggaggatagcgattagtatgagttgcgacgttcgttttcggtcggcgggttcgcggtcggtcgagcgttggggtttggttttgtcgcgtcgtcgggaggaggggtttggtaggggacgcgggtagcgggggtcgggggcggagcgggagcgttgtttttattcgttcgaggtcgtcgtcgtcgtcgtaggtgtcgcgcggttcgcgtgttttttcgcgagtgggacgcgtcgttttttttcgcgttttggtacggttcgttcgggaggaagcgtgggaagggattcgggagttcgagggcggtagcgtttgggttcggggcgttttttttcggtcgtggttcgcgtttttttcgtcgtgtcgttattgggagaggttcgcggttcgtttttatttcgtttttcggcgtcgtttatttttttagtatcggcggtcgcgttcggtaggttttatttgcgtaggtgtgggtttcgcggcgcgg

SEQ ID NO: 4108 - DNA, 947 bp, Artificial Sequence
  chemically treated genomic DNA (Homo sapiens) CpG-island No: 4108
ccgcgccgcgaaacccacacctacgcaaataaaacctaccgaacgcgaccgccgatactaaaaaaataaacgacgccgaaaaacgaaataaaaacgaaccgcgaacctctcccaataacgacacgacgaaaaaaacgcgaaccacgaccgaaaaaaaacgccccgaacccaaacgctaccgccctcgaactcccgaatcccttcccacgcttcctcccgaacgaaccgtaccaaaacgcgaaaaaaaacgacgcgtcccactcgcgaaaaaacacgcgaaccgcgcgacacctacgacgacgacgacgacctcgaacgaataaaaacaacgctcccgctccgcccccgacccccgctacccgcgtcccctaccaaacccctcctcccgacgacgcgacaaaaccaaaccccaacgctcgaccgaccgcgaacccgccgaccgaaaacgaacgtcgcaactcatactaatcgctatcctcctcctccccctcaaacgacgctaacgacgaccctaaaacccgcgaaaaccgacatactaaaaaaactaaaattcgaaaacgaaaataaatacgccccgcccgctaccgacccgacgctcccacgacccgaccgcccgaaaaccgaaacccgcgaaaaccccgcgccccatctccgacgctaccccacgacgaactacgtcctacgaaaacccaaaaaccgaaacgaaaaccgaaacgaaaatacgaacgccgacgaactcgaactacgaaataccgaacgtccgcgaaaaaaacgcgaaccaaactcccaaaacgcaaccctaaacccgacatccacacgaacgaacgacccttttatccttactcgccgaactcgaattacaacaaaatatcaaaaaacgctaattatttatacttatcaccatacactcgaaaacaaccccgaatcatacccacaatccaaaccct

SEQ ID NO: 4109 - DNA, 601 bp, Artificial Sequence
  chemically treated genomic DNA (Homo sapiens) CpG-island No: 4109
tttgggcggtaggttttcggggttttcgggtgttagatgaagtgaggcggaggcgtcgcgggagagtcgggttcggaggcggtcgggtggatattttaggtagaagacggcgttgggaagagttgcgtgacgttcgggggttggcggttgggtcggtagcgcgtcgtggcggcgtgatttgtttatggtgttgaaggcgcggtgggtcgagtttttagcgtcgcgcgtagtgagcgttgtttggtgtatttttcgtcgcgtagttcgtttttcgcgttcgttagtagtcgtttagttttcgtagattttaggtcgggtttcgttcggtaacgtcgttcgggtgaatacgttgtcggttcgaggggtcgtttgaatggcgatgttagaggtagggtatcggggagttcgcggggaaaggtcggtcgagagcgtgcgttcgcggggagtgcgtttttgagcgtagtacgcgggttagaaggagtaatcgatttgttggtgattagagaacggagattttaagaggattcgatttaaagaggaagaatatttttgggtgcgcgttttaggtttttgtttgtagacggggagggggagaggtttt

SEQ ID NO: 4110 - DNA, 601 bp, Artificial Sequence
  chemically treated genomic DNA (Homo sapiens) CpG-island No: 4110
aaaacctctccccctccccgtctacaaacaaaaacctaaaacgcgcacccaaaaatattcttcctctttaaatcgaatcctcttaaaatctccgttctctaatcaccaacaaatcgattactccttctaacccgcgtactacgctcaaaaacgcactccccgcgaacgcacgctctcgaccgacctttccccgcgaactccccgataccctacctctaacatcgccattcaaacgacccctcgaaccgacaacgtattcacccgaacgacgttaccgaacgaaacccgacctaaaatctacgaaaactaaacgactactaacgaacgcgaaaaacgaactacgcgacgaaaaatacaccaaacaacgctcactacgcgcgacgctaaaaactcgacccaccgcgccttcaacaccataaacaaatcacgccgccacgacgcgctaccgacccaaccgccaacccccgaacgtcacgcaactcttcccaacgccgtcttctacctaaaatatccacccgaccgcctccgaacccgactctcccgcgacgcctccgcctcacttcatctaacacccgaaaaccccgaaaacctaccgcccaaa

SEQ ID NO: 4111 - DNA, 601 bp, Artificial Sequence
  chemically treated genomic DNA (Homo sapiens) CpG-island No: 4111
agagttttttttttttttcgtttgtaagtaaagatttggggcgcgtatttagaaatgttttttttttttgggtcgggtttttttaaaattttcgttttttggttattagtaggtcggttgttttttttgattcgcgtgttgcgtttagaggcgtatttttcgcggacgtacgttttcggtcgattttttttcgcgagtttttcggtgttttgtttttggtatcgttatttaggcggtttttcgggtcgatagcgtgtttattcgggcggcgttatcggacgagattcggtttgggatttgcggagattgggcggttgttggcggacgcgaggggcgggttgcgcggcggagggtgtattaggtagcgtttattgcgcgcggcgttaggggttcggtttatcgcgtttttaatattatggataggttacgtcgttacggcgcgttgtcggtttagtcgttagttttcgagcgttacgtagttttttttagcgtcgttttttgtttggagtgtttattcgatcgttttcggattcggttttttcgcgacgttttcgttttattttatttggtattcgggagtttcgggagtttgtcgtttagg

SEQ ID NO: 4112 - DNA, 601 bp, Artificial Sequence
  chemically treated genomic DNA (Homo sapiens) CpG-island No: 4112
cctaaacgacaaactcccgaaactcccgaataccaaataaaataaaacgaaaacgtcgcgaaaaaaccgaatccgaaaacgatcgaataaacactccaaacaaaaaacgacgctaaaaaaaactacgtaacgctcgaaaactaacgactaaaccgacaacgcgccgtaacgacgtaacctatccataatattaaaaacgcgataaaccgaacccctaacgccgcgcgcaataaacgctacctaatacaccctccgccgcgcaacccgcccctcgcgtccgccaacaaccgcccaatctccgcaaatcccaaaccgaatctcgtccgataacgccgcccgaataaacacgctatcgacccgaaaaaccgcctaaataacgataccaaaaacaaaacaccgaaaaactcgcgaaaaaaaatcgaccgaaaacgtacgtccgcgaaaaatacgcctctaaacgcaacacgcgaatcaaaaaaaacaaccgacctactaataaccaaaaaacgaaaattttaaaaaaacccgacccaaaaaaaaaaaacatttctaaatacgcgccccaaatctttacttacaaacgaaaaaaaaaaaaaactct

SEQ ID NO: 4113 - DNA, 895 bp, Artificial Sequence
  chemically treated genomic DNA (Homo sapiens) CpG-island No: 4113
tagttttcggttcgagggtagcggcgttcgaagtcgggttgggagtcgaggcggttgtttcggggtagtcgttttttgcggggcggggagggggcgggaggcggtcgcgttgggttcgtcgtcgtcggaggttgtatttgttttagaggatgtttaggagttcgcgggagttttttcggattagaattttttaggtcgttcgtttttattttcgtagttttcgggtcgtgtttcggtaggcgggggtcgagggggcgtcgcggcgcgagttttttttttgtttttttttttagttcggtcgttcgtcgttttgtttcgggtgcggcgagggaaggcgaggttgcggcggattatgtttatggtgtagtcgttaagcggaggtatggttgtcggaaggttattgttttatattggtttttcgttagcgttttgcgttttcggtatgttggtcgtggttatttgttcggattattggtacgagacggacgttaggaagtatagggataggtgtaaggtttttaatattcgtcgggtcgatttcggttttatttataataataataataatttgtcgtttcgggcgagtcgttcgcgtttggatcgttgggagggtaaattttttcgggttcggaatcgtcggtagttgttcgttatgagtttcgcggacgagtgtagtcggtagtataattttattaatatgggtttttggaggaagtgttatcggtagggtttcgatttcgagatcgtcgtttttattcggaaaggtaagcgtcgggcgtaaggcgtggcgttgcggagagttcggcgtttttaggtttcgtagtttttcgcgttttttttttaggttataggttattaggtttttgggttttaggcggttcggttatttaggttt

SEQ ID NO: 4114 - DNA, 895 bp, Artificial Sequence
  chemically treated genomic DNA (Homo sapiens) CpG-island No: 4114
aaacctaaataaccgaaccgcctaaaacccaaaaacctaataacctataacctaaaaaaaaaacgcgaaaaactacgaaacctaaaaacgccgaactctccgcaacgccacgccttacgcccgacgcttacctttccgaataaaaacgacgatctcgaaatcgaaaccctaccgataacacttcctccaaaaacccatattaataaaattatactaccgactacactcgtccgcgaaactcataacgaacaactaccgacgattccgaacccgaaaaaatttaccctcccaacgatccaaacgcgaacgactcgcccgaaacgacaaattattattattattataaataaaaccgaaatcgacccgacgaatattaaaaaccttacacctatccctatacttcctaacgtccgtctcgtaccaataatccgaacaaataaccacgaccaacataccgaaaacgcaaaacgctaacgaaaaaccaatataaaacaataaccttccgacaaccatacctccgcttaacgactacaccataaacataatccgccgcaacctcgccttccctcgccgcacccgaaacaaaacgacgaacgaccgaactaaaaaaaaaaacaaaaaaaaaactcgcgccgcgacgccccctcgacccccgcctaccgaaacacgacccgaaaactacgaaaataaaaacgaacgacctaaaaaattctaatccgaaaaaactcccgcgaactcctaaacatcctctaaaacaaatacaacctccgacgacgacgaacccaacgcgaccgcctcccgccccctccccgccccgcaaaaaacgactaccccgaaacaaccgcctcgactcccaacccgacttcgaacgccgctaccctcgaaccgaaaacta

SEQ ID NO: 4115 - DNA, 895 bp, Artificial Sequence
  chemically treated genomic DNA (Homo sapiens) CpG-island No: 4115
aggtttggataatcggatcgtttggaatttagagatttgatagtttgtggtttgggaaggagacgcgaggggttgcggggtttaaaggcgtcgggtttttcgtagcgttacgttttgcgttcggcgtttattttttcgaatgagggcggcgatttcggggtcgaagttttgtcggtggtattttttttagaggtttatgttggtggagttgtattgtcggttgtattcgttcgcggggtttatggcgaatagttgtcggcgatttcgggttcggaggagtttgtttttttagcggtttaggcgcgagcggttcgttcggagcggtaagttgttgttattgttgtaaatgaagtcggggtcgattcggcgggtgttgaaggttttgtatttgtttttgtgttttttggcgttcgtttcgtattagtggttcgagtagatggttacggttagtatgtcgagggcgtagagcgttagcgagaggttagtgtagagtagtaatttttcggtagttatgttttcgtttggcggttatattatgggtatgattcgtcgtagtttcgttttttttcgtcgtattcggaataaagcggcgggcggtcgagttgggggagggggtaggagagggattcgcgtcgcggcgttttttcggttttcgtttatcggagtacggttcggggattgcggggatgggggcgggcggtttaaaaagttttgattcggagaggttttcgcgggtttttgggtattttttgaggtaggtgtagttttcggcggcggcgaatttagcgcggtcgtttttcgtttttttttcgtttcgtaggaagcgattgtttcgaagtagtcgtttcggtttttagttcggtttcgggcgtcgttgttttcgggtcggaaatta

SEQ ID NO: 4116 - DNA, 895 bp, Artificial Sequence
  chemically treated genomic DNA (Homo sapiens) CpG-island No: 4116
taatttccgacccgaaaacaacgacgcccgaaaccgaactaaaaaccgaaacgactacttcgaaacaatcgcttcctacgaaacgaaaaaaaaacgaaaaacgaccgcgctaaattcgccgccgccgaaaactacacctacctcaaaaaatacccaaaaacccgcgaaaacctctccgaatcaaaactttttaaaccgcccgcccccatccccgcaatccccgaaccgtactccgataaacgaaaaccgaaaaaacgccgcgacgcgaatccctctcctaccccctcccccaactcgaccgcccgccgctttattccgaatacgacgaaaaaaaacgaaactacgacgaatcatacccataatataaccgccaaacgaaaacataactaccgaaaaattactactctacactaacctctcgctaacgctctacgccctcgacatactaaccgtaaccatctactcgaaccactaatacgaaacgaacgccaaaaaacacaaaaacaaatacaaaaccttcaacacccgccgaatcgaccccgacttcatttacaacaataacaacaacttaccgctccgaacgaaccgctcgcgcctaaaccgctaaaaaaacaaactcctccgaacccgaaatcgccgacaactattcgccataaaccccgcgaacgaatacaaccgacaatacaactccaccaacataaacctctaaaaaaaataccaccgacaaaacttcgaccccgaaatcgccgccctcattcgaaaaaataaacgccgaacgcaaaacgtaacgctacgaaaaacccgacgcctttaaaccccgcaacccctcgcgtctccttcccaaaccacaaactatcaaatctctaaattccaaacgatccgattatccaaacct

SEQ ID NO: 4117 - DNA, 756 bp, Artificial Sequence
  chemically treated genomic DNA (Homo sapiens) CpG-island No: 4117
tttcgcgtcgcgtgagtgtcggagcgttcggtggtcgtcgcgtcgcgcgtttggagggatgttaacgtggagtcggcgtcgagttcgttcggcgtgcgtgcgtgtgtgggagcgcgcgagttttttgacgcggggattagttatgaatcgggggtgtgtgtttgtttttagagatttggtaaggtgcggagttttttagaagtgcggttaagcggtagcggagacggcgagttaggaattttttttcgcgtttttagttttttagcgtggcggcggaattttcggagaaagtttgtaaatttttagcgggcgcggcgaggacgtcgggttatttagggggcgggtgggcgcgcgcgtagggggttcgtttttttcggtgcggagttgtagttgttatttttttcgtcgggttgtcggttgtagcgggtgggcgcgcgttcggggaggggaggtcgttttcggagggcgtttggttttcgttttaggcgtttcgggttggagagcggcgaggtttcgttcgttttagtttattttttcggtcgttttttgttttcgttgtttttttgttggtatcgttattttttttcggtcgttgttttaaatgatagtttcggttcgagttttggcggcgtttaggtaatttttaagatttggcggcggagtttttttttgcggtagattttcggtagaattatttgaattttttacgaagtttttagaggggtaagatgcgaaggaaggaattaaggagatgtt

SEQ ID NO: 4118 - DNA, 756 bp, Artificial Sequence
  chemically treated genomic DNA (Homo sapiens) CpG-island No: 4118
aacatctccttaattccttccttcgcatcttacccctctaaaaacttcgtaaaaaattcaaataattctaccgaaaatctaccgcaaaaaaaaactccgccgccaaatcttaaaaattacctaaacgccgccaaaactcgaaccgaaactatcatttaaaacaacgaccgaaaaaaaataacgataccaacaaaaaaacaacgaaaacaaaaaacgaccgaaaaaataaactaaaacgaacgaaacctcgccgctctccaacccgaaacgcctaaaacgaaaaccaaacgccctccgaaaacgacctcccctccccgaacgcgcgcccacccgctacaaccgacaacccgacgaaaaaaataacaactacaactccgcaccgaaaaaaacgaaccccctacgcgcgcgcccacccgccccctaaataacccgacgtcctcgccgcgcccgctaaaaatttacaaactttctccgaaaattccgccgccacgctaaaaaactaaaaacgcgaaaaaaaattcctaactcgccgtctccgctaccgcttaaccgcacttctaaaaaactccgcaccttaccaaatctctaaaaacaaacacacacccccgattcataactaatccccgcgtcaaaaaactcgcgcgctcccacacacgcacgcacgccgaacgaactcgacgccgactccacgttaacatccctccaaacgcgcgacgcgacgaccaccgaacgctccgacactcacgcgacgcgaaa

SEQ ID NO: 4119 - DNA, 756 bp, Artificial Sequence
  chemically treated genomic DNA (Homo sapiens) CpG-island No: 4119
aatatttttttggttttttttttcgtattttgtttttttaagaatttcgtgaaaagtttaagtgattttgtcgagaatttgtcgtagggggagatttcgtcgttaggttttgggaattgtttgggcgtcgttaaagttcgagtcggagttgttatttggggtagcggtcgggaagaggtaacgatgttagtaagaaagtagcggaggtaggaggcggtcggaggagtggattggagcggacggagtttcgtcgttttttagttcggagcgtttggagcgaaagttaagcgtttttcgagggcgatttttttttttcgggcgcgcgtttattcgttgtagtcggtagttcggcgggagaggtggtagttgtagtttcgtatcggggagagcgagttttttgcgcgcgcgtttattcgttttttaggtgattcggcgttttcgtcgcgttcgttggaagtttgtaaatttttttcgggggtttcgtcgttacgttgggaagttggggacgcggggggaggtttttggttcgtcgttttcgttgtcgtttgatcgtatttttggagggtttcgtattttgttaggtttttggaggtaaatatatattttcgatttataattggttttcgcgttaggggattcgcgcgtttttatatacgtacgtacgtcgggcggattcggcgtcggttttacgttagtatttttttaggcgcgcggcgcggcggttatcgagcgtttcggtatttacgcggcgcgggg

SEQ ID NO: 4120 - DNA, 756 bp, Artificial Sequence
  chemically treated genomic DNA (Homo sapiens) CpG-island No: 4120
ccccgcgccgcgtaaataccgaaacgctcgataaccgccgcgccgcgcgcctaaaaaaatactaacgtaaaaccgacgccgaatccgcccgacgtacgtacgtatataaaaacgcgcgaatcccctaacgcgaaaaccaattataaatcgaaaatatatatttacctccaaaaacctaacaaaatacgaaaccctccaaaaatacgatcaaacgacaacgaaaacgacgaaccaaaaacctccccccgcgtccccaacttcccaacgtaacgacgaaacccccgaaaaaaatttacaaacttccaacgaacgcgacgaaaacgccgaatcacctaaaaaacgaataaacgcgcgcgcaaaaaactcgctctccccgatacgaaactacaactaccacctctcccgccgaactaccgactacaacgaataaacgcgcgcccgaaaaaaaaaaatcgccctcgaaaaacgcttaactttcgctccaaacgctccgaactaaaaaacgacgaaactccgtccgctccaatccactcctccgaccgcctcctacctccgctactttcttactaacatcgttacctcttcccgaccgctaccccaaataacaactccgactcgaactttaacgacgcccaaacaattcccaaaacctaacgacgaaatctccccctacgacaaattctcgacaaaatcacttaaacttttcacgaaattcttaaaaaaacaaaatacgaaaaaaaaaaccaaaaaaatatt

SEQ ID NO: 4121 - DNA, 1079 bp, Artificial Sequence
  chemically treated genomic DNA (Homo sapiens) CpG-island No: 4121
cgtcgcgtgtttagttgtttagtcgggagtttcggtatttttagggcgtttattttatttttcgggttttggttgtagttttgaggggagcgagttagaaattgatagaacgcgatttttttttttcgcgtttatcggagttcgggttgagagggatttggggagttgcggtttggtcggggcggcgtatttaggtggtttcgtttttttgcgggttatcgttcgttattcgtatagttaggtcggtttgttgggatcgggagaggtgggcgtacgagttttagtgcgggagttcggggtgcgggcggagttttattgttttcgtgtattcgggcggtagtattttcgggtttttttttaaatcgagcgttcggcgatttttttttgtgtttagggagtcgaaagcggtatttttttcgagagaagtcgtttattggggggtggcgttggggaggtaataatgggcgtttattgtttttcgagggtttaacggtgattttttttcgcgcgcgcgttcggttatcggttggtttcgggttagggtataggtatcgcggttgggagggtcggtttcgttgttcgcgtttttcgtttcgttttagtgagttttcgcgtcgtcggtttcgtttcgcgtcgtttcgtttttcgtaggtttagttttcgcgttcggtcgtttcgcgtttagtcgcgcgtattttttttcgcggtcgggggatcgtagcgcggggttagttcggagattcggttatcggtttggggcgtttttacgtcgtttcggagcggataatgcggtgagtaggtattacgtcggtagattcggttggatttgcgtatagcggtagggattgcgtgcgttcgcgggaggttcggggtagcggttgggatttttagcggcggtcggtgagtcggggtagtttagggtttttttttttttatttgtttgtgagtttgtttcgttcgcggtcgtggtcgttttcggcgtgcgttggtgttaggttgggaaattagtagggagtcgggatatttagggtatcgtttttttatttagtgtttaacggaacgaaggggatataaagtaa

SEQ ID NO: 4122 - DNA, 1079 bp, Artificial Sequence
  chemically treated genomic DNA (Homo sapiens) CpG-island No: 4122
ttactttatatccccttcgttccgttaaacactaaataaaaaaacgataccctaaatatcccgactccctactaatttcccaacctaacaccaacgcacgccgaaaacgaccacgaccgcgaacgaaacaaactcacaaacaaataaaaaaaaaaaaaccctaaactaccccgactcaccgaccgccgctaaaaatcccaaccgctaccccgaacctcccgcgaacgcacgcaatccctaccgctatacgcaaatccaaccgaatctaccgacgtaatacctactcaccgcattatccgctccgaaacgacgtaaaaacgccccaaaccgataaccgaatctccgaactaaccccgcgctacgatcccccgaccgcgaaaaaaaatacgcgcgactaaacgcgaaacgaccgaacgcgaaaactaaacctacgaaaaacgaaacgacgcgaaacgaaaccgacgacgcgaaaactcactaaaacgaaacgaaaaacgcgaacaacgaaaccgaccctcccaaccgcgatacctataccctaacccgaaaccaaccgataaccgaacgcgcgcgcgaaaaaaaatcaccgttaaaccctcgaaaaacaataaacgcccattattacctccccaacgccaccccccaataaacgacttctctcgaaaaaaataccgctttcgactccctaaacacaaaaaaaaatcgccgaacgctcgatttaaaaaaaaacccgaaaatactaccgcccgaatacacgaaaacaataaaactccgcccgcaccccgaactcccgcactaaaactcgtacgcccacctctcccgatcccaacaaaccgacctaactatacgaataacgaacgataacccgcaaaaaaacgaaaccacctaaatacgccgccccgaccaaaccgcaactccccaaatccctctcaacccgaactccgataaacgcgaaaaaaaaaaatcgcgttctatcaatttctaactcgctcccctcaaaactacaaccaaaacccgaaaaataaaataaacgccctaaaaataccgaaactcccgactaaacaactaaacacgcgacg

SEQ ID NO: 4123 - DNA, 1079 bp, Artificial Sequence
  chemically treated genomic DNA (Homo sapiens) CpG-island No: 4123
ttgttttatgtttttttcgtttcgttggatattagatgggaaagcgatgttttgggtatttcgattttttgttggttttttagtttaatattagcgtacgtcggaagcggttacggtcgcgggcgggatagatttatagataggtagagaggaaggagttttgggttgtttcgatttatcggtcgtcgttgaggattttagtcgttgtttcgggtttttcgcgggcgtacgtaatttttgtcgttgtgcgtagatttagtcgagtttgtcggcgtggtgtttgtttatcgtattattcgtttcgagacggcgtgaaggcgttttaggtcggtggtcgggttttcgggttagtttcgcgttgcggtttttcggtcgcgagagaaggtgcgcgcgattgagcgcggggcggtcggacgcgaggattgaatttgcggagggcggggcggcgcggggcggggtcggcggcgcggggatttattggggcggggcggagggcgcgggtagcggggtcgatttttttagtcgcggtatttgtgttttggttcggggttaatcggtggtcgggcgcgcgcgcgggggggggttatcgttggattttcggaggataatgggcgtttattgttatttttttagcgttattttttagtaggcgatttttttcggagaagatgtcgttttcgattttttaagtataaagaaaggtcgtcggacgttcggtttaaagagggattcggaggtgttgtcgttcgggtgtacggggataataggatttcgttcgtatttcggattttcgtattaaaattcgtgcgtttatttttttcgattttaataggtcgatttagttgtgcgagtggcgggcggtgattcgtagggaagcgaggttatttgagtgcgtcgtttcggttaggtcgtagttttttaggttttttttagttcgggtttcggtgggcgcggagggggagggtcgcgttttgttagtttttagttcgttttttttagagttgtagttaaaattcggagagtggaataagcgttttgaagatgtcggagttttcggttgagtaattggatacgcgacg

SEQ ID NO: 4124 - DNA, 1079 bp, Artificial Sequence
  chemically treated genomic DNA (Homo sapiens) CpG-island No: 4124
cgtcgcgtatccaattactcaaccgaaaactccgacatcttcaaaacgcttattccactctccgaattttaactacaactctaaaaaaaacgaactaaaaactaacaaaacgcgaccctccccctccgcgcccaccgaaacccgaactaaaaaaaacctaaaaaactacgacctaaccgaaacgacgcactcaaataacctcgcttccctacgaatcaccgcccgccactcgcacaactaaatcgacctattaaaatcgaaaaaaataaacgcacgaattttaatacgaaaatccgaaatacgaacgaaatcctattatccccgtacacccgaacgacaacacctccgaatccctctttaaaccgaacgtccgacgacctttctttatacttaaaaaatcgaaaacgacatcttctccgaaaaaaatcgcctactaaaaaataacgctaaaaaaataacaataaacgcccattatcctccgaaaatccaacgataacccccccccgcgcgcgcgcccgaccaccgattaaccccgaaccaaaacacaaataccgcgactaaaaaaatcgaccccgctacccgcgccctccgccccgccccaataaatccccgcgccgccgaccccgccccgcgccgccccgccctccgcaaattcaatcctcgcgtccgaccgccccgcgctcaatcgcgcgcaccttctctcgcgaccgaaaaaccgcaacgcgaaactaacccgaaaacccgaccaccgacctaaaacgccttcacgccgtctcgaaacgaataatacgataaacaaacaccacgccgacaaactcgactaaatctacgcacaacgacaaaaattacgtacgcccgcgaaaaacccgaaacaacgactaaaatcctcaacgacgaccgataaatcgaaacaacccaaaactccttcctctctacctatctataaatctatcccgcccgcgaccgtaaccgcttccgacgtacgctaatattaaactaaaaaaccaacaaaaaatcgaaatacccaaaacatcgctttcccatctaatatccaacgaaacgaaaaaaacataaaacaa

SEQ ID NO: 4125 - DNA, 1127 bp, Artificial Sequence
  chemically treated genomic DNA (Homo sapiens) CpG-island No: 4125
ttttcgggcggcgtttgacgtagcgtttgtggtgggttgttttacgcgggcgtttgacgtagcgtttgtggtgggttgttttacgcgggcgtttgacgtagcgtttgtggtgggttttttcgggcggcgtttggcgtagcgtttgtggtgggttttttcgggcggcgtttgacgtagcgtttgtggtgggttttttcgggcggcgtttggcgtagcgtttgtggtgggttttttcgggcggcgtttgacgtagcgtttgtggtgggttttttcggtcggcgtttggcgtagcgtttgtggtgggttttttcgggcggcgtttggcgtagcgtttgtggtgggttgtttcgggcggcgtttggcgtagcgtttgtggtgggttgtttcgggcggcgtttgacgtagcgtttgtggtgggttgttttacgcgggcgtttgacgtagcgtttgtggtgggttgttttacgcgggcgtttgacgtagcgtttgtggtgggttgttttacgcgggcgtttgacgtagcgtttgtggtgggttgttcggggcgggcgtttgatgtagcgtttgtggtgggttttttcgggcggcgtttggcgtagcgtttggggtgggttgttttacgcgggcgtttgacgtagcgtttgtggtgggtttttttgggcggcgtttggtatagcgtttggggtgggttttttcgggcggcgtttggcgtagcgtttggggtgggttgttttacgcgggcgtttgacgtagtatttgtggtgggttattttacgcgggcgtttggtttatagtttgtggtgggttgttcggggcggcgtttggcgtagcgtttgtggtgggttttttcgggcggcgtttggtatagcgtttgtggtgggttttttcggtcggcgtttgacgtagcgtttgtggtgggttttttcgggcggcgtttggcgtagcgtttgtggtgggttttttcggtcggcgtttgacgtagcgtttgtggtgggttttttcgggcggcgtttggcgtagcgtttgtggtgggtttttttggtcggcgtttgacgtagcgtttgtcgtgggttgttcggggcgggtgtttgatgtagcgtttgtggtggatttttcgggtggtgatt

SEQ ID NO: 4126 - DNA, 1127 bp, Artificial Sequence
  chemically treated genomic DNA (Homo sapiens) CpG-island No: 4126
aatcaccacccgaaaaatccaccacaaacgctacatcaaacacccgccccgaacaacccacgacaaacgctacgtcaaacgccgaccaaaaaaacccaccacaaacgctacgccaaacgccgcccgaaaaaacccaccacaaacgctacgtcaaacgccgaccgaaaaaacccaccacaaacgctacgccaaacgccgcccgaaaaaacccaccacaaacgctacgtcaaacgccgaccgaaaaaacccaccacaaacgctataccaaacgccgcccgaaaaaacccaccacaaacgctacgccaaacgccgccccgaacaacccaccacaaactataaaccaaacgcccgcgtaaaataacccaccacaaatactacgtcaaacgcccgcgtaaaacaacccaccccaaacgctacgccaaacgccgcccgaaaaaacccaccccaaacgctataccaaacgccgcccaaaaaaacccaccacaaacgctacgtcaaacgcccgcgtaaaacaacccaccccaaacgctacgccaaacgccgcccgaaaaaacccaccacaaacgctacatcaaacgcccgccccgaacaacccaccacaaacgctacgtcaaacgcccgcgtaaaacaacccaccacaaacgctacgtcaaacgcccgcgtaaaacaacccaccacaaacgctacgtcaaacgcccgcgtaaaacaacccaccacaaacgctacgtcaaacgccgcccgaaacaacccaccacaaacgctacgccaaacgccgcccgaaacaacccaccacaaacgctacgccaaacgccgcccgaaaaaacccaccacaaacgctacgccaaacgccgaccgaaaaaacccaccacaaacgctacgtcaaacgccgcccgaaaaaacccaccacaaacgctacgccaaacgccgcccgaaaaaacccaccacaaacgctacgtcaaacgccgcccgaaaaaacccaccacaaacgctacgccaaacgccgcccgaaaaaacccaccacaaacgctacgtcaaacgcccgcgtaaaacaacccaccacaaacgctacgtcaaacgcccgcgtaaaacaacccaccacaaacgctacgtcaaacgccgcccgaaaa

SEQ ID NO: 4127 - DNA, 1127 bp, Artificial Sequence
  chemically treated genomic DNA (Homo sapiens) CpG-island No: 4127
agttattattcggaaagtttattatagacgttatattaggtattcgtttcgaatagtttacgatagacgttacgttaggcgtcgattagaagagtttattatagacgttacgttaggcgtcgttcgaaagagtttattatagacgttacgttaggcgtcgatcggaagagtttattatagacgttacgttaggcgtcgttcggaagagtttattatagacgttacgttaggcgtcgatcggaagagtttattatagacgttatgttaggcgtcgttcggaagagtttattatagacgttacgttaggcgtcgtttcgaatagtttattatagattgtaagttaggcgttcgcgtggaatagtttattatagatgttacgttagacgttcgcgtggaatagtttattttagacgttacgttaggcgtcgttcggaagagtttattttagacgttatgttaggcgtcgtttagaagagtttattatagacgttacgttaggcgttcgcgtggaatagtttattttagacgttacgttaggcgtcgttcggaagagtttattatagacgttatattaggcgttcgtttcgaatagtttattatagacgttacgttaggcgttcgcgtggaatagtttattatagacgttacgttaggcgttcgcgtggaatagtttattatagacgttacgttaggcgttcgcgtggaatagtttattatagacgttacgttaggcgtcgttcggaatagtttattatagacgttacgttaggcgtcgttcggaatagtttattatagacgttacgttaggcgtcgttcggaagagtttattatagacgttacgttaggcgtcgatcggaagagtttattatagacgttacgttaggcgtcgttcggaagagtttattatagacgttacgttaggcgtcgttcggaagagtttattatagacgttacgttaggcgtcgttcggaagagtttattatagacgttacgttaggcgtcgttcggaagagtttattatagacgttacgttaggcgttcgcgtggaatagtttattatagacgttacgttaagcgttcgcgtggaatagtttattataggcgttacgttaggcgtcgttcggaag

SEQ ID NO: 4128 - DNA, 1127 bp, Artificial Sequence
  chemically treated genomic DNA (Homo sapiens) CpG-island No: 4128
cttccgaacgacgcctaacgtaacgcctataataaactattccacgcgaacgcttaacgtaacgtctataataaactattccacgcgaacgcctaacgtaacgtctataataaactcttccgaacgacgcctaacgtaacgtctataataaactcttccgaacgacgcctaacgtaacgtctataataaactcttccgaacgacgcctaacgtaacgtctataataaactcttccgaacgacgcctaacgtaacgtctataataaactcttccgatcgacgcctaacgtaacgtctataataaactcttccgaacgacgcctaacgtaacgtctataataaactattccgaacgacgcctaacgtaacgtctataataaactattccgaacgacgcctaacgtaacgtctataataaactattccacgcgaacgcctaacgtaacgtctataataaactattccacgcgaacgcctaacgtaacgtctataataaactattccacgcgaacgcctaacgtaacgtctataataaactattcgaaacgaacgcctaatataacgtctataataaactcttccgaacgacgcctaacgtaacgtctaaaataaactattccacgcgaacgcctaacgtaacgtctataataaactcttctaaacgacgcctaacataacgtctaaaataaactcttccgaacgacgcctaacgtaacgtctaaaataaactattccacgcgaacgtctaacgtaacatctataataaactattccacgcgaacgcctaacttacaatctataataaactattcgaaacgacgcctaacgtaacgtctataataaactcttccgaacgacgcctaacataacgtctataataaactcttccgatcgacgcctaacgtaacgtctataataaactcttccgaacgacgcctaacgtaacgtctataataaactcttccgatcgacgcctaacgtaacgtctataataaactctttcgaacgacgcctaacgtaacgtctataataaactcttctaatcgacgcctaacgtaacgtctatcgtaaactattcgaaacgaatacctaatataacgtctataataaactttccgaataataact

SEQ ID NO: 4129 - DNA, 808 bp, Artificial Sequence
  chemically treated genomic DNA (Homo sapiens) CpG-island No: 4129
aattattcggtgtagatgggagtttatcgtaggtggtcggtcggggtatttagggtttcgaggaggtagggtcgttttttttagaggtagtagcgggagttttagcgcggcggtggggtcggttcgagggcggttagtgacgtcggtagcgtttttttttagtcgttaggttttcggtaggggacgtcgttcgtttcgagagtacgttcgaggcggcggttaggtcggttttgggaaggtttcgtagcgggcgggtaggttgcgggagcggtcggcgttgatagttgcgtaggcggttattcgcgcggcgacggtacggggttgcgggtcgcggcgtaggttagggtcgttttaagaatttagttcgttttttatcgtcgttcgtatcgtttataggggaaggtttagagtttcgttattttgtcgtagtagagttttattagttgttttattcggtagcgtggggcggggaagacgtttatttttttaggaaagggcgttatcgttattgttttagttttcgttttagtagtcgacgttcgacgtttgtttatagattatttttattgcggggtagaggttgcgggtttttttgtttatgtgttcgtttcgtttcggcgcgcggtttgtttggtttgttttatcgtggacgttatttagtatgatgttttttttttattttcggttggtgcggcgtgtatttgttttacggtgatagagttgtggtatgcggtaacgcgtttcgggtacgagtgagttagtttcgagcggcgtttcgtaataacgtgatggagtcggacgtggattg

SEQ ID NO: 4130 - DNA, 808 bp, Artificial Sequence
  chemically treated genomic DNA (Homo sapiens) CpG-island No: 4130
caatccacgtccgactccatcacgttattacgaaacgccgctcgaaactaactcactcgtacccgaaacgcgttaccgcataccacaactctatcaccgtaaaacaaatacacgccgcaccaaccgaaaataaaaaaaaaacatcatactaaataacgtccacgataaaacaaaccaaacaaaccgcgcgccgaaacgaaacgaacacataaacaaaaaaacccgcaacctctaccccgcaataaaaataatctataaacaaacgtcgaacgtcgactactaaaacgaaaactaaaacaataacgataacgccctttcctaaaaaaataaacgtcttccccgccccacgctaccgaataaaacaactaataaaactctactacgacaaaataacgaaactctaaaccttcccctataaacgatacgaacgacgataaaaaacgaactaaattcttaaaacgaccctaacctacgccgcgacccgcaaccccgtaccgtcgccgcgcgaataaccgcctacgcaactatcaacgccgaccgctcccgcaacctacccgcccgctacgaaaccttcccaaaaccgacctaaccgccgcctcgaacgtactctcgaaacgaacgacgtcccctaccgaaaacctaacgactaaaaaaaaacgctaccgacgtcactaaccgccctcgaaccgaccccaccgccgcgctaaaactcccgctactacctctaaaaaaaacgaccctacctcctcgaaaccctaaataccccgaccgaccacctacgataaactcccatctacaccgaataatt

SEQ ID NO: 4131 - DNA, 808 bp, Artificial Sequence
  chemically treated genomic DNA (Homo sapiens) CpG-island No: 4131
taatttacgttcgattttattacgttattacggagcgtcgttcggaattgatttattcgtattcgaggcgcgttgtcgtatattataattttattatcgtgaagtaagtgtacgtcgtattaatcgaggatggaagaaagatattatattaaatggcgtttacgatagagtaaattagatagatcgcgcgtcgagacggggcgggtatatgagtaagagggttcgtagtttttgtttcgtagtgaaggtagtttatggatagacgtcggacgtcggttattgaggcggagattgagatagtggcgatggcgtttttttttgaagaagtgaacgtttttttcgttttacgttgtcggataaagtagttggtggggttttattgcgataaggtaacggagttttgagtttttttttgtgggcggtgcgggcggcgatggggagcgggttgggtttttggggcggttttggtttgcgtcgcggttcgtagtttcgtgtcgtcgtcgcgcgagtagtcgtttgcgtagttgttagcgtcggtcgttttcgtagtttgttcgttcgttgcgaggtttttttagagtcggtttggtcgtcgtttcggacgtgttttcggggcgggcggcgttttttgtcgagggtttggcggttgaggaggggcgttatcggcgttattggtcgttttcgggtcggttttatcgtcgcgttgggattttcgttgttgtttttaaggagagcggttttattttttcgaagttttgggtgtttcggtcggttatttgcggtggatttttatttgtatcgagtagtt

SEQ ID NO: 4132 - DNA, 808 bp, Artificial Sequence
  chemically treated genomic DNA (Homo sapiens) CpG-island No: 4132
aactactcgatacaaataaaaatccaccgcaaataaccgaccgaaacacccaaaacttcgaaaaaataaaaccgctctccttaaaaacaacaacgaaaatcccaacgcgacgataaaaccgacccgaaaacgaccaataacgccgataacgcccctcctcaaccgccaaaccctcgacaaaaaacgccgcccgccccgaaaacacgtccgaaacgacgaccaaaccgactctaaaaaaacctcgcaacgaacgaacaaactacgaaaacgaccgacgctaacaactacgcaaacgactactcgcgcgacgacgacacgaaactacgaaccgcgacgcaaaccaaaaccgccccaaaaacccaacccgctccccatcgccgcccgcaccgcccacaaaaaaaaactcaaaactccgttaccttatcgcaataaaaccccaccaactactttatccgacaacgtaaaacgaaaaaaacgttcacttcttcaaaaaaaaacgccatcgccactatctcaatctccgcctcaataaccgacgtccgacgtctatccataaactaccttcactacgaaacaaaaactacgaaccctcttactcatatacccgccccgtctcgacgcgcgatctatctaatttactctatcgtaaacgccatttaatataatatctttcttccatcctcgattaatacgacgtacacttacttcacgataataaaattataatatacgacaacgcgcctcgaatacgaataaatcaattccgaacgacgctccgtaataacgtaataaaatcgaacgtaaatta

SEQ ID NO: 4133 - DNA, 528 bp, Artificial Sequence
  chemically treated genomic DNA (Homo sapiens) CpG-island No: 4133
  unsure (422, 521)
gcgtatttttttttaaatcgttttttcgggtttcgagtaatttttttttcggatttgcggggtttagattttttttttagatttttcgttttagtttttttttcgtaatcgtagatttttttattcgtttttcggggttgtagatttcggatttttttttaagttttcgagtcggattttcggttttagttattattttcgtttcgggtgttcgcgtttttaatatatcgtataagtgtttataagtttcgagtttacgacgcgcgtttttttggtcggttcggtttttcgttcgggttcgaacgtgcgcgcggttgttatgttcgggttttcgtcgttaacgtcgttcggcgtagattagtagtagtacggggcgggggtaacgtttatcgttttcggttttcggcgtacgttcgattcgncgtgcgttgtcgcggtaatttgggttcgttttatttttgtgtttaggtcggtttcggggttaatttataaggtaatttaggtttttttttaagtggttntttggga

SEQ ID NO: 4134 - DNA, 528 bp, Artificial Sequence
  chemically treated genomic DNA (Homo sapiens) CpG-island No: 4134
  unsure (8, 107)
tcccaaanaaccacttaaaaaaaaacctaaattaccttataaattaaccccgaaaccgacctaaacacaaaaataaaacgaacccaaattaccgcgacaacgcacgncgaatcgaacgtacgccgaaaaccgaaaacgataaacgttacccccgccccgtactactactaatctacgccgaacgacgttaacgacgaaaacccgaacataacaaccgcgcgcacgttcgaacccgaacgaaaaaccgaaccgaccaaaaaaacgcgcgtcgtaaactcgaaacttataaacacttatacgatatattaaaaacgcgaacacccgaaacgaaaataataactaaaaccgaaaatccgactcgaaaacttaaaaaaaaatccgaaatctacaaccccgaaaaacgaataaaaaaatctacgattacgaaaaaaaaactaaaacgaaaaatctaaaaaaaaaatctaaaccccgcaaatccgaaaaaaaaattactcgaaacccgaaaaaacgatttaaaaaaaaatacgc

SEQ ID NO: 4135 - DNA, 528 bp, Artificial Sequence
  chemically treated genomic DNA (Homo sapiens) CpG-island No: 4135
  unsure (8, 107)
ttttaagngattatttggaaaggggtttaaattgttttataaattaatttcggggtcggtttaggtatagaaatgaggcgggtttaaattgtcgcgatagcgtacgncgagtcgaacgtacgtcgggggtcgaggacggtggacgttattttcgtttcgtgttgttgttagtttgcgtcgggcggcgttggcggcgaagattcgaatatggtaatcgcgcgtacgttcgggttcgagcgggaagtcgagtcggttaaggaagcgcgcgtcgtgggttcggagtttgtggatatttatacggtgtgttgggggcgcgggtattcgaagcgggggtggtggttggaatcgggagttcgattcgggggtttggggaggggttcgggatttgtagtttcgaggagcgggtagaagggtttgcgattgcgaggagggggttgggacgggggatttaggaaagggatttgggtttcgtaggttcgggagaagggttgttcggggttcggggaggcggtttggaaaagggtacgt

SEQ ID NO: 4136 - DNA, 528 bp, Artificial Sequence
  chemically treated genomic DNA (Homo sapiens) CpG-island No: 4136
  unsure (422, 521)
acgtacccttttccaaaccgcctccccgaaccccgaacaacccttctcccgaacctacgaaacccaaatccctttcctaaatcccccgtcccaaccccctcctcgcaatcgcaaacccttctacccgctcctcgaaactacaaatcccgaacccctccccaaacccccgaatcgaactcccgattccaaccaccacccccgcttcgaatacccgcgcccccaacacaccgtataaatatccacaaactccgaacccacgacgcgcgcttccttaaccgactcgacttcccgctcgaacccgaacgtacgcgcgattaccatattcgaatcttcgccgccaacgccgcccgacgcaaactaacaacaacacgaaacgaaaataacgtccaccgtcctcgacccccgacgtacgttcgactcgncgtacgctatcgcgacaatttaaacccgcctcatttctatacctaaaccgaccccgaaattaatttataaaacaatttaaacccctttccaaataatcncttaaaa

SEQ ID NO: 4137 - DNA, 624 bp, Artificial Sequence
  chemically treated genomic DNA (Homo sapiens) CpG-island No: 4137
aatcggcggggattaattttatatttcgtagttggcggaaagtagcgggaggaggtatttagttttggggttgagatttaagtttttgcgcgcgtaaattacgtttttgtggattttggttgttgcgtgttcgcgcgcgtttcggagtgcgtatgcgtagcggcgggggttgtttcggtagttttttattgaggggattcgttagttttaaatttagtggcgtttgttttgattttcggggtttggtttttagcgtagtaattttgtcggcgaagaaggtgagcgtagtgttgtgtggtagtagaggtttttaggacgaggagtagcgggacgaggaagggtagattggtgaaatcgtaaattgggcgtttgtttcggcgtcggatttttgtttgtaaaggtgggtggttcgttcggagcgggaaaatatttcggaggtggagggttgggttagcgtgattgataagcgggaatttttgtgtggggacggggtaggtttaggaaggttgtgtttgcggtggaacggcgcggtgcgtaggagtgggtattaatagtagtcgcgtgtttgggttttagatttggtttagttgtgttgagttttttatggattatgttacgtagata

SEQ ID NO: 4138 - DNA, 624 bp, Artificial Sequence
  chemically treated genomic DNA (Homo sapiens) CpG-island No: 4138
tatctacgtaacataatccataaaaaactcaacacaactaaaccaaatctaaaacccaaacacgcgactactattaatacccactcctacgcaccgcgccgttccaccgcaaacacaaccttcctaaacctaccccgtccccacacaaaaattcccgcttatcaatcacgctaacccaaccctccacctccgaaatattttcccgctccgaacgaaccacccacctttacaaacaaaaatccgacgccgaaacaaacgcccaatttacgatttcaccaatctacccttcctcgtcccgctactcctcgtcctaaaaacctctactaccacacaacactacgctcaccttcttcgccgacaaaattactacgctaaaaaccaaaccccgaaaatcaaaacaaacgccactaaatttaaaactaacgaatcccctcaataaaaaactaccgaaacaacccccgccgctacgcatacgcactccgaaacgcgcgcgaacacgcaacaaccaaaatccacaaaaacgtaatttacgcgcgcaaaaacttaaatctcaaccccaaaactaaatacctcctcccgctactttccgccaactacgaaatataaaattaatccccgccgatt

SEQ ID NO: 4139 - DNA, 624 bp, Artificial Sequence
  chemically treated genomic DNA (Homo sapiens) CpG-island No: 4139
tatttacgtaatataatttatgaaaagtttaatatagttaggttaaatttaagatttagatacgcggttgttgttaatgtttatttttgcgtatcgcgtcgttttatcgtaggtataatttttttaggtttgtttcgtttttatataggggttttcgtttgttaattacgttggtttagttttttattttcggaatgttttttcgtttcggacgggttatttatttttgtaaataggggttcggcgtcggaatagacgtttagtttgcgattttattagtttgttttttttcgtttcgttgtttttcgttttaaggatttttgttgttatatagtattgcgtttatttttttcgtcggtagaattgttacgttgaaagttaggtttcgggaattagggtaaacgttattgaatttgaaattggcgggtttttttagtgaaaggttgtcggaataattttcgtcgttgcgtatgcgtatttcgggacgcgcgcgaatacgtagtagttagaatttataggggcgtggtttgcgcgcgtaggaatttggattttaattttagggttaggtgttttttttcgttgtttttcgttagttgcggggtgtgagattaattttcgtcgatt

SEQ ID NO: 4140 - DNA, 624 bp, Artificial Sequence
  chemically treated genomic DNA (Homo sapiens) CpG-island No: 4140
aatcgacgaaaattaatctcacaccccgcaactaacgaaaaacaacgaaaaaaaacacctaaccctaaaattaaaatccaaattcctacgcgcgcaaaccacgcccctataaattctaactactacgtattcgcgcgcgtcccgaaatacgcatacgcaacgacgaaaattattccgacaacctttcactaaaaaaacccgccaatttcaaattcaataacgtttaccctaattcccgaaacctaactttcaacgtaacaattctaccgacgaaaaaaataaacgcaatactatataacaacaaaaatccttaaaacgaaaaacaacgaaacgaaaaaaaacaaactaataaaatcgcaaactaaacgtctattccgacgccgaacccctatttacaaaaataaataacccgtccgaaacgaaaaaacattccgaaaataaaaaactaaaccaacgtaattaacaaacgaaaacccctatataaaaacgaaacaaacctaaaaaaattatacctacgataaaacgacgcgatacgcaaaaataaacattaacaacaaccgcgtatctaaatcttaaatttaacctaactatattaaacttttcataaattatattacgtaaata

SEQ ID NO: 4141 - DNA, 682 bp, Artificial Sequence
  chemically treated genomic DNA (Homo sapiens) CpG-island No: 4141
gattttgatgagtggcgtgaatttttcggttgataaatcgtttggatgcggtttttgtcgttttgtatcgtggttagtcggtcgtcgttttagtcgtattaggttatttgcggttttcgtgatagcgatatttagttcgttaggtttcgtttacgtcgttatattcgttttgttattttgcggtttagcgggtcgtaaagatagcggttttcgattagtggttcgttatgttgtattcgcgtgtagaatattaggcggtgttggttgtcgtagtggtagtggtgggttcgttcgtcgttcgttcgtattatattcgtcgggatgcggttcgtttttttcgttagtttgtcgtatttatcgtggcggtagatatagtgcgtatttttcgcgatgcggttattcggttatattgtgagtgtattgttcgggtgtagtttcgggttcggtagtcggttgttcgtcgggttcgtggtatacgggatgcggatgtttaggtttggtgcgagggtgcgtatattttttagtttgttcgtggcgttgtagtcgtattttcgcgtttgtcgcgggtcgttgatgcgtattaggtcgtcgttgttattttattcgtagttacggttatatatatggttgtttaggtgttggttttgtaattggttgcgggggtgtattgatgaattattgt

SEQ ID NO: 4142 - DNA, 682 bp, Artificial Sequence
  chemically treated genomic DNA (Homo sapiens) CpG-island No: 4142
acaataattcatcaatacacccccgcaaccaattacaaaaccaacacctaaacaaccatatatataaccgtaactacgaataaaataacaacgacgacctaatacgcatcaacgacccgcgacaaacgcgaaaatacgactacaacgccacgaacaaactaaaaaatatacgcaccctcgcaccaaacctaaacatccgcatcccgtataccacgaacccgacgaacaaccgactaccgaacccgaaactacacccgaacaatacactcacaatataaccgaataaccgcatcgcgaaaaatacgcactatatctaccgccacgataaatacgacaaactaacgaaaaaaacgaaccgcatcccgacgaatataatacgaacgaacgacgaacgaacccaccactaccactacgacaaccaacaccgcctaatattctacacgcgaatacaacataacgaaccactaatcgaaaaccgctatctttacgacccgctaaaccgcaaaataacaaaacgaatataacgacgtaaacgaaacctaacgaactaaatatcgctatcacgaaaaccgcaaataacctaatacgactaaaacgacgaccgactaaccacgatacaaaacgacaaaaaccgcatccaaacgatttatcaaccgaaaaattcacgccactcatcaaaatc

SEQ ID NO: 4143 - DNA, 682 bp, Artificial Sequence
  chemically treated genomic DNA (Homo sapiens) CpG-island No: 4143
gtagtagtttattaatatattttcgtagttagttatagagttagtatttgaatagttatgtatatgatcgtgattacgggtggagtgataacggcgatttggtgcgtattagcggttcgcgatagacgcgggaatacggttatagcgttacgggtaggttggagagtgtgcgtattttcgtattagatttggatattcgtatttcgtatgttacggattcggcgggtaatcggttgtcggattcggagttgtattcggatagtatatttatagtgtggtcggataatcgtatcgcggaggatgcgtattatgtttatcgttacgatgaatacggtaggttgacggagaagacggatcgtatttcggcgggtgtgatacggacggacgacgagcggatttattattattattacgatagttagtatcgtttggtgttttatacgcggatatagtatggcgagttattggtcgagagtcgttatttttacgattcgttgggtcgtagggtggtaaaacgggtgtggcggcgtgaacgggatttgacgggttggatgtcgttgttacggaaatcgtaagtgatttggtacggttgggacggcgatcggttgattacgatatagaacgataggagtcgtatttagacgatttattagtcggggagtttacgttatttattagggtt

SEQ ID NO: 4144 - DNA, 682 bp, Artificial Sequence
  chemically treated genomic DNA (Homo sapiens) CpG-island No: 4144
aaccctaataaataacgtaaactccccgactaataaatcgtctaaatacgactcctatcgttctatatcgtaatcaaccgatcgccgtcccaaccgtaccaaatcacttacgatttccgtaacaacgacatccaacccgtcaaatcccgttcacgccgccacacccgttttaccaccctacgacccaacgaatcgtaaaaataacgactctcgaccaataactcgccatactatatccgcgtataaaacaccaaacgatactaactatcgtaataataataataaatccgctcgtcgtccgtccgtatcacacccgccgaaatacgatccgtcttctccgtcaacctaccgtattcatcgtaacgataaacataatacgcatcctccgcgatacgattatccgaccacactataaatatactatccgaatacaactccgaatccgacaaccgattacccgccgaatccgtaacatacgaaatacgaatatccaaatctaatacgaaaatacgcacactctccaacctacccgtaacgctataaccgtattcccgcgtctatcgcgaaccgctaatacgcaccaaatcgccgttatcactccacccgtaatcacgatcatatacataactattcaaatactaactctataactaactacgaaaatatattaataaactactac

SEQ ID NO: 4145 - DNA, 1498 bp, Artificial Sequence
  chemically treated genomic DNA (Homo sapiens) CpG-island No: 4145
  unsure (499..500, 764, 1011, 1114, 1136)
ggtacgttgttttttcgtttgtaacggtatgttttttattattttgagtaattttttttttttttcgattttttagcgaggtttgggaatcgcgtggaagatattttttttattttgttcggtttcgtattagtttaagttcgtttttgttattttaatttgcgtttcgttttttacggagcggtcgggaaggattttgtgggacgtggcgattcggtaagggggattggtcgcgatttttcggtcgtcgggttcgggcggttgcgtttttattaatttttttagaaatttgataattgtacggcgacggtcggacggggatttagaggggttacggggttaggttgtatcggtttcgtcgtgggtaggttcggatcgtaggggattttatgttcgagtttcggtttttttcgtttcgtcgggagagggagtaggtagaagttaggggagttttagcgggatcgaggttcgtttttagtcgcggggtcgcgggttttanngggttagcgtttataatgcggtttcgcgttttttatgcgggagcgggtgcgttgttatgatagcgattttcgtggcgcgcgttcgggtttgtcgtttttaggcgcgtacggttttttttcgtttcgatttttcgtcgttgtgcgtaattttttttcggttgtgggaaggggtcgggtttgtcgtttgacgtttgtgcggggttcggaagatggttgcggagtcgagtatcgggtagtggttgcggcggcggcggcggcggcggngtcgggagcgcggcgggcgggggtttcgttttgcgcgtggggcgttgagtcgagaggcgcggaggcggcgagggcgcgggggttttgaggatcgttcggcgtcgttttttgttatattatgggtagcgtagaggacgtagttaaagagaaattgttgtggaacgtgaagaaggaggtaaagtcgagttaagaatttcggggggttcgcgttttggttcgcgcggtttagggggtagaaaggtttttncgtttatttttcggcgcgggtattcgggtcgaatttgggtcgggcggggcgggttttggacgggttgcgttttttttttttttttcggatgggggagggtagnagtttttttttcgggggatttngtcggcgttttcggtttgtttgtttcgtagtttcgtagtttttcgtttagtgacggtagcggcgttgggagtttaaggtcgggggaggggtggcggcgatggcggggatggttggattcggagttgtttatttagtgttcgcgtcgttaggggagggggcggggtttcgcgcgagttttcgcggcgtaggtgggtgtcgtgcgggtcgagtttttttacgttttaagtgggtgtcgtgcgggttgagtttttttttgttcgacgttcgttgtgtttttagttacggagtgatcgttgtcggaggggtgcgtcgtatattttagtttttttttttacgtttatttttttagttagggattagg

SEQ ID NO: 4146 - DNA, 1498 bp, Artificial Sequence
  chemically treated genomic DNA (Homo sapiens) CpG-island No: 4146
  unsure (363, 385, 488, 735, 999..)
cctaatccctaactaaaaaaataaacgtaaaaaaaaaaactaaaatatacgacgcacccctccgacaacgatcactccgtaactaaaaacacaacgaacgtcgaacaaaaaaaaactcaacccgcacgacacccacttaaaacgtaaaaaaactcgacccgcacgacacccacctacgccgcgaaaactcgcgcgaaaccccgccccctcccctaacgacgcgaacactaaataaacaactccgaatccaaccatccccgccatcgccgccacccctcccccgaccttaaactcccaacgccgctaccgtcactaaacgaaaaactacgaaactacgaaacaaacaaaccgaaaacgccgacnaaatcccccgaaaaaaaaactnctaccctcccccatccgaaaaaaaaaaaaaaaacgcaacccgtccaaaacccgccccgcccgacccaaattcgacccgaatacccgcgccgaaaaataaacgnaaaaacctttctaccccctaaaccgcgcgaaccaaaacgcgaaccccccgaaattcttaactcgactttacctccttcttcacgttccacaacaatttctctttaactacgtcctctacgctacccataatataacaaaaaacgacgccgaacgatcctcaaaacccccgcgccctcgccgcctccgcgcctctcgactcaacgccccacgcgcaaaacgaaacccccgcccgccgcgctcccgacnccgccgccgccgccgccgccgcaaccactacccgatactcgactccgcaaccatcttccgaaccccgcacaaacgtcaaacgacaaacccgaccccttcccacaaccgaaaaaaaattacgcacaacgacgaaaaatcgaaacgaaaaaaaaccgtacgcgcctaaaaacgacaaacccgaacgcgcgccacgaaaatcgctatcataacaacgcacccgctcccgcataaaaaacgcgaaaccgcattataaacgctaacccnntaaaacccgcgaccccgcgactaaaaacgaacctcgatcccgctaaaactcccctaacttctacctactccctctcccgacgaaacgaaaaaaaccgaaactcgaacataaaatcccctacgatccgaacctacccacgacgaaaccgatacaacctaaccccgtaacccctctaaatccccgtccgaccgtcgccgtacaattatcaaatttctaaaaaaattaataaaaacgcaaccgcccgaacccgacgaccgaaaaatcgcgaccaatcccccttaccgaatcgccacgtcccacaaaatccttcccgaccgctccgtaaaaaacgaaacgcaaattaaaataacaaaaacgaacttaaactaatacgaaaccgaacaaaataaaaaaaatatcttccacgcgattcccaaacctcgctaaaaaatcgaaaaaaaaaaaaaattactcaaaataataaaaaacataccgttacaaacgaaaaaacaacgtacc

SEQ ID NO: 4147 - DNA, 1498 bp, Artificial Sequence
  chemically treated genomic DNA (Homo sapiens) CpG-island No: 4147
  unsure (363, 385, 488, 735, 999..)
tttggtttttggttaaggaggtgggcgtggagggagaaattgaggtgtgcggcgtattttttcggtagcgattatttcgtagttggaggtatagcggacgtcggataagggggagtttagttcgtacgatatttatttaggacgtggggaagttcggttcgtacgatatttatttgcgtcgcgggagttcgcgcggggtttcgtttttttttttggcggcgcgggtattgaatgggtagtttcggatttagttattttcgttatcgtcgttatttttttttcggttttgggtttttagcgtcgttgtcgttattgggcggggagttgcggggttgcgaagtaaataagtcgggagcgtcggtngggtttttcggggaaagggttnttgtttttttttattcgagaaaggggaaggaggcgtagttcgtttaggattcgtttcgttcggtttaggttcggttcgggtgttcgcgtcggggggtgggcgnggggatttttttgttttttgggtcgcgcgggttagggcgcgagtttttcggggtttttgattcgattttatttttttttttacgttttatagtagtttttttttgattgcgttttttgcgttgtttatggtgtggtaggaggcggcgtcgagcggtttttagagttttcgcgttttcgtcgttttcgcgtttttcggtttagcgttttacgcgtaaggcggagttttcgttcgtcgcgttttcggtntcgtcgtcgtcgtcgtcgtcgtagttattgttcggtgttcggtttcgtagttatttttcgagtttcgtatagacgttaggcggtaggttcggtttttttttatagtcggaggggggttgcgtatagcgacgggggatcggggcggggagaggtcgtgcgcgtttaggggcggtagattcgggcgcgcgttacgggggtcgttgttatggtaacgtattcgttttcgtatggagggcgcgaagtcgtattgtgagcgttggtttnntggagttcgcggtttcgcggttgagagcgagtttcggtttcgttgaagtttttttgatttttgtttgttttttttttcgacgggacggaaagggtcggggttcgggtatggggttttttgcggttcgagtttgtttacggcgaagtcggtgtagtttggtttcgtgatttttttgaattttcgttcggtcgtcgtcgtgtagttgttaagtttttgggaagattagtgggagcgtagtcgttcgagttcgacggtcggagggtcgcggttagttttttttgtcgggtcgttacgttttataaggtttttttcggtcgtttcgtgggaggcggggcgtaggttggagtaatagggacgggtttgagttggtacggaatcgggtaaggtgagagaagtgttttttacgcgatttttaagtttcgttagggaatcgagggagaagaaaggttgtttagagtgataaagaatatgtcgttgtaaacggaagagtaacgtgtt

SEQ ID NO: 4148 - DNA, 1498 bp, Artificial Sequence
  chemically treated genomic DNA (Homo sapiens) CpG-island No: 4148
  unsure (499..500, 764, 1011, 1114, 1136)
aacacgttactcttccgtttacaacgacatattctttatcactctaaacaacctttcttctccctcgattccctaacgaaacttaaaaatcgcgtaaaaaacacttctctcaccttacccgattccgtaccaactcaaacccgtccctattactccaacctacgccccgcctcccacgaaacgaccgaaaaaaaccttataaaacgtaacgacccgacaaaaaaaactaaccgcgaccctccgaccgtcgaactcgaacgactacgctcccactaatcttcccaaaaacttaacaactacacgacgacgaccgaacgaaaattcaaaaaaatcacgaaaccaaactacaccgacttcgccgtaaacaaactcgaaccgcaaaaaaccccatacccgaaccccgaccctttccgtcccgtcgaaaaaaaaaacaaacaaaaatcaaaaaaacttcaacgaaaccgaaactcgctctcaaccgcgaaaccgcgaactccannaaaccaacgctcacaatacgacttcgcgccctccatacgaaaacgaatacgttaccataacaacgacccccgtaacgcgcgcccgaatctaccgcccctaaacgcgcacgacctctccccgccccgatcccccgtcgctatacgcaacccccctccgactataaaaaaaaaccgaacctaccgcctaacgtctatacgaaactcgaaaaataactacgaaaccgaacaccgaacaataactacgacgacgacgacgacgacganaccgaaaacgcgacgaacgaaaactccgccttacgcgtaaaacgctaaaccgaaaaacgcgaaaacgacgaaaacgcgaaaactctaaaaaccgctcgacgccgcctcctaccacaccataaacaacgcaaaaaacgcaatcaaaaaaaaactactataaaacgtaaaaaaaaaaataaaatcgaatcaaaaaccccgaaaaactcgcgccctaacccgcgcgacccaaaaaacaaaaaaatccccncgcccaccccccgacgcgaacacccgaaccgaacctaaaccgaacgaaacgaatcctaaacgaactacgcctccttcccctttctcgaataaaaaaaaacaanaaccctttccccgaaaaacccnaccgacgctcccgacttatttacttcgcaaccccgcaactccccgcccaataacgacaacgacgctaaaaacccaaaaccgaaaaaaaaataacgacgataacgaaaataactaaatccgaaactacccattcaatacccgcgccgccaaaaaaaaaaacgaaaccccgcgcgaactcccgcgacgcaaataaatatcgtacgaaccgaacttccccacgtcctaaataaatatcgtacgaactaaactcccccttatccgacgtccgctatacctccaactacgaaataatcgctaccgaaaaaatacgccgcacacctcaatttctccctccacgcccacctccttaaccaaaaaccaaa

SEQ ID NO: 4149 - DNA, 1215 bp, Artificial Sequence
  chemically treated genomic DNA (Homo sapiens) CpG-island No: 4149
gaggtcgggggaggggcggcgtttagcggttggtttttcgcgcgttggatttttttcgttattttttttacggggttcgtgacgtcgcgtcgttttcggagtttttttagaggatggatagggagagtttcggttcgtcgtttattttttttttaacgcgggttgggagttttacgtttttttattttttacggtttcgcgttttcgcggttgtcggtttattttttatagttttcggttcggcgcgcggaagtttcgtcggtttttagggaaatcgaagtttaggtcgttatggtaatcgtttgacgtggcggcgttttcggttcgagtattgtagagggagcgacgtttaaagggaggggacgcgtagtcgggagggtttcgaaaaaagagatattttttttttttagtttaggaggaaggaaagcgtgacgtgttttaggttcggcggtttcggggttgtttgtcgtttagttaaatcggagtttttttcgttttaggcgtaattttatattcgggtcgtggcgtttttacgcgcgtttcgaaaagattttttttttttggggtaaacggggttcggttcgcgtcgtagcgtggacggggattacgtttaatttttttcgtagatagttatagatattcgggcggaatttgggttttcgtttaggttttgcggtcggggaggaggcgtcgggtcgttttatgtttttttttttcgcggttgtattaatacgcgcgaacgggagtcgttatcgggattcgtattaggcgttacggcgcgcgttttacggtttcggggacgtcgaggttgtaggggttcgggagcggcgcgggaggggagtcgcgtttttttttgcgtacgcgcgttttttcgggtagggagtttcgttgacgttagtcgggttatgtgtttagcgttcgcgtggaggtgggagggaggcgcgggggagtcgtcggggcgtgagggcggggcggggcgcggtcgggggaggggcggcggagggagggcgggggaagttgcgcgacgtcggttttcgggttttatatttggatgtatcgtagcgtcgttcgtagtacgtttagattggacgtttttttgttatttacgttggggatgtttcgttttagggttttaaagtatttttttagatgggtttttttgaagagaggggcgagcgtcggttagcggtgtttggggcggggttgggacggggg

SEQ ID NO: 4150 - DNA, 1215 bp, Artificial Sequence
  chemically treated genomic DNA (Homo sapiens) CpG-island No: 4150
cccccgtcccaaccccgccccaaacaccgctaaccgacgctcgcccctctcttcaaaaaaacccatctaaaaaaatactttaaaaccctaaaacgaaacatccccaacgtaaataacaaaaaaacgtccaatctaaacgtactacgaacgacgctacgatacatccaaatataaaacccgaaaaccgacgtcgcgcaacttcccccgccctccctccgccgcccctcccccgaccgcgccccgccccgccctcacgccccgacgactcccccgcgcctccctcccacctccacgcgaacgctaaacacataacccgactaacgtcaacgaaactccctacccgaaaaaacgcgcgtacgcaaaaaaaaacgcgactcccctcccgcgccgctcccgaacccctacaacctcgacgtccccgaaaccgtaaaacgcgcgccgtaacgcctaatacgaatcccgataacgactcccgttcgcgcgtattaatacaaccgcgaaaaaaaaaaacataaaacgacccgacgcctcctccccgaccgcaaaacctaaacgaaaacccaaattccgcccgaatatctataactatctacgaaaaaaattaaacgtaatccccgtccacgctacgacgcgaaccgaaccccgtttaccccaaaaaaaaaaaatcttttcgaaacgcgcgtaaaaacgccacgacccgaatataaaattacgcctaaaacgaaaaaaactccgatttaactaaacgacaaacaaccccgaaaccgccgaacctaaaacacgtcacgctttccttcctcctaaactaaaaaaaaaaaatatctcttttttcgaaaccctcccgactacgcgtcccctccctttaaacgtcgctccctctacaatactcgaaccgaaaacgccgccacgtcaaacgattaccataacgacctaaacttcgatttccctaaaaaccgacgaaacttccgcgcgccgaaccgaaaactataaaaaataaaccgacaaccgcgaaaacgcgaaaccgtaaaaaataaaaaaacgtaaaactcccaacccgcgttaaaaaaaaaataaacgacgaaccgaaactctccctatccatcctctaaaaaaactccgaaaacgacgcgacgtcacgaaccccgtaaaaaaaataacgaaaaaaatccaacgcgcgaaaaaccaaccgctaaacgccgcccctcccccgacctc

SEQ ID NO: 4151 - DNA, 1215 bp, Artificial Sequence
  chemically treated genomic DNA (Homo sapiens) CpG-island No: 4151
ttttcgttttagtttcgttttaggtatcgttgatcggcgttcgtttttttttttaggagggtttatttgaaagagtgttttgagattttgaagcggaatatttttaacgtggatgataagaagacgtttaatttgagcgtgttgcggacggcgttgcggtatatttaggtatggggttcggaggtcggcgtcgcgtagtttttttcgtttttttttcgtcgtttttttttcggtcgcgtttcgtttcgtttttacgtttcggcggttttttcgcgttttttttttatttttacgcgggcgttgagtatatggttcggttgacgttagcggggttttttgttcgggagggcgcgcgtgcgtagaggagggcgcggtttttttttcgcgtcgttttcgagtttttgtagtttcggcgttttcggggtcgtgaggcgcgcgtcgtgacgtttggtgcgagtttcgatggcggttttcgttcgcgcgtgttggtgtagtcgcgggagggaagggtatggggcggttcggcgtttttttttcggtcgtagagtttgggcgggagtttagatttcgttcgaatgtttgtagttatttgcggggagggttgggcgtggttttcgtttacgttgcggcgcgggtcgagtttcgtttattttaaaggaggaaggttttttcggagcgcgcgtggaggcgttacggttcgagtgtggggttacgtttggggcggggaaaatttcgatttgattgggcggtaaatagtttcggggtcgtcgagtttgaaatacgttacgttttttttttttttgggttaggaagagggggtgttttttttttcggggttttttcggttgcgcgttttttttttttgggcgtcgttttttttgtagtgttcgggtcgggggcgtcgttacgttaggcggttgttatggcggtttgagtttcggtttttttggaaatcggcggggttttcgcgcgtcgggtcggaggttgtgggggatgggtcggtagtcgcggagacgcggagtcgtaggggatggagggacgtggggtttttagttcgcgttggggggggggtgggcggcgagtcgggattttttttgtttattttttgaggaagtttcgggggcggcgcggcgttacgggtttcgtgggaggggtggcgaggagggtttagcgcgcgaggagttagtcgttgggcgtcgtttttttttcggtttt

SEQ ID NO: 4152 - DNA, 1215 bp, Artificial Sequence
  chemically treated genomic DNA (Homo sapiens) CpG-island No: 4152
aaaaccgaaaaaaaaacgacgcccaacgactaactcctcgcgcgctaaaccctcctcgccacccctcccacgaaacccgtaacgccgcgccgcccccgaaacttcctcaaaaaataaacaaaaaaaatcccgactcgccgcccaccccccccccaacgcgaactaaaaaccccacgtccctccatcccctacgactccgcgtctccgcgactaccgacccatcccccacaacctccgacccgacgcgcgaaaaccccgccgatttccaaaaaaaccgaaactcaaaccgccataacaaccgcctaacgtaacgacgcccccgacccgaacactacaaaaaaaacgacgcccaaaaaaaaaaaacgcgcaaccgaaaaaaccccgaaaaaaaaaacaccccctcttcctaacccaaaaaaaaaaaaaacgtaacgtatttcaaactcgacgaccccgaaactatttaccgcccaatcaaatcgaaattttccccgccccaaacgtaaccccacactcgaaccgtaacgcctccacgcgcgctccgaaaaaaccttcctcctttaaaataaacgaaactcgacccgcgccgcaacgtaaacgaaaaccacgcccaaccctccccgcaaataactacaaacattcgaacgaaatctaaactcccgcccaaactctacgaccgaaaaaaaaacgccgaaccgccccatacccttccctcccgcgactacaccaacacgcgcgaacgaaaaccgccatcgaaactcgcaccaaacgtcacgacgcgcgcctcacgaccccgaaaacgccgaaactacaaaaactcgaaaacgacgcgaaaaaaaaaccgcgccctcctctacgcacgcgcgccctcccgaacaaaaaaccccgctaacgtcaaccgaaccatatactcaacgcccgcgtaaaaataaaaaaaaaacgcgaaaaaaccgccgaaacgtaaaaacgaaacgaaacgcgaccgaaaaaaaaacgacgaaaaaaaaacgaaaaaaactacgcgacgccgacctccgaaccccatacctaaatataccgcaacgccgtccgcaacacgctcaaattaaacgtcttcttatcatccacgttaaaaatattccgcttcaaaatctcaaaacactctttcaaataaaccctcctaaaaaaaaaaacgaacgccgatcaacgatacctaaaacgaaactaaaacgaaaa

SEQ ID NO: 4153 - DNA, 685 bp, Artificial Sequence
  chemically treated genomic DNA (Homo sapiens) CpG-island No: 4153
aggggtcgggtcgcgtcgtttttagtaggagtgttttcggtgtacgtggtcgggggcggagttcgtttacgttattattcggtgtaattaacgggttcggaacgtaggtatacgtaatattttaggcgagagcgggtttggaacgcgtagatacgttatattttatattggttaaagcggggcgtagcgaggggggttcgggggttgatttttagcgattcgcgggttatttcgtaaacgtttaattagttcggtttttatttaaatttcggacgcgtagtttagtttagttttgggaggcggggttaggcggggttggttaggattataagatacgcgatgttattttattttgtaaaggtcgttttcgttttaagcggcgcgtagatttgtcgggagcgtttttcgtattttttttacggggttagggaagtcgaagagttgtttcgcgtagagtagtttttatttttatttcgttatatatacgtttattcgtgtgttatatatacgttcgtgtatacgttcgtttatttgtttttttcgaggtttatattatatatttttcgtgtatatacgtacgtatacgcgagtttgttatttttacgtaatattattttttattttatttttcggtttatatatttttagtgttatcgagggtttcgttggtttacgtaaaagtagt

SEQ ID NO: 4154 - DNA, 685 bp, Artificial Sequence
  chemically treated genomic DNA (Homo sapiens) CpG-island No: 4154
actacttttacgtaaaccaacgaaaccctcgataacactaaaaatatataaaccgaaaaataaaataaaaaataatattacgtaaaaataacaaactcgcgtatacgtacgtatatacacgaaaaatatataatataaacctcgaaaaaaacaaataaacgaacgtatacacgaacgtatatataacacacgaataaacgtatatataacgaaataaaaataaaaactactctacgcgaaacaactcttcgacttccctaaccccgtaaaaaaaatacgaaaaacgctcccgacaaatctacgcgccgcttaaaacgaaaacgacctttacaaaataaaataacatcgcgtatcttataatcctaaccaaccccgcctaaccccgcctcccaaaactaaactaaactacgcgtccgaaatttaaataaaaaccgaactaattaaacgtttacgaaataacccgcgaatcgctaaaaatcaacccccgaacccccctcgctacgccccgctttaaccaatataaaatataacgtatctacgcgttccaaacccgctctcgcctaaaatattacgtatacctacgttccgaacccgttaattacaccgaataataacgtaaacgaactccgcccccgaccacgtacaccgaaaacactcctactaaaaacgacgcgacccgacccct

SEQ ID NO: 4155 - DNA, 685 bp, Artificial Sequence
  chemically treated genomic DNA (Homo sapiens) CpG-island No: 4155
gttgtttttgcgtgggttagcggagttttcggtggtattgaggatgtgtgagtcggggggtggggtgaggaatggtgttgcgtgggggtggtaggttcgcgtgtgcgtgcgtgtgtgtacgggggatgtgtgatgtgagtttcgggaagagtagatgaacggacgtgtatacgggcgtgtgtatagtatacgagtgggcgtgtgtgtaacggagtgggggtggggattattttacgcggagtagtttttcggtttttttggtttcgtggggagggtgcggggggcgttttcggtagatttacgcgtcgtttggggcggaggcggtttttgtagaatgaaatgatatcgcgtgttttatgattttggttagtttcgtttgatttcgttttttagagttgggttgggttgcgcgttcggggtttgggtgaaagtcgggttaattgggcgtttgcgaaatggttcgcgggtcgttgggggttagttttcgggtttttttcgttgcgtttcgttttagttagtgtggaatgtggcgtgtttgcgcgttttaaattcgttttcgtttggaatgttgcgtgtgtttgcgtttcgagttcgttggttatatcgggtggtgacgtggacgggtttcgttttcgattacgtgtatcggggatatttttgttggggacggcgcggttcggttttt

SEQ ID NO: 4156 - DNA, 685 bp, Artificial Sequence
  chemically treated genomic DNA (Homo sapiens) CpG-island No: 4156
aaaaaccgaaccgcgccgtccccaacaaaaatatccccgatacacgtaatcgaaaacgaaacccgtccacgtcaccacccgatataaccaacgaactcgaaacgcaaacacacgcaacattccaaacgaaaacgaatttaaaacgcgcaaacacgccacattccacactaactaaaacgaaacgcaacgaaaaaaacccgaaaactaacccccaacgacccgcgaaccatttcgcaaacgcccaattaacccgactttcacccaaaccccgaacgcgcaacccaacccaactctaaaaaacgaaatcaaacgaaactaaccaaaatcataaaacacgcgatatcatttcattctacaaaaaccgcctccgccccaaacgacgcgtaaatctaccgaaaacgccccccgcaccctccccacgaaaccaaaaaaaccgaaaaactactccgcgtaaaataatccccacccccactccgttacacacacgcccactcgtatactatacacacgcccgtatacacgtccgttcatctactcttcccgaaactcacatcacacatcccccgtacacacacgcacgcacacgcgaacctaccacccccacgcaacaccattcctcaccccaccccccgactcacacatcctcaataccaccgaaaactccgctaacccacgcaaaaacaac

SEQ ID NO: 4157 - DNA, 776 bp, Artificial Sequence
  chemically treated genomic DNA (Homo sapiens) CpG-island No: 4157
tcgtttttcgtcgttaggtcgagttcgggtatcggtagtcgcggcgcgttcggggttttgtaaaggtcgttcgggtttgttttcgtcgcgggtcgggtacggagttcgtaggtttcggcgcggttcggtttttttcgttcgttcgtttttcggtcgggggttcgcgttcgttcgttcgttttttcggttgtagggtcggtttcgtcgagttttcgcggcgttcgggttttatttaattgtttttcgttggggcggcggcggcggtggttgcggcggcggcgggtttcggtttcgttttacgtagaagtagttttttatcgttcgggcggcgcgggaggggtcgggttcggggtttaggcggtaggagtcggcgtcgtagttcgagcgcgagttttatcgagagcggcggcggcggcggcggcggcggaggggcggggcgcggtttggcggcggcggcgataacggtagtggcggcggcggtttttttcgcgggtcgcggcggcgggtcgggtttcgggtttttcggcgttggcgttggtttaggatcgggggaggcgttcggcgttcgaggttggttcgggcgggaggagggagagggagttttggcgtttcgagttcgcgtcgtcgtttcggtcggtatttcgtttttttagtttttttttcgatttagttcgttagtcgtaggtagggtttcggtgcgtttattcgggttttttcgagttcgtcggcgattttagtttagttttaggttttcgggagtttacggtttttagagt

SEQ ID NO: 4158 - DNA, 776 bp, Artificial Sequence
  chemically treated genomic DNA (Homo sapiens) CpG-island No: 4158
actctaaaaaccgtaaactcccgaaaacctaaaactaaactaaaatcgccgacgaactcgaaaaaacccgaataaacgcaccgaaaccctacctacgactaacgaactaaatcgaaaaaaaaactaaaaaaacgaaataccgaccgaaacgacgacgcgaactcgaaacgccaaaactccctctccctcctcccgcccgaaccaacctcgaacgccgaacgcctcccccgatcctaaaccaacgccaacgccgaaaaacccgaaacccgacccgccgccgcgacccgcgaaaaaaaccgccgccgccactaccgttatcgccgccgccgccaaaccgcgccccgcccctccgccgccgccgccgccgccgccgctctcgataaaactcgcgctcgaactacgacgccgactcctaccgcctaaaccccgaacccgacccctcccgcgccgcccgaacgataaaaaactacttctacgtaaaacgaaaccgaaacccgccgccgccgcaaccaccgccgccgccgccccaacgaaaaacaattaaataaaacccgaacgccgcgaaaactcgacgaaaccgaccctacaaccgaaaaaacgaacgaacgaacgcgaacccccgaccgaaaaacgaacgaacgaaaaaaaccgaaccgcgccgaaacctacgaactccgtacccgacccgcgacgaaaacaaacccgaacgacctttacaaaaccccgaacgcgccgcgactaccgatacccgaactcgacctaacgacgaaaaacga

SEQ ID NO: 4159 - DNA, 776 bp, Artificial Sequence
  chemically treated genomic DNA (Homo sapiens) CpG-island No: 4159
gttttagaggtcgtgggttttcgggggtttgaggttggattggggtcgtcggcgggttcggggaggttcgggtgggcgtatcggggttttgtttgcggttgacgggttgggtcgagggggaggttggggaggcggggtgtcggtcggggcggcggcgcgggttcgggacgttagggtttttttttttttttttcgttcgagttagtttcgggcgtcgggcgtttttttcgattttgaattagcgttagcgtcgggaggttcggagttcggttcgtcgtcgcggttcgcggagggagtcgtcgtcgttattgtcgttgtcgtcgtcgtcgttaggtcgcgtttcgttttttcgtcgtcgtcgtcgtcgtcgtcgttttcggtgaggttcgcgttcgagttgcggcgtcggtttttgtcgtttgggtttcgggttcggtttttttcgcgtcgttcgggcgatgagaagttgtttttgcgtgagacggagtcgggattcgtcgtcgtcgtagttatcgtcgtcgtcgttttagcggggaatagttaagtgaggttcgggcgtcgcggaggttcggcggagtcggttttgtagtcgggagggcgggcgggcgggcgcgggttttcggtcgaggggcgggcggacgggaggagtcgggtcgcgtcgaggtttgcgggtttcgtgttcggttcgcggcggggataggttcgggcggtttttgtagagtttcgagcgcgtcgcggttgtcggtgttcgggttcggtttggcggcgagaggcgg

SEQ ID NO: 4160 - DNA, 776 bp, Artificial Sequence
  chemically treated genomic DNA (Homo sapiens) CpG-island No: 4160
ccgcctctcgccgccaaaccgaacccgaacaccgacaaccgcgacgcgctcgaaactctacaaaaaccgcccgaacctatccccgccgcgaaccgaacacgaaacccgcaaacctcgacgcgacccgactcctcccgtccgcccgcccctcgaccgaaaacccgcgcccgcccgcccgccctcccgactacaaaaccgactccgccgaacctccgcgacgcccgaacctcacttaactattccccgctaaaacgacgacgacgataactacgacgacgacgaatcccgactccgtctcacgcaaaaacaacttctcatcgcccgaacgacgcgaaaaaaaccgaacccgaaacccaaacgacaaaaaccgacgccgcaactcgaacgcgaacctcaccgaaaacgacgacgacgacgacgacgacgaaaaaacgaaacgcgacctaacgacgacgacgacaacgacaataacgacgacgactccctccgcgaaccgcgacgacgaaccgaactccgaacctcccgacgctaacgctaattcaaaatcgaaaaaaacgcccgacgcccgaaactaactcgaacgaaaaaaaaaaaaaaaaaccctaacgtcccgaacccgcgccgccgccccgaccgacaccccgcctccccaacctccccctcgacccaacccgtcaaccgcaaacaaaaccccgatacgcccacccgaacctccccgaacccgccgacgaccccaatccaacctcaaacccccgaaaacccacgacctctaaaac

SEQ ID NO: 4161 - DNA, 793 bp, Artificial Sequence
  chemically treated genomic DNA (Homo sapiens) CpG-island No: 4161
tcgtcgcggatgaagcggggttagaaacgtattgttttcgtttagatttagggttttaggtgtcgcgcgggtcgaagttttaatttttagggattttagatttttgtcggtgatttaaattttataattcgcgattagtatagttttgtcgttttcgtcgttatagtcgtcgttattttcggcgtagttcggtttcgcgagggcgtttgcgttcggcgacggtcgaaattggtttttcgcggttttcgtcgtcggattttcgttaatgttgttatcgtttttttttttttttttttagtttttttttattttcggggttgttttggattcgttggtttcgtaataatatttcgttggttttttttaggcggcgggattagtgtagtcgtcgttttttaggatcgttcgtcggttagggtttttgtttttttcggtataggttattatggttattaatttatagtcgtagtcgtttttttcggcgtcgtcgtttttttcgtcgtagtcgtagtcgtagttatcgtcgtcgtcgtcgggtttcggggttggtttcggcgcgggcggggcgggcggcgcgggtgcgggcgtcggggattcgtagttcgtggttatgatcgtgaattattttaagagttaggggtttttcgattagtttcgtagagattgtttggtcgacgtggatattaaggttaggagcgcgtcgggtttgggggtttgcgagggaaggggaggatttaagggcgcgttttttttgtagtggtttttttttggagttgtagttgtgtgttacgga

SEQ ID NO: 4162 - DNA, 793 bp, Artificial Sequence
  chemically treated genomic DNA (Homo sapiens) CpG-island No: 4162
tccgtaacacacaactacaactccaaaaaaaaaccactacaaaaaaaacgcgcccttaaatcctccccttccctcgcaaacccccaaacccgacgcgctcctaaccttaatatccacgtcgaccaaacaatctctacgaaactaatcgaaaaacccctaactcttaaaataattcacgatcataaccacgaactacgaatccccgacgcccgcacccgcgccgcccgccccgcccgcgccgaaaccaaccccgaaacccgacgacgacgacgataactacgactacgactacgacgaaaaaaacgacgacgccgaaaaaaacgactacgactataaattaataaccataataacctataccgaaaaaaacaaaaaccctaaccgacgaacgatcctaaaaaacgacgactacactaatcccgccgcctaaaaaaaaccaacgaaatattattacgaaaccaacgaatccaaaacaaccccgaaaataaaaaaaaactaaaaaaaaaaaaaaaaaaacgataacaacattaacgaaaatccgacgacgaaaaccgcgaaaaaccaatttcgaccgtcgccgaacgcaaacgccctcgcgaaaccgaactacgccgaaaataacgacgactataacgacgaaaacgacaaaactatactaatcgcgaattataaaatttaaatcaccgacaaaaatctaaaatccctaaaaattaaaacttcgacccgcgcgacacctaaaaccctaaatctaaacgaaaacaatacgtttctaaccccgcttcatccgcgacga

SEQ ID NO: 4163 - DNA, 793 bp, Artificial Sequence
  chemically treated genomic DNA (Homo sapiens) CpG-island No: 4163
ttcgtggtatatagttgtagttttaagaggaagttattgtaaaagaagcgcgtttttgggttttttttttttttcgtagatttttaaattcggcgcgtttttaattttggtgtttacgtcggttaggtagtttttgcggaattggtcgaagagtttttggtttttgaggtggtttacgattatggttacgagttgcgggttttcggcgttcgtattcgcgtcgttcgtttcgttcgcgtcggggttagtttcggggttcggcggcggcggcggtggttgcggttgcggttgcggcgggggaggcggcggcgtcggaggaggcggttgcggttgtgggttggtggttatggtggtttgtgtcggggagggtaagggttttgatcggcggacgattttgggaggcggcggttgtattggtttcgtcgtttgagggaagttaacgggatgttgttacggaattagcggatttagagtaatttcggaagtgaaagggaattgggggaaaggaggaaaagacggtgataatattgacgaaagttcggcgacggaggtcgcgaagagttagtttcgatcgtcgtcgggcgtaagcgttttcgcgaggtcgagttgcgtcggaagtggcggcgattgtggcgacggagacgataagattgtgttggtcgcgggttgtggggtttaggttatcggtaggggtttggagtttttggaggttagggtttcgattcgcgcgatatttggggttttaggtttgagcgggggtagtgcgtttttggtttcgttttattcgcgacgg

SEQ ID NO: 4164 - DNA, 793 bp, Artificial Sequence
  chemically treated genomic DNA (Homo sapiens) CpG-island No: 4164
ccgtcgcgaataaaacgaaaccaaaaacgcactacccccgctcaaacctaaaaccccaaatatcgcgcgaatcgaaaccctaacctccaaaaactccaaacccctaccgataacctaaaccccacaacccgcgaccaacacaatcttatcgtctccgtcgccacaatcgccgccacttccgacgcaactcgacctcgcgaaaacgcttacgcccgacgacgatcgaaactaactcttcgcgacctccgtcgccgaactttcgtcaatattatcaccgtcttttcctcctttcccccaattccctttcacttccgaaattactctaaatccgctaattccgtaacaacatcccgttaacttccctcaaacgacgaaaccaatacaaccgccgcctcccaaaatcgtccgccgatcaaaacccttaccctccccgacacaaaccaccataaccaccaacccacaaccgcaaccgcctcctccgacgccgccgcctcccccgccgcaaccgcaaccgcaaccaccgccgccgccgccgaaccccgaaactaaccccgacgcgaacgaaacgaacgacgcgaatacgaacgccgaaaacccgcaactcgtaaccataatcgtaaaccacctcaaaaaccaaaaactcttcgaccaattccgcaaaaactacctaaccgacgtaaacaccaaaattaaaaacgcgccgaatttaaaaatctacgaaaaaaaaaaaaaacccaaaaacgcgcttcttttacaataacttcctcttaaaactacaactatataccacgaa

SEQ ID NO: 4165 - DNA, 974 bp, Artificial Sequence
  chemically treated genomic DNA (Homo sapiens) CpG-island No: 4165
atttagttgagttgcgaaaggagagcgtttggttttggattcggggggagggggttttcgggcggggtgggtttttaaggtgggggcgagggtcggcgttgattttgggacggagtggggcgggagttgttgggtcgcgtagtagtgggcggcggcggtttcgtatatttagtttattcgcgttgcggtcgtcggcgttttttgtttcgttcggagttgttcggcgttttagttgttcgtttcgtcggtcgtttttgttcgcggcgtagatggttgtgcgcggcgttaatattttgacgtttttttttatttaggcgatttttaataagaaagaggagcgcggcgggttggtcgcgttagaggggcgttcggcgttcgggggtatagcggtatcggtggtcgcggttttcgttgtttgttgttggcggttttttggggagagggacgcgggcgcgttggggggcgtcgaggattttttgttggcgttttttgtcggtattagaatagttgcggggcggattgcggagagttcggaaggttgggattcggatttcgcgtttagcgaggagaacgagagtaggcggcgttgcgcggacgcgcggggggttagcggggtcggttttgcggggggatttttgagtttcggttagtcggtttgtgagttggtcgtttttaaagatttagaggaggaagtcgcgggtcggagcgatagcgagatgttcgttagcgttttaggtttgttgcggtttcgcggggatgggggtcgggttgaggggatggacgcggagggtaattacgtcgagtggggtggtcggtttgagtattttgcgttttggggttcggaggttggttaaatttcgaagttttgcgttttggcgcgagttgttttattatttcgggaattgagttcgcgagagatcggagtagttttttagagttttacgttttggggtgaggtttgagatattttgggt

SEQ ID NO: 4166 - DNA, 974 bp, Artificial Sequence
  chemically treated genomic DNA (Homo sapiens) CpG-island No: 4166
acccaaaatatctcaaacctcaccccaaaacgtaaaactctaaaaaactactccgatctctcgcgaactcaattcccgaaataataaaacaactcgcgccaaaacgcaaaacttcgaaatttaaccaacctccgaaccccaaaacgcaaaatactcaaaccgaccaccccactcgacgtaattaccctccgcgtccatcccctcaacccgacccccatccccgcgaaaccgcaacaaacctaaaacgctaacgaacatctcgctatcgctccgacccgcgacttcctcctctaaatctttaaaaacgaccaactcacaaaccgactaaccgaaactcaaaaatccccccgcaaaaccgaccccgctaaccccccgcgcgtccgcgcaacgccgcctactctcgttctcctcgctaaacgcgaaatccgaatcccaaccttccgaactctccgcaatccgccccgcaactattctaataccgacaaaaaacgccaacaaaaaatcctcgacgccccccaacgcgcccgcgtccctctccccaaaaaaccgccaacaacaaacaacgaaaaccgcgaccaccgataccgctatacccccgaacgccgaacgcccctctaacgcgaccaacccgccgcgctcctctttcttattaaaaatcgcctaaataaaaaaaaacgtcaaaatattaacgccgcgcacaaccatctacgccgcgaacaaaaacgaccgacgaaacgaacaactaaaacgccgaacaactccgaacgaaacaaaaaacgccgacgaccgcaacgcgaataaactaaatatacgaaaccgccgccgcccactactacgcgacccaacaactcccgccccactccgtcccaaaatcaacgccgaccctcgcccccaccttaaaaacccaccccgcccgaaaaccccctccccccgaatccaaaaccaaacgctctcctttcgcaactcaactaaat

SEQ ID NO: 4167 - DNA, 974 bp, Artificial Sequence
  chemically treated genomic DNA (Homo sapiens) CpG-island No: 4167
gtttaggatgttttaggttttattttaggacgtagggttttgaggagttatttcggtttttcgcgggtttagttttcgaagtgatagagtagttcgcgttagagcgtagaatttcgggatttggttagttttcgagttttagggcgtagggtgtttaagtcgattattttattcggcgtggttgtttttcgcgtttatttttttagttcggtttttattttcgcgaagtcgtagtagatttgagacgttggcggatatttcgttgtcgtttcggttcgcggtttttttttttaggtttttggaagcggttagtttatagatcggttggtcgaggtttaaggattttttcgtaaggtcggtttcgttggtttttcgcgcgttcgcgtagcgtcgtttgttttcgtttttttcgttgagcgcggagttcgagttttagtttttcgggtttttcgtagttcgtttcgtagttgttttggtatcggtaggagacgttagtagagagttttcggcgttttttaacgcgttcgcgtttttttttttaaagagtcgttaatagtagatagcgggagtcgcggttatcgatgtcgttgtgttttcgggcgtcgggcgtttttttggcgcggttagttcgtcgcgttttttttttttgttgaggatcgtttggatggagaaggacgttaaggtgttggcgtcgcgtatagttatttgcgtcgcgggtaggagcggtcggcggggcgggtagttggggcgtcgagtagtttcgagcgggatagagagcgtcggcggtcgtagcgcgagtgagttgggtgtgcgaggtcgtcgtcgtttattgttgcgcggtttagtagttttcgttttatttcgttttaggattagcgtcgattttcgtttttattttagaggtttatttcgttcggagatttttttttttcgaatttagagttagacgtttttttttcgtagtttagttggat

SEQ ID NO: 4168 - DNA, 974 bp, Artificial Sequence
  chemically treated genomic DNA (Homo sapiens) CpG-island No: 4168
atccaactaaactacgaaaaaaaaacgtctaactctaaattcgaaaaaaaaaaatctccgaacgaaataaacctctaaaataaaaacgaaaatcgacgctaatcctaaaacgaaataaaacgaaaactactaaaccgcgcaacaataaacgacgacgacctcgcacacccaactcactcgcgctacgaccgccgacgctctctatcccgctcgaaactactcgacgccccaactacccgccccgccgaccgctcctacccgcgacgcaaataactatacgcgacgccaacaccttaacgtccttctccatccaaacgatcctcaacaaaaaaaaaaaacgcgacgaactaaccgcgccaaaaaaacgcccgacgcccgaaaacacaacgacatcgataaccgcgactcccgctatctactattaacgactctttaaaaaaaaaaacgcgaacgcgttaaaaaacgccgaaaactctctactaacgtctcctaccgataccaaaacaactacgaaacgaactacgaaaaacccgaaaaactaaaactcgaactccgcgctcaacgaaaaaaacgaaaacaaacgacgctacgcgaacgcgcgaaaaaccaacgaaaccgaccttacgaaaaaatccttaaacctcgaccaaccgatctataaactaaccgcttccaaaaacctaaaaaaaaaaaccgcgaaccgaaacgacaacgaaatatccgccaacgtctcaaatctactacgacttcgcgaaaataaaaaccgaactaaaaaaataaacgcgaaaaacaaccacgccgaataaaataatcgacttaaacaccctacgccctaaaactcgaaaactaaccaaatcccgaaattctacgctctaacgcgaactactctatcacttcgaaaactaaacccgcgaaaaaccgaaataactcctcaaaaccctacgtcctaaaataaaacctaaaacatcctaaac

SEQ ID NO: 4169 - DNA, 542 bp, Artificial Sequence
  chemically treated genomic DNA (Homo sapiens) CpG-island No: 4169
tttttatcggggttcgtaggcgatcgtagtttaaggatcgaggacgacggtgttggttttagaggtgtatacgtgttcgcgttgtgtagcggggtcggcggcgggggcggtagcgggtcggtaggcgtcgcggaggaggaggaggagtcggcggcgtttaagttacgtaagaagcgttcgcgggtcgtttttttttacgcgtaggttttcgagttggagcgtcgttttaattattagcgttatttgttcgggttcgagcgcgtagatttggtcgcgtcgttgaagtttatcgagacgtaggtgaaaatttggttttagaatcgtcgttataagataaagcgtcggtagatggtagtcgatttgttggtttcggcgttcgtcgttaagaaggtggtcgtaaaggtgttggtgcgcgacgattagagataatatttgttcggcgaagtgttgcggttattttcgtttttgttattgtagtttttttattattattcgtattattgttttttaggttgggcgttttttatttgcgtagttgtcgt

SEQ ID NO: 4170 - DNA, 542 bp, Artificial Sequence
  chemically treated genomic DNA (Homo sapiens) CpG-island No: 4170
acgacaactacgcaaataaaaaacgcccaacctaaaaaacaataatacgaataataataaaaaaactacaataacaaaaacgaaaataaccgcaacacttcgccgaacaaatattatctctaatcgtcgcgcaccaacacctttacgaccaccttcttaacgacgaacgccgaaaccaacaaatcgactaccatctaccgacgctttatcttataacgacgattctaaaaccaaattttcacctacgtctcgataaacttcaacgacgcgaccaaatctacgcgctcgaacccgaacaaataacgctaataattaaaacgacgctccaactcgaaaacctacgcgtaaaaaaaaacgacccgcgaacgcttcttacgtaacttaaacgccgccgactcctcctcctcctccgcgacgcctaccgacccgctaccgcccccgccgccgaccccgctacacaacgcgaacacgtatacacctctaaaaccaacaccgtcgtcctcgatccttaaactacgatcgcctacgaaccccgataaaaa

SEQ ID NO: 4171 - DNA, 542 bp, Artificial Sequence
  chemically treated genomic DNA (Homo sapiens) CpG-island No: 4171
gcggtagttgcgtaggtggagagcgtttagtttgggaggtagtagtacgggtaatagtaggagggttgtagtggtagaagcgagggtggtcgtagtatttcgtcgggtaggtattgtttttggtcgtcgcgtattagtatttttacggttatttttttggcggcgggcgtcgaggttagtaggtcggttgttatttgtcggcgttttgttttgtagcgacggttttggaattagatttttatttgcgtttcggtgagttttagcgacgcggttaggtttgcgcgttcgggttcggataggtagcgttggtggttaaagcggcgttttagttcgaagatttgcgcgtgggagaaagcggttcgcgagcgttttttgcgtggtttgggcgtcgtcggtttttttttttttttcgcgacgtttgtcggttcgttgtcgttttcgtcgtcggtttcgttgtatagcgcggatacgtgtgtatttttggggttaatatcgtcgttttcggtttttgggttgcggtcgtttgcggatttcggtgggaa

SEQ ID NO: 4172 - DNA, 542 bp, Artificial Sequence
  chemically treated genomic DNA (Homo sapiens) CpG-island No: 4172
ttcccaccgaaatccgcaaacgaccgcaacccaaaaaccgaaaacgacgatattaaccccaaaaatacacacgtatccgcgctatacaacgaaaccgacgacgaaaacgacaacgaaccgacaaacgtcgcgaaaaaaaaaaaaaaaccgacgacgcccaaaccacgcaaaaaacgctcgcgaaccgctttctcccacgcgcaaatcttcgaactaaaacgccgctttaaccaccaacgctacctatccgaacccgaacgcgcaaacctaaccgcgtcgctaaaactcaccgaaacgcaaataaaaatctaattccaaaaccgtcgctacaaaacaaaacgccgacaaataacaaccgacctactaacctcgacgcccgccgccaaaaaaataaccgtaaaaatactaatacgcgacgaccaaaaacaatacctacccgacgaaatactacgaccaccctcgcttctaccactacaaccctcctactattacccgtactactacctcccaaactaaacgctctccacctacgcaactaccgc

SEQ ID NO: 4173 - DNA, 738 bp, Artificial Sequence
  chemically treated genomic DNA (Homo sapiens) CpG-island No: 4173
ttcgtcgttcgttcgttcggtatagagttcgtttcgttttttttagttcgtttttttagtacgtttttttttttcgatttcgttaagtttcgcggttttttttttttttttatcgttttagcggcggttagcggcggtatcggttgggttttcgatattataatttttaggagtagtcgtcgtttttttatagtattaggcgagtcgttgcgttagcgttaattttaatttttagtttgttttatttttttttttcgtttttttttttcgtcggaattcgtcgtcgtcgtcgtcgtcgtcgtcgttttaggaatatagttagtttttcgttcgttttgttttttttttttcggtttttttttttttttatttttcgttagtagtcgtagtcgtagtcgtagtcgtttttttttacgggcgcgttttcgtcgttatttagatgcgcggtttcgcgttgcggtttcgttttaagcgttgcgttcgtagatgtattttcgttcgtttttcggttacgtttttaagttcgtttcgtcggttttagtttcgtttggagtggttggaaggtattttagcgggcggtttggagatttgattttattttcggggcgtggtttcgttcggggtgtttagaggtcggagtatcgttgggaggagagttggtttatttggaggagggaatgcgattttgagcgggttaagttttagtgggttagagtaggattttgatggaatttgcgg

SEQ ID NO: 4174 - DNA, 738 bp, Artificial Sequence
  chemically treated genomic DNA (Homo sapiens) CpG-island No: 4174
ccgcaaattccatcaaaatcctactctaacccactaaaacttaacccgctcaaaatcgcattccctcctccaaataaaccaactctcctcccaacgatactccgacctctaaacaccccgaacgaaaccacgccccgaaaataaaatcaaatctccaaaccgcccgctaaaataccttccaaccactccaaacgaaactaaaaccgacgaaacgaacttaaaaacgtaaccgaaaaacgaacgaaaatacatctacgaacgcaacgcttaaaacgaaaccgcaacgcgaaaccgcgcatctaaataacgacgaaaacgcgcccgtaaaaaaaaacgactacgactacgactacgactactaacgaaaaataaaaaaaaaaaaaaaccgaaaaaaaaaaaacaaaacgaacgaaaaactaactatattcctaaaacgacgacgacgacgacgacgacgacgaattccgacgaaaaaaaaaaacgaaaaaaaaaaataaaacaaactaaaaattaaaattaacgctaacgcaacgactcgcctaatactataaaaaaacgacgactactcctaaaaattataatatcgaaaacccaaccgataccgccgctaaccgccgctaaaacgataaaaaaaaaaaaaaaaccgcgaaacttaacgaaatcgaaaaaaaaaaacgtactaaaaaaacgaactaaaaaaaacgaaacgaactctataccgaacgaacgaacgacgaa

SEQ ID NO: 4175 - DNA, 738 bp, Artificial Sequence
  chemically treated genomic DNA (Homo sapiens) CpG-island No: 4175
tcgtaaattttattagaattttattttgatttattagggtttggttcgtttagagtcgtatttttttttttaaatgaattaattttttttttagcgatatttcgatttttgagtatttcgggcggggttacgtttcggaaatggagttaggtttttaggtcgttcgttgaagtgttttttagttattttaagcggggttggggtcggcggggcgggtttgggggcgtggtcgggaggcgggcggggatgtatttgcgggcgtagcgtttggggcggagtcgtagcgcgaggtcgcgtatttgggtggcggcggggacgcgttcgtggggagaggcggttgcggttgcggttgcggttgttggcggggggtgggggggaggaggaatcgggaaggggggggtagggcgagcggagagttagttgtgtttttgaggcggcggcggcggcggcggcggcggcgggtttcgacggaggaggagggcggggaaggaggatggagtaagttgggggttggggttggcgttagcgtagcggttcgtttggtattgtgggagagcggcggttgtttttggaagttgtggtgtcgggagtttagtcggtgtcgtcgttagtcgtcgttagggcggtggggaggaggagggagtcgcggggtttggcggggtcgggagggagggacgtgttgggggaacgagttggggaagacggagcgggttttgtgtcgggcgggcgggcggcggg

SEQ ID NO: 4176 - DNA, 738 bp, Artificial Sequence
  chemically treated genomic DNA (Homo sapiens) CpG-island No: 4176
cccgccgcccgcccgcccgacacaaaacccgctccgtcttccccaactcgttcccccaacacgtccctccctcccgaccccgccaaaccccgcgactccctcctcctccccaccgccctaacgacgactaacgacgacaccgactaaactcccgacaccacaacttccaaaaacaaccgccgctctcccacaataccaaacgaaccgctacgctaacgccaaccccaacccccaacttactccatcctccttccccgccctcctcctccgtcgaaacccgccgccgccgccgccgccgccgccgcctcaaaaacacaactaactctccgctcgccctaccccccccttcccgattcctcctcccccccaccccccgccaacaaccgcaaccgcaaccgcaaccgcctctccccacgaacgcgtccccgccgccacccaaatacgcgacctcgcgctacgactccgccccaaacgctacgcccgcaaatacatccccgcccgcctcccgaccacgcccccaaacccgccccgccgaccccaaccccgcttaaaataactaaaaaacacttcaacgaacgacctaaaaacctaactccatttccgaaacgtaaccccgcccgaaatactcaaaaatcgaaatatcgctaaaaaaaaaattaattcatttaaaaaaaaaaatacgactctaaacgaaccaaaccctaataaatcaaaataaaattctaataaaatttacga

SEQ ID NO: 4177 - DNA, 1142 bp, Artificial Sequence
  chemically treated genomic DNA (Homo sapiens) CpG-island No: 4177
tgtttcgcgtttgtacgcgtacgtatatatttatatatattcgtatagatatatttatatatagatatataagcgcgtatatatatatacgcgcgcgcgcggatatatatatatttatattcgcgtttcgagggatttagtacggcgtagggcgggggtttatcggttttttgtaggttttcgaggcgcgagacggcggcgttcgggtttagttttgggagttagttcgagttcgggaggaacgtttggatcgcgttttgtatagtttcgggattaggcgggaatttagattttcgtttgtagagtcgtttttttcgttaggtttaggtcgcgcgagtcgttttttttttttttcgcgcgttttttttttcgttttttttttttttttagttcgattttgtattttttggttcggttcggttttattttttcgcgggcggcgttacgcgggttttggggcgtattttgggggtttcggggcgggtcgggacggttggcggcgcggttcgggggcgggcggcggcgggtgtcggggacgttatggtttttcgtttttcgtttttttgttcgtcgagtttttttcggtcgttcgtaagtttttgggggtttttcgttcgcgcgcgtttttcgtggggttttcgtcgttttcggttttagcggcgcgtttttttcggtcggtttagcgtaggttcgttcgcggtttttgtttttttttgtcgtggtttcgcgacgatttgcgcgacgcgtttttttttttcgatttatttcgttcggtttagtgagttaattcgtagttggcggtcgttcggtcgggttgttacggtaattttttttttagggttcggttcgcgcggagttgcggtaaataggattttttgtcggattcgttttttcgtttttcggggtgggggagaggtggtttaattttttttgggaggacgttcgtcgcgcgcgggttttattttatttaggttcgggcggattcgcgaggtgttttcggtttgaggtttagatttggacgtttaagtttggggaacggcgtcgcgtgttcggtttcgtttattttaggtagttaatatattttcggtatcgggtcggggtcgggggtatttcgggtagtgagttaggtattatttttgttt

SEQ ID NO: 4178 - DNA, 1142 bp, Artificial Sequence
  chemically treated genomic DNA (Homo sapiens) CpG-island No: 4178
aaacaaaaataatacctaactcactacccgaaatacccccgaccccgacccgataccgaaaatatattaactacctaaaataaacgaaaccgaacacgcgacgccgttccccaaacttaaacgtccaaatctaaacctcaaaccgaaaacacctcgcgaatccgcccgaacctaaataaaataaaacccgcgcgcgacgaacgtcctcccaaaaaaaattaaaccacctctcccccaccccgaaaaacgaaaaaacgaatccgacaaaaaatcctatttaccgcaactccgcgcgaaccgaaccctaaaaaaaaaattaccgtaacaacccgaccgaacgaccgccaactacgaattaactcactaaaccgaacgaaataaatcgaaaaaaaaaaacgcgtcgcgcaaatcgtcgcgaaaccacgacaaaaaaaaacaaaaaccgcgaacgaacctacgctaaaccgaccgaaaaaaacgcgccgctaaaaccgaaaacgacgaaaaccccacgaaaaacgcgcgcgaacgaaaaacccccaaaaacttacgaacgaccgaaaaaaactcgacgaacaaaaaaacgaaaaacgaaaaaccataacgtccccgacacccgccgccgcccgcccccgaaccgcgccgccaaccgtcccgacccgccccgaaacccccaaaatacgccccaaaacccgcgtaacgccgcccgcgaaaaaataaaaccgaaccgaaccaaaaaatacaaaatcgaactaaaaaaaaaaaaaaaacgaaaaaaaaaacgcgcgaaaaaaaaaaaaaacgactcgcgcgacctaaacctaacgaaaaaaacgactctacaaacgaaaatctaaattcccgcctaatcccgaaactatacaaaacgcgatccaaacgttcctcccgaactcgaactaactcccaaaactaaacccgaacgccgccgtctcgcgcctcgaaaacctacaaaaaaccgataaacccccgccctacgccgtactaaatccctcgaaacgcgaatataaatatatatatatccgcgcgcgcgcgtatatatatatacgcgcttatatatctatatataaatatatctatacgaatatatataaatatatacgtacgcgtacaaacgcgaaaca

SEQ ID NO: 4179 - DNA, 1142 bp, Artificial Sequence
  chemically treated genomic DNA (Homo sapiens) CpG-island No: 4179
gggtaagggtggtgtttgatttattgttcgaggtgttttcggtttcggttcggtgtcgagagtgtgttaattgtttagagtaagcggggtcgggtacgcggcgtcgttttttaggtttggacgtttaggtttaagttttaggtcggaagtatttcgcgaattcgttcgggtttgggtggaatggagttcgcgcgcggcgggcgtttttttaggaagggttaagttattttttttttatttcgagaggcgagggggcgagttcggtagaaggttttgtttatcgtagtttcgcgcgggtcgggttttgggagaggagttgtcgtggtaattcggtcgggcgatcgttagttgcggattagtttattgggtcgggcgggatgggtcgggaggagggggcgcgtcgcgtagatcgtcgcggagttacggtaggaggaggtaggggtcgcgggcgagtttgcgttgggtcggtcgagggaagcgcgtcgttggggtcgggggcggcggggattttacgggagacgcgcgcggacggggaatttttaggggtttgcgggcggtcgggggaggttcggcggataaaggggcggagggcggagggttatggcgttttcggtattcgtcgtcgttcgttttcgagtcgcgtcgttagtcgtttcggttcgtttcggagtttttaagatgcgttttagagttcgcgtagcgtcgttcgcggggaggtagggtcgggtcgggttagggggtgtagggtcgagttggggagggaaaggggacggaggaggggacgcgcgggggagggaggaaacggttcgcgcggtttgagtttgacgggggaagcggttttgtagacgggagtttgagttttcgtttggtttcgggattgtgtagagcgcgatttaggcgtttttttcgggttcgggttgatttttaggattgagttcggacgtcgtcgtttcgcgtttcggggatttgtagaaagtcggtagattttcgttttgcgtcgtgttgggtttttcggggcgcgagtgtgagtgtgtgtgtgttcgcgcgcgcgcgtgtgtgtgtgtgcgcgtttgtgtgtttgtgtgtgagtgtgtttgtgcgagtgtgtgtgagtgtgtgcgtgcgcgtgtaagcgcggggta

SEQ ID NO: 4180 - DNA, 1142 bp, Artificial Sequence
  chemically treated genomic DNA (Homo sapiens) CpG-island No: 4180
taccccgcgcttacacgcgcacgcacacactcacacacactcgcacaaacacactcacacacaaacacacaaacgcgcacacacacacacgcgcgcgcgcgaacacacacacactcacactcgcgccccgaaaaacccaacacgacgcaaaacgaaaatctaccgactttctacaaatccccgaaacgcgaaacgacgacgtccgaactcaatcctaaaaatcaacccgaacccgaaaaaaacgcctaaatcgcgctctacacaatcccgaaaccaaacgaaaactcaaactcccgtctacaaaaccgcttcccccgtcaaactcaaaccgcgcgaaccgtttcctccctcccccgcgcgtcccctcctccgtcccctttccctccccaactcgaccctacaccccctaacccgacccgaccctacctccccgcgaacgacgctacgcgaactctaaaacgcatcttaaaaactccgaaacgaaccgaaacgactaacgacgcgactcgaaaacgaacgacgacgaataccgaaaacgccataaccctccgccctccgcccctttatccgccgaacctcccccgaccgcccgcaaacccctaaaaattccccgtccgcgcgcgtctcccgtaaaatccccgccgcccccgaccccaacgacgcgcttccctcgaccgacccaacgcaaactcgcccgcgacccctacctcctcctaccgtaactccgcgacgatctacgcgacgcgccccctcctcccgacccatcccgcccgacccaataaactaatccgcaactaacgatcgcccgaccgaattaccacgacaactcctctcccaaaacccgacccgcgcgaaactacgataaacaaaaccttctaccgaactcgccccctcgcctctcgaaataaaaaaaaaataacttaacccttcctaaaaaaacgcccgccgcgcgcgaactccattccacccaaacccgaacgaattcgcgaaatacttccgacctaaaacttaaacctaaacgtccaaacctaaaaaacgacgccgcgtacccgaccccgcttactctaaacaattaacacactctcgacaccgaaccgaaaccgaaaacacctcgaacaataaatcaaacaccacccttaccc

SEQ ID NO: 4181 - DNA, 620 bp, Artificial Sequence
  chemically treated genomic DNA (Homo sapiens) CpG-island No: 4181
ggagacgcgttagggcgttattattttttcgaggttcgcgtttaggcggttcgttttttattttagaggcgttcgtttaggcgaggttgcggtgaagcgaagttcggttttgattcgcggacggagttcgtatttggtcggaatatcgtttcgttttttttagtatttcgtttgtttttaggtcggaggattcgcgtttcgttcgatattcgtcgcgtcgcgtcgcgtcgcgcggaaggggttgttagacggtattaattgcggaacgggaggagttaggatttacgcgaagttaggtttcgggcgttcgcgatttgagcgagggggtcgcgcgggcggaggtaggggtcgggtagtcgtagggttatcgtgcgtttaggggttagtatgagatcgttggggtggcgggtattagtttagggcgcgggcgtaggcgggggtcgggagggcggggcggagcgtggagggcgggcggagcgtcgggggcggagcgtcgggggcgggcgggagtgtaggtgtagggaatcgaggtatcgagggttgtggtggagcggaggggcgcgggagatggatgggacgggttcggttattaggttgaaatcgttattgtaaaattataa

SEQ ID NO: 4182 - DNA, 620 bp, Artificial Sequence
  chemically treated genomic DNA (Homo sapiens) CpG-island No: 4182
ttataattttacaataacgatttcaacctaataaccgaacccgtcccatccatctcccgcgcccctccgctccaccacaaccctcgatacctcgattccctacacctacactcccgcccgcccccgacgctccgcccccgacgctccgcccgccctccacgctccgccccgccctcccgacccccgcctacgcccgcgccctaaactaatacccgccaccccaacgatctcatactaacccctaaacgcacgataaccctacgactacccgacccctacctccgcccgcgcgaccccctcgctcaaatcgcgaacgcccgaaacctaacttcgcgtaaatcctaactcctcccgttccgcaattaataccgtctaacaaccccttccgcgcgacgcgacgcgacgcgacgaatatcgaacgaaacgcgaatcctccgacctaaaaacaaacgaaatactaaaaaaaacgaaacgatattccgaccaaatacgaactccgtccgcgaatcaaaaccgaacttcgcttcaccgcaacctcgcctaaacgaacgcctctaaaataaaaaacgaaccgcctaaacgcgaacctcgaaaaaataataacgccctaacgcgtctcc

SEQ ID NO: 4183 - DNA, 620 bp, Artificial Sequence
  chemically treated genomic DNA (Homo sapiens) CpG-island No: 4183
ttataattttgtaatggcggttttaatttagtggtcgaattcgttttatttatttttcgcgttttttcgttttattatagttttcggtgtttcggttttttgtatttgtattttcgttcgttttcgacgtttcgttttcgacgtttcgttcgttttttacgtttcgtttcgttttttcggttttcgtttgcgttcgcgttttgggttggtgttcgttattttagcgattttatattggtttttgggcgtacggtgattttgcggttgttcggtttttgttttcgttcgcgcggttttttcgtttaggtcgcgggcgttcggggtttggtttcgcgtgggttttggtttttttcgtttcgtagttggtgtcgtttgatagtttttttcgcgcggcgcggcgcggcgcggcgggtgtcgggcggggcgcgggtttttcggtttgaggataggcgaggtgttggagggagcggggcggtatttcggttagatgcgagtttcgttcgcgggttagggtcgggtttcgttttatcgtagtttcgtttgagcgggcgtttttgaagtggagggcgggtcgtttgggcgcgggtttcgggaggatggtggcgttttggcgcgttttt

SEQ ID NO: 4184 - DNA, 620 bp, Artificial Sequence
  chemically treated genomic DNA (Homo sapiens) CpG-island No: 4184
aaaaacgcgccaaaacgccaccatcctcccgaaacccgcgcccaaacgacccgccctccacttcaaaaacgcccgctcaaacgaaactacgataaaacgaaacccgaccctaacccgcgaacgaaactcgcatctaaccgaaataccgccccgctccctccaacacctcgcctatcctcaaaccgaaaaacccgcgccccgcccgacacccgccgcgccgcgccgcgccgcgcgaaaaaaactatcaaacgacaccaactacgaaacgaaaaaaaccaaaacccacgcgaaaccaaaccccgaacgcccgcgacctaaacgaaaaaaccgcgcgaacgaaaacaaaaaccgaacaaccgcaaaatcaccgtacgcccaaaaaccaatataaaatcgctaaaataacgaacaccaacccaaaacgcgaacgcaaacgaaaaccgaaaaaacgaaacgaaacgtaaaaaacgaacgaaacgtcgaaaacgaaacgtcgaaaacgaacgaaaatacaaatacaaaaaaccgaaacaccgaaaactataataaaacgaaaaaacgcgaaaaataaataaaacgaattcgaccactaaattaaaaccgccattacaaaattataa

SEQ ID NO: 4185 - DNA, 508 bp, Artificial Sequence
  chemically treated genomic DNA (Homo sapiens) CpG-island No: 4185
tttatatcgtatatttttagagcgtcgtgtgacgtttttagtttcgttagtaaaacggattcggtattttaatttttttcggagggaaaatgtacgagttagggtcgcgtttttcgtcgttttggtatatagaatgttttcgggaatcgtttatacgagttcggggtcgtttttttttttcggcggcggtcgcgcggagttcgtttttttcggatatcgtttttaaagtgttcgcgtggtttcgcgatttagtcgttttaagttcgttcgtggtcgtttagtcgcgaaagtgtttcgtatttggcggatcgggagtggcgatcgttcgtttcggtacgtatttagttagcggttgtagcggttttggcgcgtttttttcgaggattgtttagttttaatttcgaagcgacggttttcggtttttttttttttggcggttgtaggagtcgggacgttttcgttttatcgagggggaagggaaggtggtgggcgcgtttttttttttttt

SEQ ID NO: 4186 - DNA, 508 bp, Artificial Sequence
  chemically treated genomic DNA (Homo sapiens) CpG-island No: 4186
aaaaaaaaaaaaaacgcgcccaccaccttcccttccccctcgataaaacgaaaacgtcccgactcctacaaccgccaaaaaaaaaaaaaccgaaaaccgtcgcttcgaaattaaaactaaacaatcctcgaaaaaaacgcgccaaaaccgctacaaccgctaactaaatacgtaccgaaacgaacgatcgccactcccgatccgccaaatacgaaacactttcgcgactaaacgaccacgaacgaacttaaaacgactaaatcgcgaaaccacgcgaacactttaaaaacgatatccgaaaaaaacgaactccgcgcgaccgccgccgaaaaaaaaaaacgaccccgaactcgtataaacgattcccgaaaacattctatataccaaaacgacgaaaaacgcgaccctaactcgtacattttccctccgaaaaaaattaaaataccgaatccgttttactaacgaaactaaaaacgtcacacgacgctctaaaaatatacgatataaa

SEQ ID NO: 4187 - DNA, 508 bp, Artificial Sequence
  chemically treated genomic DNA (Homo sapiens) CpG-island No: 4187
ggagggagagagagcgcgtttattatttttttttttttttcgatggagcgggggcgtttcggtttttgtagtcgttagaggagggagagtcgggggtcgtcgtttcggagttggggttgagtagttttcggggagagcgcgttaagatcgttgtagtcgttggttgagtacgtatcggagcggacggtcgttattttcggttcgttaagtgcgggatattttcgcggttgagcggttacgggcgaatttggggcggttgagtcgcggggttacgcgggtattttgggggcggtgttcgggggaagcgggtttcgcgcggtcgtcgtcggaaggagagggcggtttcgggttcgtgtgggcgattttcggagatattttgtgtgttagggcggcggggagcgcggttttgattcgtgtatttttttttcgagaaaggttggggtgtcgagttcgttttgttaacggggttgggggcgttatacggcgttttgggggtgtgcgatgtggg

SEQ ID NO: 4188 - DNA, 508 bp, Artificial Sequence
  chemically treated genomic DNA (Homo sapiens) CpG-island No: 4188
cccacatcgcacacccccaaaacgccgtataacgcccccaaccccgttaacaaaacgaactcgacaccccaacctttctcgaaaaaaaaatacacgaatcaaaaccgcgctccccgccgccctaacacacaaaatatctccgaaaatcgcccacacgaacccgaaaccgccctctccttccgacgacgaccgcgcgaaacccgcttcccccgaacaccgcccccaaaatacccgcgtaaccccgcgactcaaccgccccaaattcgcccgtaaccgctcaaccgcgaaaatatcccgcacttaacgaaccgaaaataacgaccgtccgctccgatacgtactcaaccaacgactacaacgatcttaacgcgctctccccgaaaactactcaaccccaactccgaaacgacgacccccgactctccctcctctaacgactacaaaaaccgaaacgcccccgctccatcgaaaaaaaaaaaaaaataataaacgcgctctctctccctcc

SEQ ID NO: 4189 - DNA, 578 bp, Artificial Sequence
  chemically treated genomic DNA (Homo sapiens) CpG-island No: 4189
tcgggttcgcgtttttttcgtttatcgttcgacgtagttcgttttgcgcgggggcgtaggcggtttttttagcgttgcggcgtttcgcgcgtcggtcgggtaggttttttttcgtcgtgtttgttatttttttttttgtttttttcgagcgagttatatttttatttttttttttcgttcgatttcgtcgtttttatttttatattcggggttgttatattgggagattttttttttgttatattcgtcgtttcgttttcgtttacgcgcggtcgagtgacgtagatttcgacgtgggtcgcgtcgggcgggggcgggggcgtcgttgggttacggttcggttttttttcgtcgtttttttcgcggaattcggaggacggtttatttatacggtagttgggaggaattaagtgggcgtcgggagtgggcggttttcgcgagtttcgtttcgggcgcggggaggggacgataaagagggagacgggtggggaacgtcgttttcggtttgttttttagttgcggagtgaattgggaaggtttgtaattaaaaaaaaaaaattatgtgtgaggttttcgat

SEQ ID NO: 4190 - DNA, 578 bp, Artificial Sequence
  chemically treated genomic DNA (Homo sapiens) CpG-island No: 4190
atcgaaaacctcacacataattttttttttttaattacaaaccttcccaattcactccgcaactaaaaaacaaaccgaaaacgacgttccccacccgtctccctctttatcgtcccctccccgcgcccgaaacgaaactcgcgaaaaccgcccactcccgacgcccacttaattcctcccaactaccgtataaataaaccgtcctccgaattccgcgaaaaaaacgacgaaaaaaaaccgaaccgtaacccaacgacgcccccgcccccgcccgacgcgacccacgtcgaaatctacgtcactcgaccgcgcgtaaacgaaaacgaaacgacgaatataacaaaaaaaaaatctcccaatataacaaccccgaatataaaaataaaaacgacgaaatcgaacgaaaaaaaaaaataaaaatataactcgctcgaaaaaaacaaaaaaaaaaataacaaacacgacgaaaaaaaacctacccgaccgacgcgcgaaacgccgcaacgctaaaaaaaccgcctacgcccccgcgcaaaacgaactacgtcgaacgataaacgaaaaaaacgcgaacccga

SEQ ID NO: 4191 - DNA, 578 bp, Artificial Sequence
  chemically treated genomic DNA (Homo sapiens) CpG-island No: 4191
atcgggaattttatatataattttttttttttaattgtaaatttttttagtttatttcgtagttggagagtaggtcggaggcggcgttttttattcgtttttttttttgtcgtttttttttcgcgttcggagcgggattcgcgggagtcgtttattttcggcgtttatttggttttttttagttgtcgtgtgaatgggtcgtttttcggatttcgcggagggggcggcgggaaggggtcgagtcgtagtttagcggcgttttcgttttcgttcggcgcgatttacgtcgggatttgcgttattcggtcgcgcgtgggcggaagcggagcggcgaatgtagtaagaggggaattttttaatgtgataatttcggatgtgggagtggaggcggcggagtcgggcgggggagggggatgaaggtgtagttcgttcggggaaggtaggggaagggatggtaagtacggcgggggaggatttgttcggtcggcgcgcggagcgtcgtagcgttggaggagtcgtttgcgttttcgcgtagagcgagttgcgtcgggcggtgggcggaagaagcgcgggttcga

SEQ ID NO: 4192 - DNA, 578 bp, Artificial Sequence
  chemically treated genomic DNA (Homo sapiens) CpG-island No: 4192
tcgaacccgcgcttcttccgcccaccgcccgacgcaactcgctctacgcgaaaacgcaaacgactcctccaacgctacgacgctccgcgcgccgaccgaacaaatcctcccccgccgtacttaccatcccttcccctaccttccccgaacgaactacaccttcatccccctcccccgcccgactccgccgcctccactcccacatccgaaattatcacattaaaaaattcccctcttactacattcgccgctccgcttccgcccacgcgcgaccgaataacgcaaatcccgacgtaaatcgcgccgaacgaaaacgaaaacgccgctaaactacgactcgaccccttcccgccgccccctccgcgaaatccgaaaaacgacccattcacacgacaactaaaaaaaaccaaataaacgccgaaaataaacgactcccgcgaatcccgctccgaacgcgaaaaaaaaacgacaaaaaaaaaaacgaataaaaaacgccgcctccgacctactctccaactacgaaataaactaaaaaaatttacaattaaaaaaaaaaaattatatataaaattcccgat

SEQ ID NO: 4193 - DNA, 693 bp, Artificial Sequence
  chemically treated genomic DNA (Homo sapiens) CpG-island No: 4193
tttttcgtagacggagttaagttggattgtcgcgtcgcgcggggcgggtaaagggggcgttgcgttcggtttcgggtagggagtgacggcggcggcggcggtttcgggcgagcgtggttttcgcgtgcgtatacgtatacgtcgtcgcgtagggatatacggatttcggtcgttagtcggttatataggcgcggagattcggttcggcgcgcgtttttcggcgatacgttttttattttcgcgtcgcgcgggtcgcggatttgtaggttgcgcgttttttgcggagtttgtttcggttttacggataggtttcgtagtgagtaggtaagggtcgtttcgtcgcggttgtttttttacgtttcggtcgttttttttttttttagaattttcgtttagtcgggatttcggatttttttttttggtttggcggttttcgttagtcgcgatttttatcgacggagagcgggcgagggtcggcgttaggtaagttttttagatttgaaatgaagttttttttcgtcgttgcgttttttttgcgcgttaggttgatattttttaatttaagtgtttggcgttgcgttcggggcggtcgatcgtcgtagattgtcggggtgggggtcgatttagttattttacgttttttttgatgcggagaagggagattaggggggtaggtaagttatgcggtcggag

SEQ ID NO: 4194 - DNA, 693 bp, Artificial Sequence
  chemically treated genomic DNA (Homo sapiens) CpG-island No: 4194
ctccgaccgcataacttacctacccccctaatctcccttctccgcatcaaaaaaaacgtaaaataactaaatcgacccccaccccgacaatctacgacgatcgaccgccccgaacgcaacgccaaacacttaaattaaaaaatatcaacctaacgcgcaaaaaaaacgcaacgacgaaaaaaaacttcatttcaaatctaaaaaacttacctaacgccgaccctcgcccgctctccgtcgataaaaatcgcgactaacgaaaaccgccaaaccaaaaaaaaaaatccgaaatcccgactaaacgaaaattctaaaaaaaaaaaaaacgaccgaaacgtaaaaaaacaaccgcgacgaaacgacccttacctactcactacgaaacctatccgtaaaaccgaaacaaactccgcaaaaaacgcgcaacctacaaatccgcgacccgcgcgacgcgaaaataaaaaacgtatcgccgaaaaacgcgcgccgaaccgaatctccgcgcctatataaccgactaacgaccgaaatccgtatatccctacgcgacgacgtatacgtatacgcacgcgaaaaccacgctcgcccgaaaccgccgccgccgccgtcactccctacccgaaaccgaacgcaacgccccctttacccgccccgcgcgacgcgacaatccaacttaactccgtctacgaaaaa

SEQ ID NO: 4195 - DNA, 693 bp, Artificial Sequence
  chemically treated genomic DNA (Homo sapiens) CpG-island No: 4195
tttcggtcgtatggtttgtttgtttttttggtttttttttttcgtattaggaggggcgtgagatagttaggtcgatttttatttcggtagtttgcggcgatcggtcgtttcgagcgtagcgttagatatttgggttggggggtgttagtttgacgcgtaggaagggcgtagcggcgggagggggttttattttagatttgggaggtttgtttggcgtcggttttcgttcgtttttcgtcggtggaggtcgcggttggcggagatcgttaagttagaggaggggattcgaggtttcggttgggcgaaggttttggagggggagaagacggtcgaggcgtggaggggtagtcgcggcggggcgatttttatttgtttattgcggggtttgttcgtggggtcggggtagatttcgtaaaggacgcgtagtttgtaagttcgcggttcgcgcggcgcggggatggggagcgtgtcgtcgaggagcgcgcgtcgagtcgggttttcgcgtttgtgtggtcggttggcggtcggggttcgtgtgtttttgcgcggcggcgtgtgcgtgtgcgtacgcggggattacgttcgttcggagtcgtcgtcgtcgtcgttattttttgttcggggtcgagcgtagcgttttttttgttcgtttcgcgcggcgcggtagtttagtttggtttcgtttgcgggaag

SEQ ID NO: 4196 - DNA, 693 bp, Artificial Sequence
  chemically treated genomic DNA (Homo sapiens) CpG-island No: 4196
cttcccgcaaacgaaaccaaactaaactaccgcgccgcgcgaaacgaacaaaaaaaacgctacgctcgaccccgaacaaaaaataacgacgacgacgacgactccgaacgaacgtaatccccgcgtacgcacacgcacacgccgccgcgcaaaaacacacgaaccccgaccgccaaccgaccacacaaacgcgaaaacccgactcgacgcgcgctcctcgacgacacgctccccatccccgcgccgcgcgaaccgcgaacttacaaactacgcgtcctttacgaaatctaccccgaccccacgaacaaaccccgcaataaacaaataaaaatcgccccgccgcgactacccctccacgcctcgaccgtcttctccccctccaaaaccttcgcccaaccgaaacctcgaatcccctcctctaacttaacgatctccgccaaccgcgacctccaccgacgaaaaacgaacgaaaaccgacgccaaacaaacctcccaaatctaaaataaaaccccctcccgccgctacgcccttcctacgcgtcaaactaacaccccccaacccaaatatctaacgctacgctcgaaacgaccgatcgccgcaaactaccgaaataaaaatcgacctaactatctcacgcccctcctaatacgaaaaaaaaaaaccaaaaaaacaaacaaaccatacgaccgaaa

SEQ ID NO: 4197 - DNA, 602 bp, Artificial Sequence
  chemically treated genomic DNA (Homo sapiens) CpG-island No: 4197
gcgcgcggcgtttcgggttttgtagttttggatagattttcgaggtttatggtgtcgtgcggcgggtcgttgcgtttgcgcggtgcgagcggcgggtagcgtagattgcgaggtttttttgttcggttgaggggagggtcgttggtcggggtttgcggtacgtcgttttagtgagggacgttattgcggttattcggtttgttgtttttttgggcgttatttttttaggcgattcgacgcgacgcgttagtagcgtagtatcgatttttttcgggtttttgggcgttgttttgaggtgaggagttcgttggaggcgggagagttgggggagggggcgcggcggcggcggcggcgggagttttgcgtgagggaacgcgttttcgaggcggaggttaggagcggggagcgcgttcgggtttagcgttttgttttttcgtttttcgcgttgagtttttcgtttgtcgttgaggcgtcggtgttagttgcgtgaaggatggagagggcggggcgcgaattttgagttagagattgagtgtttgggggtgggtcgagtatttgggggtcgtttttcggggttcgggtggtttggaataatgttgttt

SEQ ID NO: 4198 - DNA, 602 bp, Artificial Sequence
  chemically treated genomic DNA (Homo sapiens) CpG-island No: 4198
aaacaacattattccaaaccacccgaaccccgaaaaacgacccccaaatactcgacccacccccaaacactcaatctctaactcaaaattcgcgccccgccctctccatccttcacgcaactaacaccgacgcctcaacgacaaacgaaaaactcaacgcgaaaaacgaaaaaacaaaacgctaaacccgaacgcgctccccgctcctaacctccgcctcgaaaacgcgttccctcacgcaaaactcccgccgccgccgccgccgcgccccctcccccaactctcccgcctccaacgaactcctcacctcaaaacaacgcccaaaaacccgaaaaaaatcgatactacgctactaacgcgtcgcgtcgaatcgcctaaaaaaataacgcccaaaaaaacaacaaaccgaataaccgcaataacgtccctcactaaaacgacgtaccgcaaaccccgaccaacgaccctcccctcaaccgaacaaaaaaacctcgcaatctacgctacccgccgctcgcaccgcgcaaacgcaacgacccgccgcacgacaccataaacctcgaaaatctatccaaaactacaaaacccgaaacgccgcgcgc

SEQ ID NO: 4199 - DNA, 602 bp, Artificial Sequence
  chemically treated genomic DNA (Homo sapiens) CpG-island No: 4199
aagtaatattgttttagattattcgggtttcgaagagcggtttttaagtgttcggtttatttttaagtatttagtttttggtttaggattcgcgtttcgttttttttattttttacgtagttggtatcgacgttttagcgataggcgaagagtttagcgcgggaagcggagaagtaggacgttggattcgggcgcgtttttcgtttttaattttcgtttcgaaagcgcgtttttttacgtagggttttcgtcgtcgtcgtcgtcgcgtttttttttttagttttttcgtttttagcgggttttttattttagagtagcgtttaagagttcgagaggaatcggtgttgcgttgttggcgcgtcgcgtcgggtcgtttgggggagtggcgtttaggaaggtagtaagtcgggtggtcgtagtggcgttttttattgaagcggcgtatcgtaggtttcggttaacggttttttttttagtcgaataaaagagtttcgtagtttgcgttgttcgtcgttcgtatcgcgtaggcgtaacgattcgtcgtacggtattatgggtttcgggggtttgtttaagattataaggttcgaagcgtcgcgcgt

SEQ ID NO: 4200 - DNA, 602 bp, Artificial Sequence
  chemically treated genomic DNA (Homo sapiens) CpG-island No: 4200
acgcgcgacgcttcgaaccttataatcttaaacaaacccccgaaacccataataccgtacgacgaatcgttacgcctacgcgatacgaacgacgaacaacgcaaactacgaaactcttttattcgactaaaaaaaaaaccgttaaccgaaacctacgatacgccgcttcaataaaaaacgccactacgaccacccgacttactaccttcctaaacgccactcccccaaacgacccgacgcgacgcgccaacaacgcaacaccgattcctctcgaactcttaaacgctactctaaaataaaaaacccgctaaaaacgaaaaaactaaaaaaaaaaacgcgacgacgacgacgacgaaaaccctacgtaaaaaaacgcgctttcgaaacgaaaattaaaaacgaaaaacgcgcccgaatccaacgtcctacttctccgcttcccgcgctaaactcttcgcctatcgctaaaacgtcgataccaactacgtaaaaaataaaaaaaacgaaacgcgaatcctaaaccaaaaactaaatacttaaaaataaaccgaacacttaaaaaccgctcttcgaaacccgaataatctaaaacaatattactt

SEQ ID NO: 4201 - DNA, 699 bp, Artificial Sequence
  chemically treated genomic DNA (Homo sapiens) CpG-island No: 4201
gggcggcgggaagttagtgtttgcgtcggggttttcgttgtttttttcgtcgttgtcgtcgggtttattttcggagttcgaggtttcgacgtttttatttatggtttcgatagatgttttttcgtcgtcggtgtcgtttgggtcggaggtcgagttttcggggtcgtcgtcgtttttttcgttttcgtcgtcgggtttcgcgaacgagttagttcgcgttttgttcgagtttttagggtcgtttttcgaaggttcgtcgtcgtttatggcgtcgagtataggtttaggttgcggggttcgggttgttcgggttgttttagtcgtcgtcgttgtcgtcgtttttttcgggttttggttttttttaggtcgcgtcgttttggtttgggtttcggtttcggtttagcgttcgtcgcggggtacgtcgggagatgtagttcggttgtcgttcgcgtcgtcgttatcgttttcggttcgtatagagagtcgcgtggtacgtcgggaaatgaagtttataaaagttttagagtagatcgcgggaatgatgggcgggaatgacgggttacgttgtacgtcgggaaatggagtttagggtaatttgttagtcgattgtacgacggggagttttgaagtattttaggaagtagagagtttgatgtacgttgggaaacggagtttatttatttagtttattagttgtgt

SEQ ID NO: 4202 - DNA, 699 bp, Artificial Sequence
  chemically treated genomic DNA (Homo sapiens) CpG-island No: 4202
acacaactaataaactaaataaataaactccgtttcccaacgtacatcaaactctctacttcctaaaatacttcaaaactccccgtcgtacaatcgactaacaaattaccctaaactccatttcccgacgtacaacgtaacccgtcattcccgcccatcattcccgcgatctactctaaaacttttataaacttcatttcccgacgtaccacgcgactctctatacgaaccgaaaacgataacgacgacgcgaacgacaaccgaactacatctcccgacgtaccccgcgacgaacgctaaaccgaaaccgaaacccaaaccaaaacgacgcgacctaaaaaaaaccaaaacccgaaaaaaacgacgacaacgacgacgactaaaacaacccgaacaacccgaaccccgcaacctaaacctatactcgacgccataaacgacgacgaaccttcgaaaaacgaccctaaaaactcgaacaaaacgcgaactaactcgttcgcgaaacccgacgacgaaaacgaaaaaaacgacgacgaccccgaaaactcgacctccgacccaaacgacaccgacgacgaaaaaacatctatcgaaaccataaataaaaacgtcgaaacctcgaactccgaaaataaacccgacgacaacgacgaaaaaaacaacgaaaaccccgacgcaaacactaacttcccgccgccc

SEQ ID NO: 4203 - DNA, 699 bp, Artificial Sequence
  chemically treated genomic DNA (Homo sapiens) CpG-island No: 4203
atatagttaatagattgagtgagtggatttcgttttttagcgtgtattaggttttttgttttttaaagtgttttagggtttttcgtcgtatagtcggttgatagattattttggattttatttttcgacgtatagcgtgattcgttattttcgtttattattttcgcggtttattttgaggtttttgtggattttatttttcggcgtgttacgcggttttttgtgcgggtcgagggcggtgacggcggcgcggacgatagtcggattgtatttttcggcgtgtttcgcggcgggcgttgggtcggagtcggagtttaagttagagcggcgcggtttggaagaggttagggttcgggggaggcggcggtagcggcggcggttggggtagttcgggtagttcgagtttcgtagtttgggtttgtgttcggcgttatgagcggcggcgggttttcgggaggcggttttgggggttcgggtagggcgcggattagttcgttcgcggagttcggcggcggaggcggaggaggcggcggcggtttcggaggttcggttttcggtttaggcggtatcggcggcggaaaggtatttgtcggggttatgggtgggggcgtcggggtttcgagtttcgggggtggattcggcggtagcggcggaggaggtagcggaggtttcggcgtaggtattagtttttcgtcgttt

SEQ ID NO: 4204 - DNA, 699 bp, Artificial Sequence
  chemically treated genomic DNA (Homo sapiens) CpG-island No: 4204
aaacgacgaaaaactaatacctacgccgaaacctccgctacctcctccgccgctaccgccgaatccacccccgaaactcgaaaccccgacgcccccacccataaccccgacaaatacctttccgccgccgataccgcctaaaccgaaaaccgaacctccgaaaccgccgccgcctcctccgcctccgccgccgaactccgcgaacgaactaatccgcgccctacccgaacccccaaaaccgcctcccgaaaacccgccgccgctcataacgccgaacacaaacccaaactacgaaactcgaactacccgaactaccccaaccgccgccgctaccgccgcctcccccgaaccctaacctcttccaaaccgcgccgctctaacttaaactccgactccgacccaacgcccgccgcgaaacacgccgaaaaatacaatccgactatcgtccgcgccgccgtcaccgccctcgacccgcacaaaaaaccgcgtaacacgccgaaaaataaaatccacaaaaacctcaaaataaaccgcgaaaataataaacgaaaataacgaatcacgctatacgtcgaaaaataaaatccaaaataatctatcaaccgactatacgacgaaaaaccctaaaacactttaaaaaacaaaaaacctaatacacgctaaaaaacgaaatccactcactcaatctattaactatat

SEQ ID NO: 4205 - DNA, 516 bp, Artificial Sequence
  chemically treated genomic DNA (Homo sapiens) CpG-island No: 4205
tttgtgtcgggttttcgttttttttattggttgtcgtttcgttcgttgatcgttgattggtcgagatttgttttttcgtttttgagcgattaatttttgcgttgtcgcgttttcgggttgggtggggtatttttttttttatcgtagatagttcgggtgttagttggtcggcgtttcgtcgcggttcgcgtgggtgttaggtcggtcgggtattcgttcgttttttttgtataaagcggttttgtggagtttgtcgggggttggttgggggttaggcggcgagtggaaaatttcgtgagcgcggggaggggaggggaacgtagggcggcgtttttttttttgttcgggttttggcgttttttttagttcgcgtcgattaatttttttagtttaagcgtttgtatatttttttttcgttttcgtatttttttttttttaaatttacgttttttaatttttttattttcgtattttatttattttttaatttttggggattattttttatatattttt

SEQ ID NO: 4206 - DNA, 516 bp, Artificial Sequence
  chemically treated genomic DNA (Homo sapiens) CpG-island No: 4206
aaaaatatataaaaaataatccccaaaaattaaaaaataaataaaatacgaaaataaaaaaattaaaaaacgtaaatttaaaaaaaaaaaaatacgaaaacgaaaaaaaaatatacaaacgcttaaactaaaaaaattaatcgacgcgaactaaaaaaaacgccaaaacccgaacaaaaaaaaaaacgccgccctacgttcccctcccctccccgcgctcacgaaattttccactcgccgcctaacccccaaccaacccccgacaaactccacaaaaccgctttatacaaaaaaaacgaacgaatacccgaccgacctaacacccacgcgaaccgcgacgaaacgccgaccaactaacacccgaactatctacgataaaaaaaaaaataccccacccaacccgaaaacgcgacaacgcaaaaattaatcgctcaaaaacgaaaaaacaaatctcgaccaatcaacgatcaacgaacgaaacgacaaccaataaaaaaaacgaaaacccgacacaaa

SEQ ID NO: 4207 - DNA, 516 bp, Artificial Sequence
  chemically treated genomic DNA (Homo sapiens) CpG-island No: 4207
gagagtgtgtgggggatggtttttagggattgggagatgggtgggatgcgggggtgggggggttgagagacgtgggtttggggaagggaaggtgcgggggcgggaaaggggtgtataggcgtttgggttgggagggttggtcggcgcgggttgagggaggcgttaaggttcgagtagaggagggggcgtcgttttgcgtttttttttttttttcgcgtttacgagattttttattcgtcgtttggtttttagttaattttcggtaggttttataaagtcgttttgtgtagggagggcggacgggtgttcggtcggtttgatatttacgcgggtcgcggcggggcgtcggttagttggtattcgagttgtttgcggtgggagggagggtattttatttagttcgaggacgcggtagcgtaggggttaatcgtttaggggcggagaagtaggtttcggttaattagcggttagcgggcgagacggtagttaatgagaaggacggaggttcgatatagg

SEQ ID NO: 4208 - DNA, 516 bp, Artificial Sequence
  chemically treated genomic DNA (Homo sapiens) CpG-island No: 4208
cctatatcgaacctccgtccttctcattaactaccgtctcgcccgctaaccgctaattaaccgaaacctacttctccgcccctaaacgattaacccctacgctaccgcgtcctcgaactaaataaaataccctccctcccaccgcaaacaactcgaataccaactaaccgacgccccgccgcgacccgcgtaaatatcaaaccgaccgaacacccgtccgccctccctacacaaaacgactttataaaacctaccgaaaattaactaaaaaccaaacgacgaataaaaaatctcgtaaacgcgaaaaaaaaaaaaaaacgcaaaacgacgccccctcctctactcgaaccttaacgcctccctcaacccgcgccgaccaaccctcccaacccaaacgcctatacacccctttcccgcccccgcaccttcccttccccaaacccacgtctctcaacccccccacccccgcatcccacccatctcccaatccctaaaaaccatcccccacacactctc

SEQ ID NO: 4209 - DNA, 1226 bp, Artificial Sequence
  chemically treated genomic DNA (Homo sapiens) CpG-island No: 4209
gtttaggcgggtgtgcgggaggcgggtcgagtcgcgcgtgagcgtgtttttcgcgcggattggatatataatagtattacgtataatttagagattttcgtagcgcggcgtttcgaatcgtttttttggttcggtgtttttattgtagtgcgttttttttgttatttttttatcgcggtttcgttttcggtcggttcggggttaatcggagttcgtttcgttttgtttttatttgtatatgattgacgttttttcggggcggttaatgggggcgggcgcggcggggtttgattcgcgcgcggcggcggtagttaatgggtttacgcgcggggggtcgggtttgcgcggaaggtcgcgggggaagcggggaaggggcggggggaggcgcggcggggggaggggagcgcgtagtagtggcggggcggggaggcggtggtggttcggcgcggggttcgttcggagcgtacggacgtacgtacgttggttcgtttgttcgttcggggtcggaggtcgattcggcgttgagtttcgggttcggggttcggaaaggcggggcggcggcgtcggtagtcgggacgcgcggggttagagtcgttattcgtcggagttgcgagggagggagggaacgagcgagttagcgagcggggaagggagggggtcgttttcgcgtacgcgcgtcgcgtttcgtttcgtttgtttcgtttgtttcgttcgtcggatttcgcgagggaggagggagagggagggggcggtgtcgatggttttcgtgtcgcgcgtttcgtgacggttttcgcgcgcgtcggggggcggggcggggtcggtgcgcgttgatttttttcgtttttcgggcggcgggaggtaggcggcgttgtgcgtaggcgcgttcggtagagattttcgcgtggggcggtcggaggggggcggcgggggggggggtatgcggcgacggtttttcgtttttttcgggtttaagcggcgacggtcgaggagcgggttgcgggcggagcggcgtcggtcgttgaggaggtgcgagtttttgtcgggttttttttgcgtcggattatgtattcggtttataggtttttgatgttcgcgtttagcgcggtttttcgtggtttcggtatgttcggttagtagcgtttgggttttgggattgtaggggttaaggtgtcggggtgttaagtgcggagtaacggtggtgggggtatagtaggggagagaatagt

SEQ ID NO: 4210 - DNA, 1226 bp, Artificial Sequence
  chemically treated genomic DNA (Homo sapiens) CpG-island No: 4210
actattctctcccctactatacccccaccaccgttactccgcacttaacaccccgacaccttaacccctacaatcccaaaacccaaacgctactaaccgaacataccgaaaccacgaaaaaccgcgctaaacgcgaacatcaaaaacctataaaccgaatacataatccgacgcaaaaaaaacccgacaaaaactcgcacctcctcaacgaccgacgccgctccgcccgcaacccgctcctcgaccgtcgccgcttaaacccgaaaaaaacgaaaaaccgtcgccgcatacccccccccccgccgcccccctccgaccgccccacgcgaaaatctctaccgaacgcgcctacgcacaacgccgcctacctcccgccgcccgaaaaacgaaaaaaatcaacgcgcaccgaccccgccccgccccccgacgcgcgcgaaaaccgtcacgaaacgcgcgacacgaaaaccatcgacaccgccccctccctctccctcctccctcgcgaaatccgacgaacgaaacaaacgaaacaaacgaaacgaaacgcgacgcgcgtacgcgaaaacgaccccctcccttccccgctcgctaactcgctcgttccctccctccctcgcaactccgacgaataacgactctaaccccgcgcgtcccgactaccgacgccgccgccccgcctttccgaaccccgaacccgaaactcaacgccgaatcgacctccgaccccgaacgaacaaacgaaccaacgtacgtacgtccgtacgctccgaacgaaccccgcgccgaaccaccaccgcctccccgccccgccactactacgcgctcccctccccccgccgcgcctccccccgccccttccccgcttcccccgcgaccttccgcgcaaacccgaccccccgcgcgtaaacccattaactaccgccgccgcgcgcgaatcaaaccccgccgcgcccgcccccattaaccgccccgaaaaaacgtcaatcatatacaaataaaaacaaaacgaaacgaactccgattaaccccgaaccgaccgaaaacgaaaccgcgataaaaaaataacaaaaaaaacgcactacaataaaaacaccgaaccaaaaaaacgattcgaaacgccgcgctacgaaaatctctaaattatacgtaatactattatatatccaatccgcgcgaaaaacacgctcacgcgcgactcgacccgcctcccgcacacccgcctaaac

SEQ ID NO: 4211 - DNA, 1226 bp, Artificial Sequence
  chemically treated genomic DNA (Homo sapiens) CpG-island No: 4211
attgtttttttttttattatatttttattatcgttatttcgtatttagtatttcgatattttgatttttgtagttttagggtttaggcgttattgatcgaatatgtcgaggttacgggaggtcgcgttggacgcgggtattaggggtttgtgggtcgaatatatggttcggcgtaggggggattcggtaggggttcgtatttttttagcggtcgacgtcgtttcgttcgtagttcgtttttcggtcgtcgtcgtttgggttcggggggagcgggaggtcgtcgtcgtatgttttttttttcgtcgttttttttcggtcgttttacgcgggggtttttgtcgggcgcgtttgcgtatagcgtcgtttgtttttcgtcgttcggggggcgggggaggttagcgcgtatcggtttcgtttcgtttttcggcgcgcgcgggggtcgttacggggcgcgcggtacgggggttatcggtatcgtttttttttttttttttttttttcgcggagttcggcgggcggggtaggcggggtaggcggggcggggcgcgacgcgcgtgcgcgggggcggttttttttttttttcgttcgttggttcgttcgttttttttttttttcgtagtttcggcgggtaacggttttggtttcgcgcgtttcggttgtcggcgtcgtcgtttcgttttttcgggtttcgggttcgaggtttagcgtcgggtcgattttcggtttcgggcgggtagacggattagcgtgcgtgcgttcgtgcgtttcgagcgagtttcgcgtcgaattattatcgttttttcgtttcgttattattacgcgttttttttttttcgtcgcgttttttttcgtttttttttcgtttttttcgcggtttttcgcgtaagttcggtttttcgcgcgtgagtttattggttgtcgtcgtcgcgcgcgggttaggtttcgtcgcgttcgtttttattggtcgtttcgggggaacgttagttatatgtaaataagggtagggcggggcgggtttcggttggtttcgagtcggtcgggggcggggtcgcggtaggagggtggtagggagggcgtattgtagtaaaggtatcgagttaggggggcggttcggggcgtcgcgttgcggaggtttttgggttgtgcgtggtgttgttgtgtgtttagttcgcgcgaggaatacgtttacgcgcggttcggttcgtttttcgtatattcgtttgggt

SEQ ID NO: 4212 - DNA, 1226 bp, Artificial Sequence
  chemically treated genomic DNA (Homo sapiens) CpG-island No: 4212
acccaaacgaatatacgaaaaacgaaccgaaccgcgcgtaaacgtattcctcgcgcgaactaaacacacaacaacaccacgcacaacccaaaaacctccgcaacgcgacgccccgaaccgcccccctaactcgatacctttactacaatacgccctccctaccaccctcctaccgcgaccccgcccccgaccgactcgaaaccaaccgaaacccgccccgccctacccttatttacatataactaacgttcccccgaaacgaccaataaaaacgaacgcgacgaaacctaacccgcgcgcgacgacgacaaccaataaactcacgcgcgaaaaaccgaacttacgcgaaaaaccgcgaaaaaaacgaaaaaaaaacgaaaaaaaacgcgacgaaaaaaaaaaaacgcgtaataataacgaaacgaaaaaacgataataattcgacgcgaaactcgctcgaaacgcacgaacgcacgcacgctaatccgtctacccgcccgaaaccgaaaatcgacccgacgctaaacctcgaacccgaaacccgaaaaaacgaaacgacgacgccgacaaccgaaacgcgcgaaaccaaaaccgttacccgccgaaactacgaaaaaaaaaaaaaacgaacgaaccaacgaacgaaaaaaaaaaaaaaccgcccccgcgcacgcgcgtcgcgccccgccccgcctaccccgcctaccccgcccgccgaactccgcgaaaaaaaaaaaaaaaaaaaaaaacgataccgataacccccgtaccgcgcgccccgtaacgacccccgcgcgcgccgaaaaacgaaacgaaaccgatacgcgctaacctcccccgccccccgaacgacgaaaaacaaacgacgctatacgcaaacgcgcccgacaaaaacccccgcgtaaaacgaccgaaaaaaaacgacgaaaaaaaaaacatacgacgacgacctcccgctccccccgaacccaaacgacgacgaccgaaaaacgaactacgaacgaaacgacgtcgaccgctaaaaaaatacgaacccctaccgaatcccccctacgccgaaccatatattcgacccacaaacccctaatacccgcgtccaacgcgacctcccgtaacctcgacatattcgatcaataacgcctaaaccctaaaactacaaaaatcaaaatatcgaaatactaaatacgaaataacgataataaaaatataataaaaaaaaaaacaat

SEQ ID NO: 4213 - DNA, 554 bp, Artificial Sequence
  chemically treated genomic DNA (Homo sapiens) CpG-island No: 4213
gaacgtttattagggatatttagcgttcgtcgttttgtacgttttgtatcggcgtgggtttgttggttgggtttttttttttatttattttggcgtcgtagtttttgtaggatgagcgagtcgggtcggttcgggagtgtttcgaacggagttggtttcgttacgtttatttttatttttcgcggtaataaaggatcgttttaacgttagtatattcgcggaggacgaaggtcgatatagggcgtcgttttttttttagggacggaagtttttatttaggaggtaggtggaattaggaattttcgttttttttacgacggtcgtatagtgggttcgttcggcgtttttcgttcgggtcgttgatttttaggtcgcgtattcggtacggggtggggggagggagaggcgagattatttagttttcgaggcggggaggagggagaaattatttatcggttacggggaggggcgaattatttgaagagtcgagagtgggcggggaaaatttagttttttgtttagtaaatgggaagaaattatttgttgtatagagt

SEQ ID NO: 4214 - DNA, 554 bp, Artificial Sequence
  chemically treated genomic DNA (Homo sapiens) CpG-island No: 4214
actctatacaacaaataatttcttcccatttactaaacaaaaaactaaattttccccgcccactctcgactcttcaaataattcgcccctccccgtaaccgataaataatttctccctcctccccgcctcgaaaactaaataatctcgcctctccctccccccaccccgtaccgaatacgcgacctaaaaatcaacgacccgaacgaaaaacgccgaacgaacccactatacgaccgtcgtaaaaaaaacgaaaattcctaattccacctacctcctaaataaaaacttccgtccctaaaaaaaaaacgacgccctatatcgaccttcgtcctccgcgaatatactaacgttaaaacgatcctttattaccgcgaaaaataaaaataaacgtaacgaaaccaactccgttcgaaacactcccgaaccgacccgactcgctcatcctacaaaaactacgacgccaaaataaataaaaaaaaaaacccaaccaacaaacccacgccgatacaaaacgtacaaaacgacgaacgctaaatatccctaataaacgttc

SEQ ID NO: 4215 - DNA, 554 bp, Artificial Sequence
  chemically treated genomic DNA (Homo sapiens) CpG-island No: 4215
attttgtatagtaaatggtttttttttatttgttagatagagggttagatttttttcgtttattttcgattttttaggtagttcgttttttttcgtgatcggtgggtggtttttttttttttttcgtttcgggagttggatggtttcgtttttttttttttttatttcgtgtcgggtgcgcggtttgggagttagcggttcgagcgggaagcgtcgggcgagtttattgtgcggtcgtcgtgggggaagcgaaggtttttgattttatttattttttaagtgaaggttttcgtttttggagaggaggcggcgttttgtatcggttttcgtttttcgcgggtgtgttagcgttgggacggttttttgttgtcgcgaggggtaggagtgggcgtggcggagttagtttcgttcggaatattttcgggtcgattcgattcgtttattttgtaggagttgcggcgttaagatgagtggagaggagaatttagttagtaagtttacgtcggtgtaggacgtatagggcgacgggcgttggatgtttttggtgagcgttt

SEQ ID NO: 4216 - DNA, 554 bp, Artificial Sequence
  chemically treated genomic DNA (Homo sapiens) CpG-island No: 4216
aaacgctcaccaaaaacatccaacgcccgtcgccctatacgtcctacaccgacgtaaacttactaactaaattctcctctccactcatcttaacgccgcaactcctacaaaataaacgaatcgaatcgacccgaaaatattccgaacgaaactaactccgccacgcccactcctacccctcgcgacaacaaaaaaccgtcccaacgctaacacacccgcgaaaaacgaaaaccgatacaaaacgccgcctcctctccaaaaacgaaaaccttcacttaaaaaataaataaaatcaaaaaccttcgcttcccccacgacgaccgcacaataaactcgcccgacgcttcccgctcgaaccgctaactcccaaaccgcgcacccgacacgaaataaaaaaaaaaaaaaacgaaaccatccaactcccgaaacgaaaaaaaaaaaaaaaccacccaccgatcacgaaaaaaaacgaactacctaaaaaatcgaaaataaacgaaaaaaatctaaccctctatctaacaaataaaaaaaaaccatttactatacaaaat

SEQ ID NO: 4217 - DNA, 1025 bp, Artificial Sequence
  chemically treated genomic DNA (Homo sapiens) CpG-island No: 4217
gagttgggttggggcggggagttcgggacgacgggatggaataatggaggaggtcggagggattggaggtagaggggattcggtaaggataatggggatcggttagataatgggggggaggggcgtcggagggagaggttggggagcgggagagaggttgagaagtgggttagggagggtagaagaggggcgacggcgagggcggtagagagatggaagtagaaggaaaggagatagagcggggcgcggattttgaagtggtcggggtttcgtttgttcgttgagggatagtgagacgagaagagagagtagaggtttggatatttttagcgtttgttttcgcgtttttgttcgcggttttttttagtttcggaattggggttgcggatttaaggttgggaggggagtgtttatttcgtcggggcgaattcgttttcggggtttttttacggtcggcgggttttttcgacgcgcgtgtttttacggtttgaagtagcgtagcggatcgcgagggacggagcgggtgtgtttttattcgggttggcggtggttacgtttcggggtgtagagcgtcggggcgtattaggcggggattttttttggtcgcgcgtagttttggttacgtaggcgggaggcggtaggtagggggcgttgcggggcgaggtaagtgtagttcgtcgttgtttgtttgcgagtttggggttgcgcgtcgttttttatttagttgcgcgattcgagcgtagcgtttatcgcgtttcgtgggttttcgcgtttcgaagggtcgggattcggtttgagttttttttggttttcggtgtaagtcgttgggtatttaacgagacgggggcgttcggacgtttcggattttgtagcgcggtatttcgggttatcgattcggtaaaggtcggcgggtttttcgggtggttcgacgagattgttagatgtggtttgttttatggttatgaatcgaatgttttggaaggtttggtaacggaggaggcgtttttatttttttcgttagtatt

SEQ ID NO: 4218 - DNA, 1025 bp, Artificial Sequence
  chemically treated genomic DNA (Homo sapiens) CpG-island No: 4218
aatactaacgaaaaaaataaaaacgcctcctccgttaccaaaccttccaaaacattcgattcataaccataaaacaaaccacatctaacaatctcgtcgaaccacccgaaaaacccgccgacctttaccgaatcgataacccgaaataccgcgctacaaaatccgaaacgtccgaacgcccccgtctcgttaaatacccaacgacttacaccgaaaaccaaaaaaaactcaaaccgaatcccgacccttcgaaacgcgaaaacccacgaaacgcgataaacgctacgctcgaatcgcgcaactaaataaaaaacgacgcgcaaccccaaactcgcaaacaaacaacgacgaactacacttacctcgccccgcaacgccccctacctaccgcctcccgcctacgtaaccaaaactacgcgcgaccaaaaaaaatccccgcctaatacgccccgacgctctacaccccgaaacgtaaccaccgccaacccgaataaaaacacacccgctccgtccctcgcgatccgctacgctacttcaaaccgtaaaaacacgcgcgtcgaaaaaacccgccgaccgtaaaaaaaccccgaaaacgaattcgccccgacgaaataaacactcccctcccaaccttaaatccgcaaccccaattccgaaactaaaaaaaaccgcgaacaaaaacgcgaaaacaaacgctaaaaatatccaaacctctactctctcttctcgtctcactatccctcaacgaacaaacgaaaccccgaccacttcaaaatccgcgccccgctctatctcctttccttctacttccatctctctaccgccctcgccgtcgcccctcttctaccctccctaacccacttctcaacctctctcccgctccccaacctctccctccgacgcccctcccccccattatctaaccgatccccattatccttaccgaatcccctctacctccaatccctccgacctcctccattattccatcccgtcgtcccgaactccccgccccaacccaactc

SEQ ID NO: 4219 - DNA, 1025 bp, Artificial Sequence
  chemically treated genomic DNA (Homo sapiens) CpG-island No: 4219
gatgttggcggggagagtgaagacgtttttttcgttgttagattttttagggtattcggtttatggttataaagtaggttatatttgataatttcgtcggattattcggaggattcgtcgatttttgtcgagtcggtggttcgggatatcgcgttatagaattcgaggcgttcgggcgttttcgtttcgttaggtgtttagcggtttgtatcgagagttaggagaggtttagatcggatttcgatttttcgaggcgcgggagtttacggagcgcggtgggcgttgcgttcgggtcgcgtagttaggtggggagcggcgcgtagttttagattcgtaggtaggtagcggcggattgtatttgtttcgtttcgtagcgttttttgtttgtcgtttttcgtttgcgtagttagagttgcgcgcggttaggaagggttttcgtttagtgcgtttcggcgttttgtatttcgagacgtagttatcgttagttcgggtaggggtatattcgtttcgtttttcgcgattcgttgcgttgttttaagtcgtgagaatacgcgcgtcggaggagttcgtcggtcgtgggggaatttcgggagcgggttcgtttcggcgaagtgggtattttttttttagttttagattcgtagttttaatttcgggattgggagaggtcgcgagtaggagcgcggggataggcgttggaaatgtttaagtttttgtttttttttttcgttttattgttttttagcgggtaggcgggatttcgattattttagggttcgcgtttcgttttgttttttttttttttgtttttatttttttgtcgttttcgtcgtcgttttttttttgttttttttaatttattttttaatttttttttcgttttttaattttttttttcgacgttttttttttttattgtttggtcggtttttattgtttttgtcgggttttttttgtttttagttttttcgattttttttattgttttatttcgtcgtttcgggtttttcgttttagtttagttt

SEQ ID NO: 4220 - DNA, 1025 bp, Artificial Sequence
  chemically treated genomic DNA (Homo sapiens) CpG-island No: 4220
aaactaaactaaaacgaaaaacccgaaacgacgaaataaaacaataaaaaaaatcgaaaaaactaaaaacaaaaaaaacccgacaaaaacaataaaaaccgaccaaacaataaaaaaaaaaaacgtcgaaaaaaaaaattaaaaaacgaaaaaaaaattaaaaaataaattaaaaaaaacaaaaaaaaaacgacgacgaaaacgacaaaaaaataaaaacaaaaaaaaaaaaaacaaaacgaaacgcgaaccctaaaataatcgaaatcccgcctacccgctaaaaaacaataaaacgaaaaaaaaaaacaaaaacttaaacatttccaacgcctatccccgcgctcctactcgcgacctctcccaatcccgaaattaaaactacgaatctaaaactaaaaaaaaaatacccacttcgccgaaacgaacccgctcccgaaattcccccacgaccgacgaactcctccgacgcgcgtattctcacgacttaaaacaacgcaacgaatcgcgaaaaacgaaacgaatatacccctacccgaactaacgataactacgtctcgaaatacaaaacgccgaaacgcactaaacgaaaacccttcctaaccgcgcgcaactctaactacgcaaacgaaaaacgacaaacaaaaaacgctacgaaacgaaacaaatacaatccgccgctacctacctacgaatctaaaactacgcgccgctccccacctaactacgcgacccgaacgcaacgcccaccgcgctccgtaaactcccgcgcctcgaaaaatcgaaatccgatctaaacctctcctaactctcgatacaaaccgctaaacacctaacgaaacgaaaacgcccgaacgcctcgaattctataacgcgatatcccgaaccaccgactcgacaaaaatcgacgaatcctccgaataatccgacgaaattatcaaatataacctactttataaccataaaccgaataccctaaaaaatctaacaacgaaaaaaacgtcttcactctccccgccaacatc

SEQ ID NO: 4221 - DNA, 772 bp, Artificial Sequence
  chemically treated genomic DNA (Homo sapiens) CpG-island No: 4221
gttatttcgttttcgcgtgtcgtttttttttggttggagagtcggcgttttaggttttcgggttgcgggtcggtaggggaggagttaatttcggaggtatcggttgggtttattgtatttgtcgtcgtcgtcgtcgtcgtcggtgggagggacgaggaagcgggagtcgtttgggcgttaggagcgttttagtttggcggggcgtagcgtagcgcggggagcgggcggtcggggtttcgcgcggttgggggcgttcgttagggggcgcgtcgcgacggggcgggtggagtagtttggtttggggaattagtattaaggacgggcgcgcgcgtaggtttttagtatatttgggcgagagcggcgtcgttggagtcgaggggggcgtcgagcgtagatttggagtagtagagttacggcgtagttggggtttttcgaggcgttcggggcgtatatttgggatttcgagcgggggtcgtgtcgcgcgtagttggattaggggaggggggcggcggttgtatagttggatcgaagggggcggggtcggttttgggcgattcgttgaggggagggtcgcgggtcgtcggggattggagtatgggacggcgcgtttgaaggagtaggaaggggaaggaggtttgggatttcgaaaagagaaggggagagcgaggggacgagagcggaggaggaagatgtaattgattcgttgttgtttcgtgtttttggtgtagggtagtttttatttggtgagtggttcgaggggagttgcgtagag

SEQ ID NO: 4222 - DNA, 772 bp, Artificial Sequence
  chemically treated genomic DNA (Homo sapiens) CpG-island No: 4222
ctctacgcaactcccctcgaaccactcaccaaataaaaactaccctacaccaaaaacacgaaacaacaacgaatcaattacatcttcctcctccgctctcgtcccctcgctctccccttctcttttcgaaatcccaaacctccttccccttcctactccttcaaacgcgccgtcccatactccaatccccgacgacccgcgaccctcccctcaacgaatcgcccaaaaccgaccccgcccccttcgatccaactatacaaccgccgcccccctcccctaatccaactacgcgcgacacgacccccgctcgaaatcccaaatatacgccccgaacgcctcgaaaaaccccaactacgccgtaactctactactccaaatctacgctcgacgcccccctcgactccaacgacgccgctctcgcccaaatatactaaaaacctacgcgcgcgcccgtccttaatactaattccccaaaccaaactactccacccgccccgtcgcgacgcgccccctaacgaacgcccccaaccgcgcgaaaccccgaccgcccgctccccgcgctacgctacgccccgccaaactaaaacgctcctaacgcccaaacgactcccgcttcctcgtccctcccaccgacgacgacgacgacgacgacaaatacaataaacccaaccgatacctccgaaattaactcctcccctaccgacccgcaacccgaaaacctaaaacgccgactctccaaccaaaaaaaaacgacacgcgaaaacgaaataac

SEQ ID NO: 4223 - DNA, 772 bp, Artificial Sequence
  chemically treated genomic DNA (Homo sapiens) CpG-island No: 4223
ttttgcgtagtttttttcggattatttattagatagaggttattttgtattaggaatacgaagtagtagcgagttagttgtatttttttttttcgttttcgttttttcgtttttttttttttttttcggggttttaggttttttttttttttttgtttttttaggcgcgtcgttttatgttttagttttcggcggttcgcggttttttttttagcgggtcgtttagggtcgatttcgtttttttcggtttagttgtgtagtcgtcgttttttttttttggtttagttgcgcgcggtacggttttcgttcgaggttttagatgtgcgtttcgagcgtttcgaagggttttagttgcgtcgtggttttgttgttttagatttgcgttcggcgtttttttcggttttagcggcgtcgttttcgtttagatgtgttggggatttgcgcgcgcgttcgtttttggtgttaattttttaaattaggttgttttattcgtttcgtcgcggcgcgttttttggcggacgtttttagtcgcgcggagtttcggtcgttcgtttttcgcgttgcgttgcgtttcgttagattagagcgtttttggcgtttaggcggttttcgttttttcgttttttttatcggcggcggcggcggcggcggtaggtatagtgagtttagtcggtattttcggagttaattttttttttgtcggttcgtagttcggggatttaggacgtcggttttttagttaggagaggacggtacgcgggggcggagtagt

SEQ ID NO: 4224 - DNA, 772 bp, Artificial Sequence
  chemically treated genomic DNA (Homo sapiens) CpG-island No: 4224
actactccgcccccgcgtaccgtcctctcctaactaaaaaaccgacgtcctaaatccccgaactacgaaccgacaaaaaaaaaattaactccgaaaataccgactaaactcactatacctaccgccgccgccgccgccgccgataaaaaaaacgaaaaaacgaaaaccgcctaaacgccaaaaacgctctaatctaacgaaacgcaacgcaacgcgaaaaacgaacgaccgaaactccgcgcgactaaaaacgtccgccaaaaaacgcgccgcgacgaaacgaataaaacaacctaatttaaaaaattaacaccaaaaacgaacgcgcgcgcaaatccccaacacatctaaacgaaaacgacgccgctaaaaccgaaaaaaacgccgaacgcaaatctaaaacaacaaaaccacgacgcaactaaaacccttcgaaacgctcgaaacgcacatctaaaacctcgaacgaaaaccgtaccgcgcgcaactaaaccaaaaaaaaaaaacgacgactacacaactaaaccgaaaaaaacgaaatcgaccctaaacgacccgctaaaaaaaaaaccgcgaaccgccgaaaactaaaacataaaacgacgcgcctaaaaaaacaaaaaaaaaaaaaaaacctaaaaccccgaaaaaaaaaaaaaaaaacgaaaaaacgaaaacgaaaaaaaaaaatacaactaactcgctactacttcgtattcctaatacaaaataacctctatctaataaataatccgaaaaaaactacgcaaaa

SEQ ID NO: 4225 - DNA, 604 bp, Artificial Sequence
  chemically treated genomic DNA (Homo sapiens) CpG-island No: 4225
cgaattacgtttcgtcgtatttaaggtttcggttgggttttgttgcgcggttagaatcgggaaatggagggtttagacgtttcgcgcgagtaggtttagtcgcgtttttttatttgtcgttatcgtcgttgagtcggttcgtgggcgcggtcgtttttatttgtaggagcgggggcgcgcgggattcgtttttaaggtgtttacgggcggtgcgggttacgtgtcgcgtaggtgaggttggcggggcgggcgtcggcggagatttagagtagagggaataggtttcgttttcgaacgttcgcggggatttagagcggagggaataggtttcgtttttcgaacgttcgttgtgatttagagcggagggagtaggtttcgtttcgcgaaagtttgtggagatttagggcggagggaataggtttcgttttcgggatcggtttttgaggcggcgtatgcgcgttttttcgttcggattgcgagtttttttttagtttttggtttttagggttaaggcgattttaggtttggaaagggattttcgtcgtaaatttttttgtttttgttaaagttgcggtcgtaaggtttagtgatcgtttgaaacgtt

SEQ ID NO: 4226 - DNA, 604 bp, Artificial Sequence
  chemically treated genomic DNA (Homo sapiens) CpG-island No: 4226
aacgtttcaaacgatcactaaaccttacgaccgcaactttaacaaaaacaaaaaaatttacgacgaaaatccctttccaaacctaaaatcgccttaaccctaaaaaccaaaaactaaaaaaaaactcgcaatccgaacgaaaaaacgcgcatacgccgcctcaaaaaccgatcccgaaaacgaaacctattccctccgccctaaatctccacaaactttcgcgaaacgaaacctactccctccgctctaaatcacaacgaacgttcgaaaaacgaaacctattccctccgctctaaatccccgcgaacgttcgaaaacgaaacctattccctctactctaaatctccgccgacgcccgccccgccaacctcacctacgcgacacgtaacccgcaccgcccgtaaacaccttaaaaacgaatcccgcgcgcccccgctcctacaaataaaaacgaccgcgcccacgaaccgactcaacgacgataacgacaaataaaaaaacgcgactaaacctactcgcgcgaaacgtctaaaccctccatttcccgattctaaccgcgcaacaaaacccaaccgaaaccttaaatacgacgaaacgtaattcg

SEQ ID NO: 4227 - DNA, 604 bp, Artificial Sequence
  chemically treated genomic DNA (Homo sapiens) CpG-island No: 4227
gacgttttaggcgattattaggttttgcgatcgtagttttagtaaaaatagaaagatttgcgacggaagtttttttttaagtttgaaatcgttttgattttaggagttagaagttggggaggaattcgtagttcgggcggaagagcgcgtatgcgtcgttttaggggtcggtttcgggggcggggtttgtttttttcgttttgggtttttataggttttcgcggggcggggtttatttttttcgttttgggttatagcgggcgttcggggggcggggtttgtttttttcgttttgggttttcgcgggcgttcgggggcggggtttgttttttttgttttgggttttcgtcggcgttcgtttcgttagttttatttgcgcggtacgtgattcgtatcgttcgtgggtattttgaaggcggatttcgcgcgttttcgtttttgtaggtgagagcggtcgcgtttacgggtcggtttagcggcggtggcggtaggtggggaagcgcggttgggtttgttcgcgcggggcgtttgagttttttatttttcggttttaatcgcgtagtagggtttaatcgggattttgagtgcggcgaggcgtggttcg

SEQ ID NO: 4228 - DNA, 604 bp, Artificial Sequence
  chemically treated genomic DNA (Homo sapiens) CpG-island No: 4228
cgaaccacgcctcgccgcactcaaaatcccgattaaaccctactacgcgattaaaaccgaaaaataaaaaactcaaacgccccgcgcgaacaaacccaaccgcgcttccccacctaccgccaccgccgctaaaccgacccgtaaacgcgaccgctctcacctacaaaaacgaaaacgcgcgaaatccgccttcaaaatacccacgaacgatacgaatcacgtaccgcgcaaataaaactaacgaaacgaacgccgacgaaaacccaaaacaaaaaaaacaaaccccgcccccgaacgcccgcgaaaacccaaaacgaaaaaaacaaaccccgccccccgaacgcccgctataacccaaaacgaaaaaaataaaccccgccccgcgaaaacctataaaaacccaaaacgaaaaaaacaaaccccgcccccgaaaccgacccctaaaacgacgcatacgcgctcttccgcccgaactacgaattcctccccaacttctaactcctaaaatcaaaacgatttcaaacttaaaaaaaaacttccgtcgcaaatctttctatttttactaaaactacgatcgcaaaacctaataatcgcctaaaacgtc

SEQ ID NO: 4229 - DNA, 936 bp, Artificial Sequence
  chemically treated genomic DNA (Homo sapiens) CpG-island No: 4229
cgagcgttggacgcgttttttttcgcgagttttttttcgaggtttttcgggttttttcggttaatttcgttcgggcggtgcgcgttttcgttgtttacgttttcgttttagagaggtagggtttttagagtttgttagtttcgcggtcgtaattaatttcgggtcggagtgtttcggttcggttagtttcgcggcgtgagggaaggggagtttagtagtttttcgcgcggggtttaggcgtcggcggtagggcgggttttttatcgttagcgtgttagtttcgtttttatttattagtgtgttagtttcgtttttttttacgtcgtcgcgcgttcgggggcggggtttggcgcgtatcgttcgcgtacggcgaggcgtttgttgattggttattggggttcgggtttttatcggcggagcgcgtttttttttagatttttcgttagtaggagtcgcgcggtagatgcggtgtttttaggagtttcgttcgatagaacggttgggttttgtcggttgtcggtatgtcgcgatagagtattttgtatagttttttttttaagttttcggcgttgagtgatgttaataaggtttcggttagggttttacgcgaaggcggtcgtgtcgtcgttgttttcggggtttttttttttttaggcggggatgcggtttggagcgaggttgggtttgggtttaggtttttggcgcgtttcgcgttatcgtttaaggcgaagaattttaacggagggttgcggagatcggtagcgtttgttgtttttattaggtagcggggtgggggtggggtcgaaggcgggggtatagcggcggggcgtttggaattcggcgaggggaggttcgtatagggggttgggggggtgtacggtttggttttgggttcggaggaggcggggtcgtagagttggtttgaatgagtgtagg

SEQ ID NO: 4230 - DNA, 936 bp, Artificial Sequence
  chemically treated genomic DNA (Homo sapiens) CpG-island No: 4230
cctacactcattcaaaccaactctacgaccccgcctcctccgaacccaaaaccaaaccgtacacccccccaaccccctatacgaacctcccctcgccgaattccaaacgccccgccgctatacccccgccttcgaccccacccccaccccgctacctaataaaaacaacaaacgctaccgatctccgcaaccctccgttaaaattcttcgccttaaacgataacgcgaaacgcgccaaaaacctaaacccaaacccaacctcgctccaaaccgcatccccgcctaaaaaaaaaaaaaccccgaaaacaacgacgacacgaccgccttcgcgtaaaaccctaaccgaaaccttattaacatcactcaacgccgaaaacttaaaaaaaaaactatacaaaatactctatcgcgacataccgacaaccgacaaaacccaaccgttctatcgaacgaaactcctaaaaacaccgcatctaccgcgcgactcctactaacgaaaaatctaaaaaaaaacgcgctccgccgataaaaacccgaaccccaataaccaatcaacaaacgcctcgccgtacgcgaacgatacgcgccaaaccccgcccccgaacgcgcgacgacgtaaaaaaaaacgaaactaacacactaataaataaaaacgaaactaacacgctaacgataaaaaacccgccctaccgccgacgcctaaaccccgcgcgaaaaactactaaactccccttccctcacgccgcgaaactaaccgaaccgaaacactccgacccgaaattaattacgaccgcgaaactaacaaactctaaaaaccctacctctctaaaacgaaaacgtaaacaacgaaaacgcgcaccgcccgaacgaaattaaccgaaaaaacccgaaaaacctcgaaaaaaaactcgcgaaaaaaaacgcgtccaacgctcg

SEQ ID NO: 4231 - DNA, 936 bp, Artificial Sequence
  chemically treated genomic DNA (Homo sapiens) CpG-island No: 4231
tttgtatttatttaagttaattttgcggtttcgtttttttcgagtttagggttaggtcgtgtatttttttaattttttgtgcgagttttttttcgtcgggttttaagcgtttcgtcgttatgttttcgttttcgattttatttttatttcgttatttggtgggggtagtaggcgttatcgattttcgtagtttttcgttgaggtttttcgttttgggcggtgacgcggagcgcgttaagggtttgggtttaggtttagtttcgttttaggtcgtattttcgtttggggaaggagaggtttcgggggtagcggcggtacggtcgttttcgcgtgaggttttggtcgaggttttgttggtattatttagcgtcggagatttggggaagaagttgtatagggtgttttgtcgcgatatatcgatagtcggtaaggtttaatcgttttgtcggacggagtttttaaaagtatcgtatttatcgcgcggtttttgttggcgggaaatttggggggaggcgcgtttcgtcggtaggaattcgggttttagtggttaattaataggcgtttcgtcgtgcgcgggcggtgcgcgttaggtttcgttttcgggcgcgcggcgacgtggggaagggcggggttggtatattggtgggtaggggcggggttggtacgttggcggtgaggggttcgttttgtcgtcgacgtttgggtttcgcgcggggaattgttgagtttttttttttttacgtcgcggggttggtcgggtcggaatatttcgattcggggttagttgcggtcgcggggttagtaggttttgaaagttttgtttttttggagcggaagcgtgaatagcgggggcgcgtatcgttcgggcgggattaatcggggggattcgaaaggtttcggaaaggggttcgcggggagaaacgcgtttagcgttcg

SEQ ID NO: 4232 - DNA, 936 bp, Artificial Sequence
  chemically treated genomic DNA (Homo sapiens) CpG-island No: 4232
cgaacgctaaacgcgtttctccccgcgaacccctttccgaaacctttcgaatccccccgattaatcccgcccgaacgatacgcgcccccgctattcacgcttccgctccaaaaaaacaaaactttcaaaacctactaaccccgcgaccgcaactaaccccgaatcgaaatattccgacccgaccaaccccgcgacgtaaaaaaaaaaaaactcaacaattccccgcgcgaaacccaaacgtcgacgacaaaacgaacccctcaccgccaacgtaccaaccccgcccctacccaccaatataccaaccccgcccttccccacgtcgccgcgcgcccgaaaacgaaacctaacgcgcaccgcccgcgcacgacgaaacgcctattaattaaccactaaaacccgaattcctaccgacgaaacgcgcctccccccaaatttcccgccaacaaaaaccgcgcgataaatacgatacttttaaaaactccgtccgacaaaacgattaaaccttaccgactatcgatatatcgcgacaaaacaccctatacaacttcttccccaaatctccgacgctaaataataccaacaaaacctcgaccaaaacctcacgcgaaaacgaccgtaccgccgctacccccgaaacctctccttccccaaacgaaaatacgacctaaaacgaaactaaacctaaacccaaacccttaacgcgctccgcgtcaccgcccaaaacgaaaaacctcaacgaaaaactacgaaaatcgataacgcctactacccccaccaaataacgaaataaaaataaaatcgaaaacgaaaacataacgacgaaacgcttaaaacccgacgaaaaaaaactcgcacaaaaaattaaaaaaatacacgacctaaccctaaactcgaaaaaaacgaaaccgcaaaattaacttaaataaatacaaa

SEQ ID NO: 4233 - DNA, 624 bp, Artificial Sequence
  chemically treated genomic DNA (Homo sapiens) CpG-island No: 4233
ggtagtacggttcgggaggtcgcggttcgagatttcggtttttgttattgtggcggtagtattttttttagggtcgttttgtcgggttcgtttttttcggcgcgtggggtttttcgcgttgttatcgttcgggtttcgattagtttgggttttcggggagttagaaggcgggtagatagtgttagggttcggcgcgggttcgggttcggttcggtttcgttgtaggtttcggttttttttcggttttcgcgtcgcgtttcgcgtttttttttttttttcgttcgtcggtcgttgtcgttatcgtttttcggcgcgggttaaggaggagtcgggagacgtcgagtcgcgggtagcgtcgagtcgcgagtttcgttattcggtgtgcgtttcgtttggagagttacggtcgtttttacgtcggcgagggatttcgtcgttttcgtttatttgcggtcgcgtggtttcgggagttcgtcgtttattcgggatgataatttattgtttttcgtcgggagagtttttagtgcgtatcgtatatcgttaattttagttgatattttaatttcggcgttttattttgttaaatttcgtatatagatgaatagttttagtttttttaggatt

SEQ ID NO: 4234 - DNA, 624 bp, Artificial Sequence
  chemically treated genomic DNA (Homo sapiens) CpG-island No: 4234
aatcctaaaaaaactaaaactattcatctatatacgaaatttaacaaaataaaacgccgaaattaaaatatcaactaaaattaacgatatacgatacgcactaaaaactctcccgacgaaaaacaataaattatcatcccgaataaacgacgaactcccgaaaccacgcgaccgcaaataaacgaaaacgacgaaatccctcgccgacgtaaaaacgaccgtaactctccaaacgaaacgcacaccgaataacgaaactcgcgactcgacgctacccgcgactcgacgtctcccgactcctccttaacccgcgccgaaaaacgataacgacaacgaccgacgaacgaaaaaaaaaaaaaaacgcgaaacgcgacgcgaaaaccgaaaaaaaaccgaaacctacaacgaaaccgaaccgaacccgaacccgcgccgaaccctaacactatctacccgccttctaactccccgaaaacccaaactaatcgaaacccgaacgataacaacgcgaaaaaccccacgcgccgaaaaaaacgaacccgacaaaacgaccctaaaaaaaatactaccgccacaataacaaaaaccgaaatctcgaaccgcgacctcccgaaccgtactacc

SEQ ID NO: 4235 - DNA, 624 bp, Artificial Sequence
  chemically treated genomic DNA (Homo sapiens) CpG-island No: 4235
agttttgagaaagttggggttgtttatttgtatacggagtttaatagaatgaaacgtcggagttggggtgttagttggaattgacggtatacggtgcgtattagggattttttcgacggggagtagtgagttgttatttcgggtagacggcgaattttcggagttacgcggtcgtaggtgggcgagggcggcgagatttttcgtcggcgtgagagcggtcgtggttttttaggcggagcgtatatcgggtagcgaggttcgcggttcggcgttgttcgcggttcggcgtttttcggtttttttttaattcgcgtcgggaggcggtggcggtagcggtcggcgggcgggggagggggaggggcgcggagcgcggcgcggaggtcggggaggagtcggggtttgtagcggagtcgagtcgagttcgagttcgcgtcgagttttgatattgtttgttcgttttttggtttttcgggagtttagattggtcggagttcgagcggtggtagcgcggggagttttacgcgtcgaagggagcggattcgataggacggttttagaggaggtgttgtcgttatagtagtagggatcggagtttcgagtcgcggtttttcggatcgtgttgtt

SEQ ID NO: 4236 - DNA, 624 bp, Artificial Sequence
  chemically treated genomic DNA (Homo sapiens) CpG-island No: 4236
aacaacacgatccgaaaaaccgcgactcgaaactccgatccctactactataacgacaacacctcctctaaaaccgtcctatcgaatccgctcccttcgacgcgtaaaactccccgcgctaccaccgctcgaactccgaccaatctaaactcccgaaaaaccaaaaaacgaacaaacaatatcaaaactcgacgcgaactcgaactcgactcgactccgctacaaaccccgactcctccccgacctccgcgccgcgctccgcgcccctccccctcccccgcccgccgaccgctaccgccaccgcctcccgacgcgaattaaaaaaaaaccgaaaaacgccgaaccgcgaacaacgccgaaccgcgaacctcgctacccgatatacgctccgcctaaaaaaccacgaccgctctcacgccgacgaaaaatctcgccgccctcgcccacctacgaccgcgtaactccgaaaattcgccgtctacccgaaataacaactcactactccccgtcgaaaaaatccctaatacgcaccgtataccgtcaattccaactaacaccccaactccgacgtttcattctattaaactccgtatacaaataaacaaccccaactttctcaaaact

SEQ ID NO: 4237 - DNA, 1181 bp, Artificial Sequence
  chemically treated genomic DNA (Homo sapiens) CpG-island No: 4237
tagcggttcgggcggttcggtcgcggggtaggttggtagcgcggtgggcgtttcggcggtggcggcggcggcgttgggggcggcggcgggtcggaggcggttagtgcggcgatcgcgtatttagtcgtagtttacgtagaggcgtaggttttgttgcgcgtcgttcgtcgttagttttaggtgttcgatgagtagcggcggttcgacgcggtggaaggcggcggcgaagaaagcgcggtcgtgcgcgttggtggagaagagtagtaggtcgtattggaagtttcgcgggcggttttagcgtacgagtagcgagtttagtatttgtcgttgtacgttgatgttgtacggcgtcgttgtcgtcgtcgtttttttcgggttcgggcgttcggggggttcgggggtcgtcgaggttagtagtcgcggggcgatgggttcgttcgcggaggacgcgttgattgaagtattggagggtatttcgaggaggtcgggcgcgttcgcggtttcgtcgcggacgggcggtagcgggtaggcggcggttaggagcgcggcgagtaggggtagtatggtttgcggcgggcgtttacgcgcgcgaggtcggcggcggttgtatggcgagcgggcgacgggtcggcgagtttacggtgggatcgcgggagtcggcggtcgggcgtagtgcgggcgcgtcgggcgtttgttaagttcgtaggggcggcgcggaggcggtgacggcggttggttcggcgcggggatttttttagattcggttgcgtttggggtttttcgtcgttttcggcgtcggggtttttgggttgtcgcgttgttttgcggggtcgggtgttattttagagtaggatttttcggttcggtttcgtttttcgcgtgtttcgtttcgtttcgtttttcgttcgttaggttcggggatttaggggagggcggggttttacgcgtcggggttgggagaggaatcgtcggggcggggttgggtgcgggggcgcggcggagagcggatcgttcggggtgcgtgcgggcgggcggggaagtttgcggacgcgttcgggcgttttcgcgtttcgggtgaatcgcgtttttagagggaggttttagggttcggagattatttttttgttaggtttgaggggagtttcgttgtttcgttttagcgttatcgaattttttttgtt

SEQ ID NO: 4238 - DNA, 1181 bp, Artificial Sequence
  chemically treated genomic DNA (Homo sapiens) CpG-island No: 4238
aacaaaaaaaattcgataacgctaaaacgaaacaacgaaactcccctcaaacctaacaaaaaaataatctccgaaccctaaaacctccctctaaaaacgcgattcacccgaaacgcgaaaacgcccgaacgcgtccgcaaacttccccgcccgcccgcacgcaccccgaacgatccgctctccgccgcgcccccgcacccaaccccgccccgacgattcctctcccaaccccgacgcgtaaaaccccgccctcccctaaatccccgaacctaacgaacgaaaaacgaaacgaaacgaaacacgcgaaaaacgaaaccgaaccgaaaaatcctactctaaaataacacccgaccccgcaaaacaacgcgacaacccaaaaaccccgacgccgaaaacgacgaaaaaccccaaacgcaaccgaatctaaaaaaatccccgcgccgaaccaaccgccgtcaccgcctccgcgccgcccctacgaacttaacaaacgcccgacgcgcccgcactacgcccgaccgccgactcccgcgatcccaccgtaaactcgccgacccgtcgcccgctcgccatacaaccgccgccgacctcgcgcgcgtaaacgcccgccgcaaaccatactacccctactcgccgcgctcctaaccgccgcctacccgctaccgcccgtccgcgacgaaaccgcgaacgcgcccgacctcctcgaaataccctccaatacttcaatcaacgcgtcctccgcgaacgaacccatcgccccgcgactactaacctcgacgacccccgaaccccccgaacgcccgaacccgaaaaaaacgacgacgacaacgacgccgtacaacatcaacgtacaacgacaaatactaaactcgctactcgtacgctaaaaccgcccgcgaaacttccaatacgacctactactcttctccaccaacgcgcacgaccgcgctttcttcgccgccgccttccaccgcgtcgaaccgccgctactcatcgaacacctaaaactaacgacgaacgacgcgcaacaaaacctacgcctctacgtaaactacgactaaatacgcgatcgccgcactaaccgcctccgacccgccgccgcccccaacgccgccgccgccaccgccgaaacgcccaccgcgctaccaacctaccccgcgaccgaaccgcccgaaccgcta

SEQ ID NO: 4239 - DNA, 1181 bp, Artificial Sequence
  chemically treated genomic DNA (Homo sapiens) CpG-island No: 4239
aataaaggaggttcggtagcgttaaggcgagatagcgaagttttttttaggtttgataaaaggatggttttcgggttttggagtttttttttgagaacgcgatttattcggagcgcgggggcgttcgggcgcgttcgtaggttttttcgttcgttcgtacgtatttcgggcgattcgtttttcgtcgcgttttcgtatttagtttcgtttcggcgattttttttttagtttcggcgcgtggaatttcgtttttttttgagttttcgagtttggcgagcggagggcggggcggggcggggtacgcgggaggcggagtcgagtcggggaattttgttttgggatagtattcggtttcgtagagtagcgcggtagtttaagggtttcggcgtcgggggcggcggggaattttaaacgtaatcgggtttggagggattttcgcgtcgagttagtcgtcgttatcgttttcgcgtcgtttttgcgggtttggtaggcgttcggcgcgttcgtattgcgttcggtcgtcggttttcgcggttttatcgtgagttcgtcggttcgtcgttcgttcgttatgtaatcgtcgtcggtttcgcgcgcgtaggcgttcgtcgtaggttatgttgtttttgttcgtcgcgtttttggtcgtcgtttgttcgttgtcgttcgttcgcggcggggtcgcggacgcgttcggttttttcggggtgttttttaatgttttagttaacgcgtttttcgcggacgagtttatcgtttcgcggttgttggtttcggcggttttcgggtttttcgagcgttcgggttcggaggagacggcggcggtagcggcgtcgtgtaatattagcgtgtagcggtagatgttgagttcgttgttcgtgcgttggggtcgttcgcggggtttttagtgcgatttattgtttttttttattaacgcgtacggtcgcgtttttttcgtcgtcgttttttatcgcgtcgggtcgtcgttgtttatcgagtatttggggttggcggcgggcggcgcgtagtaggatttgcgtttttgcgtgggttgcggttgggtgcgcggtcgtcgtattggtcgttttcggttcgtcgtcgtttttagcgtcgtcgtcgttatcgtcggggcgtttatcgcgttgttagtttatttcgcggtcgagtcgttcgggtcgttg

SEQ ID NO: 4240 - DNA, 1181 bp, Artificial Sequence
  chemically treated genomic DNA (Homo sapiens) CpG-island No: 4240
caacgacccgaacgactcgaccgcgaaataaactaacaacgcgataaacgccccgacgataacgacgacgacgctaaaaacgacgacgaaccgaaaacgaccaatacgacgaccgcgcacccaaccgcaacccacgcaaaaacgcaaatcctactacgcgccgcccgccgccaaccccaaatactcgataaacaacgacgacccgacgcgataaaaaacgacgacgaaaaaaacgcgaccgtacgcgttaataaaaaaaaacaataaatcgcactaaaaaccccgcgaacgaccccaacgcacgaacaacgaactcaacatctaccgctacacgctaatattacacgacgccgctaccgccgccgtctcctccgaacccgaacgctcgaaaaacccgaaaaccgccgaaaccaacaaccgcgaaacgataaactcgtccgcgaaaaacgcgttaactaaaacattaaaaaacaccccgaaaaaaccgaacgcgtccgcgaccccgccgcgaacgaacgacaacgaacaaacgacgaccaaaaacgcgacgaacaaaaacaacataacctacgacgaacgcctacgcgcgcgaaaccgacgacgattacataacgaacgaacgacgaaccgacgaactcacgataaaaccgcgaaaaccgacgaccgaacgcaatacgaacgcgccgaacgcctaccaaacccgcaaaaacgacgcgaaaacgataacgacgactaactcgacgcgaaaatccctccaaacccgattacgtttaaaattccccgccgcccccgacgccgaaacccttaaactaccgcgctactctacgaaaccgaatactatcccaaaacaaaattccccgactcgactccgcctcccgcgtaccccgccccgccccgccctccgctcgccaaactcgaaaactcaaaaaaaaacgaaattccacgcgccgaaactaaaaaaaaaatcgccgaaacgaaactaaatacgaaaacgcgacgaaaaacgaatcgcccgaaatacgtacgaacgaacgaaaaaacctacgaacgcgcccgaacgcccccgcgctccgaataaatcgcgttctcaaaaaaaaactccaaaacccgaaaaccatccttttatcaaacctaaaaaaaacttcgctatctcgccttaacgctaccgaacctcctttatt

SEQ ID NO: 4241 - DNA, 760 bp, Artificial Sequence
  chemically treated genomic DNA (Homo sapiens) CpG-island No: 4241
  unsure (559)
agcgtttatttaggagtaatatttttttgcgatcgaagtgatggatgttgtcgacgttgcgtaggtcgcgtaagtgtgttagcgattgttagttgaaacggagcgattggacgcgttggttaatgcggcgggaattttacgtatgggcgcgatcgattagtttagtaaagaggattggtagtagatttttgcggttaacgtcggcggtgcgtttaatttgttttagtaaattatgaattagtttcgtcgttagcggggcggggcgattgttattgtggcgttcgacgtcgcgtatacgtcgcgtattggtatgagtgtttatggcgtatcgaaagcggcgttgaaaagtttggcgttgagcgtcgggttggaattggcgggtagcggcgtgcgttgtaatgtggtttcgtttggttttatcgatatcgatatgtaacgtacgttgtgggtgagcgatgacgtcgaagaatacgtattcgcggttttggcgagtagtttaaattcggtatttcgttggggaaaatcgttcgtttataagagatcgttaatacgattttgnttttcgtttttgatttcgttagttatattattttatagggaaattggggtcgattggcggtttaacgttggggggtataaagtatgatttggaaaacggtatttaaacgtttcgattaaattgaattttaattcgcggattattatttatggtggggcgtatttttgggggaaatggggttttaattttttttgggtttta

SEQ ID NO: 4242 - DNA, 760 bp, Artificial Sequence
  chemically treated genomic DNA (Homo sapiens) CpG-island No: 4242
  unsure (202)
taaaacccaaaaaaaattaaaaccccatttcccccaaaaatacgccccaccataaataataatccgcgaattaaaattcaatttaatcgaaacgtttaaataccgttttccaaatcatactttataccccccaacgttaaaccgccaatcgaccccaatttccctataaaataatataactaacgaaatcaaaaacgaaaancaaaatcgtattaacgatctcttataaacgaacgattttccccaacgaaataccgaatttaaactactcgccaaaaccgcgaatacgtattcttcgacgtcatcgctcacccacaacgtacgttacatatcgatatcgataaaaccaaacgaaaccacattacaacgcacgccgctacccgccaattccaacccgacgctcaacgccaaacttttcaacgccgctttcgatacgccataaacactcataccaatacgcgacgtatacgcgacgtcgaacgccacaataacaatcgccccgccccgctaacgacgaaactaattcataatttactaaaacaaattaaacgcaccgccgacgttaaccgcaaaaatctactaccaatcctctttactaaactaatcgatcgcgcccatacgtaaaattcccgccgcattaaccaacgcgtccaatcgctccgtttcaactaacaatcgctaacacacttacgcgacctacgcaacgtcgacaacatccatcacttcgatcgcaaaaaaatattactcctaaataaacgct

SEQ ID NO: 4243 - DNA, 760 bp, Artificial Sequence
  chemically treated genomic DNA (Homo sapiens) CpG-island No: 4243
  unsure (202)
tggggtttagaaggggttaaaattttattttttttaagaatgcgttttattatgggtggtaattcgcgggttggggtttagtttggtcgaagcgtttaaatgtcgttttttagattatgttttatgttttttagcgttgagtcgttaatcgattttaatttttttgtagggtaatatggttggcgaggttagaggcgaggantaaaatcgtgttggcgattttttgtggacgggcgattttttttagcggaatgtcgagtttaaattgttcgttaaagtcgcgaatacgtgtttttcggcgttatcgtttatttatagcgtgcgttgtatatcggtgtcggtggagttaggcgaaattatattatagcgtacgtcgttattcgttagttttagttcgacgtttaacgttaggttttttagcgtcgttttcgatgcgttataagtatttatgttaatacgcggcgtgtgcgcggcgtcggacgttatagtgataatcgtttcgtttcgttgacggcgaaattggtttatggtttgttggaataggttaaacgtatcgtcgacgttaatcgtaaaagtttgttgttagttttttttattgagttgatcggtcgcgtttatgcgtaaaattttcgtcgtattgattagcgcgtttagtcgtttcgttttagttaatagtcgttgatatatttgcgcgatttgcgtagcgtcggtaatatttattatttcggtcgtaaagggatattgtttttgagtgaacgtt

SEQ ID NO: 4244 - DNA, 760 bp, Artificial Sequence
  chemically treated genomic DNA (Homo sapiens) CpG-island No: 4244
  unsure (559)
aacgttcactcaaaaacaatatccctttacgaccgaaataataaatattaccgacgctacgcaaatcgcgcaaatatatcaacgactattaactaaaacgaaacgactaaacgcgctaatcaatacgacgaaaattttacgcataaacgcgaccgatcaactcaataaaaaaaactaacaacaaacttttacgattaacgtcgacgatacgtttaacctattccaacaaaccataaaccaatttcgccgtcaacgaaacgaaacgattatcactataacgtccgacgccgcgcacacgccgcgtattaacataaatacttataacgcatcgaaaacgacgctaaaaaacctaacgttaaacgtcgaactaaaactaacgaataacgacgtacgctataatataatttcgcctaactccaccgacaccgatatacaacgcacgctataaataaacgataacgccgaaaaacacgtattcgcgactttaacgaacaatttaaactcgacattccgctaaaaaaaatcgcccgtccacaaaaaatcgccaacacgattttantcctcgcctctaacctcgccaaccatattaccctacaaaaaaattaaaatcgattaacgactcaacgctaaaaaacataaaacataatctaaaaaacgacatttaaacgcttcgaccaaactaaaccccaacccgcgaattaccacccataataaaacgcattcttaaaaaaaataaaattttaaccccttctaaacccca

SEQ ID NO: 4245 - DNA, 637 bp, Artificial Sequence
  chemically treated genomic DNA (Homo sapiens) CpG-island No: 4245
tcgtcgtgcgtttattttttgttagtggttcgtttcgaatatttttcgtcgggcggcgggtattgcggttcgttttattttcggttgttgttcggttttatattcggtgttcgttcgttttcggttttttcgtcgtgatgttgtttcgatttcgttgtgtgtttcgggcgtttagtcgttcgtttttcgttttttagaaggtacggtttggtcgagtcggggtttcgacgggtgaggagtttgttggcgggtagagaggcggtttggaaggtaggggcgcggcgcgtcggtcgggtcgggtattaagggtattgggacgcggaggtcgcgcgggttgggcggttcggggtcgtggttgttttcgggatcgttttgcggagtttagcggttttttgttttttttaggtagtttgcggggaacgttttttgttgtattttatttttcgcgcgggagttggggagtcgcgttcgtttagatatttgatttagagttagggaggaggcgcggcggagtttttcggcgggattcggcgttcgtttcgttttgttttgttaaaattagtgggtattaatgagtttcgttgggaagttgagatagtttggtaggtttagcgtgttgattgggtttgttagtacg

SEQ ID NO: 4246 - DNA, 637 bp, Artificial Sequence
  chemically treated genomic DNA (Homo sapiens) CpG-island No: 4246
cgtactaacaaacccaatcaacacgctaaacctaccaaactatctcaacttcccaacgaaactcattaatacccactaattttaacaaaacaaaacgaaacgaacgccgaatcccgccgaaaaactccgccgcgcctcctccctaactctaaatcaaatatctaaacgaacgcgactccccaactcccgcgcgaaaaataaaatacaacaaaaaacgttccccgcaaactacctaaaaaaaacaaaaaaccgctaaactccgcaaaacgatcccgaaaacaaccacgaccccgaaccgcccaacccgcgcgacctccgcgtcccaatacccttaatacccgacccgaccgacgcgccgcgcccctaccttccaaaccgcctctctacccgccaacaaactcctcacccgtcgaaaccccgactcgaccaaaccgtaccttctaaaaaacgaaaaacgaacgactaaacgcccgaaacacacaacgaaatcgaaacaacatcacgacgaaaaaaccgaaaacgaacgaacaccgaatataaaaccgaacaacaaccgaaaataaaacgaaccgcaatacccgccgcccgacgaaaaatattcgaaacgaaccactaacaaaaaataaacgcacgacga

SEQ ID NO: 4247 - DNA, 637 bp, Artificial Sequence
  chemically treated genomic DNA (Homo sapiens) CpG-island No: 4247
cgtgttggtagatttaattaatacgttgggtttgttaaattattttaattttttaacgggatttattaatatttattgattttaatagagtaagacgagacgggcgtcgaatttcgtcggaggatttcgtcgcgttttttttttaattttgagttaagtatttggacgggcgcggttttttagttttcgcgcggagggtggggtatagtaggaaacgtttttcgtaggttgtttggagaaggtagggggtcgttgggtttcgtaaaacggtttcgagggtaattacggtttcgggtcgtttagttcgcgcggttttcgcgttttagtgtttttggtgttcggttcggtcggcgcgtcgcgtttttgttttttaggtcgtttttttgttcgttaatagattttttattcgtcggggtttcggttcggttagatcgtattttttggaaggcggagagcgagcggttgaacgttcgagatatatagcgggatcgggatagtattacggcggaggagtcgagggcgggcggatatcggatatagggtcggataataatcggaagtggggcgggtcgtagtattcgtcgttcgacgaggggtgttcggagcgaattattggtagggggtgggcgtacggcgg

SEQ ID NO: 4248 - DNA, 637 bp, Artificial Sequence
  chemically treated genomic DNA (Homo sapiens) CpG-island No: 4248
ccgccgtacgcccaccccctaccaataattcgctccgaacacccctcgtcgaacgacgaatactacgacccgccccacttccgattattatccgaccctatatccgatatccgcccgccctcgactcctccgccgtaatactatcccgatcccgctatatatctcgaacgttcaaccgctcgctctccgccttccaaaaaatacgatctaaccgaaccgaaaccccgacgaataaaaaatctattaacgaacaaaaaaacgacctaaaaaacaaaaacgcgacgcgccgaccgaaccgaacaccaaaaacactaaaacgcgaaaaccgcgcgaactaaacgacccgaaaccgtaattaccctcgaaaccgttttacgaaacccaacgaccccctaccttctccaaacaacctacgaaaaacgtttcctactataccccaccctccgcgcgaaaactaaaaaaccgcgcccgtccaaatacttaactcaaaattaaaaaaaaaacgcgacgaaatcctccgacgaaattcgacgcccgtctcgtcttactctattaaaatcaataaatattaataaatcccgttaaaaaattaaaataatttaacaaacccaacgtattaattaaatctaccaacacg

SEQ ID NO: 4249 - DNA, 647 bp, Artificial Sequence
  chemically treated genomic DNA (Homo sapiens) CpG-island No: 4249
  unsure (2, 11, 138, 303)
gncggcggcgngcggtattttttcggttattgttgttttttttgggcgagattagtcgcgttttgggcgttattttagtttggtcggcggtttattttgtttcggttgttgtagcggtgtcgcgagcggagttttttngatgggttcggacgtgggcggcggcggcggtggcggcggggtcggggcgtagcgtattcgtagcgggagtcgcgagttgatttgggcggtttgatatagtacggttttttatgtcgaagtcgaggcggggggagaaggaaaataaagggggaggggtcggtatangagggggcggtgggaattattatattcgggaggaaagtacgcgggcgggataaggaattagtttcgaatagggaaagcgaagcgagggaaaaaaattaattcgatttgtcggggtttaatttcggatcgtttttaagcgttaatttgttttttttttttcgttcggtgattgggggaacgaatagcggtcgataggaaacgcggttacgttaatttgtttttcgaataaatttggacgaaataattcgtcgacggtttaaagggggaattcggaatttttaaatcgggggcgaggaatttaggttttttgtggaagaaatttatttaggtggtattaattttga

SEQ ID NO: 4250 - DNA, 647 bp, Artificial Sequence
  chemically treated genomic DNA (Homo sapiens) CpG-island No: 4250
  unsure (345, 510, 637, 646)
tcaaaattaataccacctaaataaatttcttccacaaaaaacctaaattcctcgcccccgatttaaaaattccgaattccccctttaaaccgtcgacgaattatttcgtccaaatttattcgaaaaacaaattaacgtaaccgcgtttcctatcgaccgctattcgttcccccaatcaccgaacgaaaaaaaaaaaacaaattaacgcttaaaaacgatccgaaattaaaccccgacaaatcgaattaatttttttccctcgcttcgctttccctattcgaaactaattccttatcccgcccgcgtactttcctcccgaatataataattcccaccgccccctcntataccgacccctccccctttattttccttctccccccgcctcgacttcgacataaaaaaccgtactatatcaaaccgcccaaatcaactcgcgactcccgctacgaatacgctacgccccgaccccgccgccaccgccgccgccgcccacgtccgaacccatcnaaaaaactccgctcgcgacaccgctacaacaaccgaaacaaaataaaccgccgaccaaactaaaataacgcccaaaacgcgactaatctcgcccaaaaaaaacaacaataaccgaaaaaataccgcncgccgccgnc

SEQ ID NO: 4251 - DNA, 647 bp, Artificial Sequence
  chemically treated genomic DNA (Homo sapiens) CpG-island No: 4251
  unsure (345, 510, 637, 646)
ttaagattggtgttatttaagtgggttttttttataaggggtttaagtttttcgttttcgatttagagatttcgggttttttttttgggtcgtcggcgggttgtttcgtttaagtttgttcggggggtaagttaacgtgatcgcgttttttgtcggtcgttgttcgtttttttagttatcgagcgagagggaagaaatagattggcgtttgaaggcgattcggagttgggtttcgataaatcggattgatttttttttttcgtttcgttttttttgttcggggttggttttttgtttcgttcgcgtgtttttttttcgggtgtgatggtttttatcgtttttttntgtgtcggtttttttttttttgtttttttttttttttcgtttcggtttcgatatgaggggtcgtgttgtgttaggtcgtttaagttagttcgcggttttcgttgcggatgcgttgcgtttcggtttcgtcgttatcgtcgtcgtcgtttacgttcggatttattnggggggtttcgttcgcggtatcgttgtagtagtcggggtagagtgggtcgtcgattaggttgaggtggcgtttaagacgcggttgatttcgtttagggggggtagtagtagtcggaggaatgtcgtncgtcgtcgnt

SEQ ID NO: 4252 - DNA, 647 bp, Artificial Sequence
  chemically treated genomic DNA (Homo sapiens) CpG-island No: 4252
  unsure (2, 11, 138, 303)
ancgacgacgnacgacattcctccgactactactaccccccctaaacgaaatcaaccgcgtcttaaacgccacctcaacctaatcgacgacccactctaccccgactactacaacgataccgcgaacgaaaccccccnaataaatccgaacgtaaacgacgacgacgataacgacgaaaccgaaacgcaacgcatccgcaacgaaaaccgcgaactaacttaaacgacctaacacaacacgacccctcatatcgaaaccgaaacgaaaaaaaaaaaaaaacaaaaaaaaaaaaaccgacacanaaaaaaacgataaaaaccatcacacccgaaaaaaaaacacgcgaacgaaacaaaaaaccaaccccgaacaaaaaaaacgaaacgaaaaaaaaaaatcaatccgatttatcgaaacccaactccgaatcgccttcaaacgccaatctatttcttccctctcgctcgataactaaaaaaacgaacaacgaccgacaaaaaacgcgatcacgttaacttaccccccgaacaaacttaaacgaaacaacccgccgacgacccaaaaaaaaaacccgaaatctctaaatcgaaaacgaaaaacttaaaccccttataaaaaaaacccacttaaataacaccaatcttaa

SEQ ID NO: 4253 - DNA, 806 bp, Artificial Sequence
  chemically treated genomic DNA (Homo sapiens) CpG-island No: 4253
cgattcgtcgtagaggaaaaggaaattttaaataaaattcgggcgtagagtttatttttattggttaaagagcgtcgttaagatttttttcgttcggggttgttcgcgttgttattagtaaagatggcggttataggcggagtcgtttatttcgaaggtcgtaggttattttgtcggttacgattatttacgcggagttttttacgtttttcgcggtttgacgtattgtaggtgtagcgcgattaattagacggcgcggtttttttcggttaattattgtagggtcgcgtcggtttattagagcgtttttgttaaattgaacgaggaaagaagttttagtagcgttaattaagtaatcggttatagatcgcgtttcggtgcgtgtgtgacgatatcgtcgtgtgttttttcgttgggagatatagtgttttcgtttttgtttcgtttcgttcgcgagcgttttaaaggtttgggcgtgcggtttgtttttttttttcgtttgacgggcggtggttttttcgagatagaaatttgattgaaaaataatattaaatattcgtgttgcggttcgtggttttttatagggttatttgaattagtttcgtttgtttttttgttttttgtcgttcgtttttcgcgttttgtgaaaatagttggcgtcgtagaaatgagataaacgtttttgagttcgaaattcgtattcgaattgttatcgagtcgattttttttgttttggaatttagggttcggttattcgagaagtatttttatgggtattttgtttttataagggttcgtttttattt

SEQ ID NO: 4254 - DNA, 806 bp, Artificial Sequence
  chemically treated genomic DNA (Homo sapiens) CpG-island No: 4254
aaataaaaacgaacccttataaaaacaaaatacccataaaaatacttctcgaataaccgaaccctaaattccaaaacaaaaaaaatcgactcgataacaattcgaatacgaatttcgaactcaaaaacgtttatctcatttctacgacgccaactattttcacaaaacgcgaaaaacgaacgacaaaaaacaaaaaaacaaacgaaactaattcaaataaccctataaaaaaccacgaaccgcaacacgaatatttaatattatttttcaatcaaatttctatctcgaaaaaaccaccgcccgtcaaacgaaaaaaaaaaacaaaccgcacgcccaaacctttaaaacgctcgcgaacgaaacgaaacaaaaacgaaaacactatatctcccaacgaaaaaacacacgacgatatcgtcacacacgcaccgaaacgcgatctataaccgattacttaattaacgctactaaaacttctttcctcgttcaatttaacaaaaacgctctaataaaccgacgcgaccctacaataattaaccgaaaaaaaccgcgccgtctaattaatcgcgctacacctacaatacgtcaaaccgcgaaaaacgtaaaaaactccgcgtaaataatcgtaaccgacaaaataacctacgaccttcgaaataaacgactccgcctataaccgccatctttactaataacaacgcgaacaaccccgaacgaaaaaaatcttaacgacgctctttaaccaataaaaataaactctacgcccgaattttatttaaaatttccttttcctctacgacgaatcg

SEQ ID NO: 4255 - DNA, 806 bp, Artificial Sequence
  chemically treated genomic DNA (Homo sapiens) CpG-island No: 4255
aaatggaaacgggtttttgtagaaataaagtgtttatgagggtgtttttcgggtggtcgggttttgagttttaaaataggaagggtcggttcggtggtagttcgagtgcgggtttcgagtttaggggcgtttattttatttttgcggcgttaattgtttttataaaacgcgaaggacgaacggtaaagagtaaggggataggcgaggttagtttaggtggttttatggagggttacgggtcgtagtacgggtatttggtattattttttagttaagtttttgtttcgggggaattatcgttcgttaagcggagaggaagagtaagtcgtacgtttaagtttttggagcgttcgcgggcggggcgaggtaagggcgagggtattatattttttagcggaggagtatacggcggtgtcgttatatacgtatcggaacgcggtttgtagtcggttgtttagttggcgttgttgaggttttttttttcgtttagtttgataaggacgttttgataggtcggcgcgattttgtagtggttggtcgaaaagagtcgcgtcgtttgattggtcgcgttgtatttgtaatgcgttaagtcgcgaagggcgtggagggtttcgcgtgaatggtcgtggtcggtagggtagtttgcggttttcggagtgagcggtttcgtttatggtcgttatttttattagtggtagcgcggatagtttcggacggaaggggttttggcggcgttttttggttagtagaaataggttttgcgttcgagttttgtttggggttttttttttttttacggcgggtcg

SEQ ID NO: 4256 - DNA, 806 bp, Artificial Sequence
  chemically treated genomic DNA (Homo sapiens) CpG-island No: 4256
cgacccgccgtaaaaaaaaaaaaaaccccaaacaaaactcgaacgcaaaacctatttctactaaccaaaaaacgccgccaaaaccccttccgtccgaaactatccgcgctaccactaataaaaataacgaccataaacgaaaccgctcactccgaaaaccgcaaactaccctaccgaccacgaccattcacgcgaaaccctccacgcccttcgcgacttaacgcattacaaatacaacgcgaccaatcaaacgacgcgactcttttcgaccaaccactacaaaatcgcgccgacctatcaaaacgtccttatcaaactaaacgaaaaaaaaaacctcaacaacgccaactaaacaaccgactacaaaccgcgttccgatacgtatataacgacaccgccgtatactcctccgctaaaaaatataataccctcgcccttacctcgccccgcccgcgaacgctccaaaaacttaaacgtacgacttactcttcctctccgcttaacgaacgataattcccccgaaacaaaaacttaactaaaaaataataccaaatacccgtactacgacccgtaaccctccataaaaccacctaaactaacctcgcctatccccttactctttaccgttcgtccttcgcgttttataaaaacaattaacgccgcaaaaataaaataaacgcccctaaactcgaaacccgcactcgaactaccaccgaaccgacccttcctattttaaaactcaaaacccgaccacccgaaaaacaccctcataaacactttatttctacaaaaacccgtttccattt

SEQ ID NO: 4257 - DNA, 770 bp, Artificial Sequence
  chemically treated genomic DNA (Homo sapiens) CpG-island No: 4257
ttcgtatttattgtatttattagcgtcgtattcgggttgtttgtagcgtagcgtttcggtttgggagtcgggcggggtcgggtattagattttttttttcggttcgtttttttttatttcgttttttcgtcggcgcgaaggtggtaggtcgggcgggtagtggagaatgaatgggttggagttggtcggtggcgtatattgtttcggtcgggtgttgaggggcgtagttagcgttcgttatttttttattttggtcggttttgttgggcgttttttttcggtcgttttttttttttttttttcggggggcgcggcgcgggcgtgggttgggaaggaaggagtcggggaagggtggggttgggggtaggaaggcgaggggttgggggcggagagggcggaagcggcggtcgggtcgttttgcgttcgggcggggttttgcggtgtggtcgtggtttgtttttgtcgttttcgtattttgcggttttttatttagtgtagtagtgcgggcgggcgtgagtttcggtgtattaggaggtatttttcgcgggaggcgttgggttcgcgttaattggggcggggggggggggcggcgggggaggagggaattggcgcgcggtttggtttttattagagacgtaaagtttttgtttcgggaggaggcggcggcgtcgcgggttcgtcgtttgggggagtagaagcgggtgggaggtgcgggtggttttggttttagttttggtgcgcgggggtcgggggtggtgatttttttggtt

SEQ ID NO: 4258 - DNA, 770 bp, Artificial Sequence
  chemically treated genomic DNA (Homo sapiens) CpG-island No: 4258
aaccaaaaaaatcaccacccccgacccccgcgcaccaaaactaaaaccaaaaccacccgcacctcccacccgcttctactcccccaaacgacgaacccgcgacgccgccgcctcctcccgaaacaaaaactttacgtctctaataaaaaccaaaccgcgcgccaattccctcctcccccgccgccccccccccccgccccaattaacgcgaacccaacgcctcccgcgaaaaatacctcctaatacaccgaaactcacgcccgcccgcactactacactaaataaaaaaccgcaaaatacgaaaacgacaaaaacaaaccacgaccacaccgcaaaaccccgcccgaacgcaaaacgacccgaccgccgcttccgccctctccgcccccaacccctcgccttcctacccccaaccccacccttccccgactccttccttcccaacccacgcccgcgccgcgccccccgaaaaaaaaaaaaaaaaaacgaccgaaaaaaaacgcccaacaaaaccgaccaaaataaaaaaataacgaacgctaactacgcccctcaacacccgaccgaaacaatatacgccaccgaccaactccaacccattcattctccactacccgcccgacctaccaccttcgcgccgacgaaaaaacgaaataaaaaaaaacgaaccgaaaaaaaaaatctaatacccgaccccgcccgactcccaaaccgaaacgctacgctacaaacaacccgaatacgacgctaataaatacaataaatacgaa

SEQ ID NO: 4259 - DNA, 770 bp, Artificial Sequence
  chemically treated genomic DNA (Homo sapiens) CpG-island No: 4259
ggttaggagggttattattttcggttttcgcgtattagggttgaggttaaggttattcgtattttttattcgtttttgtttttttaggcgacgagttcgcggcgtcgtcgttttttttcggagtagaaattttgcgtttttaatggaaattaagtcgcgcgttagtttttttttttttcgtcgtttttttttttcgttttaattagcgcgagtttagcgtttttcgcgggaagtgttttttggtgtatcgaggtttacgttcgttcgtattgttgtattgggtggggggtcgtagggtgcgaaagcggtaggaataagttacggttatatcgtagggtttcgttcgggcgtagggcggttcggtcgtcgttttcgtttttttcgtttttaatttttcgtttttttgtttttaattttattttttttcggtttttttttttttagtttacgttcgcgtcgcgtttttcgggaagaaggaggggagagcgatcgagggagggcgtttagtagggtcggttaaagtggggaggtggcgggcgttgattgcgttttttaatattcggtcggaataatgtgcgttatcggttagttttagtttatttattttttattgttcgttcgatttgttattttcgcgtcggcggagaagcggggtggggaggggcgggtcgggggggggggtttagtgttcggtttcgttcggtttttaggtcgaaacgttgcgttgtaggtagttcgggtgcggcgttagtggatgtagtgggtgcggg

SEQ ID NO: 4260 - DNA, 770 bp, Artificial Sequence
  chemically treated genomic DNA (Homo sapiens) CpG-island No: 4260
cccgcacccactacatccactaacgccgcacccgaactacctacaacgcaacgtttcgacctaaaaaccgaacgaaaccgaacactaaacccccccccccgacccgcccctccccaccccgcttctccgccgacgcgaaaataacaaatcgaacgaacaataaaaaataaataaactaaaactaaccgataacgcacattattccgaccgaatattaaaaaacgcaatcaacgcccgccacctccccactttaaccgaccctactaaacgccctccctcgatcgctctcccctccttcttcccgaaaaacgcgacgcgaacgtaaactaaaaaaaaaaaaaccgaaaaaaaataaaattaaaaacaaaaaaacgaaaaattaaaaacgaaaaaaacgaaaacgacgaccgaaccgccctacgcccgaacgaaaccctacgatataaccgtaacttattcctaccgctttcgcaccctacgaccccccacccaatacaacaatacgaacgaacgtaaacctcgatacaccaaaaaacacttcccgcgaaaaacgctaaactcgcgctaattaaaacgaaaaaaaaaaacgacgaaaaaaaaaaaaactaacgcgcgacttaatttccattaaaaacgcaaaatttctactccgaaaaaaaacgacgacgccgcgaactcgtcgcctaaaaaaacaaaaacgaataaaaaatacgaataaccttaacctcaaccctaatacgcgaaaaccgaaaataataaccctcctaacc

SEQ ID NO: 4261 - DNA, 527 bp, Artificial Sequence
  chemically treated genomic DNA (Homo sapiens) CpG-island No: 4261
cgatttcgatttttaattcggttcgtagtcgaattcgagttgttttagtttttttttcgggacgtcggtcgcgtttttattttttttggttcggttcgcgggcgtttttatttgcgttcgggtttcgcggtcgttttagtttcgtcgcgtagtcgaatttttcgtttcggttcgcgagcgttcgtttttttttgcgggggcggggtcgatattcggggggcgggttttggcgtttcggtaaggttaatcgcgagtttcggttgcgggaggtcggagcgggggcggggcgcggggtaggtagcggggtaggttgcgtttaggagagtggggcggggtttcgggcgcgggcggggtcgggggcggggcgaagagcggttttttagggtgatttcgtgacgttaggaaggcgcgagtagtttcgcgagttcgaatttcgcgttaggtgagttggttcgaattttgtatgttagtttcgggggtttatttgttggggaagaatgttagtgattataattgttgtatcgttt

SEQ ID NO: 4262 - DNA, 527 bp, Artificial Sequence
  chemically treated genomic DNA (Homo sapiens) CpG-island No: 4262
aaacgatacaacaattataatcactaacattcttccccaacaaataaacccccgaaactaacatacaaaattcgaaccaactcacctaacgcgaaattcgaactcgcgaaactactcgcgccttcctaacgtcacgaaatcaccctaaaaaaccgctcttcgccccgcccccgaccccgcccgcgcccgaaaccccgccccactctcctaaacgcaacctaccccgctacctaccccgcgccccgcccccgctccgacctcccgcaaccgaaactcgcgattaaccttaccgaaacgccaaaacccgccccccgaatatcgaccccgcccccgcaaaaaaaaacgaacgctcgcgaaccgaaacgaaaaattcgactacgcgacgaaactaaaacgaccgcgaaacccgaacgcaaataaaaacgcccgcgaaccgaaccaaaaaaaataaaaacgcgaccgacgtcccgaaaaaaaaactaaaacaactcgaattcgactacgaaccgaattaaaaatcgaaatcg

SEQ ID NO: 4263 - DNA, 527 bp, Artificial Sequence
  chemically treated genomic DNA (Homo sapiens) CpG-island No: 4263
aagcggtgtagtagttatgattattgatatttttttttagtaaatgagttttcggagttggtatgtaggattcgaattagtttatttagcgcgggattcgaattcgcgaaattattcgcgtttttttgacgttacgaagttattttggaaagtcgtttttcgtttcgttttcggtttcgttcgcgttcggagtttcgttttatttttttgggcgtagtttatttcgttgtttgtttcgcgtttcgttttcgtttcggtttttcgtagtcggggttcgcgattggttttgtcgggacgttagggttcgtttttcgagtgtcggtttcgttttcgtagaggggagcgagcgttcgcgggtcggggcggagggttcggttgcgcggcggggttgaggcggtcgcggggttcgagcgtaggtaagggcgttcgcgaatcgggttaggggaagtgagggcgcggtcggcgtttcggagaggggattgggatagttcggattcggttgcggatcgagttgggggtcggagtcg

SEQ ID NO: 4264 - DNA, 527 bp, Artificial Sequence
  chemically treated genomic DNA (Homo sapiens) CpG-island No: 4264
cgactccgacccccaactcgatccgcaaccgaatccgaactatcccaatcccctctccgaaacgccgaccgcgccctcacttcccctaacccgattcgcgaacgcccttacctacgctcgaaccccgcgaccgcctcaaccccgccgcgcaaccgaaccctccgccccgacccgcgaacgctcgctcccctctacgaaaacgaaaccgacactcgaaaaacgaaccctaacgtcccgacaaaaccaatcgcgaaccccgactacgaaaaaccgaaacgaaaacgaaacgcgaaacaaacaacgaaataaactacgcccaaaaaaataaaacgaaactccgaacgcgaacgaaaccgaaaacgaaacgaaaaacgactttccaaaataacttcgtaacgtcaaaaaaacgcgaataatttcgcgaattcgaatcccgcgctaaataaactaattcgaatcctacataccaactccgaaaactcatttactaaaaaaaaatatcaataatcataactactacaccgctt

SEQ ID NO: 4265 - DNA, 685 bp, Artificial Sequence
  chemically treated genomic DNA (Homo sapiens) CpG-island No: 4265
cgaggggattaatgcggagaggggcggcggggtgggtttcggtggggcgggttcggtaggggggcgtttttcgggtgggggaggggaggcggtcgggagttgtttaaggtgagcgcggaggggtcggtcgggttcggcgggaagggacgggggacgttcggcgaggggtttcggagttacgcggggaagggttcggttttaaggttcgggaggttggggtcgggataaaggagggacgcgcggcggggaggacggtcggttgggggttgcgtagggatttttttttcgtttcgggtcgtttatttgggttcgttggtttttgcggcgtcgcggtcgttgtttttgttcgtttcggtgttcgttggcgtcgtcgtttttcgttcgttcgagtcgtcgtagtcgcgttcgcgtcgttttcgttcgtcgggtttcgcgtttcgtttcgtttcgtttcgtttcgtttcgtttcggggattcgcgtttacggggtcggcgcgtcgttcggttaaggttatcgtcgttttacgcgggatttttgttcgcgttcggggtgggagaggtcgttaggattcgggattttcgttttgttacgtagttatttgcgcgcgttttttttcggggtgggagttggggtcgtttttcggggaatttcgagtgggggttaggagttcggtttgggaggagt

SEQ ID NO: 4266 - DNA, 685 bp, Artificial Sequence
  chemically treated genomic DNA (Homo sapiens) CpG-island No: 4266
actcctcccaaaccgaactcctaacccccactcgaaattccccgaaaaacgaccccaactcccaccccgaaaaaaaacgcgcgcaaataactacgtaacaaaacgaaaatcccgaatcctaacgacctctcccaccccgaacgcgaacaaaaatcccgcgtaaaacgacgataaccttaaccgaacgacgcgccgaccccgtaaacgcgaatccccgaaacgaaacgaaacgaaacgaaacgaaacgaaacgcgaaacccgacgaacgaaaacgacgcgaacgcgactacgacgactcgaacgaacgaaaaacgacgacgccaacgaacaccgaaacgaacaaaaacaacgaccgcgacgccgcaaaaaccaacgaacccaaataaacgacccgaaacgaaaaaaaaatccctacgcaacccccaaccgaccgtcctccccgccgcgcgtccctcctttatcccgaccccaacctcccgaaccttaaaaccgaacccttccccgcgtaactccgaaacccctcgccgaacgtcccccgtcccttcccgccgaacccgaccgacccctccgcgctcaccttaaacaactcccgaccgcctcccctcccccacccgaaaaacgcccccctaccgaacccgccccaccgaaacccaccccgccgcccctctccgcattaatcccctcg

SEQ ID NO: 4267 - DNA, 685 bp, Artificial Sequence
  chemically treated genomic DNA (Homo sapiens) CpG-island No: 4267
gttttttttaagtcgggtttttggtttttattcggggtttttcgggaagcggttttagtttttatttcgagggagggcgcgcgtaggtggttacgtggtagggcgggggtttcggattttggcgattttttttatttcgggcgcgggtaggggtttcgcgtggggcggcggtgattttggtcgggcggcgcgtcggtttcgtgggcgcgggttttcggggcggggcggggcggggcggggcggggcggagcgcggggttcggcgggcggggacggcgcgggcgcgattgcggcggttcgggcgggcggggggcggcggcgttagcggatatcggagcgggtaggagtagcggtcgcggcgtcgtagggattagcgggtttaggtaggcggttcggggcggggagggggtttttgcgtagtttttagtcggtcgtttttttcgtcgcgcgttttttttttgtttcggttttagtttttcgggttttggggtcgggttttttttcgcgtggtttcggggtttttcgtcgggcgtttttcgttttttttcgtcgggttcggtcggttttttcgcgtttattttggatagttttcggtcgtttttttttttttattcggagggcgtttttttgtcgagttcgttttatcgaggtttatttcgtcgttttttttcgtattggttttttcg

SEQ ID NO: 4268 - DNA, 685 bp, Artificial Sequence
  chemically treated genomic DNA (Homo sapiens) CpG-island No: 4268
cgaaaaaaccaatacgaaaaaaaacgacgaaataaacctcgataaaacgaactcgacaaaaaaacgccctccgaataaaaaaaaaaaaacgaccgaaaactatccaaaataaacgcgaaaaaaccgaccgaacccgacgaaaaaaaacgaaaaacgcccgacgaaaaaccccgaaaccacgcgaaaaaaaacccgaccccaaaacccgaaaaactaaaaccgaaacaaaaaaaaaacgcgcgacgaaaaaaacgaccgactaaaaactacgcaaaaaccccctccccgccccgaaccgcctacctaaacccgctaatccctacgacgccgcgaccgctactcctacccgctccgatatccgctaacgccgccgccccccgcccgcccgaaccgccgcaatcgcgcccgcgccgtccccgcccgccgaaccccgcgctccgccccgccccgccccgccccgccccgccccgaaaacccgcgcccacgaaaccgacgcgccgcccgaccaaaatcaccgccgccccacgcgaaacccctacccgcgcccgaaataaaaaaaatcgccaaaatccgaaacccccgccctaccacgtaaccacctacgcgcgccctccctcgaaataaaaactaaaaccgcttcccgaaaaaccccgaataaaaaccaaaaacccgacttaaaaaaaac

SEQ ID NO: 4269 - DNA, 1120 bp, Artificial Sequence
  chemically treated genomic DNA (Homo sapiens) CpG-island No: 4269
gagggtagaggtgggtgacgcggttatacggtagggatatcgagggtagaggtgggtgacgtagttatacggtagggatttcgagggtagaggtgggtgacgcggttatacggtagggatatcgagggtagagatgggtgacgcggttatacggtagggatatcgagggtagaggtgggtgacgcggttatacggtagggatatcgagggtagaggtgggtgacgcggttatacggtagggatttcgagggtagaggtgggtgacgcggttatacggtagggatatcgagggtagagatgggtgacgcggttatacggtagggatatcgagggtagagatgggtgacgcggttatagggtagggatatcgagggtagagatgggtgacgcggttatacggcggggatatcgagggtagaggtgggtgacgcggttatacggtagggatatcgagggtagaggtgggtgacgcggttatacggtagggatttcgagggtagaggtgggtgacgcggttatacggtagggatatcgagggtagagatgggtgacgcggttatacggtagggatatcgagggtagaggtgggtgacgcggttatagggtagggatatcgagggtagaggtgggtgacgcggttatacggtagggatatcgagggtagaggtgggtgatacggttatacggtagggatttcgagggtagagatgggtgacgcggttatagggtagggatatcgagggtagagatgggtgacgcggttatacggtagggatatcgagggtagagatgggtgacgcggttatacggcggggatatcgagggtagaggtgggtgacgcggttatacggcggggatatcgagggtagaggtgggtgacgcggttatacggtagggatatcgagggtagaggtgggtgacgcggttatacggtagggatatcgagggtagaggtgggtgatacggttatacggtagggatttcgagggtagagatgggtgacgcggttatacggtagggatttcgagggtagagatgggtgacgcggttatagggtagggatatcgagggtagagatgggtgacgcggttatacggtagggatattagattgtttttat

SEQ ID NO: 4270 - DNA, 1120 bp, Artificial Sequence
  chemically treated genomic DNA (Homo sapiens) CpG-island No: 4270
ataaaaacaatctaatatccctaccgtataaccgcgtcacccatctctaccctcgatatccctaccctataaccgcgtcacccatctctaccctcgaaatccctaccgtataaccgcgtcacccatctctaccctcgaaatccctaccgtataaccgtatcacccacctctaccctcgatatccctaccgtataaccgcgtcacccacctctaccctcgatatccctaccgtataaccgcgtcacccacctctaccctcgatatccccgccgtataaccgcgtcacccacctctaccctcgatatccccgccgtataaccgcgtcacccatctctaccctcgatatccctaccgtataaccgcgtcacccatctctaccctcgatatccctaccctataaccgcgtcacccatctctaccctcgaaatccctaccgtataaccgtatcacccacctctaccctcgatatccctaccgtataaccgcgtcacccacctctaccctcgatatccctaccctataaccgcgtcacccacctctaccctcgatatccctaccgtataaccgcgtcacccatctctaccctcgatatccctaccgtataaccgcgtcacccacctctaccctcgaaatccctaccgtataaccgcgtcacccacctctaccctcgatatccctaccgtataaccgcgtcacccacctctaccctcgatatccccgccgtataaccgcgtcacccatctctaccctcgatatccctaccctataaccgcgtcacccatctctaccctcgatatccctaccgtataaccgcgtcacccatctctaccctcgatatccctaccgtataaccgcgtcacccacctctaccctcgaaatccctaccgtataaccgcgtcacccacctctaccctcgatatccctaccgtataaccgcgtcacccacctctaccctcgatatccctaccgtataaccgcgtcacccatctctaccctcgatatccctaccgtataaccgcgtcacccacctctaccctcgaaatccctaccgtataactacgtcacccacctctaccctcgatatccctaccgtataaccgcgtcacccacctctaccctc

SEQ ID NO: 4271 - DNA, 1120 bp, Artificial Sequence
  chemically treated genomic DNA (Homo sapiens) CpG-island No: 4271
gtgagggtaatttggtgtttttgtcgtgtggtcgcgttatttatttttgttttcggtgtttttgttttgtggtcgcgttatttatttttgttttcggagtttttgtcgtgtggtcgcgttatttatttttgttttcggagtttttgtcgtgtggtcgtgttatttatttttgttttcggtgtttttgtcgtgtggtcgcgttatttatttttgttttcggtgtttttgtcgtgtggtcgcgttatttatttttgttttcggtgttttcgtcgtgtggtcgcgttatttatttttgttttcggtgttttcgtcgtgtggtcgcgttatttatttttgttttcggtgtttttgtcgtgtggtcgcgttatttatttttgttttcggtgtttttgttttgtggtcgcgttatttatttttgttttcggagtttttgtcgtgtggtcgtgttatttatttttgttttcggtgtttttgtcgtgtggtcgcgttatttatttttgttttcggtgtttttgttttgtggtcgcgttatttatttttgttttcggtgtttttgtcgtgtggtcgcgttatttatttttgttttcggtgtttttgtcgtgtggtcgcgttatttatttttgttttcggagtttttgtcgtgtggtcgcgttatttatttttgttttcggtgtttttgtcgtgtggtcgcgttatttatttttgttttcggtgttttcgtcgtgtggtcgcgttatttatttttgttttcggtgtttttgttttgtggtcgcgttatttatttttgttttcggtgtttttgtcgtgtggtcgcgttatttatttttgttttcggtgtttttgtcgtgtggtcgcgttatttatttttgttttcggagtttttgtcgtgtggtcgcgttatttatttttgttttcggtgtttttgtcgtgtggtcgcgttatttatttttgttttcggtgtttttgtcgtgtggtcgcgttatttatttttgttttcggtgtttttgtcgtgtggtcgcgttatttatttttgttttcggagtttttgtcgtgtggttgcgttatttatttttgttttcggtgtttttgtcgtgtggtcgcgttatttatttttgttttt

SEQ ID NO: 4272 - DNA, 1120 bp, Artificial Sequence
  chemically treated genomic DNA (Homo sapiens) CpG-island No: 4272
aaaaacaaaaataaataacgcgaccacacgacaaaaacaccgaaaacaaaaataaataacgcaaccacacgacaaaaactccgaaaacaaaaataaataacgcgaccacacgacaaaaacaccgaaaacaaaaataaataacgcgaccacacgacaaaaacaccgaaaacaaaaataaataacgcgaccacacgacaaaaacaccgaaaacaaaaataaataacgcgaccacacgacaaaaactccgaaaacaaaaataaataacgcgaccacacgacaaaaacaccgaaaacaaaaataaataacgcgaccacacgacaaaaacaccgaaaacaaaaataaataacgcgaccacaaaacaaaaacaccgaaaacaaaaataaataacgcgaccacacgacgaaaacaccgaaaacaaaaataaataacgcgaccacacgacaaaaacaccgaaaacaaaaataaataacgcgaccacacgacaaaaactccgaaaacaaaaataaataacgcgaccacacgacaaaaacaccgaaaacaaaaataaataacgcgaccacacgacaaaaacaccgaaaacaaaaataaataacgcgaccacaaaacaaaaacaccgaaaacaaaaataaataacgcgaccacacgacaaaaacaccgaaaacaaaaataaataacacgaccacacgacaaaaactccgaaaacaaaaataaataacgcgaccacaaaacaaaaacaccgaaaacaaaaataaataacgcgaccacacgacaaaaacaccgaaaacaaaaataaataacgcgaccacacgacgaaaacaccgaaaacaaaaataaataacgcgaccacacgacgaaaacaccgaaaacaaaaataaataacgcgaccacacgacaaaaacaccgaaaacaaaaataaataacgcgaccacacgacaaaaacaccgaaaacaaaaataaataacacgaccacacgacaaaaactccgaaaacaaaaataaataacgcgaccacacgacaaaaactccgaaaacaaaaataaataacgcgaccacaaaacaaaaacaccgaaaacaaaaataaataacgcgaccacacgacaaaaacaccaaattaccctcac

SEQ ID NO: 4273 - DNA, 634 bp, Artificial Sequence
  chemically treated genomic DNA (Homo sapiens) CpG-island No: 4273
gagtcgcgtagaggtttagaggcgttagcggcgtgcgcggtttttaaggaaatcgttcgttttagttattttagcggttttggaatggtagagtaagaggtttcgtttacgtatcgtcgagattaataacggatcgggagggttacggcgagtgcgtagagggttttagcgtattttcggttttttttttttagttgtgggcggggtttaggggcgcgtgcgttttgttttttttgtgcgcgcgtcgttttagtatgtttcgggagcgcgggcggcgggttttttggtttttaggcggtcgtggcggcggtggcggcggttgggtcgaggtaggcggttttagtggtcgaggtggttggacgcgtagtaggtggaaggagggagggagtcgtaggcgtagatttattcgttatgaagtttttcgtaggtatcgattatttcgttcgtcggattcgggcgttttttgtattttcgtttttttcggggtcgcgatttgggtttaaggttggagcgaagcgattttcgagttattttcggtcgggttggaggggtagcgggggaggtggacgattttgttttttcgtttgtcgaatgaatgaattagtttttttagcgttttatttattttgtaaag

SEQ ID NO: 4274 - DNA, 634 bp, Artificial Sequence
  chemically treated genomic DNA (Homo sapiens) CpG-island No: 4274
ctttacaaaataaataaaacgctaaaaaaactaattcattcattcgacaaacgaaaaaacaaaatcgtccacctcccccgctacccctccaacccgaccgaaaataactcgaaaatcgcttcgctccaaccttaaacccaaatcgcgaccccgaaaaaaacgaaaatacaaaaaacgcccgaatccgacgaacgaaataatcgatacctacgaaaaacttcataacgaataaatctacgcctacgactccctccctccttccacctactacgcgtccaaccacctcgaccactaaaaccgcctacctcgacccaaccgccgccaccgccgccacgaccgcctaaaaaccaaaaaacccgccgcccgcgctcccgaaacatactaaaacgacgcgcgcacaaaaaaaacaaaacgcacgcgcccctaaaccccgcccacaactaaaaaaaaaaaaccgaaaatacgctaaaaccctctacgcactcgccgtaaccctcccgatccgttattaatctcgacgatacgtaaacgaaacctcttactctaccattccaaaaccgctaaaataactaaaacgaacgatttccttaaaaaccgcgcacgccgctaacgcctctaaacctctacgcgactc

SEQ ID NO: 4275 - DNA, 634 bp, Artificial Sequence
  chemically treated genomic DNA (Homo sapiens) CpG-island No: 4275
ttttgtagaatgaatgaagcgttggaaaagttggtttatttattcggtaaacgagagagtagggtcgtttatttttttcgttgtttttttagttcggtcgagggtggttcgggggtcgtttcgttttagttttaggtttaagtcgcgatttcgggaggagcgagggtgtaggggacgttcgggttcggcgagcggggtagtcggtatttgcggggggttttatggcgggtgggtttgcgtttgcggttttttttttttttttatttgttacgcgtttagttatttcggttattgaggtcgtttgtttcggtttaatcgtcgttatcgtcgttacggtcgtttgaggattaaggggttcgtcgttcgcgttttcggggtatgttggggcggcgcgcgtatagggagggtaggacgtacgcgtttttgagtttcgtttatagttaaaggaggagggtcgggagtgcgttggagttttttgcgtattcgtcgtaattttttcggttcgttattggtttcggcggtgcgtgggcggagttttttgttttattattttagagtcgttggggtggttaggacggacggtttttttggaaatcgcgtacgtcgttgacgtttttgagtttttgcgcggttt

SEQ ID NO: 4276 - DNA, 634 bp, Artificial Sequence
  chemically treated genomic DNA (Homo sapiens) CpG-island No: 4276
aaaccgcgcaaaaactcaaaaacgtcaacgacgtacgcgatttccaaaaaaaccgtccgtcctaaccaccccaacgactctaaaataataaaacaaaaaactccgcccacgcaccgccgaaaccaataacgaaccgaaaaaattacgacgaatacgcaaaaaactccaacgcactcccgaccctcctcctttaactataaacgaaactcaaaaacgcgtacgtcctaccctccctatacgcgcgccgccccaacataccccgaaaacgcgaacgacgaaccccttaatcctcaaacgaccgtaacgacgataacgacgattaaaccgaaacaaacgacctcaataaccgaaataactaaacgcgtaacaaataaaaaaaaaaaaaaaaccgcaaacgcaaacccacccgccataaaaccccccgcaaataccgactaccccgctcgccgaacccgaacgtcccctacaccctcgctcctcccgaaatcgcgacttaaacctaaaactaaaacgaaacgacccccgaaccaccctcgaccgaactaaaaaaacaacgaaaaaaataaacgaccctactctctcgtttaccgaataaataaaccaacttttccaacgcttcattcattctacaaaa

SEQ ID NO: 4277 - DNA, 518 bp, Artificial Sequence
  chemically treated genomic DNA (Homo sapiens) CpG-island No: 4277
ttttaatatcgttatttttaatatcgtcgtttttcgatatttttattttcggatatttttattttttgatttatttattttttaatattaatatttttcgatatatttatttttcgatatttttattttttaatattaatatttttcgatatttttatttttcgatatttttatttttcgatattaatattttttaatattaatatttttttatatttttattttttaatattaatattttttgatatttttatttttcgatatttttattttttaatattaatatttttcgatatttttatttttcgatattaatatttttcgatattaatatttttcgatattaatattttacgatatttatatttttcgatattaatatttttcgatattaatatttttcgatatttttatttttcgatatcgttatttttcgatattcgtatttttcgatattattatttttggtattaagtttttggtgtattttggaggggacgtatttaattagagtagag

SEQ ID NO: 4278 - DNA, 518 bp, Artificial Sequence
  chemically treated genomic DNA (Homo sapiens) CpG-island No: 4278
ctctactctaattaaatacgtcccctccaaaatacaccaaaaacttaataccaaaaataataatatcgaaaaatacgaatatcgaaaaataacgatatcgaaaaataaaaatatcgaaaaatattaatatcgaaaaatattaatatcgaaaaatataaatatcgtaaaatattaatatcgaaaaatattaatatcgaaaaatattaatatcgaaaaataaaaatatcgaaaaatattaatattaaaaaataaaaatatcgaaaaataaaaatatcaaaaaatattaatattaaaaaataaaaatataaaaaaatattaatattaaaaaatattaatatcgaaaaataaaaatatcgaaaaataaaaatatcgaaaaatattaatattaaaaaataaaaatatcgaaaaataaatatatcgaaaaatattaatattaaaaaataaataaatcaaaaaataaaaatatccgaaaataaaaatatcgaaaaacgacgatattaaaaataacgatattaaaa

SEQ ID NO: 4279 - DNA, 518 bp, Artificial Sequence
  chemically treated genomic DNA (Homo sapiens) CpG-island No: 4279
ttttgttttggttgggtgcgttttttttaaaatgtattaggaatttaatgttagagatggtggtgtcgggagatgcgggtatcgggaggtggcggtgtcgggaggtgggggtgtcggaaggtgttggtgtcgggaggtgttggtgtcgggaggtgtgggtgtcgtgaggtgttggtgtcgggaggtgttggtgtcgggaggtgttggtgtcgggaggtgggggtgtcgggaggtgttggtgttgggaggtgggggtgtcgggaggtgggggtgttaggaggtgttagtgttgggaggtgggggtgtggggaagtgttggtgttgggaggtgttggtgtcgggaggtgggggtgtcgggaagtgggggtgtcgggaggtgttggtattgggaggtgggggtgtcgggaggtgggtgtgtcgggaggtgttggtgttgggaggtgggtgggttaggaggtgggggtgttcggaggtggaggtatcgggagacggcggtgttggaggtggcggtgttggag

SEQ ID NO: 4280 - DNA, 518 bp, Artificial Sequence
  chemically treated genomic DNA (Homo sapiens) CpG-island No: 4280
ctccaacaccgccacctccaacaccgccgtctcccgatacctccacctccgaacacccccacctcctaacccacccacctcccaacaccaacacctcccgacacacccacctcccgacacccccacctcccaataccaacacctcccgacacccccacttcccgacacccccacctcccgacaccaacacctcccaacaccaacacttccccacacccccacctcccaacactaacacctcctaacacccccacctcccgacacccccacctcccaacaccaacacctcccgacacccccacctcccgacaccaacacctcccgacaccaacacctcccgacaccaacacctcacgacacccacacctcccgacaccaacacctcccgacaccaacaccttccgacacccccacctcccgacaccgccacctcccgatacccgcatctcccgacaccaccatctctaacattaaattcctaatacattttaaaaaaaacgcacccaaccaaaacaaaa

SEQ ID NO: 4281 - DNA, 635 bp, Artificial Sequence
  chemically treated genomic DNA (Homo sapiens) CpG-island No: 4281
ggggattttagcgaattatacggggtggatttaatagtcgtaggggtatcgtggttttgcggagacgtcgttcgttcggaggcggcgttgtgatttaggttggagagttaggagtttagcgtcgcgttgcggggtttgttgggatttgtagttcgtaggttcggggtgcgtaggcgtagtgtcgagtttatttttgcgcgcgtcggggttggtggcggcggttgcggcgagtttttgaggggcgtttgcggggggcgttcgtttcgagcgtcgaggagtcgagcggaggaggcgttttagggatacgtaggggaggtcggtcggtttgtacggggcgttttcgtttcgggggttttgtttggcgttttagcgcgcgtttcgatggttatttgcgtttatttgggtcggcgcgcgcggttttcggtagtttagtcgtaagtgtcgtcgtttttcgcgtcgcgattttcgtgtcgggtttgtcggggttttggtggggttgggtttggcggggtcgggtggtcggggtatgattttgtcgcgatagggtttttacgggagggtcgggagtcggtagttcgtttagggttttaacgtttaggatggtacggtttgtttttgttttgtgaaaacgtttt

SEQ ID NO: 4282 - DNA, 635 bp, Artificial Sequence
  chemically treated genomic DNA (Homo sapiens) CpG-island No: 4282
aaaacgttttcacaaaacaaaaacaaaccgtaccatcctaaacgttaaaaccctaaacgaactaccgactcccgaccctcccgtaaaaaccctatcgcgacaaaatcataccccgaccacccgaccccgccaaacccaaccccaccaaaaccccgacaaacccgacacgaaaatcgcgacgcgaaaaacgacgacacttacgactaaactaccgaaaaccgcgcgcgccgacccaaataaacgcaaataaccatcgaaacgcgcgctaaaacgccaaacaaaacccccgaaacgaaaacgccccgtacaaaccgaccgacctcccctacgtatccctaaaacgcctcctccgctcgactcctcgacgctcgaaacgaacgccccccgcaaacgcccctcaaaaactcgccgcaaccgccgccaccaaccccgacgcgcgcaaaaataaactcgacactacgcctacgcaccccgaacctacgaactacaaatcccaacaaaccccgcaacgcgacgctaaactcctaactctccaacctaaatcacaacgccgcctccgaacgaacgacgtctccgcaaaaccacgatacccctacgactattaaatccaccccgtataattcgctaaaatcccc

SEQ ID NO: 4283 - DNA, 635 bp, Artificial Sequence
  chemically treated genomic DNA (Homo sapiens) CpG-island No: 4283
ggggcgtttttatagggtaagggtagatcgtgttattttgggcgttggggttttgggcgagttgtcggttttcgattttttcgtggggattttatcgcgatagggttatgtttcggttattcggtttcgttagatttagttttattagagtttcggtaggttcggtacggaggtcgcggcgcgggaggcggcggtatttacggttgagttgtcgggagtcgcgcgcgtcggtttaggtgggcgtaggtgattatcggggcgcgcgttgaggcgttagatagggttttcgaggcgggagcgtttcgtgtaggtcggtcggttttttttgcgtgtttttgggacgtttttttcgttcggtttttcggcgttcggagcggacgtttttcgtaggcgttttttaggaattcgtcgtagtcgtcgttattaatttcgacgcgcgtagaggtaaattcggtattgcgtttgcgtatttcgaatttgcgaattataagttttagtaggtttcgtagcgcggcgttgggtttttgattttttaatttgggttatagcgtcgttttcgggcgggcggcgttttcgtaggattacgatgtttttgcggttgttggatttatttcgtgtggttcgttggagttttt

SEQ ID NO: 4284 - DNA, 635 bp, Artificial Sequence
  chemically treated genomic DNA (Homo sapiens) CpG-island No: 4284
aaaaactccaacgaaccacacgaaataaatccaacaaccgcaaaaacatcgtaatcctacgaaaacgccgcccgcccgaaaacgacgctataacccaaattaaaaaatcaaaaacccaacgccgcgctacgaaacctactaaaacttataattcgcaaattcgaaatacgcaaacgcaataccgaatttacctctacgcgcgtcgaaattaataacgacgactacgacgaattcctaaaaaacgcctacgaaaaacgtccgctccgaacgccgaaaaaccgaacgaaaaaaacgtcccaaaaacacgcaaaaaaaaccgaccgacctacacgaaacgctcccgcctcgaaaaccctatctaacgcctcaacgcgcgccccgataatcacctacgcccacctaaaccgacgcgcgcgactcccgacaactcaaccgtaaataccgccgcctcccgcgccgcgacctccgtaccgaacctaccgaaactctaataaaactaaatctaacgaaaccgaataaccgaaacataaccctatcgcgataaaatccccacgaaaaaatcgaaaaccgacaactcgcccaaaaccccaacgcccaaaataacacgatctacccttaccctataaaaacgcccc

SEQ ID NO: 4285 - DNA, 572 bp, Artificial Sequence
  chemically treated genomic DNA (Homo sapiens) CpG-island No: 4285
cgtttcggtcgcggttgtagcggttattagcgggtcgtttttttcgttcgtttcgtcgttcgtttcggtttcgaggtagtcgttggcggttgcggttaacgtaaaggattttagggtttcgggaggcgggggcggcggcggggcggttttttcggttggttcggtttcggtttcgttcgcgtaggatgttaggaggttggcggcggcggcggttgttgggttggtttcggcggttacggcggttaggacgtcggaagttgcggtcgagttgaggtttaggtttagggagttggtgttgtagtcgtaatttgttagcgtgttaagcgtcgtgttgatggttagtaggtcggtgtttgagaaggcgggtagcgcggcgggaaaggtttttacgttagttagttcggcggggtttagtaggtcggaggcggcggcggtcgacgttgcggtcgcggttggtagtatattcgcggggttggcgtacggagagtcggtggggttggagttggttacggggtttgttacgttggcgtagttgatgttgaggtagttgttgttttgggggtttttttgta

SEQ ID NO: 4286 - DNA, 572 bp, Artificial Sequence
  chemically treated genomic DNA (Homo sapiens) CpG-island No: 4286
tacaaaaaaacccccaaaacaacaactacctcaacatcaactacgccaacgtaacaaaccccgtaaccaactccaaccccaccgactctccgtacgccaaccccgcgaatatactaccaaccgcgaccgcaacgtcgaccgccgccgcctccgacctactaaaccccgccgaactaactaacgtaaaaacctttcccgccgcgctacccgccttctcaaacaccgacctactaaccatcaacacgacgcttaacacgctaacaaattacgactacaacaccaactccctaaacctaaacctcaactcgaccgcaacttccgacgtcctaaccgccgtaaccgccgaaaccaacccaacaaccgccgccgccgccaacctcctaacatcctacgcgaacgaaaccgaaaccgaaccaaccgaaaaaaccgccccgccgccgcccccgcctcccgaaaccctaaaatcctttacgttaaccgcaaccgccaacgactacctcgaaaccgaaacgaacgacgaaacgaacgaaaaaaacgacccgctaataaccgctacaaccgcgaccgaaacg

SEQ ID NO: 4287 - DNA, 572 bp, Artificial Sequence
  chemically treated genomic DNA (Homo sapiens) CpG-island No: 4287
tataagaagatttttagagtagtagttgttttaatattagttacgttaacgtggtaggtttcgtggttaattttaattttatcggtttttcgtacgttagtttcgcggatgtgttgttagtcgcggtcgtagcgtcggtcgtcgtcgttttcggtttgttgggtttcgtcgggttggttggcgtgggggtttttttcgtcgcgttgttcgtttttttaggtatcgatttgttggttattagtacggcgtttaatacgttggtaagttacggttataatattaattttttgggtttgggttttaattcggtcgtagttttcggcgttttggtcgtcgtggtcgtcggggttaatttagtagtcgtcgtcgtcgttaattttttggtattttacgcgggcgaggtcggggtcgggttagtcggaggggtcgtttcgtcgtcgttttcgtttttcggagttttggggttttttgcgttggtcgtagtcgttaacggttatttcggggtcggggcgggcggcggggcgggcggagggggcggttcgttggtggtcgttgtagtcgcggtcggggcg

SEQ ID NO: 4288 - DNA, 572 bp, Artificial Sequence
  chemically treated genomic DNA (Homo sapiens) CpG-island No: 4288
cgccccgaccgcgactacaacgaccaccaacgaaccgccccctccgcccgccccgccgcccgccccgaccccgaaataaccgttaacgactacgaccaacgcaaaaaaccccaaaactccgaaaaacgaaaacgacgacgaaacgacccctccgactaacccgaccccgacctcgcccgcgtaaaataccaaaaaattaacgacgacgacgactactaaattaaccccgacgaccacgacgaccaaaacgccgaaaactacgaccgaattaaaacccaaacccaaaaaattaatattataaccgtaacttaccaacgtattaaacgccgtactaataaccaacaaatcgatacctaaaaaaacgaacaacgcgacgaaaaaaacccccacgccaaccaacccgacgaaacccaacaaaccgaaaacgacgacgaccgacgctacgaccgcgactaacaacacatccgcgaaactaacgtacgaaaaaccgataaaattaaaattaaccacgaaacctaccacgttaacgtaactaatattaaaacaactactactctaaaaatcttcttata

SEQ ID NO: 4289 - DNA, 579 bp, Artificial Sequence
  chemically treated genomic DNA (Homo sapiens) CpG-island No: 4289
tcgagaggattcgagtggggtcgaggttagtagtttcggggttttgagtagaggtcgtagtttgcgtcgtattcgcggttaggcggagttaaagatgtcggtttttgttgcgcggtttcgttcgggtttcgggtagtttatagtttcgtttttttcgttattgttgttggcggtgttgagcggttcggtattcggtcgcgtttttcgttcggtgtttagaatttcgtttttaatttttggtaaggcgcggacgtttacgtttttagtttttcgcgtttatatttatatttatatttatttgttttttagatcgttcggtcggattcgggttttttagtttggtgtatggcgttttacgtcgtttacgtttcgtcgggatcggggcgagattttcgtattttatcgtattttttttgtatttttttcgcgttttttagttttttatttttagttcgggtttcgcgtttcggtttttacgatacgtttaggttgtattagcgggttttattttcggagtcgtaggagcgtttagtttttatcgtgtagattcggatattgaggtttagagttcgggtgggg

SEQ ID NO: 4290 - DNA, 579 bp, Artificial Sequence
  chemically treated genomic DNA (Homo sapiens) CpG-island No: 4290
ccccacccgaactctaaacctcaatatccgaatctacacgataaaaactaaacgctcctacgactccgaaaataaaacccgctaatacaacctaaacgtatcgtaaaaaccgaaacgcgaaacccgaactaaaaataaaaaactaaaaaacgcgaaaaaaatacaaaaaaaatacgataaaatacgaaaatctcgccccgatcccgacgaaacgtaaacgacgtaaaacgccatacaccaaactaaaaaacccgaatccgaccgaacgatctaaaaaacaaataaatataaatataaatataaacgcgaaaaactaaaaacgtaaacgtccgcgccttaccaaaaattaaaaacgaaattctaaacaccgaacgaaaaacgcgaccgaataccgaaccgctcaacaccgccaacaacaataacgaaaaaaacgaaactataaactacccgaaacccgaacgaaaccgcgcaacaaaaaccgacatctttaactccgcctaaccgcgaatacgacgcaaactacgacctctactcaaaaccccgaaactactaacctcgaccccactcgaatcctctcga

SEQ ID NO: 4291 - DNA, 579 bp, Artificial Sequence
  chemically treated genomic DNA (Homo sapiens) CpG-island No: 4291
ttttattcgagttttgggttttagtgttcgagtttgtacggtgaggattggacgtttttgcggtttcgggaatagggttcgttggtgtagtttgggcgtgtcgtgggagtcgaggcgcgaggttcgggttggggatgaggggttgaggggcgcgggagggatgtagagaggatgcggtgaagtgcgaagatttcgtttcggtttcggcggggcgtgggcggcgtgaaacgttatatattaggttgagaggttcgggttcggtcgagcggtttgaggagtaggtgggtgtgggtgtgggtgtgggcgcgaagggttgagggcgtgggcgttcgcgttttattagagattggaagcgaggttttgggtatcgagcgggggacgcggtcggatatcgggtcgtttagtatcgttagtagtagtagcgggaagggcgaggttgtaggttgttcgggattcgggcggggtcgcgtagtagaggtcggtatttttggtttcgtttggtcgcgggtgcggcgtaagttacggtttttgtttagggtttcggggttattggtttcggttttattcgggttttttcgg

SEQ ID NO: 4292 - DNA, 579 bp, Artificial Sequence
  chemically treated genomic DNA (Homo sapiens) CpG-island No: 4292
ccgaaaaaacccgaataaaaccgaaaccaataaccccgaaaccctaaacaaaaaccgtaacttacgccgcacccgcgaccaaacgaaaccaaaaataccgacctctactacgcgaccccgcccgaatcccgaacaacctacaacctcgcccttcccgctactactactaacgatactaaacgacccgatatccgaccgcgtcccccgctcgatacccaaaacctcgcttccaatctctaataaaacgcgaacgcccacgccctcaacccttcgcgcccacacccacacccacacccacctactcctcaaaccgctcgaccgaacccgaacctctcaacctaatatataacgtttcacgccgcccacgccccgccgaaaccgaaacgaaatcttcgcacttcaccgcatcctctctacatccctcccgcgcccctcaacccctcatccccaacccgaacctcgcgcctcgactcccacgacacgcccaaactacaccaacgaaccctattcccgaaaccgcaaaaacgtccaatcctcaccgtacaaactcgaacactaaaacccaaaactcgaataaaa

SEQ ID NO: 4293 - DNA, 769 bp, Artificial Sequence
  chemically treated genomic DNA (Homo sapiens) CpG-island No: 4293
aacgttcgcgtcggaatttgcgaaggacgttgtttggtagcgcgtagttgattaggaagacgtggatttcgagaaataggcgtaggacgaggaggtagaattcgattggcgcgtagagtagtagtacgagtagtaggaagtagttattcggaagtttgggggcgagaggcgaagtggttaggcgtcgaaggtcgagagtacgcggggatcggttttttttcgtcgggttttttatcggtgcgagttaaagagtcgtttcggtttcggttttgagggaagttttataattgttgttttaggagcgttcggtcgtcgtcgtcgtcgttattttcgcgttcggtcgtaggggtttttgggaaggcggagtttttgggtattcgttcggggtgaggggattcgaagttttgaggcgcgtcggaagggttagcggttttagtatatttcgcggttttttgggtcgttttataattcgcgttcggcggagattataattttcggtattcgtggggtagggaggagtcggtttttcggaattttggtttcggcgtgtatttttgaaggattttaggtatcggcgtgtttcgcgttttattgttcgtttgttcgcgttttgggtgtcgtttttgagtagggcgggcgaggaggtagttaaggcggagttgatggttgcgtcgagggcggggcggggtgtaggttggagttttcgggtatggcgggttttggggggtattcgttgggggaggagatttcgtttgatttttgattttcg

SEQ ID NO: 4294 - DNA, 769 bp, Artificial Sequence
  chemically treated genomic DNA (Homo sapiens) CpG-island No: 4294
cgaaaatcaaaaatcaaacgaaatctcctcccccaacgaataccccccaaaacccgccatacccgaaaactccaacctacaccccgccccgccctcgacgcaaccatcaactccgccttaactacctcctcgcccgccctactcaaaaacgacacccaaaacgcgaacaaacgaacaataaaacgcgaaacacgccgatacctaaaatccttcaaaaatacacgccgaaaccaaaattccgaaaaaccgactcctccctaccccacgaataccgaaaattataatctccgccgaacgcgaattataaaacgacccaaaaaaccgcgaaatatactaaaaccgctaacccttccgacgcgcctcaaaacttcgaatcccctcaccccgaacgaatacccaaaaactccgccttcccaaaaacccctacgaccgaacgcgaaaataacgacgacgacgacgaccgaacgctcctaaaacaacaattataaaacttccctcaaaaccgaaaccgaaacgactctttaactcgcaccgataaaaaacccgacgaaaaaaaaccgatccccgcgtactctcgaccttcgacgcctaaccacttcgcctctcgcccccaaacttccgaataactacttcctactactcgtactactactctacgcgccaatcgaattctacctcctcgtcctacgcctatttctcgaaatccacgtcttcctaatcaactacgcgctaccaaacaacgtccttcgcaaattccgacgcgaacgtt

SEQ ID NO: 4295 - DNA, 769 bp, Artificial Sequence
  chemically treated genomic DNA (Homo sapiens) CpG-island No: 4295
cggaggttaggggttaaacggggtttttttttttagcgaatgttttttaaagttcgttatgttcgaaggttttagtttgtatttcgtttcgttttcggcgtagttattagtttcgttttggttgttttttcgttcgttttatttagaggcggtatttaggacgcgagtaggcggatagtaggacgcggggtacgtcggtatttgaagttttttagaagtgtacgtcgggattaggatttcgggaggtcgatttttttttgttttacgaatgtcgggaattgtggttttcgtcggacgcgagttgtgagacggtttaaggggtcgcggggtatgttgggatcgttagttttttcggcgcgttttaggatttcgggtttttttatttcgggcggatgtttaaagatttcgtttttttaagagtttttgcggtcgggcgcgaaaatggcggcggcggcgacggtcgggcgtttttgaagtagtagttatggagttttttttagggtcggggtcggagcggttttttgattcgtatcggtaagagattcggcgggaagagatcgattttcgcgtgttttcggttttcggcgtttgattatttcgtttttcgtttttaggttttcgggtgattgttttttattgttcgtgttgttgttttacgcgttagtcgggttttgttttttcgttttgcgtttgtttttcgggatttacgtttttttggttagttgcgcgttgttagatagcgtttttcgtaggtttcgacgcgggcgtt

SEQ ID NO: 4296 - DNA, 769 bp, Artificial Sequence
  chemically treated genomic DNA (Homo sapiens) CpG-island No: 4296
aacgcccgcgtcgaaacctacgaaaaacgctatctaacaacgcgcaactaaccaaaaaaacgtaaatcccgaaaaacaaacgcaaaacgaaaaaacaaaacccgactaacgcgtaaaacaacaacacgaacaataaaaaacaatcacccgaaaacctaaaaacgaaaaacgaaataatcaaacgccgaaaaccgaaaacacgcgaaaatcgatctcttcccgccgaatctcttaccgatacgaatcaaaaaaccgctccgaccccgaccctaaaaaaaactccataactactacttcaaaaacgcccgaccgtcgccgccgccgccattttcgcgcccgaccgcaaaaactcttaaaaaaacgaaatctttaaacatccgcccgaaataaaaaaacccgaaatcctaaaacgcgccgaaaaaactaacgatcccaacataccccgcgaccccttaaaccgtctcacaactcgcgtccgacgaaaaccacaattcccgacattcgtaaaacaaaaaaaaatcgacctcccgaaatcctaatcccgacgtacacttctaaaaaacttcaaataccgacgtaccccgcgtcctactatccgcctactcgcgtcctaaataccgcctctaaataaaacgaacgaaaaaacaaccaaaacgaaactaataactacgccgaaaacgaaacgaaatacaaactaaaaccttcgaacataacgaactttaaaaaacattcgctaaaaaaaaaaaccccgtttaacccctaacctccg

SEQ ID NO: 4297 - DNA, 504 bp, Artificial Sequence
  chemically treated genomic DNA (Homo sapiens) CpG-island No: 4297
cgtatttcgaggagttgaggaatagagagcgaggtgaggcgtcgaaataaggaaggagttagggggagtggagcgagattgggcggtggacgggacgggtcgggtcggggttagagggcggggtttgagtcgggagggggcggagataggggcggggtaggcgagggcgggagcggttgtcgtcgcgcggttaggattgtttgaggggaagttcgcgagcgttggttatgggttttggggcgcggttggcggcgttgttggcggtgttggcgttcgggataggagatttagaaagggttgcggttcggggcgatacgttttcggcgttgattagcgtggcgcgcgttttggcgttcgagcgtcggttgttggggttgttgaggcggtatttgcgcggggaggaggcgcggttgcgggatttgattaggtgagggtacgacgagtgggagcgattaaggggttttagtgggatatattgtgtcgtagggtggggtgatttaggtt

SEQ ID NO: 4298 - DNA, 504 bp, Artificial Sequence
  chemically treated genomic DNA (Homo sapiens) CpG-island No: 4298
aacctaaatcaccccaccctacgacacaatatatcccactaaaaccccttaatcgctcccactcgtcgtaccctcacctaatcaaatcccgcaaccgcgcctcctccccgcgcaaataccgcctcaacaaccccaacaaccgacgctcgaacgccaaaacgcgcgccacgctaatcaacgccgaaaacgtatcgccccgaaccgcaaccctttctaaatctcctatcccgaacgccaacaccgccaacaacgccgccaaccgcgccccaaaacccataaccaacgctcgcgaacttcccctcaaacaatcctaaccgcgcgacgacaaccgctcccgccctcgcctaccccgcccctatctccgccccctcccgactcaaaccccgccctctaaccccgacccgacccgtcccgtccaccgcccaatctcgctccactccccctaactccttccttatttcgacgcctcacctcgctctctattcctcaactcctcgaaatacg

SEQ ID NO: 4299 - DNA, 504 bp, Artificial Sequence
  chemically treated genomic DNA (Homo sapiens) CpG-island No: 4299
aatttgagttattttattttgcggtatagtgtattttattgaggttttttggtcgtttttattcgtcgtgtttttatttagttaggtttcgtagtcgcgtttttttttcgcgtaggtatcgttttagtagttttagtagtcggcgttcgggcgttagggcgcgcgttacgttggttagcgtcgagaacgtgtcgtttcgagtcgtagttttttttgggttttttgtttcgagcgttagtatcgttagtagcgtcgttagtcgcgttttaggatttatagttagcgttcgcgaatttttttttagatagttttggtcgcgcggcggtagtcgttttcgttttcgtttgtttcgtttttgttttcgttttttttcggtttaggtttcgttttttggtttcggttcggttcgtttcgtttatcgtttagtttcgttttattttttttgattttttttttgtttcgacgttttatttcgttttttattttttagtttttcggaatgcg

SEQ ID NO: 4300 - DNA, 504 bp, Artificial Sequence
  chemically treated genomic DNA (Homo sapiens) CpG-island No: 4300
cgcattccgaaaaactaaaaaataaaaaacgaaataaaacgtcgaaacaaaaaaaaaatcaaaaaaaataaaacgaaactaaacgataaacgaaacgaaccgaaccgaaaccaaaaaacgaaacctaaaccgaaaaaaaacgaaaacaaaaacgaaacaaacgaaaacgaaaacgactaccgccgcgcgaccaaaactatctaaaaaaaaattcgcgaacgctaactataaatcctaaaacgcgactaacgacgctactaacgatactaacgctcgaaacaaaaaacccaaaaaaaactacgactcgaaacgacacgttctcgacgctaaccaacgtaacgcgcgccctaacgcccgaacgccgactactaaaactactaaaacgatacctacgcgaaaaaaaaacgcgactacgaaacctaactaaataaaaacacgacgaataaaaacgaccaaaaaacctcaataaaatacactataccgcaaaataaaataactcaaatt

SEQ ID NO: 4301 - DNA, 550 bp, Artificial Sequence
  chemically treated genomic DNA (Homo sapiens) CpG-island No: 4301
ttgtcgtttttcgtcgtatgcgcgtatatcgatatcgttcgtattattcgttgcgcggtgacgagatttgttagatgtttaacgtgaagcggggcgttttttatttgcgtcgtcgatttgacgattatcgtttcggtttttagtgtagtagttcgattggtatataacgcggcgatacgattcgcgcgcgtagcgcgcgaatatcgtcggagtagttatacgagttagtcgacgtataggttagtaggtattcgttagtgtacggtaaggcgagaaaaggagttagcggtcgagtataagttcgggcgtatggtcgaattacgaaatattcggtttcgattcgtagaggcggtcgaagttcgttcgcgtcggattcggatttttataggttttattcgtttaatttggcgttcgtggttttgtggaatcgagttcgtatcgtcgtatatcggtaagttttatcgtattttaggtgcggttagattacggggttggttattgttgattcgtcgcggttaaggagtttatatagggtttttattaggggagg

SEQ ID NO: 4302 - DNA, 550 bp, Artificial Sequence
  chemically treated genomic DNA (Homo sapiens) CpG-island No: 4302
cctcccctaataaaaaccctatataaactccttaaccgcgacgaatcaacaataaccaaccccgtaatctaaccgcacctaaaatacgataaaacttaccgatatacgacgatacgaactcgattccacaaaaccacgaacgccaaattaaacgaataaaacctataaaaatccgaatccgacgcgaacgaacttcgaccgcctctacgaatcgaaaccgaatatttcgtaattcgaccatacgcccgaacttatactcgaccgctaactccttttctcgccttaccgtacactaacgaatacctactaacctatacgtcgactaactcgtataactactccgacgatattcgcgcgctacgcgcgcgaatcgtatcgccgcgttatataccaatcgaactactacactaaaaaccgaaacgataatcgtcaaatcgacgacgcaaataaaaaacgccccgcttcacgttaaacatctaacaaatctcgtcaccgcgcaacgaataatacgaacgatatcgatatacgcgcatacgacgaaaaacgacaa

SEQ ID NO: 4303 - DNA, 550 bp, Artificial Sequence
  chemically treated genomic DNA (Homo sapiens) CpG-island No: 4303
ttttttttggtgaagattttgtgtagattttttgatcgcggcgggttagtaatggttagtttcgtgatttaatcgtatttgggatgcgatgggatttatcgatatgcggcggtacgggttcggttttatagaattacggacgttaaattagacgggtaggatttgtagggattcggattcggcgcggacgggtttcggtcgtttttgcgggtcgggatcggatgtttcgtggttcggttatgcgttcgagtttgtattcggtcgttgattttttttttcgttttatcgtgtattaacgggtgtttgttggtttatacgtcggttgattcgtgtaattgtttcgacgatgttcgcgcgttgcgcgcgcgagtcgtgtcgtcgcgttgtgtgttaatcgaattgttgtattgagggtcgggacgatgatcgttaggtcggcgacgtagataggggacgtttcgttttacgttggatatttggtaaatttcgttatcgcgtaacgagtaatgcgggcgatatcgatatgcgcgtatgcgacgaaaggcggtag

SEQ ID NO: 4304 - DNA, 550 bp, Artificial Sequence
  chemically treated genomic DNA (Homo sapiens) CpG-island No: 4304
ctaccgcctttcgtcgcatacgcgcatatcgatatcgcccgcattactcgttacgcgataacgaaatttaccaaatatccaacgtaaaacgaaacgtcccctatctacgtcgccgacctaacgatcatcgtcccgaccctcaatacaacaattcgattaacacacaacgcgacgacacgactcgcgcgcgcaacgcgcgaacatcgtcgaaacaattacacgaatcaaccgacgtataaaccaacaaacacccgttaatacacgataaaacgaaaaaaaaaatcaacgaccgaatacaaactcgaacgcataaccgaaccacgaaacatccgatcccgacccgcaaaaacgaccgaaacccgtccgcgccgaatccgaatccctacaaatcctacccgtctaatttaacgtccgtaattctataaaaccgaacccgtaccgccgcatatcgataaatcccatcgcatcccaaatacgattaaatcacgaaactaaccattactaacccgccgcgatcaaaaaatctacacaaaatcttcaccaaaaaaaa

SEQ ID NO: 4305 - DNA, 1072 bp, Artificial Sequence
  chemically treated genomic DNA (Homo sapiens) CpG-island No: 4305
cgtaatgttatcgggattcgtaggtatagggcgatagtacggacgtcgtcgtttaggtcgtgtttattgtgcgtcgcggttagtttatcgcgatttcggtttaggaggcggcgggatttcgtattttttttttgtaacggagtttttttggtttgcgggtcgagttttataggcgttcgacgggtttcgcgcgtttataggattataattttcgtgatgtcgcgcgcgtcgatcgttgattggttgtgtagcggacggattcgcggggggggggggtcgtacgtcgtgtacgtgcgtacggcgacggtcggatggttgcgtggggttgtgtggttgcgttcggcgcggcgcgtgggttttgttggcgggcggcgcgcgcggttgcggggttttagggtcgtttcgttcgtaggtgttatgttgtgggtttcgtttaggtgaggacgttcgggttttggtcgagttattcgttatttagggtcggaggcggggcggggagtcgcggggaaggaggggcggtcgggttggtattttagttttttgggaattgtttggatcgtcgtcgcgttcgagtgtatcgcgtttttgttggagggcggatgcgttttgtttttttttgattcgttggcggtttcggaaacgttattttcgcgggagagcgttcgtgggacggtttgggttaggttgtttgttagtttttgcgtttttcggtagttttcgcgtttttgttttttttgcgcgttttttgatttttattatgaggacgtttgggtcgtgatttttatttgtatgtggaggaaattgggtcgcgcgtcgggagtcgcgtttgcgggtgtttcgtttttaagtgtttgtgggtttggtgcgggttttgggtttagtttagttcgttgtgatttcgattgagcgttggaggtttcgcgggcgggagtaggagggttggagtcggcgtttgttgtgtgttcggcgcggtagtgatgtgtgagttttttcgtaatttttgagaaggtgtgattttgtgtggttaggaagtcgaagtttgacgagtttttaagtacgtttttttaggttt

SEQ ID NO: 4306 - DNA, 1072 bp, Artificial Sequence
  chemically treated genomic DNA (Homo sapiens) CpG-island No: 4306
aaacctaaaaaaacgtacttaaaaactcgtcaaacttcgacttcctaaccacacaaaatcacaccttctcaaaaattacgaaaaaactcacacatcactaccgcgccgaacacacaacaaacgccgactccaaccctcctactcccgcccgcgaaacctccaacgctcaatcgaaatcacaacgaactaaactaaacccaaaacccgcaccaaacccacaaacacttaaaaacgaaacacccgcaaacgcgactcccgacgcgcgacccaatttcctccacatacaaataaaaatcacgacccaaacgtcctcataataaaaatcaaaaaacgcgcaaaaaaaacaaaaacgcgaaaactaccgaaaaacgcaaaaactaacaaacaacctaacccaaaccgtcccacgaacgctctcccgcgaaaataacgtttccgaaaccgccaacgaatcaaaaaaaaacaaaacgcatccgccctccaacaaaaacgcgatacactcgaacgcgacgacgatccaaacaattcccaaaaaactaaaataccaacccgaccgcccctccttccccgcgactccccgccccgcctccgaccctaaataacgaataactcgaccaaaacccgaacgtcctcacctaaacgaaacccacaacataacacctacgaacgaaacgaccctaaaaccccgcaaccgcgcgcgccgcccgccaacaaaacccacgcgccgcgccgaacgcaaccacacaaccccacgcaaccatccgaccgtcgccgtacgcacgtacacgacgtacgaccccccccccccgcgaatccgtccgctacacaaccaatcaacgatcgacgcgcgcgacatcacgaaaattataatcctataaacgcgcgaaacccgtcgaacgcctataaaactcgacccgcaaaccaaaaaaactccgttacaaaaaaaaaatacgaaatcccgccgcctcctaaaccgaaatcgcgataaactaaccgcgacgcacaataaacacgacctaaacgacgacgtccgtactatcgccctatacctacgaatcccgataacattacg

SEQ ID NO: 4307 - DNA, 1072 bp, Artificial Sequence
  chemically treated genomic DNA (Homo sapiens) CpG-island No: 4307
ggatttgagaaaacgtatttgaaaattcgttaagtttcggttttttgattatataaggttatatttttttagaagttgcggggaggtttatatattattatcgcgtcgggtatatagtaggcgtcggttttagtttttttgttttcgttcgcggagtttttagcgtttagtcgaggttatagcgagttgaattgaatttaaggttcgtattaaatttataggtatttgggggcggagtattcgtaggcgcggttttcggcgcgcggtttagttttttttatatgtagatgaaaattacgatttaaacgtttttatggtggaaattagaagacgcgtagggaaaatagggacgcggaaattgtcgggaagcgtaggggttgataagtagtttggtttaggtcgttttacgagcgttttttcgcgggagtagcgttttcgaggtcgttagcgagttagaggaaggtagggcgtattcgttttttagtaagaacgcgatgtattcgggcgcgacgacggtttaggtagtttttaggaggttgggatattagttcggtcgttttttttttttcgcggtttttcgtttcgttttcggttttgagtggcgagtggttcggttagaattcggacgtttttatttgagcggggtttatagtatagtatttgcgggcggggcggttttggagtttcgtagtcgcgcgcgtcgttcgttagtaaagtttacgcgtcgcgtcgagcgtagttatatagttttacgtagttattcggtcgtcgtcgtgcgtacgtgtacggcgtgcggtttttttttttcgcgagttcgttcgttgtatagttaattagcggtcggcgcgcgcggtattacgggagttgtagttttgtaagcgcgcggagttcgtcgggcgtttatggaattcgattcgtaggttaaaggggtttcgttgtaaggaagaagtgcggggtttcgtcgttttttagatcgagatcgcggtgagttggtcgcggcgtataatgggtacggtttgggcggcggcgttcgtattatcgttttgtgtttgcggatttcggtaatattgcg

SEQ ID NO: 4308 - DNA, 1072 bp, Artificial Sequence
  chemically treated genomic DNA (Homo sapiens) CpG-island No: 4308
cgcaatattaccgaaatccgcaaacacaaaacgataatacgaacgccgccgcccaaaccgtacccattatacgccgcgaccaactcaccgcgatctcgatctaaaaaacgacgaaaccccgcacttcttccttacaacgaaacccctttaacctacgaatcgaattccataaacgcccgacgaactccgcgcgcttacaaaactacaactcccgtaataccgcgcgcgccgaccgctaattaactatacaacgaacgaactcgcgaaaaaaaaaaaccgcacgccgtacacgtacgcacgacgacgaccgaataactacgtaaaactatataactacgctcgacgcgacgcgtaaactttactaacgaacgacgcgcgcgactacgaaactccaaaaccgccccgcccgcaaatactatactataaaccccgctcaaataaaaacgtccgaattctaaccgaaccactcgccactcaaaaccgaaaacgaaacgaaaaaccgcgaaaaaaaaaaaacgaccgaactaatatcccaacctcctaaaaactacctaaaccgtcgtcgcgcccgaatacatcgcgttcttactaaaaaacgaatacgccctaccttcctctaactcgctaacgacctcgaaaacgctactcccgcgaaaaaacgctcgtaaaacgacctaaaccaaactacttatcaacccctacgcttcccgacaatttccgcgtccctattttccctacgcgtcttctaatttccaccataaaaacgtttaaatcgtaattttcatctacatataaaaaaaactaaaccgcgcgccgaaaaccgcgcctacgaatactccgcccccaaatacctataaatttaatacgaaccttaaattcaattcaactcgctataacctcgactaaacgctaaaaactccgcgaacgaaaacaaaaaaactaaaaccgacgcctactatatacccgacgcgataataatatataaacctccccgcaacttctaaaaaaatataaccttatataatcaaaaaaccgaaacttaacgaattttcaaatacgttttctcaaatcc

SEQ ID NO: 4309 - DNA, 1561 bp, Artificial Sequence
  chemically treated genomic DNA (Homo sapiens) CpG-island No: 4309
gtgtgcgatggcgtgtgatcgaaggtcggtaagtttataggagggcgttataggtgtggggcgtgtgtgatggcgtgtgatcgaaggtcggtaagtttataggagggcgttataggtgtggagcgtgtgcgatggtatgtgatcgaaggtttgtgagtttataggagtgtgttataggtgtggggcgtgtgcgatggcgtgtgattgaaggtcggtaagtttataggagggcgttataggtgtggggcgtgtgcgatggcgtgtgatcgaaggtcggtaagtttataggagtgtgttataggtgtggggcgtgtgcgatggcgtgtgatcgaaggtcggtaagtttataggagtgtgttataggtgtggagcgtgtgcgatggtatgtgaaggtcggtaagtttataggagggcgtcgtaggtgtggggcgtgtgcgatggtatgtgatcgaaggtcggtaagtttataggagtgcgttataggtgtggggcgtgtgcgatggcgtgtgatcgaaggtttgtaagtttataggagtgcgttataggtgtggggcgtgtgcgatggcgtgtgatcgaaggtcggtaagtttataggagggcgttataggtgtggggcgtgtgcgatggcgtgtgatcgaaggtcggtaagtttataggagggcgttataggtgtggggcgtgtgcgatggcgtgtgatcgaaggtcggtaagtttataggagggcgttataggtgtggggcgtgtgcgatgacgtgtgatcgaaggtcggtaagtttataggagggcgttataggtgtggggcgtgtgcgatggcgtgtgatcgaatgtcggtaagtttataggagggcgttataggtgtggggcgtgtgcgatggcgtgtgatcgaaggtcggtaagtttataggagggcgttataggtgtggggcgtgtgcgatggcgtgtgatcgaaggtcggtaagtttataggagggcgttataggtgtggggcgtgtgcgatggcgtgtgatcgaaggtcggtaagtttataggagggcgttataggtgtggggcgtgtgcgatgacgtgtgattgaaggtcggtaagtttataggagggcgttataggtgtggggcgtgtgcgatgatgtgtgattgaaggtcggtaagtttataggagggcgttataggtgtggggcgtgtgcgatgacgtgtgatcgaaggtttgtaagtttataggagtgtgttataggtgtggagcgtgtgcgatggcgtgtgatcgaaggtcggtaagtttataggagggcgttataggtgtggggcgtgtgcgatgacgtgtgattgaaggtcggtaagtttataggagggcgttataggtgtggagcgtgtgcgatggcgtgtgatcgaaggtttgtaagtttataggagtgtgttataggtgtggagcgtgtgcgatggcgtgtgatcgaaggtcggtaagtttataggagggcgttataggtgtggagcgtgtgcgatggtatgtgattgaaggtcggtaagtttataggagggcgttataggtgtggaggggagggtttggagta

SEQ ID NO: 4310 - DNA, 1561 bp, Artificial Sequence
  chemically treated genomic DNA (Homo sapiens) CpG-island No: 4310
tactccaaaccctcccctccacacctataacgccctcctataaacttaccgaccttcaatcacataccatcgcacacgctccacacctataacgccctcctataaacttaccgaccttcgatcacacgccatcgcacacgctccacacctataacacactcctataaacttacaaaccttcgatcacacgccatcgcacacgctccacacctataacgccctcctataaacttaccgaccttcaatcacacgtcatcgcacacgccccacacctataacgccctcctataaacttaccgaccttcgatcacacgccatcgcacacgctccacacctataacacactcctataaacttacaaaccttcgatcacacgtcatcgcacacgccccacacctataacgccctcctataaacttaccgaccttcaatcacacatcatcgcacacgccccacacctataacgccctcctataaacttaccgaccttcaatcacacgtcatcgcacacgccccacacctataacgccctcctataaacttaccgaccttcgatcacacgccatcgcacacgccccacacctataacgccctcctataaacttaccgaccttcgatcacacgccatcgcacacgccccacacctataacgccctcctataaacttaccgaccttcgatcacacgccatcgcacacgccccacacctataacgccctcctataaacttaccgacattcgatcacacgccatcgcacacgccccacacctataacgccctcctataaacttaccgaccttcgatcacacgtcatcgcacacgccccacacctataacgccctcctataaacttaccgaccttcgatcacacgccatcgcacacgccccacacctataacgccctcctataaacttaccgaccttcgatcacacgccatcgcacacgccccacacctataacgccctcctataaacttaccgaccttcgatcacacgccatcgcacacgccccacacctataacgcactcctataaacttacaaaccttcgatcacacgccatcgcacacgccccacacctataacgcactcctataaacttaccgaccttcgatcacataccatcgcacacgccccacacctacgacgccctcctataaacttaccgaccttcacataccatcgcacacgctccacacctataacacactcctataaacttaccgaccttcgatcacacgccatcgcacacgccccacacctataacacactcctataaacttaccgaccttcgatcacacgccatcgcacacgccccacacctataacgccctcctataaacttaccgaccttcaatcacacgccatcgcacacgccccacacctataacacactcctataaactcacaaaccttcgatcacataccatcgcacacgctccacacctataacgccctcctataaacttaccgaccttcgatcacacgccatcacacacgccccacacctataacgccctcctataaacttaccgaccttcgatcacacgccatcgcacac

SEQ ID NO: 4311 - DNA, 1561 bp, Artificial Sequence
  chemically treated genomic DNA (Homo sapiens) CpG-island No: 4311
tattttaagtttttttttttatatttgtggcgtttttttgtgagtttatcggtttttaattatatgttatcgtatacgttttatatttgtgacgtttttttgtgagtttatcggttttcgattatacgttatcgtatacgttttatatttgtggtatatttttgtgagtttataggttttcgattatacgttatcgtatacgttttatatttgtggcgtttttttgtgagtttatcggtttttaattatacgttatcgtatacgttttatatttgtgacgtttttttgtgagtttatcggttttcgattatacgttatcgtatacgttttatatttgtggtatatttttgtgagtttataggttttcgattatacgttatcgtatacgttttatatttgtgacgtttttttgtgagtttatcggtttttaattatatattatcgtatacgttttatatttgtgacgtttttttgtgagtttatcggtttttaattatacgttatcgtatacgttttatatttgtgacgtttttttgtgagtttatcggttttcgattatacgttatcgtatacgttttatatttgtgacgtttttttgtgagtttatcggttttcgattatacgttatcgtatacgttttatatttgtgacgtttttttgtgagtttatcggttttcgattatacgttatcgtatacgttttatatttgtgacgtttttttgtgagtttatcggtattcgattatacgttatcgtatacgttttatatttgtgacgtttttttgtgagtttatcggttttcgattatacgttatcgtatacgttttatatttgtgacgtttttttgtgagtttatcggttttcgattatacgttatcgtatacgttttatatttgtgacgtttttttgtgagtttatcggttttcgattatacgttatcgtatacgttttatatttgtgacgtttttttgtgagtttatcggttttcgattatacgttatcgtatacgttttatatttgtgacgtatttttgtgagtttataggttttcgattatacgttatcgtatacgttttatatttgtggcgtatttttgtgagtttatcggttttcgattatatgttatcgtatacgttttatatttgcgacgtttttttgtgagtttatcggtttttatatgttatcgtatacgttttatatttgtggtatatttttgtgagtttatcggttttcgattatacgttatcgtatacgttttatatttgtggtatatttttgtgagtttatcggttttcgattatacgttatcgtatacgttttatatttgtggcgtttttttgtgagtttatcggtttttaattatacgttatcgtatacgttttatatttgtggtatatttttgtgagtttataggttttcgattatatgttatcgtatacgttttatatttgtggcgtttttttgtgagtttatcggttttcgattatacgttattatatacgttttatatttgtgacgtttttttgtgagtttatcggttttcgattatacgttatcgtatat

SEQ ID NO: 4312 - DNA, 1561 bp, Artificial Sequence
  chemically treated genomic DNA (Homo sapiens) CpG-island No: 4312
atatacgataacgtataatcgaaaaccgataaactcacaaaaaaacgtcacaaatataaaacgtatataataacgtataatcgaaaaccgataaactcacaaaaaaacgccacaaatataaaacgtatacgataacatataatcgaaaacctataaactcacaaaaatataccacaaatataaaacgtatacgataacgtataattaaaaaccgataaactcacaaaaaaacgccacaaatataaaacgtatacgataacgtataatcgaaaaccgataaactcacaaaaatataccacaaatataaaacgtatacgataacgtataatcgaaaaccgataaactcacaaaaatataccacaaatataaaacgtatacgataacatataaaaaccgataaactcacaaaaaaacgtcgcaaatataaaacgtatacgataacatataatcgaaaaccgataaactcacaaaaatacgccacaaatataaaacgtatacgataacgtataatcgaaaacctataaactcacaaaaatacgtcacaaatataaaacgtatacgataacgtataatcgaaaaccgataaactcacaaaaaaacgtcacaaatataaaacgtatacgataacgtataatcgaaaaccgataaactcacaaaaaaacgtcacaaatataaaacgtatacgataacgtataatcgaaaaccgataaactcacaaaaaaacgtcacaaatataaaacgtatacgataacgtataatcgaaaaccgataaactcacaaaaaaacgtcacaaatataaaacgtatacgataacgtataatcgaataccgataaactcacaaaaaaacgtcacaaatataaaacgtatacgataacgtataatcgaaaaccgataaactcacaaaaaaacgtcacaaatataaaacgtatacgataacgtataatcgaaaaccgataaactcacaaaaaaacgtcacaaatataaaacgtatacgataacgtataatcgaaaaccgataaactcacaaaaaaacgtcacaaatataaaacgtatacgataacgtataattaaaaaccgataaactcacaaaaaaacgtcacaaatataaaacgtatacgataatatataattaaaaaccgataaactcacaaaaaaacgtcacaaatataaaacgtatacgataacgtataatcgaaaacctataaactcacaaaaatataccacaaatataaaacgtatacgataacgtataatcgaaaaccgataaactcacaaaaaaacgtcacaaatataaaacgtatacgataacgtataattaaaaaccgataaactcacaaaaaaacgccacaaatataaaacgtatacgataacgtataatcgaaaacctataaactcacaaaaatataccacaaatataaaacgtatacgataacgtataatcgaaaaccgataaactcacaaaaaaacgtcacaaatataaaacgtatacgataacatataattaaaaaccgataaactcacaaaaaaacgccacaaatataaaaaaaaaaacttaaaata

SEQ ID NO: 4313 - DNA, 1244 bp, Artificial Sequence
  chemically treated genomic DNA (Homo sapiens) CpG-island No: 4313
atttttagcgatttttttaggagttcgcgttttatgggagttttttcgtatcgggtcgtttcgttttggcggttgttcgcgttttttttcgttttttttaggttatagggttttcgattcgattgtgacgtattgtattttcgtttttttttttttcgttgatttagcgcgtcgcgttttttttttttttggtttcgttgttttttttttttttcgaatttagttttggttttttcgtcgttagtttttttttttttcggcgggattcgtttttcgtttcgtttcgtttcgttttcgtttcgtttgtttttatcgcggttcgttcggtttatcgtttgttttttttttttgtcgttcggttcggttcgtttagtttagtggttttagttcggatttcgtcgtcgttcggtttaggtgcgagtttttattgttggggaggcggcgggtttcggtttttttcggtcgtttagttcgtttcgttcgttcggggttggcggggagggaatagttgggcggttttagagtttttcggaggataatgcgttcggcgttcggttattttcgttcggtttttttcgcgttcggttttttttcgtcgttttcggtagtcgttcggttgtagttttttttttttcgcgggggtttttttcgcggtcggagaggtttcggcgatagtagtattagtattagtattagtcgcgggggaggcggcggtagacgcggcgggggcggcggtttttcgagtagtagtacgggcgtcgagcgcgaggacgacgacgagagttttagcgttagtaagtcgttggtgtttaacgtcgcgtttttggggtcgtcggtttaggtgggcgttttcgtcggtttcgcgtttgtcgtttttttttttttagcggttatttttttttttatttttacgtttatttttttttgtagtatgatagtcgcggatttcggcgggggcgtcgcggtcggggtcgtcgggggtttcgggagtcgttcggcggggggcgcgggcggtatcgggatcggtagcggcgttttttgttgttcgtgttgttgttgttgcggttgtttagatcgtttcggtcgtagaggtcggcgtcgcggttgcgtttttagttttaggtgtcgttggggttattaggcgttgttcgtggtgttgttgttggcgtagggcggtttgttggatttgtattttatcgtcgttatcgatttgtattggtgtttttggatcgttattgatttgg

SEQ ID NO: 4314 - DNA, 1244 bp, Artificial Sequence
  chemically treated genomic DNA (Homo sapiens) CpG-island No: 4314
ccaaatcaataacgatccaaaaacaccaatacaaatcgataacgacgataaaatacaaatccaacaaaccgccctacgccaacaacaacaccacgaacaacgcctaataaccccaacgacacctaaaactaaaaacgcaaccgcgacgccgacctctacgaccgaaacgatctaaacaaccgcaacaacaacaacacgaacaacaaaaaacgccgctaccgatcccgataccgcccgcgccccccgccgaacgactcccgaaacccccgacgaccccgaccgcgacgcccccgccgaaatccgcgactatcatactacaaaaaaaaataaacgtaaaaataaaaaaaaaaataaccgctaaaaaaaaaaaaacgacaaacgcgaaaccgacgaaaacgcccacctaaaccgacgaccccaaaaacgcgacgttaaacaccaacgacttactaacgctaaaactctcgtcgtcgtcctcgcgctcgacgcccgtactactactcgaaaaaccgccgcccccgccgcgtctaccgccgcctcccccgcgactaatactaatactaatactactatcgccgaaacctctccgaccgcgaaaaaaacccccgcgaaaaaaaaaaaactacaaccgaacgactaccgaaaacgacgaaaaaaaaccgaacgcgaaaaaaaccgaacgaaaataaccgaacgccgaacgcattatcctccgaaaaactctaaaaccgcccaactattccctccccgccaaccccgaacgaacgaaacgaactaaacgaccgaaaaaaaccgaaacccgccgcctccccaacaataaaaactcgcacctaaaccgaacgacgacgaaatccgaactaaaaccactaaactaaacgaaccgaaccgaacgacaaaaaaaaaaaacaaacgataaaccgaacgaaccgcgataaaaacaaacgaaacgaaaacgaaacgaaacgaaacgaaaaacgaatcccgccgaaaaaaaaaaaaactaacgacgaaaaaaccaaaactaaattcgaaaaaaaaaaaaaacaacgaaaccaaaaaaaaaaaaaacgcgacgcgctaaatcaacgaaaaaaaaaaaaacgaaaatacaatacgtcacaatcgaatcgaaaaccctataacctaaaaaaaacgaaaaaaaacgcgaacaaccgccaaaacgaaacgacccgatacgaaaaaactcccataaaacgcgaactcctaaaaaaatcgctaaaaat

SEQ ID NO: 4315 - DNA, 1244 bp, Artificial Sequence
  chemically treated genomic DNA (Homo sapiens) CpG-island No: 4315
ttaggttagtggcgatttaggagtattagtataggtcggtgacggcgatgaggtataggtttagtaggtcgttttgcgttagtagtagtattacggatagcgtttggtagttttagcggtatttgggattgggggcgtagtcgcggcgtcgatttttgcggtcggggcggtttgggtagtcgtagtagtagtaatacgggtagtaggaggcgtcgttgtcggtttcggtgtcgttcgcgtttttcgtcgagcggttttcggggttttcgacggtttcggtcgcggcgttttcgtcgaagttcgcggttgttatgttgtaggaggaggtgggcgtggaggtggaggaggaggtggtcgttgaggaggagaaggcgataggcgcggggtcggcgggggcgtttatttgagtcggcggttttaggagcgcggcgttgggtattagcggtttgttgacgttgaggttttcgtcgtcgttttcgcgttcggcgttcgtgttgttgttcggggagtcgtcgttttcgtcgcgtttgtcgtcgtttttttcgcggttggtgttggtgttggtgttgttgtcgtcggagttttttcggtcgcggaaggagttttcgcggaggaagaggggttgtagtcgggcggttgtcgggggcggcgggaaggaatcggacgcggaggagatcgagcgagggtggtcgagcgtcgggcgtattgtttttcgaggggttttggggtcgtttagttgtttttttttcgttaatttcgggcgggcgaggcgggttaggcggtcgaggggagtcggggttcgtcgtttttttagtagtggggattcgtatttgggtcgggcggcggcgagattcggattggagttattggattgggcgagtcgggtcgggcggtagggagagggggtaggcggtgaatcgagcggatcgcggtgaagataggcgaggcgggggcggggcggggcggggcggggagcgagtttcgtcgggagggagggaggttggcggcggggaaattaggattggattcgagggggagaggaagtagcgagattagaggaggagaaagcgcggcgcgttggattaacgggaagagaaggggcgggggtgtagtgcgttatagtcgggtcgggagttttgtggtttggaggaagcgggaggaggcgcgggtagtcgttagggcgaggcgattcggtgcggggggatttttatggagcgcggatttttaaggaagtcgttgggaat

SEQ ID NO: 4316 - DNA, 1244 bp, Artificial Sequence
  chemically treated genomic DNA (Homo sapiens) CpG-island No: 4316
attcccaacgacttccttaaaaatccgcgctccataaaaatccccccgcaccgaatcgcctcgccctaacgactacccgcgcctcctcccgcttcctccaaaccacaaaactcccgacccgactataacgcactacacccccgccccttctcttcccgttaatccaacgcgccgcgctttctcctcctctaatctcgctacttcctctccccctcgaatccaatcctaatttccccgccgccaacctccctccctcccgacgaaactcgctccccgccccgccccgccccgcccccgcctcgcctatcttcaccgcgatccgctcgattcaccgcctaccccctctccctaccgcccgacccgactcgcccaatccaataactccaatccgaatctcgccgccgcccgacccaaatacgaatccccactactaaaaaaacgacgaaccccgactcccctcgaccgcctaacccgcctcgcccgcccgaaattaacgaaaaaaaaacaactaaacgaccccaaaacccctcgaaaaacaatacgcccgacgctcgaccaccctcgctcgatctcctccgcgtccgattccttcccgccgcccccgacaaccgcccgactacaacccctcttcctccgcgaaaactccttccgcgaccgaaaaaactccgacgacaacaacaccaacaccaacaccaaccgcgaaaaaaacgacgacaaacgcgacgaaaacgacgactccccgaacaacaacacgaacgccgaacgcgaaaacgacgacgaaaacctcaacgtcaacaaaccgctaatacccaacgccgcgctcctaaaaccgccgactcaaataaacgcccccgccgaccccgcgcctatcgccttctcctcctcaacgaccacctcctcctccacctccacgcccacctcctcctacaacataacaaccgcgaacttcgacgaaaacgccgcgaccgaaaccgtcgaaaaccccgaaaaccgctcgacgaaaaacgcgaacgacaccgaaaccgacaacgacgcctcctactacccgtattactactactacgactacccaaaccgccccgaccgcaaaaatcgacgccgcgactacgcccccaatcccaaataccgctaaaactaccaaacgctatccgtaatactactactaacgcaaaacgacctactaaacctatacctcatcgccgtcaccgacctatactaatactcctaaatcgccactaacctaa

SEQ ID NO: 4317 - DNA, 692 bp, Artificial Sequence
  chemically treated genomic DNA (Homo sapiens) CpG-island No: 4317
tcggggtcgtcggggcggcgtagttagcggcgcgtataattattatttgtattattattacgtcgcgtcgtttttgtatttgttcgttttttcggtcgttatcgttggggttaaggtacgcggagttcgcgggggcgtcggcggcgcggggggcggtttgggggcggtcgcggtagcgggcgagttcgttttcgtttatttggtttggtttatttattttatcgtttttatttttaaggtggtgttgattttgggtacgtttattttagattttatcgagttacgcgcgtttttcggtattacgggttttcgttttattatggcgttgtcggtgtttttgttttatagtttggtgcgggttattagcgaggcgggcgcgttttcgggatcggtaggatttttgttgttgtagttttagcggtatcgcgcggtcggatgttttttgggtacgtgtttggatttgttcgatagttttacgttggtggagttgatgttggagggtcgcgtgtcgttgttcgcgtatttgcgttatttgtttatcgtcgtttatttttttattttcgtttcgtcggtgttttggttttacgagtttaacgtcgcggtcgtagcggttgtattttggggttaggttttcgggtttggtagttgtagtcgttttttgcgtttgttgggcggttgtttggtggacgtgt

SEQ ID NO: 4318 - DNA, 692 bp, Artificial Sequence
  chemically treated genomic DNA (Homo sapiens) CpG-island No: 4318
acacgtccaccaaacaaccgcccaacaaacgcaaaaaacgactacaactaccaaacccgaaaacctaaccccaaaatacaaccgctacgaccgcgacgttaaactcgtaaaaccaaaacaccgacgaaacgaaaataaaaaaataaacgacgataaacaaataacgcaaatacgcgaacaacgacacgcgaccctccaacatcaactccaccaacgtaaaactatcgaacaaatccaaacacgtacccaaaaaacatccgaccgcgcgataccgctaaaactacaacaacaaaaatcctaccgatcccgaaaacgcgcccgcctcgctaataacccgcaccaaactataaaacaaaaacaccgacaacgccataataaaacgaaaacccgtaataccgaaaaacgcgcgtaactcgataaaatctaaaataaacgtacccaaaatcaacaccaccttaaaaataaaaacgataaaataaataaaccaaaccaaataaacgaaaacgaactcgcccgctaccgcgaccgcccccaaaccgccccccgcgccgccgacgcccccgcgaactccgcgtaccttaaccccaacgataacgaccgaaaaaacgaacaaatacaaaaacgacgcgacgtaataataatacaaataataattatacgcgccgctaactacgccgccccgacgaccccga

SEQ ID NO: 4319 - DNA, 692 bp, Artificial Sequence
  chemically treated genomic DNA (Homo sapiens) CpG-island No: 4319
gtacgtttattaggtagtcgtttagtaggcgtagaaggcggttgtagttgttaggttcggaggtttggttttaggatgtagtcgttgcggtcgcggcgttgagttcgtagagttagagtatcggcgaggcgagggtgaggaagtagacggcgataagtaggtagcgtaggtgcgcgggtagcggtacgcggttttttagtattagttttattagcgtgaagttgtcgagtaggtttaagtacgtgtttaggaagtattcggtcgcgcggtgtcgttggggttgtagtagtaggggttttgtcgatttcgggggcgcgttcgtttcgttgatggttcgtattaagttgtagagtaggggtatcgatagcgttatggtgagacggaagttcgtggtgtcgaagggcgcgcgtagttcgatgaggtttaggatggacgtgtttaggattagtattattttgggagtgaaggcgatggagtagataagttaggttaggtaggcgaaggcgaattcgttcgttgtcgcggtcgtttttaggtcgtttttcgcgtcgtcggcgttttcgcgggtttcgcgtgttttggttttagcggtagcggtcgagggggcgggtagatgtaggggcggcgcggcgtggtggtggtgtaggtggtggttgtgcgcgtcgttggttgcgtcgtttcgacggtttcgg

SEQ ID NO: 4320 - DNA, 692 bp, Artificial Sequence
  chemically treated genomic DNA (Homo sapiens) CpG-island No: 4320
ccgaaaccgtcgaaacgacgcaaccaacgacgcgcacaaccaccacctacaccaccaccacgccgcgccgcccctacatctacccgccccctcgaccgctaccgctaaaaccaaaacacgcgaaacccgcgaaaacgccgacgacgcgaaaaacgacctaaaaacgaccgcgacaacgaacgaattcgccttcgcctacctaacctaacttatctactccatcgccttcactcccaaaataatactaatcctaaacacgtccatcctaaacctcatcgaactacgcgcgcccttcgacaccacgaacttccgtctcaccataacgctatcgatacccctactctacaacttaatacgaaccatcaacgaaacgaacgcgcccccgaaatcgacaaaacccctactactacaaccccaacgacaccgcgcgaccgaatacttcctaaacacgtacttaaacctactcgacaacttcacgctaataaaactaatactaaaaaaccgcgtaccgctacccgcgcacctacgctacctacttatcgccgtctacttcctcaccctcgcctcgccgatactctaactctacgaactcaacgccgcgaccgcaacgactacatcctaaaaccaaacctccgaacctaacaactacaaccgccttctacgcctactaaacgactacctaataaacgtac

SEQ ID NO: 4321 - DNA, 576 bp, Artificial Sequence
  chemically treated genomic DNA (Homo sapiens) CpG-island No: 4321
taggcggtcgttttttcgtttttaggggtgggcgcgcgacgcgggtagggatcgggcgttcggaggattaagcgagcgtatttcgtttattcgtgttgggatattatttagtttggacgtcgtttttcgtttttttttttcgcgtatcgttagcgttaattaaagattttcgtcgggaaagtttttttgttaagttggaaagcgttgaaggcggatcgttttttagatttgggtttgtaggtttataaggttcgggaggtttacggtgggcgtttgtttaatagagggtttttgcggagaagcgtagaacgataaatgttagaggcggtgatcgcgttttttggatattagcgtcgtatcgcgtattcgcgtcgtttgcgcgttttgtagtcggttgggttattcggtttttatatattaggcggattcgcgtcgggacggggcggagcggggtgggcggggagggggtggggaaggtcgaacggttttttgggagtcgtagttcgattacgtagttttgtcgtagttagaataaaagttaaataaggatggaaatggttagggtttgtttattat

SEQ ID NO: 4322 - DNA, 576 bp, Artificial Sequence
  chemically treated genomic DNA (Homo sapiens) CpG-island No: 4322
ataataaacaaaccctaaccatttccatccttatttaacttttattctaactacgacaaaactacgtaatcgaactacgactcccaaaaaaccgttcgaccttccccaccccctccccgcccaccccgctccgccccgtcccgacgcgaatccgcctaatatataaaaaccgaataacccaaccgactacaaaacgcgcaaacgacgcgaatacgcgatacgacgctaatatccaaaaaacgcgatcaccgcctctaacatttatcgttctacgcttctccgcaaaaaccctctattaaacaaacgcccaccgtaaacctcccgaaccttataaacctacaaacccaaatctaaaaaacgatccgccttcaacgctttccaacttaacaaaaaaactttcccgacgaaaatctttaattaacgctaacgatacgcgaaaaaaaaaaacgaaaaacgacgtccaaactaaataatatcccaacacgaataaacgaaatacgctcgcttaatcctccgaacgcccgatccctacccgcgtcgcgcgcccacccctaaaaacgaaaaaacgaccgccta

SEQ ID NO: 4323 - DNA, 576 bp, Artificial Sequence
  chemically treated genomic DNA (Homo sapiens) CpG-island No: 4323
gtggtgggtaaattttaattatttttatttttgtttagtttttgttttgattacgataggattacgtagtcgaattacgatttttaggaagtcgttcggttttttttatttttttttcgtttatttcgtttcgtttcgtttcggcgcgggttcgtttggtatataagggtcgaatggtttagtcgattgtagggcgcgtaggcggcgcgggtgcgcggtgcggcgttggtatttagaggacgcggttatcgtttttggtatttgtcgttttgcgttttttcgtaaggattttttgttaggtaggcgtttatcgtaagtttttcgggttttgtgaatttgtaaatttaagtttgagagacgattcgtttttagcgttttttagtttggtagagaggttttttcggcggggatttttggttggcgttggcgatgcgcggggaagaaaggcgaggagcggcgtttaggttgggtgatgttttagtacgagtaggcgggatgcgttcgtttggtttttcgggcgttcggtttttgttcgcgtcgcgcgtttatttttggggacgagaaggcggtcgtttg

SEQ ID NO: 4324 - DNA, 576 bp, Artificial Sequence
  chemically treated genomic DNA (Homo sapiens) CpG-island No: 4324
caaacgaccgccttctcgtccccaaaaataaacgcgcgacgcgaacaaaaaccgaacgcccgaaaaaccaaacgaacgcatcccgcctactcgtactaaaacatcacccaacctaaacgccgctcctcgcctttcttccccgcgcatcgccaacgccaaccaaaaatccccgccgaaaaaacctctctaccaaactaaaaaacgctaaaaacgaatcgtctctcaaacttaaatttacaaattcacaaaacccgaaaaacttacgataaacgcctacctaacaaaaaatccttacgaaaaaacgcaaaacgacaaataccaaaaacgataaccgcgtcctctaaataccaacgccgcaccgcgcacccgcgccgcctacgcgccctacaatcgactaaaccattcgacccttatataccaaacgaacccgcgccgaaacgaaacgaaacgaaataaacgaaaaaaaaataaaaaaaaccgaacgacttcctaaaaatcgtaattcgactacgtaatcctatcgtaatcaaaacaaaaactaaacaaaaataaaaataattaaaatttacccaccac

SEQ ID NO: 4325 - DNA, 1237 bp, Artificial Sequence
  chemically treated genomic DNA (Homo sapiens) CpG-island No: 4325
tggagtcgtattcgtttttacgtatttgcgttagtttattaaaatttaatttgggtatttttatgtaatcgtggcgggtttaggcgcgttttttcgcggtttttcgttttagtataggtcggtaggttttggtttatgtatttttttatttcgcgatcgcgtcggggtttatttttattgtagaatttgtcgttaaatttagtgtggttgtagtcgtagtttatttcgtcgggggttagtacggtgtagagatcgtcgttggcgtagggattgcgcgtaggcgtatatagagggtcggcggtcgtatcgcgtagattttggttatttagtagcgtcggcggtcgttcgtttagttttaggttggttagaaggtcgcggaaaggcggttcgtatttgacggtgttgagcgtgagtgtagataggcgtacgtcgggagggatgtcgtttacgaataggtcgttggttatttgtatttcgcgtcgttttgagcggatttcggcggcgcgggtttcgtcgtttatcgttagcgtcgtgcgtcgcgcgtcgcgggttagtaatattatgtgttagcggtcgtcggttatcggcgtgtttagttgtagcgtggcgggtttcgcgtaagatagcgtgaagcgtagtcgtaggcgttcgtttattagtagtagttttaagaagtcgtagtcgtcgtcgtcgtttaggtagagtagtagcgcgcgcgtggcgttggtgcgtaggttgaagttgagttcgtcggtgttcgtcgttttcgtttaacgcgcgtagcgagttttttgtttggggtcgttgtcgaattttaagttacggacgtttgtcgttagcgttagtagtaatagtagcggcggtagttggggtggcggttgttatcgattttcgagcgttatgttttcggcggtttcgacgtcgttcggttttcggtttcgtttaggttttagagtcgcgggcgtatggggcggggagggggtcgggcgtttttcgcgcggagcggggttttttcgtcgatttatagtgttatggatttagtagtcggggtttacgtgtttacgttttcggaaggtaacgacggcggttgcggtggtggagtttttttttcgcggcgggttcgtatggaaggtgggggagggacgtttgtagggaaatagagaggaaaggtttaatcgaaggtttagatttaaggggtgtcgtcggtgtttggttttttattttaaattagtaggtg

SEQ ID NO: 4326 - DNA, 1237 bp, Artificial Sequence
  chemically treated genomic DNA (Homo sapiens) CpG-island No: 4326
cacctactaatttaaaataaaaaaccaaacaccgacgacaccccttaaatctaaaccttcgattaaacctttcctctctatttccctacaaacgtccctcccccaccttccatacgaacccgccgcgaaaaaaaaactccaccaccgcaaccgccgtcgttaccttccgaaaacgtaaacacgtaaaccccgactactaaatccataacactataaatcgacgaaaaaaccccgctccgcgcgaaaaacgcccgaccccctccccgccccatacgcccgcgactctaaaacctaaacgaaaccgaaaaccgaacgacgtcgaaaccgccgaaaacataacgctcgaaaatcgataacaaccgccaccccaactaccgccgctactattactactaacgctaacgacaaacgtccgtaacttaaaattcgacaacgaccccaaacaaaaaactcgctacgcgcgttaaacgaaaacgacgaacaccgacgaactcaacttcaacctacgcaccaacgccacgcgcgcgctactactctacctaaacgacgacgacgactacgacttcttaaaactactactaataaacgaacgcctacgactacgcttcacgctatcttacgcgaaacccgccacgctacaactaaacacgccgataaccgacgaccgctaacacataatattactaacccgcgacgcgcgacgcacgacgctaacgataaacgacgaaacccgcgccgccgaaatccgctcaaaacgacgcgaaatacaaataaccaacgacctattcgtaaacgacatccctcccgacgtacgcctatctacactcacgctcaacaccgtcaaatacgaaccgcctttccgcgaccttctaaccaacctaaaactaaacgaacgaccgccgacgctactaaataaccaaaatctacgcgatacgaccgccgaccctctatatacgcctacgcgcaatccctacgccaacgacgatctctacaccgtactaacccccgacgaaataaactacgactacaaccacactaaatttaacgacaaattctacaataaaaataaaccccgacgcgatcgcgaaataaaaaaatacataaaccaaaacctaccgacctatactaaaacgaaaaaccgcgaaaaaacgcgcctaaacccgccacgattacataaaaatacccaaattaaattttaataaactaacgcaaatacgtaaaaacgaatacgactcca

SEQ ID NO: 4327 - DNA, 1237 bp, Artificial Sequence
  chemically treated genomic DNA (Homo sapiens) CpG-island No: 4327
tatttgttaatttgagatggagagttagatatcgacgatattttttgaatttgaattttcgattaaattttttttttttgtttttttgtaggcgttttttttttattttttatacgagttcgtcgcgggggaggggttttattatcgtagtcgtcgtcgttgtttttcggggacgtggatacgtgagtttcggttattgagtttatggtattgtgaatcggcgagggagtttcgtttcgcgcgaggggcgttcggtttttttttcgttttatgcgttcgcggttttgaagtttgagcggggtcgggggtcgggcggcgtcggggtcgtcggaggtatggcgttcgggagtcggtggtaatcgttattttagttgtcgtcgttgttgttgttgttggcgttggcggtaggcgttcgtggtttggagttcggtagcggttttaggtagagggttcgttacgcgcgttgggcgggagcggcgagtatcggcgagtttagttttagtttgcgtattaacgttacgcgcgcgttgttgttttatttggacgacggcggcgattgcgattttttggagttgttgttggtggacgggcgtttgcggttgcgttttacgttgttttgcgcggagttcgttacgttgtagttggatacgtcggtggtcgacgatcgttggtatatggtgttgttgattcgcgacgcgcggcgtacggcgttggcggtggacggcgaagttcgcgtcgtcgaggttcgtttaaagcggcgcgagatgtaggtggttagcgatttgttcgtgggcggtatttttttcgacgtgcgtttatttgtatttacgtttagtatcgttaagtacgagtcgttttttcgcggttttttggttaatttgaagttgggcgagcggtcgtcggcgttgttgggtagttagggtttgcgcggtgcggtcgtcgattttttgtgtgcgtttgcgcgtaatttttgcgttaacggcggtttttgtatcgtgttagttttcggcgaggtgggttgcgattgtagttatattggatttggcggtaagttttgtagtgaaggtgagtttcggcgcggtcgcgagatggaagggtgtatgggttagggtttatcggtttgtgttggggcgggaggtcgcgggagagcgcgtttaaattcgttacggttgtatggagatgtttagattaggttttagtaaattggcgtaagtgcgtgaggacggatgcgatttta

SEQ ID NO: 4328 - DNA, 1237 bp, Artificial Sequence
  chemically treated genomic DNA (Homo sapiens) CpG-island No: 4328
taaaatcgcatccgtcctcacgcacttacgccaatttactaaaacctaatctaaacatctccatacaaccgtaacgaatttaaacgcgctctcccgcgacctcccgccccaacacaaaccgataaaccctaacccatacacccttccatctcgcgaccgcgccgaaactcaccttcactacaaaacttaccgccaaatccaatataactacaatcgcaacccacctcgccgaaaactaacacgatacaaaaaccgccgttaacgcaaaaattacgcgcaaacgcacacaaaaaatcgacgaccgcaccgcgcaaaccctaactacccaacaacgccgacgaccgctcgcccaacttcaaattaaccaaaaaaccgcgaaaaaacgactcgtacttaacgatactaaacgtaaatacaaataaacgcacgtcgaaaaaaataccgcccacgaacaaatcgctaaccacctacatctcgcgccgctttaaacgaacctcgacgacgcgaacttcgccgtccaccgccaacgccgtacgccgcgcgtcgcgaatcaacaacaccatataccaacgatcgtcgaccaccgacgtatccaactacaacgtaacgaactccgcgcaaaacaacgtaaaacgcaaccgcaaacgcccgtccaccaacaacaactccaaaaaatcgcaatcgccgccgtcgtccaaataaaacaacaacgcgcgcgtaacgttaatacgcaaactaaaactaaactcgccgatactcgccgctcccgcccaacgcgcgtaacgaaccctctacctaaaaccgctaccgaactccaaaccacgaacgcctaccgccaacgccaacaacaacaacaacgacgacaactaaaataacgattaccaccgactcccgaacgccatacctccgacgaccccgacgccgcccgacccccgaccccgctcaaacttcaaaaccgcgaacgcataaaacgaaaaaaaaaccgaacgcccctcgcgcgaaacgaaactccctcgccgattcacaataccataaactcaataaccgaaactcacgtatccacgtccccgaaaaacaacgacgacgactacgataataaaacccctcccccgcgacgaactcgtataaaaaataaaaaaaaaacgcctacaaaaaaacaaaaaaaaaaaatttaatcgaaaattcaaattcaaaaaatatcgtcgatatctaactctccatctcaaattaacaaata

SEQ ID NO: 4329 - DNA, 642 bp, Artificial Sequence
  chemically treated genomic DNA (Homo sapiens) CpG-island No: 4329
tcgcgcgcgtgttcgtttatttatttttgggattcgtagcgcggatttcgaattttgttcggttagcgttattttcgtgcgttttcgttcgtcggtttcgttgcggttgcggtttttattcggttttcgcgtcgcggtttagcgttttgtcgtttcgtttttttttcgtttttgtatttcgcgtcgcgttttttttatcggggattttttttttcgtttcgcgcgcgtcgggttttgaagtatattaattttttttttgtcgttttagagagtttaatcgcgggcggggggttgcgttattgttggtgtggggatcgcgtgtagtagtttttttttatcgcgatattttcgggttttgcgtttcgtttgggtgtcgtacggaggaagtcgggaggggtaggaagcggattgcggtggggaaggggcgtttcgtttagtttttcggttcgggtttttgttttcgagataaatcgtttttacggggtttattttgttcgggttcgggcgtttttttgcgggcggcggaggttcgggcgtggtggaggtcgcgggcgtggggttgcggatttttgcgatggtttgggggaggggttgggatagaatgcgagttggttttggtttagtggagttttaaaaagttag

SEQ ID NO: 4330 - DNA, 642 bp, Artificial Sequence
  chemically treated genomic DNA (Homo sapiens) CpG-island No: 4330
ctaactttttaaaactccactaaaccaaaaccaactcgcattctatcccaacccctcccccaaaccatcgcaaaaatccgcaaccccacgcccgcgacctccaccacgcccgaacctccgccgcccgcaaaaaaacgcccgaacccgaacaaaataaaccccgtaaaaacgatttatctcgaaaacaaaaacccgaaccgaaaaactaaacgaaacgccccttccccaccgcaatccgcttcctacccctcccgacttcctccgtacgacacccaaacgaaacgcaaaacccgaaaatatcgcgataaaaaaaaactactacacgcgatccccacaccaacaataacgcaaccccccgcccgcgattaaactctctaaaacgacaaaaaaaaaattaatatacttcaaaacccgacgcgcgcgaaacgaaaaaaaaaatccccgataaaaaaaacgcgacgcgaaatacaaaaacgaaaaaaaaacgaaacgacaaaacgctaaaccgcgacgcgaaaaccgaataaaaaccgcaaccgcaacgaaaccgacgaacgaaaacgcacgaaaataacgctaaccgaacaaaattcgaaatccgcgctacgaatcccaaaaataaataaacgaacacgcgcgcga

SEQ ID NO: 4331 - DNA, 642 bp, Artificial Sequence
  chemically treated genomic DNA (Homo sapiens) CpG-island No: 4331
ttggttttttgaggttttattggattaaaattagttcgtattttgttttagttttttttttaggttatcgtaaggattcgtagttttacgttcgcgatttttattacgttcgggttttcgtcgttcgtaggaagacgttcgggttcgggtagggtgaatttcgtgggaacggtttgtttcgaaaataggaattcggatcggggggttgggcggggcgttttttttttatcgtagttcgttttttgtttttttcggtttttttcgtgcgatatttaggcggggcgtagagttcgggggtgtcgcggtgggggagggttgttgtacgcggtttttatattaatagtggcgtagtttttcgttcgcggttaaattttttggggcggtaggggaggggttaatatgttttagggttcggcgcgcgcggggcgagagggggagttttcggtggaggaggcgcggcgcggggtgtaggggcggggagggggcggggcggtagggcgttgggtcgcggcgcggagatcgggtgggagtcgtagtcgtagcgaggtcggcgggcgggagcgtacggaggtggcgttggtcgggtagggttcggggttcgcgttgcgggttttaagagtgagtgagcgagtacgcgcgcgg

SEQ ID NO: 4332 - DNA, 642 bp, Artificial Sequence
  chemically treated genomic DNA (Homo sapiens) CpG-island No: 4332
ccgcgcgcgtactcgctcactcactcttaaaacccgcaacgcgaaccccgaaccctacccgaccaacgccacctccgtacgctcccgcccgccgacctcgctacgactacgactcccacccgatctccgcgccgcgacccaacgccctaccgccccgccccctccccgcccctacaccccgcgccgcgcctcctccaccgaaaactccccctctcgccccgcgcgcgccgaaccctaaaacatattaacccctcccctaccgccccaaaaaatttaaccgcgaacgaaaaactacgccactattaatataaaaaccgcgtacaacaaccctcccccaccgcgacacccccgaactctacgccccgcctaaatatcgcacgaaaaaaaccgaaaaaaacaaaaaacgaactacgataaaaaaaaaacgccccgcccaaccccccgatccgaattcctattttcgaaacaaaccgttcccacgaaattcaccctacccgaacccgaacgtcttcctacgaacgacgaaaacccgaacgtaataaaaatcgcgaacgtaaaactacgaatccttacgataacctaaaaaaaaaactaaaacaaaatacgaactaattttaatccaataaaacctcaaaaaaccaa

SEQ ID NO: 4333 - DNA, 796 bp, Artificial Sequence
  chemically treated genomic DNA (Homo sapiens) CpG-island No: 4333
ggatcggtagtagcggtttttcgtttttcgcggcgattttttttttacgaatttttcgggagttggaggtgggggggaggggattcgattacgcggttgaagagcgcggggagttcgtttttttacgcggcgggcggcggcggcgttagacgtataaagagggaggagaaaggacgtcgcgggggcgggttcggggcggaggggtcgcggtttggattgggtcggttcgaggtgaggtcggaggtagcggttttcgattggtggagtattggttttttttaatatgggtcgggattggtcgaatcgttaggttcggcgacgaaatggcggcggggtcgggggaattgggaggtgtcgtagcgcgtattttttgttattgcgcggattgaggttagagtggtaggggaataggagggggtaaagtttgtgacgtgagagaacggttagtttattggttgaaatcgatggaggtaagcgtttcggcgtcgtagtgttatacgattggttgaaacgattttttttttttaggagttagtcgttcgagaatggagaaagtcgggaggagaagtcggaattaaggcggagagtaggggtgcgtatgcgtagggagggtacgcgtgttttcgtttttttttttagaggggcggaacggaggttttaagtgacgttagttattgtgttagaggtaattagggatcgcggcgaaggggcgggttcgagttgacgaataggatacgtcgaagttgtaggtagagtagagaaagattttttgttttttttgaaaaatagtgttacg

SEQ ID NO: 4334 - DNA, 796 bp, Artificial Sequence
  chemically treated genomic DNA (Homo sapiens) CpG-island No: 4334
cgtaacactatttttcaaaaaaaacaaaaaatctttctctactctacctacaacttcgacgtatcctattcgtcaactcgaacccgccccttcgccgcgatccctaattacctctaacacaataactaacgtcacttaaaacctccgttccgcccctctaaaaaaaaaaacgaaaacacgcgtaccctccctacgcatacgcacccctactctccgccttaattccgacttctcctcccgactttctccattctcgaacgactaactcctaaaaaaaaaaaatcgtttcaaccaatcgtataacactacgacgccgaaacgcttacctccatcgatttcaaccaataaactaaccgttctctcacgtcacaaactttaccccctcctattcccctaccactctaacctcaatccgcgcaataacaaaaaatacgcgctacgacacctcccaattcccccgaccccgccgccatttcgtcgccgaacctaacgattcgaccaatcccgacccatattaaaaaaaaccaatactccaccaatcgaaaaccgctacctccgacctcacctcgaaccgacccaatccaaaccgcgacccctccgccccgaacccgcccccgcgacgtcctttctcctccctctttatacgtctaacgccgccgccgcccgccgcgtaaaaaaacgaactccccgcgctcttcaaccgcgtaatcgaatcccctcccccccacctccaactcccgaaaaattcgtaaaaaaaaaatcgccgcgaaaaacgaaaaaccgctactaccgatcc

SEQ ID NO: 4335 - DNA, 796 bp, Artificial Sequence
  chemically treated genomic DNA (Homo sapiens) CpG-island No: 4335
cgtaatattattttttagagaaaataggaagtttttttttattttatttgtagtttcgacgtattttgttcgttagttcgagttcgttttttcgtcgcggtttttagttatttttagtataatgattaacgttatttaaggttttcgtttcgtttttttggggaagggggcggggatacgcgtgttttttttacgtatgcgtatttttgtttttcgttttggtttcggttttttttttcggttttttttattttcgagcggttggtttttgggggaggggaatcgttttagttaatcgtgtggtattacgacgtcgaggcgtttatttttatcggttttagttaatgagttagtcgtttttttacgttatagattttgtttttttttatttttttgttattttggttttagttcgcgtagtaataaggagtgcgcgttgcgatattttttagttttttcggtttcgtcgttatttcgtcgtcgggtttaacggttcggttaatttcgatttatattgaaaagagttagtgttttattaatcggaggtcgttgttttcgattttatttcgggtcggtttaatttaggtcgcggttttttcgtttcgagttcgttttcgcggcgtttttttttttttttttttgtgcgtttggcgtcgtcgtcgttcgtcgcgtgagaggacgggtttttcgcgttttttagtcgcgtagtcgggtttttttttttttatttttagttttcggaaggttcgtgaaggagaagtcgtcgcggaggacgaggaatcgttgttgtcggttt

SEQ ID NO: 4336 - DNA, 796 bp, Artificial Sequence
  chemically treated genomic DNA (Homo sapiens) CpG-island No: 4336
aaaccgacaacaacgattcctcgtcctccgcgacgacttctccttcacgaaccttccgaaaactaaaaataaaaaaaaaaaaacccgactacgcgactaaaaaacgcgaaaaacccgtcctctcacgcgacgaacgacgacgacgccaaacgcacaaaaaaaaaaaaaaaaaaacgccgcgaaaacgaactcgaaacgaaaaaaccgcgacctaaattaaaccgacccgaaataaaatcgaaaacaacgacctccgattaataaaacactaactcttttcaatataaatcgaaattaaccgaaccgttaaacccgacgacgaaataacgacgaaaccgaaaaaactaaaaaatatcgcaacgcgcactccttattactacgcgaactaaaaccaaaataacaaaaaaataaaaaaaaacaaaatctataacgtaaaaaaacgactaactcattaactaaaaccgataaaaataaacgcctcgacgtcgtaataccacacgattaactaaaacgattcccctcccccaaaaaccaaccgctcgaaaataaaaaaaaccgaaaaaaaaaaccgaaaccaaaacgaaaaacaaaaatacgcatacgtaaaaaaaacacgcgtatccccgcccccttccccaaaaaaacgaaacgaaaaccttaaataacgttaatcattatactaaaaataactaaaaaccgcgacgaaaaaacgaactcgaactaacgaacaaaatacgtcgaaactacaaataaaataaaaaaaaacttcctattttctctaaaaaataatattacg

SEQ ID NO: 4337 - DNA, 544 bp, Artificial Sequence
  chemically treated genomic DNA (Homo sapiens) CpG-island No: 4337
tatcgcggttagttcggacgtgacggtgttacgggtttaggggcgagaagcggggtgaggagggggcggggtcggggttttcgcggcgggacgtgaagatgtattttttttttgcgttttcgttcgtttcgtagtttcgtttagcgtattttgtaaacgtcgttataggtttcggtttttatacgttgtagtagttcgaagcggtttcgcggattttgtagcgatacgtttcgtaatagcgttatggttcggcgtcggattcgtcggcgggcgtaagttgcggagtcggcgcggagcggcgcggggtggggcggggcgaagcgagcgggtaggtaggggtagcgtcgagattcggaggtcgtaggggcggggttagttcggggcggggttagttcggggttgtttcgtcgttcgtttggtcgagaggaggcgttttggttgcgcggggaagttttagaagtaggggcggagtttaggtattttttttaattttcgtcgcgttataggtgtagagtataaagtttaaaattttaaaatagtaaaa

SEQ ID NO: 4338 - DNA, 544 bp, Artificial Sequence
  chemically treated genomic DNA (Homo sapiens) CpG-island No: 4338
ttttactattttaaaattttaaactttatactctacacctataacgcgacgaaaattaaaaaaaatacctaaactccgcccctacttctaaaacttccccgcgcaaccaaaacgcctcctctcgaccaaacgaacgacgaaacaaccccgaactaaccccgccccgaactaaccccgcccctacgacctccgaatctcgacgctacccctacctacccgctcgcttcgccccgccccaccccgcgccgctccgcgccgactccgcaacttacgcccgccgacgaatccgacgccgaaccataacgctattacgaaacgtatcgctacaaaatccgcgaaaccgcttcgaactactacaacgtataaaaaccgaaacctataacgacgtttacaaaatacgctaaacgaaactacgaaacgaacgaaaacgcaaaaaaaaaatacatcttcacgtcccgccgcgaaaaccccgaccccgccccctcctcaccccgcttctcgcccctaaacccgtaacaccgtcacgtccgaactaaccgcgata

SEQ ID NO: 4339 - DNA, 544 bp, Artificial Sequence
  chemically treated genomic DNA (Homo sapiens) CpG-island No: 4339
ttttgttgttttaggattttgaattttatgttttgtatttgtagcgcggcgagaattgggaggggtatttaagtttcgtttttgtttttgggattttttcgcgtaattagggcgttttttttcggttaggcgggcggcggggtagtttcgggttggtttcgtttcgggttggtttcgtttttacggttttcgagtttcggcgttgtttttgtttgttcgttcgtttcgtttcgttttatttcgcgtcgtttcgcgtcggtttcgtagtttgcgttcgtcggcgggttcggcgtcgggttatggcgttgttgcgggacgtgtcgttgtaggattcgcgggatcgtttcgagttgttatagcgtgtgggggtcgggatttatggcgacgtttataaggtgcgttgagcggggttgcgggacgggcgggagcgtaggaggagggtgtatttttacgtttcgtcgcgggaatttcggtttcgttttttttttatttcgtttttcgtttttaggttcgtgatatcgttacgttcgaattggtcgcggtg

SEQ ID NO: 4340 - DNA, 544 bp, Artificial Sequence
  chemically treated genomic DNA (Homo sapiens) CpG-island No: 4340
caccgcgaccaattcgaacgtaacgatatcacgaacctaaaaacgaaaaacgaaataaaaaaaaaacgaaaccgaaattcccgcgacgaaacgtaaaaatacaccctcctcctacgctcccgcccgtcccgcaaccccgctcaacgcaccttataaacgtcgccataaatcccgacccccacacgctataacaactcgaaacgatcccgcgaatcctacaacgacacgtcccgcaacaacgccataacccgacgccgaacccgccgacgaacgcaaactacgaaaccgacgcgaaacgacgcgaaataaaacgaaacgaaacgaacgaacaaacaaaaacaacgccgaaactcgaaaaccgtaaaaacgaaaccaacccgaaacgaaaccaacccgaaactaccccgccgcccgcctaaccgaaaaaaaacgccctaattacgcgaaaaaatcccaaaaacaaaaacgaaacttaaatacccctcccaattctcgccgcgctacaaatacaaaacataaaattcaaaatcctaaaacaacaaaa

SEQ ID NO: 4341 - DNA, 747 bp, Artificial Sequence
  chemically treated genomic DNA (Homo sapiens) CpG-island No: 4341
ttttgcgcgtttcgaaggggtcggggcgtagggtggagtttcgagcggcgcgtttagtcggtggttattattatttgagtttcgggcggcgggatttcggttcgtttcgtattttcgtcgcggttagtttttttcggtatttattcgttacgcgaatggattttagtatcgtcgtttcgaggttcggggcggcgggtttcgcgggtttaggggaaagggtcgcgtaggggcgggcggtttttagtttttgattcgggtttcggtggcgggggcgcggcgggaggcggtttttcgttatttggagtaggataaggagggtaagggcggacgaagacgtatcgatattgattgtgagtagcgtttttattagttcgtagttattggaaggtatatacggcggttttacggtgtttagtagcgtttagaatttgttatcgtgacgtagtcgtttcgtcggttgttaggaaattgttttcggggttcgcgcgcgttgcgttttacggagtttgcgcgtcgttgggggcgttcgtgcgacgaaggttcgcgggcggcgagagagagtgggaggaattataattttcggcgtgtatagcgcgggttagtgttttcggggtttgtggttgtgttcgcgagcgcgttggggtttttagttagtgggtaacgtatattgattgattttttagagacgtttgtattcgtttaaaggtgatttaattttatggtgcgttgtgatattcggttttagtt

SEQ ID NO: 4342 - DNA, 747 bp, Artificial Sequence
  chemically treated genomic DNA (Homo sapiens) CpG-island No: 4342
aactaaaaccgaatatcacaacgcaccataaaattaaatcacctttaaacgaatacaaacgtctctaaaaaatcaatcaatatacgttacccactaactaaaaaccccaacgcgctcgcgaacacaaccacaaaccccgaaaacactaacccgcgctatacacgccgaaaattataattcctcccactctctctcgccgcccgcgaaccttcgtcgcacgaacgcccccaacgacgcgcaaactccgtaaaacgcaacgcgcgcgaaccccgaaaacaatttcctaacaaccgacgaaacgactacgtcacgataacaaattctaaacgctactaaacaccgtaaaaccgccgtatataccttccaataactacgaactaataaaaacgctactcacaatcaatatcgatacgtcttcgtccgcccttaccctccttatcctactccaaataacgaaaaaccgcctcccgccgcgcccccgccaccgaaacccgaatcaaaaactaaaaaccgcccgcccctacgcgaccctttcccctaaacccgcgaaacccgccgccccgaacctcgaaacgacgatactaaaatccattcgcgtaacgaataaataccgaaaaaaactaaccgcgacgaaaatacgaaacgaaccgaaatcccgccgcccgaaactcaaataataataaccaccgactaaacgcgccgctcgaaactccaccctacgccccgaccccttcgaaacgcgcaaaa

SEQ ID NO: 4343 - DNA, 747 bp, Artificial Sequence
  chemically treated genomic DNA (Homo sapiens) CpG-island No: 4343
agttagggtcgagtgttatagcgtattatggagttaagttatttttgaacgggtataaacgtttttgaaagattagttaatatgcgttatttattggttggagattttagcgcgttcgcgggtatagttataagtttcggaggtattggttcgcgttgtgtacgtcgggagttgtagttttttttattttttttcgtcgttcgcgggttttcgtcgtacgagcgtttttagcggcgcgtaggtttcgtgaagcgtagcgcgcgcggatttcgggggtagttttttagtaatcggcggagcggttacgttacggtggtaggttttaagcgttgttgggtatcgtaaggtcgtcgtgtgtattttttagtagttacgggttggtggaagcgttgtttatagttagtgtcggtacgttttcgttcgtttttattttttttattttgttttaggtagcggagagtcgtttttcgtcgcgttttcgttatcgaggttcgggttagaggttagaggtcgttcgtttttgcgcggtttttttttttgagttcgcggagttcgtcgtttcgggtttcggggcgacgatgttggagtttattcgcgtgacgggtgagtgtcgggaagggttggtcgcggcgggggtgcggggcggatcggggtttcgtcgttcggggtttaggtaatggtagttatcggttgggcgcgtcgttcgggattttattttgcgtttcgattttttcggggcgcgtagga

SEQ ID NO: 4344 - DNA, 747 bp, Artificial Sequence
  chemically treated genomic DNA (Homo sapiens) CpG-island No: 4344
tcctacgcgccccgaaaaaatcgaaacgcaaaataaaatcccgaacgacgcgcccaaccgataactaccattacctaaaccccgaacgacgaaaccccgatccgccccgcacccccgccgcgaccaacccttcccgacactcacccgtcacgcgaataaactccaacatcgtcgccccgaaacccgaaacgacgaactccgcgaactcaaaaaaaaaaaccgcgcaaaaacgaacgacctctaacctctaacccgaacctcgataacgaaaacgcgacgaaaaacgactctccgctacctaaaacaaaataaaaaaaataaaaacgaacgaaaacgtaccgacactaactataaacaacgcttccaccaacccgtaactactaaaaaatacacacgacgaccttacgatacccaacaacgcttaaaacctaccaccgtaacgtaaccgctccgccgattactaaaaaactacccccgaaatccgcgcgcgctacgcttcacgaaacctacgcgccgctaaaaacgctcgtacgacgaaaacccgcgaacgacgaaaaaaaataaaaaaaactacaactcccgacgtacacaacgcgaaccaatacctccgaaacttataactatacccgcgaacgcgctaaaatctccaaccaataaataacgcatattaactaatctttcaaaaacgtttatacccgttcaaaaataacttaactccataatacgctataacactcgaccctaact

SEQ ID NO: 4345 - DNA, 526 bp, Artificial Sequence
  chemically treated genomic DNA (Homo sapiens) CpG-island No: 4345
agtcgcgtttcgttttatcgcgaagtttaggcgcgatcgaagggttgtaggtggagtagattcggacgttttcgcgaggcggttatcgaaggagagtttggggttttcggcgcgggcgtttaggagggagttggggttttcgggaggtggggggtatttttggataggtaagacgagggcgtatcgggcgaggcgagcggtcggggtttgcgtttaaggggcgggtcggattttatttgttttttgttaacgaggaaattaatcgtcgttagtattattttttttcgggagtcgtagtgcgtggtagacgagtttttttagtttttaggtcgaggttgcgattttatattggggaacgaggatcgcggggatttggagaggggtcggggtaggttggcgggcgcggttttagtttgagatttgcgcggagggcggaggcggggaggtttttttagaaagtcgtttgtttcgcggggttcgaggggaggttgtatttttgggttttttttttagtttttttaaatag

SEQ ID NO: 4346 - DNA, 526 bp, Artificial Sequence
  chemically treated genomic DNA (Homo sapiens) CpG-island No: 4346
ctatttaaaaaaactaaaaaaaaaacccaaaaatacaacctcccctcgaaccccgcgaaacaaacgactttctaaaaaaacctccccgcctccgccctccgcgcaaatctcaaactaaaaccgcgcccgccaacctaccccgacccctctccaaatccccgcgatcctcgttccccaatataaaatcgcaacctcgacctaaaaactaaaaaaactcgtctaccacgcactacgactcccgaaaaaaaataatactaacgacgattaatttcctcgttaacaaaaaacaaataaaatccgacccgccccttaaacgcaaaccccgaccgctcgcctcgcccgatacgccctcgtcttacctatccaaaaataccccccacctcccgaaaaccccaactccctcctaaacgcccgcgccgaaaaccccaaactctccttcgataaccgcctcgcgaaaacgtccgaatctactccacctacaacccttcgatcgcgcctaaacttcgcgataaaacgaaacgcgact

SEQ ID NO: 4347 - DNA, 526 bp, Artificial Sequence
  chemically treated genomic DNA (Homo sapiens) CpG-island No: 4347
ttgtttagggaagttgaggaaggaatttaaaaatatagttttttttcggatttcgcgggataggcggttttttgagaggattttttcgttttcgtttttcgcgtaggttttaaattgaagtcgcgttcgttagtttgtttcggtttttttttaggttttcgcgattttcgttttttagtgtggagtcgtagtttcgatttgggagttgggagaattcgtttattacgtattgcggttttcggggaggggtggtgttggcggcggttagttttttcgttggtaaaaggtaggtggggttcgattcgttttttgggcgtagatttcggtcgttcgtttcgttcggtgcgttttcgttttgtttatttaagagtgttttttatttttcggggattttagtttttttttgggcgttcgcgtcgaaagttttaggttttttttcgatggtcgtttcgcggagacgttcgggtttgttttatttgtagtttttcggtcgcgtttgggtttcgcggtggagcgggacgcggtt

SEQ ID NO: 4348 - DNA, 526 bp, Artificial Sequence
  chemically treated genomic DNA (Homo sapiens) CpG-island No: 4348
aaccgcgtcccgctccaccgcgaaacccaaacgcgaccgaaaaactacaaataaaacaaacccgaacgtctccgcgaaacgaccatcgaaaaaaaacctaaaactttcgacgcgaacgcccaaaaaaaaactaaaatccccgaaaaataaaaaacactcttaaataaacaaaacgaaaacgcaccgaacgaaacgaacgaccgaaatctacgcccaaaaaacgaatcgaaccccacctaccttttaccaacgaaaaaactaaccgccgccaacaccacccctccccgaaaaccgcaatacgtaataaacgaattctcccaactcccaaatcgaaactacgactccacactaaaaaacgaaaatcgcgaaaacctaaaaaaaaaccgaaacaaactaacgaacgcgacttcaatttaaaacctacgcgaaaaacgaaaacgaaaaaatcctctcaaaaaaccgcctatcccgcgaaatccgaaaaaaaactatatttttaaattccttcctcaacttccctaaacaa

SEQ ID NO: 4349 - DNA, 1069 bp, Artificial Sequence
  chemically treated genomic DNA (Homo sapiens) CpG-island No: 4349
gtagtttcggcgggtgggtagcgttcgtttttcgggtgcgcgttaggatttcgtcgcgttttgggaagatagcgcggggcgtacgtgcgggatttcggttttaggcgtttattagtattcggttttcgtttattgacgtcgattttgcgtagttgggcggggaaagtgagggaagaaagttgggagcggttcggggcgtcggaggtttcggcggtcgtttttcgtttggtttgtagttcggtgttttacgcgttttttttttcgttcgttttagattttttcggtcgaagaacgaaacgtttcgtttttttcgcggtttcggtcggcggcgtagttgattttaaggaaataggaaaggacgggcgggggcgcgggcgtcgagtcggtgcgtcggtgcgcggttggacgggttgcggggttcggggcgcgattcgggggcggcgcgggagtcggcgagatacgtttttatttttttttttttttagagttcgattcgtcgggtagagcgtagttagtagacgttaggagtagattgtaacggcgcgtttcggaggggtcgtatcgttgtttttcgaagagttcgtttcggttttttcgattaatattggacggagttagggggcgtgcgcggtggttgtggcgttggcggcgaggcggggattcgggcggacgtcgacgaggtggtttgtcgttcggtttgggcgcggcgtcggggttagttcgggattgcgtttcggtcgcgtcgggcgtttatatcgtgcggggggcggaggttgttgcggtcgtcgttgcgtcgggggttgttcggacgtttagttcgcgcgggtcgaggcgcggggaggtagggcgggaggaggagggattaggcggcggaggagggatcgggaggagtagaggaggaggagaatgcgaggaggagggaggagaattagtagcggggttttaaggttagcgttcggacgtggatagcggtggttttcgcgggatttagttttcggcgggagtggggcggcgtatgggaggggagcgggtgttttgaggagttaattttcgagaggggcgtttttag

SEQ ID NO: 4350 - DNA, 1069 bp, Artificial Sequence
  chemically treated genomic DNA (Homo sapiens) CpG-island No: 4350
ctaaaaacgcccctctcgaaaattaactcctcaaaacacccgctcccctcccatacgccgccccactcccgccgaaaactaaatcccgcgaaaaccaccgctatccacgtccgaacgctaaccttaaaaccccgctactaattctcctccctcctcctcgcattctcctcctcctctactcctcccgatccctcctccgccgcctaatccctcctcctcccgccctacctccccgcgcctcgacccgcgcgaactaaacgtccgaacaacccccgacgcaacgacgaccgcaacaacctccgccccccgcacgatataaacgcccgacgcgaccgaaacgcaatcccgaactaaccccgacgccgcgcccaaaccgaacgacaaaccacctcgtcgacgtccgcccgaatccccgcctcgccgccaacgccacaaccaccgcgcacgccccctaactccgtccaatattaatcgaaaaaaccgaaacgaactcttcgaaaaacaacgatacgacccctccgaaacgcgccgttacaatctactcctaacgtctactaactacgctctacccgacgaatcgaactctaaaaaaaaaaaaaaataaaaacgtatctcgccgactcccgcgccgcccccgaatcgcgccccgaaccccgcaacccgtccaaccgcgcaccgacgcaccgactcgacgcccgcgcccccgcccgtcctttcctatttccttaaaatcaactacgccgccgaccgaaaccgcgaaaaaaacgaaacgtttcgttcttcgaccgaaaaaatctaaaacgaacgaaaaaaaaaacgcgtaaaacaccgaactacaaaccaaacgaaaaacgaccgccgaaacctccgacgccccgaaccgctcccaactttcttccctcactttccccgcccaactacgcaaaatcgacgtcaataaacgaaaaccgaatactaataaacgcctaaaaccgaaatcccgcacgtacgccccgcgctatcttcccaaaacgcgacgaaatcctaacgcgcacccgaaaaacgaacgctacccacccgccgaaactac

SEQ ID NO: 4351 - DNA, 1069 bp, Artificial Sequence
  chemically treated genomic DNA (Homo sapiens) CpG-island No: 4351
ttgggaacgtttttttcggaaattaattttttagggtattcgttttttttttatgcgtcgttttattttcgtcggagattaggtttcgcgggggttatcgttgtttacgttcgggcgttggttttgggatttcgttgttggtttttttttttttttttcgtatttttttttttttttgtttttttcgatttttttttcgtcgtttggtttttttttttttcgttttgttttttcgcgtttcggttcgcgcgagttagacgttcgggtagttttcggcgtagcgacggtcgtagtagttttcgtttttcgtacggtgtgagcgttcgacgcggtcgaggcgtagtttcgagttagtttcggcgtcgcgtttagatcggacgataggttatttcgtcggcgttcgttcgagttttcgtttcgtcgttaacgttataattatcgcgtacgttttttgatttcgtttagtattgatcgggagagtcggagcgagtttttcggggagtagcgatgcgattttttcgggacgcgtcgttgtagtttgtttttggcgtttgttggttgcgttttgttcggcgagtcgggttttggaggaaaagaaaggtaagggcgtgtttcgtcggttttcgcgtcgttttcggatcgcgtttcggatttcgtagttcgtttaatcgcgtatcggcgtatcggttcggcgttcgcgttttcgttcgtttttttttgtttttttgagattagttgcgtcgtcgatcgggatcgcgggaggaacgggacgtttcgtttttcggtcgggagagtttggggcgggcggaggaggagacgcgtgggatatcgggttgtaggttaggcggggaacggtcgtcgggattttcggcgtttcgaatcgtttttaattttttttttttatttttttcgtttagttgcgtaggatcggcgttagtgggcgaaagtcgggtgttggtgggcgtttggggtcggggtttcgtacgtgcgtttcgcgttgtttttttagggcgcgacggggttttggcgcgtattcgaggggcgggcgttgtttattcgtcgagattgt

SEQ ID NO: 4352 - DNA, 1069 bp, Artificial Sequence
  chemically treated genomic DNA (Homo sapiens) CpG-island No: 4352
acaatctcgacgaataaacaacgcccgcccctcgaatacgcgccaaaaccccgtcgcgccctaaaaaaacaacgcgaaacgcacgtacgaaaccccgaccccaaacgcccaccaacacccgactttcgcccactaacgccgatcctacgcaactaaacgaaaaaaataaaaaaaaaaaattaaaaacgattcgaaacgccgaaaatcccgacgaccgttccccgcctaacctacaacccgatatcccacgcgtctcctcctccgcccgccccaaactctcccgaccgaaaaacgaaacgtcccgttcctcccgcgatcccgatcgacgacgcaactaatctcaaaaaaacaaaaaaaaacgaacgaaaacgcgaacgccgaaccgatacgccgatacgcgattaaacgaactacgaaatccgaaacgcgatccgaaaacgacgcgaaaaccgacgaaacacgcccttacctttcttttcctccaaaacccgactcgccgaacaaaacgcaaccaacaaacgccaaaaacaaactacaacgacgcgtcccgaaaaaatcgcatcgctactccccgaaaaactcgctccgactctcccgatcaatactaaacgaaatcaaaaaacgtacgcgataattataacgttaacgacgaaacgaaaactcgaacgaacgccgacgaaataacctatcgtccgatctaaacgcgacgccgaaactaactcgaaactacgcctcgaccgcgtcgaacgctcacaccgtacgaaaaacgaaaactactacgaccgtcgctacgccgaaaactacccgaacgtctaactcgcgcgaaccgaaacgcgaaaaaacaaaacgaaaaaaaaaaaaaccaaacgacgaaaaaaaaatcgaaaaaaacaaaaaaaaaaaaaaatacgaaaaaaaaaaaaaaaaaccaacaacgaaatcccaaaaccaacgcccgaacgtaaacaacgataacccccgcgaaacctaatctccgacgaaaataaaacgacgcataaaaaaaaaacgaataccctaaaaaattaatttccgaaaaaaacgttcccaa

SEQ ID NO: 4353 - DNA, 1598 bp, Artificial Sequence
  chemically treated genomic DNA (Homo sapiens) CpG-island No: 4353
ggtcgcggaagggggaggcggagtaaggtcggcgggagttaatcggtttggcggtacgagggggcgggggcggggttaacgcgcgcgatttaaatatacgggtcgggcgtattttgtagtcgcgtcgtttcgcggtttttcggcgcggggtcggggaattttttttttatttgcgtatttttcgttttcgcggtttagattttttcgttagttcggtttttttttcgtagggggagcgaggcgacggttgtcgggaagcgcgcgttattttttttttttatttttcgtttttttttcgcgcgttattcgtttttttttttttttcgttaataatagttgggtggttgggggaggagggaaggtggtttcggcggagtttgggcgggcgttttttatttagtcgttagtcgtcgtgggagtcggaggatggcggcggtagtagcggtcgttcgagaggaggcggtgtcgagatcgggggcgtcgagcgcggtagtagagagcggtagcggttcgtcgtggcgtattagaatcgaaattagcggtagtcgtacggttatttgagtcgtttttttttgttggagttagcgaggggtgtttgtagtcgggattttttttttttcgcgttttttcgtttttcgcgttcgcgttaggtcgtcggtttcgttcgtcgttttaagaagagcgcgtcgggcgtcgattgtttttttggacgtcgggcggcggttttggacgtgcgggggtttttttgggtcggtcgcggcgtttgggttttgttttttagttttcgcgttcgttttcgttttttcggttttcggggcgtagcgcgcgggttcggttcggggtagggcggatatgggcgttaaatagagcggttcggtcgtcgttaacggtcgtacgcgcgcgtattcgggttcggatttattttttagtagtagcggaggcgttaatgggatcgcgggcggcggcgggggcgttcgggtcgtcgtcgcggggaggttttcggtttaggtgtttagcgcgtattagtttagcgttttcggcggcgtcgcggcggtcgcggcggtttcggtagtttcggcggtttcgcgtagtcgttttttcggcggggtcgtggggagcgtggcgtcgggggttcgcgcggcgtagtttttttttagtatttcgaatagtagtagcggttcgtacggttcgtaggattcggtgtatagtagttttgaggacggcggcggcggtcgggatcggtcggtgggcgggagtttcggcgggtcgcgtttggtgatcggttttttattagtttatttttcgtcgtatatgtttggaggtacggattttttttcgcgtattcgcgttcggttttttcgcggttgtacgtgggtcgtggtcgtcggttatttttatttttttttttttttttttttgtcggggcgtcgggggttgtttttcggattagttcgcgtcggtttttattttggaagaaattcggcgtttaatatcggcggtgtcgttatcgtatagacgcgtggttttgtttttaaatattttgagtatttttattttagcggttgtttagtagagaaagtttattttttagtgagatg

SEQ ID NO: 4354 - DNA, 1598 bp, Artificial Sequence
  chemically treated genomic DNA (Homo sapiens) CpG-island No: 4354
catctcactaaaaaataaactttctctactaaacaaccgctaaaataaaaatactcaaaatatttaaaaacaaaaccacgcgtctatacgataacgacaccgccgatattaaacgccgaatttcttccaaaataaaaaccgacgcgaactaatccgaaaaacaacccccgacgccccgacaaaaaaaaaaaaaaaaaaaaataaaaataaccgacgaccacgacccacgtacaaccgcgaaaaaaccgaacgcgaatacgcgaaaaaaaatccgtacctccaaacatatacgacgaaaaataaactaataaaaaaccgatcaccaaacgcgacccgccgaaactcccgcccaccgaccgatcccgaccgccgccgccgtcctcaaaactactatacaccgaatcctacgaaccgtacgaaccgctactactattcgaaatactaaaaaaaaactacgccgcgcgaacccccgacgccacgctccccacgaccccgccgaaaaaacgactacgcgaaaccgccgaaactaccgaaaccgccgcgaccgccgcgacgccgccgaaaacgctaaactaatacgcgctaaacacctaaaccgaaaacctccccgcgacgacgacccgaacgcccccgccgccgcccgcgatcccattaacgcctccgctactactaaaaaataaatccgaacccgaatacgcgcgcgtacgaccgttaacgacgaccgaaccgctctatttaacgcccatatccgccctaccccgaaccgaacccgcgcgctacgccccgaaaaccgaaaaaacgaaaacgaacgcgaaaactaaaaaacaaaacccaaacgccgcgaccgacccaaaaaaacccccgcacgtccaaaaccgccgcccgacgtccaaaaaaacaatcgacgcccgacgcgctcttcttaaaacgacgaacgaaaccgacgacctaacgcgaacgcgaaaaacgaaaaaacgcgaaaaaaaaaaaatcccgactacaaacacccctcgctaactccaacaaaaaaaaacgactcaaataaccgtacgactaccgctaatttcgattctaatacgccacgacgaaccgctaccgctctctactaccgcgctcgacgcccccgatctcgacaccgcctcctctcgaacgaccgctactaccgccgccatcctccgactcccacgacgactaacgactaaataaaaaacgcccgcccaaactccgccgaaaccaccttccctcctcccccaaccacccaactattattaacgaaaaaaaaaaaaaaacgaataacgcgcgaaaaaaaaacgaaaaataaaaaaaaaaaataacgcgcgcttcccgacaaccgtcgcctcgctccccctacgaaaaaaaaaccgaactaacgaaaaaatctaaaccgcgaaaacgaaaaatacgcaaataaaaaaaaaattccccgaccccgcgccgaaaaaccgcgaaacgacgcgactacaaaatacgcccgacccgtatatttaaatcgcgcgcgttaaccccgcccccgccccctcgtaccgccaaaccgattaactcccgccgaccttactccgcctcccccttccgcgacc

SEQ ID NO: 4355 - DNA, 1598 bp, Artificial Sequence
  chemically treated genomic DNA (Homo sapiens) CpG-island No: 4355
tattttattggaaaatagattttttttattgggtagtcgttgaggtgagggtgtttaggatgtttaaaaataaaattacgcgtttatgcggtagcggtatcgtcggtgttaagcgtcgggttttttttaggatggagatcgacgcgggttggttcgggaggtagttttcggcgtttcggtagaaggagaaaaggagaagggtaaaaatagtcggcggttacggtttacgtgtagtcgcgggaggatcgagcgcgggtgcgcggagaggggttcgtatttttaaatatgtgcggcgagaggtgagttggtaaggagtcgattattaggcgcggttcgtcggggttttcgtttatcggtcggtttcggtcgtcgtcgtcgtttttagggttgttgtgtatcgagttttgcgagtcgtacgggtcgttgttgttgttcgggatgttgaagggggattgcgtcgcgcgggttttcgacgttacgttttttacggtttcgtcgagggagcggttgcgcggggtcgtcggggttgtcggggtcgtcgcggtcgtcgcggcgtcgtcggaggcgttgggttggtgcgcgttgggtatttgagtcgggaattttttcgcggcggcggttcgagcgttttcgtcgtcgttcgcggttttattggcgttttcgttgttattggaaggtagattcgagttcgagtacgcgcgcgtgcggtcgttagcggcggtcgggtcgttttgtttggcgtttatgttcgttttgtttcgggtcgggttcgcgcgttgcgtttcgagagtcgggagggcgggagcgagcgcgggagttagagggtagggtttaggcgtcgcggtcggtttagagaggttttcgtacgtttagggtcgtcgttcggcgtttagaggggtagtcggcgttcggcgcgttttttttggggcggcgggcgaggtcgacggtttgacgcgggcgcgggagacgaggagacgcggagaggaaggggtttcggttgtaggtatttttcgttggttttagtaggaaggggcggtttaagtggtcgtgcggttgtcgttggtttcggttttggtgcgttacgacgggtcgttatcgttttttgttgtcgcgttcggcgttttcgatttcggtatcgttttttttcgggcggtcgttgttatcgtcgttatttttcggtttttacggcggttggcggttgagtgggaggcgttcgtttagatttcgtcggggttattttttttttttttttagttatttagttgttattaacggagaaagaggaaaaacgggtggcgcgcgaggggagaacgaaaaatgggagggagaggtggcgcgcgtttttcggtaatcgtcgtttcgttttttttgcgaaggaggggtcgggttggcgggaggatttgggtcgcgaaggcggggggtgcgtagatggggaggaggtttttcggtttcgcgtcggaaggtcgcggagcggcgcggttgtagggtgcgttcggttcgtgtgtttgggtcgcgcgcgttgatttcgttttcgttttttcgtgtcgttaggtcgattggttttcgtcggttttgtttcgtttttttttttcgcgatt

SEQ ID NO: 4356 - DNA, 1598 bp, Artificial Sequence
  chemically treated genomic DNA (Homo sapiens) CpG-island No: 4356
aatcgcgaaaaaaaaaaacgaaacaaaaccgacgaaaaccaatcgacctaacgacacgaaaaaacgaaaacgaaatcaacgcgcgcgacccaaacacacgaaccgaacgcaccctacaaccgcgccgctccgcgaccttccgacgcgaaaccgaaaaacctcctccccatctacgcaccccccgccttcgcgacccaaatcctcccgccaacccgacccctccttcgcaaaaaaaacgaaacgacgattaccgaaaaacgcgcgccacctctccctcccatttttcgttctcccctcgcgcgccacccgtttttcctctttctccgttaataacaactaaataactaaaaaaaaaaaaaaaataaccccgacgaaatctaaacgaacgcctcccactcaaccgccaaccgccgtaaaaaccgaaaaataacgacgataacaacgaccgcccgaaaaaaaacgataccgaaatcgaaaacgccgaacgcgacaacaaaaaacgataacgacccgtcgtaacgcaccaaaaccgaaaccaacgacaaccgcacgaccacttaaaccgccccttcctactaaaaccaacgaaaaatacctacaaccgaaaccccttcctctccgcgtctcctcgtctcccgcgcccgcgtcaaaccgtcgacctcgcccgccgccccaaaaaaaacgcgccgaacgccgactacccctctaaacgccgaacgacgaccctaaacgtacgaaaacctctctaaaccgaccgcgacgcctaaaccctaccctctaactcccgcgctcgctcccgccctcccgactctcgaaacgcaacgcgcgaacccgacccgaaacaaaacgaacataaacgccaaacaaaacgacccgaccgccgctaacgaccgcacgcgcgcgtactcgaactcgaatctaccttccaataacaacgaaaacgccaataaaaccgcgaacgacgacgaaaacgctcgaaccgccgccgcgaaaaaattcccgactcaaatacccaacgcgcaccaacccaacgcctccgacgacgccgcgacgaccgcgacgaccccgacaaccccgacgaccccgcgcaaccgctccctcgacgaaaccgtaaaaaacgtaacgtcgaaaacccgcgcgacgcaatcccccttcaacatcccgaacaacaacaacgacccgtacgactcgcaaaactcgatacacaacaaccctaaaaacgacgacgacgaccgaaaccgaccgataaacgaaaaccccgacgaaccgcgcctaataatcgactccttaccaactcacctctcgccgcacatatttaaaaatacgaacccctctccgcgcacccgcgctcgatcctcccgcgactacacgtaaaccgtaaccgccgactatttttacccttctccttttctccttctaccgaaacgccgaaaactacctcccgaaccaacccgcgtcgatctccatcctaaaaaaaacccgacgcttaacaccgacgataccgctaccgcataaacgcgtaattttatttttaaacatcctaaacaccctcacctcaacgactacccaataaaaaaaatctattttccaataaaata

SEQ ID NO: 4357 - DNA, 754 bp, Artificial Sequence
  chemically treated genomic DNA (Homo sapiens) CpG-island No: 4357
gatttcgtcgttaggttttgggaattgtttgggcgtcgttaaagttcgagtcggagttgttatttggggtagcggtcgggaagaggtaacgatgttagtaagaaagtagcggaggtaggaggcggtcggaggagtggattggagcggacggagtttcgtcgttttttagttcggagcgtttggagcgaaagttaagcgtttttcgagggcgatttttttttttcgggcgcgcgtttattcgttgtagtcggtagttcggcgggagaggtggtagttgtagtttcgtatcggggagagcgagttttttgcgcgcgcgtttattcgttttttaggtgattcggcgttttcgtcgcgttcgttggaagtttgtaaatttttttcgggggtttcgtcgttacgttgggaagttggggacgcggggggaggtttttggttcgtcgttttcgttgtcgtttgatcgtatttttggagggtttcgtattttgttaggtttttggaggtaaatatatattttcgatttataattggttttcgcgttaggggattcgcgcgtttttatatacgtacgtacgtcgggcggattcggcgtcggttttacgttagtatttttttaggcgcgcgcgcggcggttatcgagcgtttcggtatttacgcggcgcggggtttttagggtggttttaggatatagtcgaattttatagtttattagtattcggggtcggatttttttttggttcgttaaaatgtttataaa

SEQ ID NO: 4358 - DNA, 754 bp, Artificial Sequence
  chemically treated genomic DNA (Homo sapiens) CpG-island No: 4358
tttataaacattttaacgaaccaaaaaaaaatccgaccccgaatactaataaactataaaattcgactatatcctaaaaccaccctaaaaaccccgcgccgcgtaaataccgaaacgctcgataaccgccgcgcgcgcgcctaaaaaaatactaacgtaaaaccgacgccgaatccgcccgacgtacgtacgtatataaaaacgcgcgaatcccctaacgcgaaaaccaattataaatcgaaaatatatatttacctccaaaaacctaacaaaatacgaaaccctccaaaaatacgatcaaacgacaacgaaaacgacgaaccaaaaacctccccccgcgtccccaacttcccaacgtaacgacgaaacccccgaaaaaaatttacaaacttccaacgaacgcgacgaaaacgccgaatcacctaaaaaacgaataaacgcgcgcgcaaaaaactcgctctccccgatacgaaactacaactaccacctctcccgccgaactaccgactacaacgaataaacgcgcgcccgaaaaaaaaaaatcgccctcgaaaaacgcttaactttcgctccaaacgctccgaactaaaaaacgacgaaactccgtccgctccaatccactcctccgaccgcctcctacctccgctactttcttactaacatcgttacctcttcccgaccgctaccccaaataacaactccgactcgaactttaacgacgcccaaacaattcccaaaacctaacgacgaaatc

SEQ ID NO: 4359 - DNA, 754 bp, Artificial Sequence
  chemically treated genomic DNA (Homo sapiens) CpG-island No: 4359
tttgtaaatattttggcggattagagggaagttcggtttcgagtgttggtagattgtggaattcggttgtgttttgaggttattttagagatttcgcgtcgcgtgagtgtcggagcgttcggtggtcgtcgcgcgcgcgtttggagggatgttaacgtggagtcggcgtcgagttcgttcggcgtgcgtgcgtgtgtgggagcgcgcgagttttttgacgcggggattagttatgaatcgggggtgtgtgtttgtttttagagatttggtaaggtgcggagttttttagaagtgcggttaagcggtagcggagacggcgagttaggaattttttttcgcgtttttagttttttagcgtggcggcggaattttcggagaaagtttgtaaatttttagcgggcgcggcgaggacgtcgggttatttagggggcgggtgggcgcgcgcgtagggggttcgtttttttcggtgcggagttgtagttgttatttttttcgtcgggttgtcggttgtagcgggtgggcgcgcgttcggggaggggaggtcgttttcggagggcgtttggttttcgttttaggcgtttcgggttggagagcggcgaggtttcgttcgttttagtttattttttcggtcgttttttgttttcgttgtttttttgttggtatcgttattttttttcggtcgttgttttaaatgatagtttcggttcgagttttggcggcgtttaggtaatttttaagatttggcggcggagtt

SEQ ID NO: 4360 - DNA, 754 bp, Artificial Sequence
  chemically treated genomic DNA (Homo sapiens) CpG-island No: 4360
aactccgccgccaaatcttaaaaattacctaaacgccgccaaaactcgaaccgaaactatcatttaaaacaacgaccgaaaaaaaataacgataccaacaaaaaaacaacgaaaacaaaaaacgaccgaaaaaataaactaaaacgaacgaaacctcgccgctctccaacccgaaacgcctaaaacgaaaaccaaacgccctccgaaaacgacctcccctccccgaacgcgcgcccacccgctacaaccgacaacccgacgaaaaaaataacaactacaactccgcaccgaaaaaaacgaaccccctacgcgcgcgcccacccgccccctaaataacccgacgtcctcgccgcgcccgctaaaaatttacaaactttctccgaaaattccgccgccacgctaaaaaactaaaaacgcgaaaaaaaattcctaactcgccgtctccgctaccgcttaaccgcacttctaaaaaactccgcaccttaccaaatctctaaaaacaaacacacacccccgattcataactaatccccgcgtcaaaaaactcgcgcgctcccacacacgcacgcacgccgaacgaactcgacgccgactccacgttaacatccctccaaacgcgcgcgcgacgaccaccgaacgctccgacactcacgcgacgcgaaatctctaaaataacctcaaaacacaaccgaattccacaatctaccaacactcgaaaccgaacttccctctaatccgccaaaatatttacaaa

SEQ ID NO: 4361 - DNA, 610 bp, Artificial Sequence
  chemically treated genomic DNA (Homo sapiens) CpG-island No: 4361
tttcgttattcgttttatttgtatggcgttgtttttttttcgttgttattggttagcgtcgggtttcgtttacggtttttagatcgcggtagggtttcgttttttcgagtcgtacggagttgcggtagcgggcggattgttaaatcgcggcggcgcggcggcggcggcggcggcggcggcggcggcggcggtcgggcgggaagcggggcgcgttttggagacgagttagcggcgtttcgggtgggggaggcgggcgggtagttagagattattttagtagtttttattacggtcggatcgaaggtgcggcggcggaggggagttagggcgttttagtaggcgagtggtcggcgttttagcggcgggatgacgggggtgggtttttttttttggggacggcggtagcgcggggaggggagaagattgtcgggtggatttgcgggttaggcgatcgatcggtagttttttcgtttttcgaattttttgggttgttggattttggtttcggtacgggatcgcgttttagggcgggggtttgatcgtagttaaatttaaacggttaaatttaatagttttggtagttggggagggaaggggtttagggaggggt

SEQ ID NO: 4362 - DNA, 610 bp, Artificial Sequence
  chemically treated genomic DNA (Homo sapiens) CpG-island No: 4362
acccctccctaaaccccttccctccccaactaccaaaactattaaatttaaccgtttaaatttaactacgatcaaacccccgccctaaaacgcgatcccgtaccgaaaccaaaatccaacaacccaaaaaattcgaaaaacgaaaaaactaccgatcgatcgcctaacccgcaaatccacccgacaatcttctcccctccccgcgctaccgccgtccccaaaaaaaaaaacccacccccgtcatcccgccgctaaaacgccgaccactcgcctactaaaacgccctaactcccctccgccgccgcaccttcgatccgaccgtaataaaaactactaaaataatctctaactacccgcccgcctcccccacccgaaacgccgctaactcgtctccaaaacgcgccccgcttcccgcccgaccgccgccgccgccgccgccgccgccgccgccgccgcgccgccgcgatttaacaatccgcccgctaccgcaactccgtacgactcgaaaaaacgaaaccctaccgcgatctaaaaaccgtaaacgaaacccgacgctaaccaataacaacgaaaaaaaaacaacgccatacaaataaaacgaataacgaaa

SEQ ID NO: 4363 - DNA, 610 bp, Artificial Sequence
  chemically treated genomic DNA (Homo sapiens) CpG-island No: 4363
atttttttttagattttttttttttttagttgttaaggttgttaggtttagtcgtttaaatttggttgcggttagattttcgttttagagcgcgatttcgtgtcgagattagagtttagtagtttagaggattcggggggcgaaggggttgtcggtcggtcgtttgattcgtaagtttattcggtagttttttttttttttcgcgttgtcgtcgtttttaagagggaagatttattttcgttatttcgtcgttgagacgtcggttattcgtttgttggggcgttttggttttttttcgtcgtcgtattttcggttcggtcgtggtgggggttgttgaggtgatttttagttgttcgttcgttttttttattcggggcgtcgttgattcgtttttagagcgcgtttcgtttttcgttcggtcgtcgtcgtcgtcgtcgtcgtcgtcgtcgtcgtcgcgtcgtcgcggtttaatagttcgttcgttgtcgtagtttcgtgcggttcggggggacggaattttgtcgcggtttgggagtcgtgggcggggttcggcgttagttaatggtaacgggggaggggtagcgttatgtaaatgaagcgggtggcggga

SEQ ID NO: 4364 - DNA, 610 bp, Artificial Sequence
  chemically treated genomic DNA (Homo sapiens) CpG-island No: 4364
tcccgccacccgcttcatttacataacgctacccctcccccgttaccattaactaacgccgaaccccgcccacgactcccaaaccgcgacaaaattccgtccccccgaaccgcacgaaactacgacaacgaacgaactattaaaccgcgacgacgcgacgacgacgacgacgacgacgacgacgacgacgaccgaacgaaaaacgaaacgcgctctaaaaacgaatcaacgacgccccgaataaaaaaaacgaacgaacaactaaaaatcacctcaacaacccccaccacgaccgaaccgaaaatacgacgacgaaaaaaaaccaaaacgccccaacaaacgaataaccgacgtctcaacgacgaaataacgaaaataaatcttccctcttaaaaacgacgacaacgcgaaaaaaaaaaaaaactaccgaataaacttacgaatcaaacgaccgaccgacaaccccttcgccccccgaatcctctaaactactaaactctaatctcgacacgaaatcgcgctctaaaacgaaaatctaaccgcaaccaaatttaaacgactaaacctaacaaccttaacaactaaaaaaaaaaaaaatctaaaaaaaaat

SEQ ID NO: 4365 - DNA, 780 bp, Artificial Sequence
  chemically treated genomic DNA (Homo sapiens) CpG-island No: 4365
tcggcgtttagacgttaggttttatagaatacgtatatataggtacggggcggtaagggtcgagacgttagttggggattgcgttttagttttagacggtagacgttagttttcgtttggtgttttcgttgtagcggtttaggatgaggtcggcgttcggtcgcgggggtatcgtcggttgcggtttagagcgttgcgtttgtcgttttttttttgcgggtagagagcggggtcgagttagacgtttcgtttcgtatattggtttcgtttatagcgttttttggtttcgtttcgtcgcggtttttaatttttgtttcgcgttttggtttcgtttttcgtttgtgtttttttttttgatttcgttttttagggatcgtttcgttttttagcgttggttttttttttgttttcgtttttagttttcgtttttttttttgatttcgttttttggtttcgtttcgttattttggttttatttttggtttcgtttttttcgttgatttcgtttttaggtttgttttttttgttttttttcgttgtatttatcgagcgggttttcggggttttgcggtttcggtcgcgtttggcggcgtcgttgttgtagaaaacggacgttgttgcggcgataggcgttttggttgaggcgttttcgcgatcgttggtggatgttgtgtacgttgcggatggacgatttggtttagcgggacggggcgtcgttaaagttcgaggcgtttttgtttttagggatttagatgggtatttttggttcgaggaagtggg

SEQ ID NO: 4366 - DNA, 780 bp, Artificial Sequence
  chemically treated genomic DNA (Homo sapiens) CpG-island No: 4366
cccacttcctcgaaccaaaaatacccatctaaatccctaaaaacaaaaacgcctcgaactttaacgacgccccgtcccgctaaaccaaatcgtccatccgcaacgtacacaacatccaccaacgatcgcgaaaacgcctcaaccaaaacgcctatcgccgcaacaacgtccgttttctacaacaacgacgccgccaaacgcgaccgaaaccgcaaaaccccgaaaacccgctcgataaatacaacgaaaaaaaacaaaaaaaacaaacctaaaaacgaaatcaacgaaaaaaacgaaaccaaaaataaaaccaaaataacgaaacgaaaccaaaaaacgaaatcaaaaaaaaaaacgaaaactaaaaacgaaaacaaaaaaaaaaccaacgctaaaaaacgaaacgatccctaaaaaacgaaatcaaaaaaaaaaacacaaacgaaaaacgaaaccaaaacgcgaaacaaaaattaaaaaccgcgacgaaacgaaaccaaaaaacgctataaacgaaaccaatatacgaaacgaaacgtctaactcgaccccgctctctacccgcaaaaaaaaaacgacaaacgcaacgctctaaaccgcaaccgacgatacccccgcgaccgaacgccgacctcatcctaaaccgctacaacgaaaacaccaaacgaaaactaacgtctaccgtctaaaactaaaacgcaatccccaactaacgtctcgacccttaccgccccgtacctatatatacgtattctataaaacctaacgtctaaacgccga

SEQ ID NO: 4367 - DNA, 780 bp, Artificial Sequence
  chemically treated genomic DNA (Homo sapiens) CpG-island No: 4367
tttattttttcggattaggggtgtttatttgagtttttgggggtaggggcgtttcgggttttgacgacgtttcgtttcgttgggttaggtcgtttattcgtaacgtgtatagtatttattagcggtcgcggaagcgttttagttaggacgtttatcgtcgtaatagcgttcgttttttgtagtagcgacgtcgttaggcgcggtcgggatcgtagagtttcgggagttcgttcggtgagtgtagcgggagagggtaggaagggtaagtttaggggcggagttagcgggagaggcggggttagaggtagggttagagtagcggggcgggattagagggcggaattagagggagaggcggggattggaggcgggggtagaggaggagttagcgttagggggcggagcgatttttaagaggcggagttagagggagaggtataagcgggaggcgaggttagagcgcggagtaggagttggagatcgcggcggggcgaggttagagagcgttgtgggcggggttagtgtgcggggcggggcgtttgattcggtttcgttttttgttcgtagaggaggagcggtagacgtagcgttttaaatcgtagtcggcggtgttttcgcggtcgagcgtcgattttattttgaatcgttgtagcgagagtattaagcggaagttggcgtttgtcgtttgaggttggagcgtagtttttagttagcgtttcggtttttgtcgtttcgtgtttgtatatacgtgttttatagagtttggcgtttggacgtcga

SEQ ID NO: 4368 - DNA, 780 bp, Artificial Sequence
  chemically treated genomic DNA (Homo sapiens) CpG-island No: 4368
tcgacgtccaaacgccaaactctataaaacacgtatatacaaacacgaaacgacaaaaaccgaaacgctaactaaaaactacgctccaacctcaaacgacaaacgccaacttccgcttaatactctcgctacaacgattcaaaataaaatcgacgctcgaccgcgaaaacaccgccgactacgatttaaaacgctacgtctaccgctcctcctctacgaacaaaaaacgaaaccgaatcaaacgccccgccccgcacactaaccccgcccacaacgctctctaacctcgccccgccgcgatctccaactcctactccgcgctctaacctcgcctcccgcttatacctctccctctaactccgcctcttaaaaatcgctccgccccctaacgctaactcctcctctacccccgcctccaatccccgcctctccctctaattccgccctctaatcccgccccgctactctaaccctacctctaaccccgcctctcccgctaactccgcccctaaacttacccttcctaccctctcccgctacactcaccgaacgaactcccgaaactctacgatcccgaccgcgcctaacgacgtcgctactacaaaaaacgaacgctattacgacgataaacgtcctaactaaaacgcttccgcgaccgctaataaatactatacacgttacgaataaacgacctaacccaacgaaacgaaacgtcgtcaaaacccgaaacgcccctacccccaaaaactcaaataaacacccctaatccgaaaaaataaa

SEQ ID NO: 4369 - DNA, 715 bp, Artificial Sequence
  chemically treated genomic DNA (Homo sapiens) CpG-island No: 4369
tatttcgcgttcgggagtttttcggaataaatatttttaggtttcgggttacgggttggcgagatttcgcggggtggtcgtaggttaaagattatttatagcggtaagcggtcggtgttcggaggtagtaattatagatgggggttggagtttttttcgtttttcggtgtggttcgcgtagggattcggcggttttcggaggattttgtagggcggggttacgggtttagagtcgcgatttttttaatgtattttgttttggaaataacggagacggattttggttgtcgttttggagtttggaattcgagcgcggggcggggcgggatcgggtagggcgattcgcgtaggtaattagattttcggtggtggcggcgtaagtcgaggatggcggggtcggggtcggtcggattttcgaaacggttggcggagtcggtcgggcgcgggtatcggaaatcgtggagattttagaggggcgggggtaagggcgtttcgtttatttttgacgtcggtattagttattttattttacgttaattttttttttgtcggggtagtattcggcgtaaaggggaggggcgttatttgtttagtcgtttcgtttgttagtttacgagcgtatcgattcgggttttagatttattcgtttttgtattttcgaggggataatttagtttttttagttcgggttggtttttttttttatttttttttt

SEQ ID NO: 4370 - DNA, 715 bp, Artificial Sequence
  chemically treated genomic DNA (Homo sapiens) CpG-island No: 4370
aaaaaaaaaataaaaaaaaaaaccaacccgaactaaaaaaactaaattatcccctcgaaaatacaaaaacgaataaatctaaaacccgaatcgatacgctcgtaaactaacaaacgaaacgactaaacaaataacgcccctcccctttacgccgaatactaccccgacaaaaaaaaaattaacgtaaaataaaataactaataccgacgtcaaaaataaacgaaacgcccttacccccgcccctctaaaatctccacgatttccgatacccgcgcccgaccgactccgccaaccgtttcgaaaatccgaccgaccccgaccccgccatcctcgacttacgccgccaccaccgaaaatctaattacctacgcgaatcgccctacccgatcccgccccgccccgcgctcgaattccaaactccaaaacgacaaccaaaatccgtctccgttatttccaaaacaaaatacattaaaaaaatcgcgactctaaacccgtaaccccgccctacaaaatcctccgaaaaccgccgaatccctacgcgaaccacaccgaaaaacgaaaaaaactccaacccccatctataattactacctccgaacaccgaccgcttaccgctataaataatctttaacctacgaccaccccgcgaaatctcgccaacccgtaacccgaaacctaaaaatatttattccgaaaaactcccgaacgcgaaata

SEQ ID NO: 4371 - DNA, 715 bp, Artificial Sequence
  chemically treated genomic DNA (Homo sapiens) CpG-island No: 4371
aaaaggaaagtgaggagggggattaattcgggttagggggattgagttgttttttcgggggtgtaggagcgggtagatttggagttcgagtcggtacgttcgtgggttggtaggcggggcggttagataggtggcgttttttttttttgcgtcgggtgttgtttcggtaggagaagggttaacgtggggtggggtaattagtgtcgacgttaaaggtgagcgggacgtttttgttttcgtttttttgaggtttttacggttttcggtattcgcgttcggtcggtttcgttagtcgtttcgagagttcggtcggtttcggtttcgttattttcggtttgcgtcgttattatcggggatttggttatttgcgcgggtcgttttgttcggtttcgtttcgtttcgcgttcgggttttaaattttagggcggtaattaaagttcgttttcgttatttttagggtaaaatgtattaggaaaatcgcggttttgggttcgtgatttcgttttgtagagtttttcgagggtcgtcgggtttttgcgcgggttatatcggagagcggaggaaattttaatttttatttgtagttgttgttttcgggtatcgatcgtttatcgttataaataatttttggtttgcggttatttcgcggggtttcgttagttcgtggttcggagtttggaaatatttatttcgagaggttttcgagcgcggggtg

SEQ ID NO: 4372 - DNA, 715 bp, Artificial Sequence
  chemically treated genomic DNA (Homo sapiens) CpG-island No: 4372
caccccgcgctcgaaaacctctcgaaataaatatttccaaactccgaaccacgaactaacgaaaccccgcgaaataaccgcaaaccaaaaattatttataacgataaacgatcgatacccgaaaacaacaactacaaataaaaattaaaatttcctccgctctccgatataacccgcgcaaaaacccgacgaccctcgaaaaactctacaaaacgaaatcacgaacccaaaaccgcgattttcctaatacattttaccctaaaaataacgaaaacgaactttaattaccgccctaaaatttaaaacccgaacgcgaaacgaaacgaaaccgaacaaaacgacccgcgcaaataaccaaatccccgataataacgacgcaaaccgaaaataacgaaaccgaaaccgaccgaactctcgaaacgactaacgaaaccgaccgaacgcgaataccgaaaaccgtaaaaacctcaaaaaaacgaaaacaaaaacgtcccgctcacctttaacgtcgacactaattaccccaccccacgttaacccttctcctaccgaaacaacacccgacgcaaaaaaaaaaaacgccacctatctaaccgccccgcctaccaacccacgaacgtaccgactcgaactccaaatctacccgctcctacacccccgaaaaaacaactcaatccccctaacccgaattaatccccctcctcactttcctttt

SEQ ID NO: 4373 - DNA, 541 bp, Artificial Sequence
  chemically treated genomic DNA (Homo sapiens) CpG-island No: 4373
  unsure (4, 16, 20, 70, 150, 156, 163, 171, 178, 183, 194, 212, 220)
  unsure (257, 313, 424)
atantcgtatttggtngcgnagttcgcgtaggttgtcgatgaggttttggagttgttcgtattgttgtangcgttcggttggtcgtcgtttttgcgttttttatcgcggtcgtcgtattattttcgttatcgttttttttttttttttantatcgncggtcgngcggagtntcgtagncggtntaaggcggggnagttcggggcgtcggcgncgtaggtnaagggattttcgattcgggagagttggattaggaggnttttttagcgttgttcgagttaggacgtcggtagagttggtagtcgagtgtgtcgntttcgtttttagagtcgcggcgggtaaaaagttgcggcgtcgggggtaaaaaggcgcggcgtcgggggtaaagagttgtggcggcgggggtaaagagtcgcgacggtaaanatacgcggcggcgggggtaaaaagtcgcgggggtaaaagttataaaaagttacggcggtaggggtaaaaattcgcggcggcgggggtaaaaaatcgcgtcggtaaaaaatagcggcg

SEQ ID NO: 4374 - DNA, 541 bp, Artificial Sequence
  chemically treated genomic DNA (Homo sapiens) CpG-island No: 4374
  unsure (118, 229, 285, 322, 330, 348, 359, 364, 371, 379, 386, 392)
  unsure (472, 522, 526, 538)
cgccgctattttttaccgacgcgattttttacccccgccgccgcgaatttttacccctaccgccgtaactttttataacttttacccccgcgactttttacccccgccgccgcgtatntttaccgtcgcgactctttacccccgccgccacaactctttacccccgacgccgcgcctttttacccccgacgccgcaactttttacccgccgcgactctaaaaacgaaancgacacactcgactaccaactctaccgacgtcctaactcgaacaacgctaaaaaancctcctaatccaactctcccgaatcgaaaatcccttnacctacgncgccgacgccccgaactnccccgccttanaccgnctacganactccgcncgaccgncgatantaaaaaaaaaaaaaaaacgataacgaaaataatacgacgaccgcgataaaaaacgcaaaaacgacgaccaaccgaacgcntacaacaatacgaacaactccaaaacctcatcgacaacctacgcgaactncgcnaccaaatacgantat

SEQ ID NO: 4375 - DNA, 541 bp, Artificial Sequence
  chemically treated genomic DNA (Homo sapiens) CpG-island No: 4375
  unsure (118, 229, 285, 322, 330, 348, 359, 364, 371, 379, 386, 392)
  unsure (472, 522, 526, 538)
cgtcgttgttttttgtcggcgcggttttttgttttcgtcgtcgcgggtttttgtttttgtcgtcgtggttttttgtggtttttgttttcgcggttttttgttttcgtcgtcgcgtgtntttgtcgtcgcggttttttgttttcgtcgttatagttttttgttttcgacgtcgcgtttttttgttttcgacgtcgtagttttttgttcgtcgcggttttgagggcgggancggtatattcggttgttagttttatcggcgttttggttcgggtagcgttgaggggnttttttggtttagttttttcggatcgggggttttttngtttacgncgtcggcgtttcgggttntttcgttttgngtcgnttgcggngtttcgtncggtcgncgatgntgagagaagaaggagggcggtggcgggggtgatgcggcggtcgcggtgggaggcgtaggggcggcggttagtcgggcgtntgtagtagtgcgggtagttttagaattttatcggtagtttgcgcgggttncgtnattaagtgcggntgt

SEQ ID NO: 4376 - DNA, 541 bp, Artificial Sequence
  chemically treated genomic DNA (Homo sapiens) CpG-island No: 4376
  unsure (4, 16, 20, 70, 150, 156, 163, 171, 178, 183, 194, 212, 220)
  unsure (257, 313, 424)
acanccgcacttaatnacgnaacccgcgcaaactaccgataaaattctaaaactacccgcactactacanacgcccgactaaccgccgcccctacgcctcccaccgcgaccgccgcatcacccccgccaccgccctccttcttctctcancatcgncgaccgnacgaaacnccgcaancgacncaaaacgaaanaacccgaaacgccgacgncgtaaacnaaaaaacccccgatccgaaaaaactaaaccaaaaaancccctcaacgctacccgaaccaaaacgccgataaaactaacaaccgaatataccgntcccgccctcaaaaccgcgacgaacaaaaaactacgacgtcgaaaacaaaaaaacgcgacgtcgaaaacaaaaaactataacgacgaaaacaaaaaaccgcgacgacaaanacacgcgacgacgaaaacaaaaaaccgcgaaaacaaaaaccacaaaaaaccacgacgacaaaaacaaaaacccgcgacgacgaaaacaaaaaaccgcgccgacaaaaaacaacgacg

SEQ ID NO: 4377 - DNA, 1259 bp, Artificial Sequence
  chemically treated genomic DNA (Homo sapiens) CpG-island No: 4377
ggcgggcgaatcggtttttcgtggtattggtaaagttgggaacgttttttttaggtttcgttttttcgcgttcgtgtcgggaattcgaatttaggtaagcgttcgggttacgcgtcggggttgtttcgttgtttttagttttttagagttggcgtttgggaggaagagcgcgtgtattacgttttttttttcgtttcgttttcgcgtattgcgacgcgttgtcgcgtttcgttttttttcggttttcggagggtgacggggtgaaggcgggggaatcgaggtggggagttcgttagagtttttagattgcgagtacgcgagtcgtcgtagtcgttattcgcgtcgcgttacggttttcgggttcgtttttttttgatttttttttttttttcgtttttttttttttttttttttcgtcgatcgagtagtgatttaagtaacggagcgcggtgaagtttattttttttttttttcgtagtcgcgttagggagttcgcgcggcggtttttgtttttcggttcgagatgaattttgcggtagaagtcgagtttaatatttttttggttatcgatttttataaggtaaagttcggggttcgggtagatgaggaggagcggggcgcgttggggacgagcgcgcggtaggggggcgggggcggttggggttggggttggggttggggttggggttagggtcgcggcgcggggaggttcgggggaggcgcgggcggcggcggttggggtaggtgaggaggcgtcgtagtgggtaggaggtggtttgaggaggatggagggttgggcggtggaggcggggtttgggggcgtacggcggcggcggcgcggcggggggttgaggcgggttttagcggattttcgggcgtcggtgttcggggttcggggttcggggtttgggcgtcgtcggcgagcgtatgtttttttttgaagcgcggttttttggtttggagttgggattagttaggtaacggtttcggggattcgtagtggagagtgagcggggatatttaagtcgggttagttcggcgcgttcgtttttggttgggtaggtaagtttttcggggcgcgaggtgggagaagttttgcgcgggcgtcggagtagtcgcggttttttgcggtttcggcgcggaggatattcgtttggtttcggtagtcgtagtggatttttttgttttatttcgtcgggtttcgttttaaattttttggtatttagtgattgttcgtgttttttatttttgggtgtaga

SEQ ID NO: 4378 - DNA, 1259 bp, Artificial Sequence
  chemically treated genomic DNA (Homo sapiens) CpG-island No: 4378
tctacacccaaaaataaaaaacacgaacaatcactaaataccaaaaaatttaaaacgaaacccgacgaaataaaacaaaaaaatccactacgactaccgaaaccaaacgaatatcctccgcgccgaaaccgcaaaaaaccgcgactactccgacgcccgcgcaaaacttctcccacctcgcgccccgaaaaacttacctacccaaccaaaaacgaacgcgccgaactaacccgacttaaatatccccgctcactctccactacgaatccccgaaaccgttacctaactaatcccaactccaaaccaaaaaaccgcgcttcaaaaaaaaacatacgctcgccgacgacgcccaaaccccgaaccccgaaccccgaacaccgacgcccgaaaatccgctaaaacccgcctcaaccccccgccgcgccgccgccgccgtacgcccccaaaccccgcctccaccgcccaaccctccatcctcctcaaaccacctcctacccactacgacgcctcctcacctaccccaaccgccgccgcccgcgcctcccccgaacctccccgcgccgcgaccctaaccccaaccccaaccccaaccccaaccccaaccgcccccgcccccctaccgcgcgctcgtccccaacgcgccccgctcctcctcatctacccgaaccccgaactttaccttataaaaatcgataaccaaaaaaatattaaactcgacttctaccgcaaaattcatctcgaaccgaaaaacaaaaaccgccgcgcgaactccctaacgcgactacgaaaaaaaaaaaaaataaacttcaccgcgctccgttacttaaatcactactcgatcgacgaaaaaaaaaaaaaaaaaaaaacgaaaaaaaaaaaaaaatcaaaaaaaaacgaacccgaaaaccgtaacgcgacgcgaataacgactacgacgactcgcgtactcgcaatctaaaaactctaacgaactccccacctcgattcccccgccttcaccccgtcaccctccgaaaaccgaaaaaaaacgaaacgcgacaacgcgtcgcaatacgcgaaaacgaaacgaaaaaaaaaacgtaatacacgcgctcttcctcccaaacgccaactctaaaaaactaaaaacaacgaaacaaccccgacgcgtaacccgaacgcttacctaaattcgaattcccgacacgaacgcgaaaaaacgaaacctaaaaaaaacgttcccaactttaccaataccacgaaaaaccgattcgcccgcc

SEQ ID NO: 4379 - DNA, 1259 bp, Artificial Sequence
  chemically treated genomic DNA (Homo sapiens) CpG-island No: 4379
tttatatttagggataaggagtacgagtaattattaggtgttaaggagtttgaaacggagttcggcggagtgggataggggaatttattacggttatcggggttaggcgagtgtttttcgcgtcggagtcgtagaggatcgcggttgtttcggcgttcgcgtaggattttttttatttcgcgtttcgggagatttatttgtttagttaggggcgagcgcgtcgggttggttcggtttgaatattttcgtttattttttattgcgggttttcggggtcgttatttaattggttttagttttaggttaagaggtcgcgttttagggaagggtatgcgttcgtcggcgacgtttaagtttcgagtttcgagtttcgagtatcggcgttcgggagttcgttggggttcgttttagtttttcgtcgcgtcgtcgtcgtcgtgcgtttttaggtttcgtttttatcgtttagttttttattttttttaagttattttttgtttattgcggcgtttttttatttgttttagtcgtcgtcgttcgcgtttttttcgggttttttcgcgtcgcgattttagttttagttttagttttaattttagttttagtcgttttcgtttttttgtcgcgcgttcgtttttagcgcgtttcgtttttttttatttgttcgggtttcgagttttattttgtaggagtcggtggttaggaggatgttgaattcggtttttgtcgtaggatttatttcgggtcggaggataggggtcgtcgcgcgagttttttggcgcggttgcgaggaaggagaaaaatgagttttatcgcgtttcgttgtttaagttattgttcggtcggcggaggagggggagagggggaaacggagagaggggaggggttagaggagggcgggttcgggagtcgtgacgcggcgcgggtgacggttgcggcggttcgcgtgttcgtagtttgggagttttggcggattttttatttcggttttttcgtttttatttcgttatttttcgggggtcgagaaagggcggggcgcggtagcgcgtcgtagtgcgcggaggcggggcggggaggaggacgtgatgtacgcgtttttttttttagacgttagttttgggaagttggaggtagcggggtagtttcggcgcgtgattcgggcgtttatttaagttcgagttttcggtacgggcgcgggagggcggggtttggagggggcgtttttagttttgttagtgttacgaggagtcggttcgttcgtt

SEQ ID NO: 4380 - DNA, 1259 bp, Artificial Sequence
  chemically treated genomic DNA (Homo sapiens) CpG-island No: 4380
aacgaacgaaccgactcctcgtaacactaacaaaactaaaaacgccccctccaaaccccgccctcccgcgcccgtaccgaaaactcgaacttaaataaacgcccgaatcacgcgccgaaactaccccgctacctccaacttcccaaaactaacgtctaaaaaaaaaaacgcgtacatcacgtcctcctccccgccccgcctccgcgcactacgacgcgctaccgcgccccgccctttctcgacccccgaaaaataacgaaataaaaacgaaaaaaccgaaataaaaaatccgccaaaactcccaaactacgaacacgcgaaccgccgcaaccgtcacccgcgccgcgtcacgactcccgaacccgccctcctctaacccctcccctctctccgtttccccctctccccctcctccgccgaccgaacaataacttaaacaacgaaacgcgataaaactcatttttctccttcctcgcaaccgcgccaaaaaactcgcgcgacgacccctatcctccgacccgaaataaatcctacgacaaaaaccgaattcaacatcctcctaaccaccgactcctacaaaataaaactcgaaacccgaacaaataaaaaaaaacgaaacgcgctaaaaacgaacgcgcgacaaaaaaacgaaaacgactaaaactaaaattaaaactaaaactaaaactaaaatcgcgacgcgaaaaaacccgaaaaaaacgcgaacgacgacgactaaaacaaataaaaaaacgccgcaataaacaaaaaataacttaaaaaaaataaaaaactaaacgataaaaacgaaacctaaaaacgcacgacgacgacgacgcgacgaaaaactaaaacgaaccccaacgaactcccgaacgccgatactcgaaactcgaaactcgaaacttaaacgtcgccgacgaacgcatacccttccctaaaacgcgacctcttaacctaaaactaaaaccaattaaataacgaccccgaaaacccgcaataaaaaataaacgaaaatattcaaaccgaaccaacccgacgcgctcgcccctaactaaacaaataaatctcccgaaacgcgaaataaaaaaaatcctacgcgaacgccgaaacaaccgcgatcctctacgactccgacgcgaaaaacactcgcctaaccccgataaccgtaataaattcccctatcccactccgccgaactccgtttcaaactccttaacacctaataattactcgtactccttatccctaaatataaa

SEQ ID NO: 4381 - DNA, 1509 bp, Artificial Sequence
  chemically treated genomic DNA (Homo sapiens) CpG-island No: 4381
agaggcgtgtcgcgtgtgcgcgtgagtgtgcgcgtgtgagggtgagggtgtgagtatgtgtgtgtgtgtgttggggtgtatgcgtaggcgcgcgtgcgtattaagattcggggtgtaatttcgtaaagaaggtttaggagatcgggtatcgttagtatggatagagttttgtgtttaaataggtagtgtaaggattaattcgcgagggcggggagtggggttttttcgggaggggtaatgcgaggagtcgaggttgggtatcggaggggagcgggatttttatttcggacgggacgtttggatgtgggaagtttcggatttgggtttttgtcggagggttcgtgcgttttagattcggttggttcgacgcgggtgatatttatattatacggatgttttatgttaggtatcgcgtacgggtcgcgaggtcgggttttcgaaacggcgttttagtagcggagtaggagtggtttttagggggacgttatatttttcgtttcgattcggtttttcggatttttcgggcgttttgttcgttcgtatcgggttttattcggtagcggagttcgtatcgttcgtttcggggttttttcggcggagtatacggggcgcggggcgcgggttacggttttttattttgcgtttatcgtcgtttatcgcgcgggagttcgggcgtagggacgtatcgtcgcgtttatattttcgtcggtttcggcggttttttttttaggtatttataaaattgtcgtcgtagtcgttgttcggatatagtatatagaaggagacgtcggggtcggcgtagaaatttattttgcgttcggttttttcggtggcgatgagttcgaagggcgtgttggagtattattttttcgtaacgtcggttagttgttggaaatttatcgcggtttcgcgttcgtttttcgtcgtcgttcgttttttcgtttttaggcgtttttttttcgggcgggtagcgcggcgttcggttcggtttgcgcgggttttttcggggtcgggttgggtcggttgggattgtttatatgcggtgcggagtggggcgggcggcggtcggggaaatagcgcgagcgcgttcgcggtttttttttcgtttcgttttttttcgtttttttgcgggtcgtcgtgggggttggcgcggtcgggtcgggacgcggggcggcgggaggagcggtcggtattttcgcgggcgttcggatttttttgggcgttttcgttttttttttatttttaaataaattcggagtatttcgggttttggttatcgcggtgtcgtttcgggtcgtgacgttatgggttttagttaattatcggagtttgagatcgcgtcggtttgcgagttcggtgacgttatagcgcgagtttggaattcgtagtttcgcgggttatttggaagcggtgcgagcgtttaatatttggttagcgtttttgtggagttagaaagtttaggaagcgtttgtttaaatgcgatttaaatgtaagggaggttatagaatt

SEQ ID NO: 4382 - DNA, 1509 bp, Artificial Sequence
  chemically treated genomic DNA (Homo sapiens) CpG-island No: 4382
aattctataacctcccttacatttaaatcgcatttaaacaaacgcttcctaaactttctaactccacaaaaacgctaaccaaatattaaacgctcgcaccgcttccaaataacccgcgaaactacgaattccaaactcgcgctataacgtcaccgaactcgcaaaccgacgcgatctcaaactccgataattaactaaaacccataacgtcacgacccgaaacgacaccgcgataaccaaaacccgaaatactccgaatttatttaaaaataaaaaaaaaacgaaaacgcccaaaaaaatccgaacgcccgcgaaaataccgaccgctcctcccgccgccccgcgtcccgacccgaccgcgccaacccccacgacgacccgcaaaaaaacgaaaaaaaacgaaacgaaaaaaaaaccgcgaacgcgctcgcgctatttccccgaccgccgcccgccccactccgcaccgcatataaacaatcccaaccgacccaacccgaccccgaaaaaacccgcgcaaaccgaaccgaacgccgcgctacccgcccgaaaaaaaaacgcctaaaaacgaaaaaacgaacgacgacgaaaaacgaacgcgaaaccgcgataaatttccaacaactaaccgacgttacgaaaaaataatactccaacacgcccttcgaactcatcgccaccgaaaaaaccgaacgcaaaataaatttctacgccgaccccgacgtctccttctatatactatatccgaacaacgactacgacgacaattttataaatacctaaaaaaaaaaccgccgaaaccgacgaaaatataaacgcgacgatacgtccctacgcccgaactcccgcgcgataaacgacgataaacgcaaaataaaaaaccgtaacccgcgccccgcgccccgtatactccgccgaaaaaaccccgaaacgaacgatacgaactccgctaccgaataaaacccgatacgaacgaacaaaacgcccgaaaaatccgaaaaaccgaatcgaaacgaaaaatataacgtccccctaaaaaccactcctactccgctactaaaacgccgtttcgaaaacccgacctcgcgacccgtacgcgatacctaacataaaacatccgtataatataaatatcacccgcgtcgaaccaaccgaatctaaaacgcacgaaccctccgacaaaaacccaaatccgaaacttcccacatccaaacgtcccgtccgaaataaaaatcccgctcccctccgatacccaacctcgactcctcgcattacccctcccgaaaaaaccccactccccgccctcgcgaattaatccttacactacctatttaaacacaaaactctatccatactaacgatacccgatctcctaaaccttctttacgaaattacaccccgaatcttaatacgcacgcgcgcctacgcatacaccccaacacacacacacacatactcacaccctcaccctcacacgcgcacactcacgcgcacacgcgacacgcctct

SEQ ID NO: 4383 - DNA, 1509 bp, Artificial Sequence
  chemically treated genomic DNA (Homo sapiens) CpG-island No: 4383
agttttatggttttttttgtatttaaatcgtatttgggtaaacgttttttgggttttttaattttatagaaacgttaattaggtattgggcgttcgtatcgtttttaggtaattcgcggagttgcggattttaggttcgcgttgtgacgttatcgggttcgtaagtcggcgcggttttaggtttcggtgattggttggggtttatgacgttacggttcggggcggtatcgcgatggttagggttcgggatgtttcgggtttgtttaaaaataaagggggggcgggagcgtttaggaaaattcgggcgttcgcgggggtgtcggtcgtttttttcgtcgtttcgcgtttcggttcggtcgcgttaatttttacggcggttcgtaagggggcggggggaggcggggcggaggaggagtcgcgggcgcgttcgcgttgttttttcggtcgtcgttcgttttatttcgtatcgtatgtaaatagttttagtcggtttagttcggtttcggaggagttcgcgtaggtcgagtcgagcgtcgcgttgttcgttcgggaggagggcgtttaggagcgggagggcgggcggcggcgggaggcgggcgcggggtcgcgatggatttttagtagttggtcgacgttgcggagaaatggtgttttaatacgtttttcgagtttatcgttatcgaggagatcgaacgtaggatggatttttacgtcgatttcggcgtttttttttatgtgttgtgttcggataacggttgcggcgataattttgtgagtgtttggaggagggatcgtcggagtcggcgggagtgtggacgcggcggtgcgtttttgcgttcgagttttcgcgcggtgggcggcggtgggcgtagagtggggggtcgtaattcgcgtttcgcgtttcgtgtgtttcgtcggggaagtttcggggcgggcggtgcgggtttcgttgtcgggtggggttcggtgcgggcgggtaaggcgttcggaggattcgaggagtcgggtcggggcgggaggtgtggcgtttttttaaaggttatttttatttcgttgttggggcgtcgtttcgggaattcgatttcgcggttcgtgcgcggtgtttggtatggagtattcgtgtggtgtgggtgttattcgcgtcggattagtcgggtttggggcgtacggatttttcggtaggagtttaggttcggagttttttatatttaggcgtttcgttcgggataggaatttcgttttttttcggtgtttagtttcggtttttcgtattgtttttttcgggagaattttatttttcgttttcgcgggttagtttttgtattgtttgtttggatataaagttttgtttatattagcgatgttcgattttttggattttttttgcggaattatatttcggattttaatacgtacgcgcgtttgcgtatatattttaatatatatatatatatgtttatatttttatttttatacgcgtatatttacgcgtatacgcggtacgttttt

SEQ ID NO: 4384 - DNA, 1509 bp, Artificial Sequence
  chemically treated genomic DNA (Homo sapiens) CpG-island No: 4384
aaaaacgtaccgcgtatacgcgtaaatatacgcgtataaaaataaaaatataaacatatatatatatatattaaaatatatacgcaaacgcgcgtacgtattaaaatccgaaatataattccgcaaaaaaaatccaaaaaatcgaacatcgctaatataaacaaaactttatatccaaacaaacaatacaaaaactaacccgcgaaaacgaaaaataaaattctcccgaaaaaaacaatacgaaaaaccgaaactaaacaccgaaaaaaaacgaaattcctatcccgaacgaaacgcctaaatataaaaaactccgaacctaaactcctaccgaaaaatccgtacgccccaaacccgactaatccgacgcgaataacacccacaccacacgaatactccataccaaacaccgcgcacgaaccgcgaaatcgaattcccgaaacgacgccccaacaacgaaataaaaataacctttaaaaaaacgccacacctcccgccccgacccgactcctcgaatcctccgaacgccttacccgcccgcaccgaaccccacccgacaacgaaacccgcaccgcccgccccgaaacttccccgacgaaacacacgaaacgcgaaacgcgaattacgaccccccactctacgcccaccgccgcccaccgcgcgaaaactcgaacgcaaaaacgcaccgccgcgtccacactcccgccgactccgacgatccctcctccaaacactcacaaaattatcgccgcaaccgttatccgaacacaacacataaaaaaaaacgccgaaatcgacgtaaaaatccatcctacgttcgatctcctcgataacgataaactcgaaaaacgtattaaaacaccatttctccgcaacgtcgaccaactactaaaaatccatcgcgaccccgcgcccgcctcccgccgccgcccgccctcccgctcctaaacgccctcctcccgaacgaacaacgcgacgctcgactcgacctacgcgaactcctccgaaaccgaactaaaccgactaaaactatttacatacgatacgaaataaaacgaacgacgaccgaaaaaacaacgcgaacgcgcccgcgactcctcctccgccccgcctccccccgcccccttacgaaccgccgtaaaaattaacgcgaccgaaccgaaacgcgaaacgacgaaaaaaacgaccgacacccccgcgaacgcccgaattttcctaaacgctcccgccccccctttatttttaaacaaacccgaaacatcccgaaccctaaccatcgcgataccgccccgaaccgtaacgtcataaaccccaaccaatcaccgaaacctaaaaccgcgccgacttacgaacccgataacgtcacaacgcgaacctaaaatccgcaactccgcgaattacctaaaaacgatacgaacgcccaatacctaattaacgtttctataaaattaaaaaacccaaaaaacgtttacccaaatacgatttaaatacaaaaaaaaccataaaact

SEQ ID NO: 4385 - DNA, 657 bp, Artificial Sequence
  chemically treated genomic DNA (Homo sapiens) CpG-island No: 4385
tcgggcgaggtttagatcgagggaaagcggagtttttggtattgcgaaaggttggcgttggggatttggggagtttcggtttcgcggagaggaggtcgggaagagttgggtaatcggtcgtagtttagatggaggagtttgtaggaagaaggtgttgggaaggcgcgttcggttgagaggaatggtcgggaaagacgagaggaggacgagggtcgagggagaaagagaaggacgtgaaaggttaggtcgcgggaaggcggcgtcgagagtcggttgggtttaggcgtcgcgaggaagtgggaatcgagagagtgaagtatagcgcgtagcgtcgcgtacgttatttttttgttttcgcgtcgttttttttgggtaattcgtgcgggtttcgattgtcggggacgggaaacgcggttaggtaggaggcgaggaagtatttcggtcgttttgtagagtcggggtttttttttttcgcggttgtcgacgttgttttttttacgttttgttttcgcggagcgcgtaagacgttttttttcgtatttgttttgagggttacgggacggagtttaggtttttagtatttcgtattttatttttgttttcgttatagtagtcgtttcgaatgggtttagaattaggggattggttcgagaggcg

SEQ ID NO: 4386 - DNA, 657 bp, Artificial Sequence
  chemically treated genomic DNA (Homo sapiens) CpG-island No: 4386
cgcctctcgaaccaatcccctaattctaaacccattcgaaacgactactataacgaaaacaaaaataaaatacgaaatactaaaaacctaaactccgtcccgtaaccctcaaaacaaatacgaaaaaaaacgtcttacgcgctccgcgaaaacaaaacgtaaaaaaaacaacgtcgacaaccgcgaaaaaaaaaaaccccgactctacaaaacgaccgaaatacttcctcgcctcctacctaaccgcgtttcccgtccccgacaatcgaaacccgcacgaattacccaaaaaaaacgacgcgaaaacaaaaaaataacgtacgcgacgctacgcgctatacttcactctctcgattcccacttcctcgcgacgcctaaacccaaccgactctcgacgccgccttcccgcgacctaacctttcacgtccttctctttctccctcgaccctcgtcctcctctcgtctttcccgaccattcctctcaaccgaacgcgccttcccaacaccttcttcctacaaactcctccatctaaactacgaccgattacccaactcttcccgacctcctctccgcgaaaccgaaactccccaaatccccaacgccaacctttcgcaataccaaaaactccgctttccctcgatctaaacctcgcccga

SEQ ID NO: 4387 - DNA, 657 bp, Artificial Sequence
  chemically treated genomic DNA (Homo sapiens) CpG-island No: 4387
cgtttttcgggttagttttttagttttaggtttattcggaacggttattgtggcgggggtagaaatggagtgcgggatgttgagagtttggatttcgtttcgtgatttttaaggtaagtgcggagaaaagcgttttgcgcgtttcgcggggataggacgtggagggagtagcgtcggtaatcgcgggaggaaaaggtttcggttttgtagggcggtcggggtgttttttcgttttttgtttagtcgcgtttttcgttttcggtaatcgggattcgtacggattgtttaggggagacggcgcgggagtaggagggtggcgtgcgcggcgttacgcgttgtgttttattttttcggtttttattttttcgcggcgtttgggtttagtcggttttcggcgtcgttttttcgcggtttggttttttacgtttttttttttttttttcggttttcgtttttttttcgtttttttcggttattttttttagtcgaacgcgtttttttagtattttttttttgtaagtttttttatttggattgcgatcgattatttagtttttttcggtttttttttcgcgaggtcgaggttttttaggtttttagcgttagtttttcgtaatgttaagggtttcgttttttttcgatttgggtttcgttcgg

SEQ ID NO: 4388 - DNA, 657 bp, Artificial Sequence
  chemically treated genomic DNA (Homo sapiens) CpG-island No: 4388
ccgaacgaaacccaaatcgaaaaaaaacgaaacccttaacattacgaaaaactaacgctaaaaacctaaaaaacctcgacctcgcgaaaaaaaaaccgaaaaaaactaaataatcgatcgcaatccaaataaaaaaacttacaaaaaaaaaatactaaaaaaacgcgttcgactaaaaaaaataaccgaaaaaaacgaaaaaaaaacgaaaaccgaaaaaaaaaaaaaaaaacgtaaaaaaccaaaccgcgaaaaaacgacgccgaaaaccgactaaacccaaacgccgcgaaaaaataaaaaccgaaaaaataaaacacaacgcgtaacgccgcgcacgccaccctcctactcccgcgccgtctcccctaaacaatccgtacgaatcccgattaccgaaaacgaaaaacgcgactaaacaaaaaacgaaaaaacaccccgaccgccctacaaaaccgaaaccttttcctcccgcgattaccgacgctactccctccacgtcctatccccgcgaaacgcgcaaaacgcttttctccgcacttaccttaaaaatcacgaaacgaaatccaaactctcaacatcccgcactccatttctacccccgccacaataaccgttccgaataaacctaaaactaaaaaactaacccgaaaaacg

SEQ ID NO: 4389 - DNA, 690 bp, Artificial Sequence
  chemically treated genomic DNA (Homo sapiens) CpG-island No: 4389
tgcggcgatcggtcgtttcgagcgtagcgttagatatttgggttggggggtgttagtttgacgcgtaggaagggcgtacggcgggagggggttttattttagatttgggaggtttgttggcgtcggtttcgttcgtttttcgtcggtggaggtcgcggttggcggagatcgtaagttagaggaggggattcgaggtttcggttgggcgaaggttttggagggggagaagacggtcgaggcgtggaggggtagtcgcggcggggcgatttttatttgtttattgcggggtttgttcgtggggtcggggtagatttcgtaaaggacgcgtatttgtaagttcgcggttcgcgcgcgcgggatggggagcgtgtgttcgaggagcgcgcgtcgagtcgggttttcgcgtttgtgtggtcggttggcggcggggttcgtgtgtttttgcgcggcggcgtgtgcgtgtgcgtacgcgggattacgttcgttcggagtcgtcgtcgtcgtcgttattttttgttcggggtcgagcgtagcgttttttttgttcgtttcgcgcgcgcggtagtttagtttggtttcgttttgcgggagaggcgtcgttttcgtcgcgaagttaggttgggcgttggagggaggcgatcgattatcgtttttttttgtttattttataggttggggagggggtgttgt

SEQ ID NO: 4390 - DNA, 690 bp, Artificial Sequence
  chemically treated genomic DNA (Homo sapiens) CpG-island No: 4390
acaacaccccctccccaacctataaaataaacaaaaaaaaacgataatcgatcgcctccctccaacgcccaacctaacttcgcgacgaaaacgacgcctctcccgcaaaacgaaaccaaactaaactaccgcgcgcgcgaaacgaacaaaaaaaacgctacgctcgaccccgaacaaaaaataacgacgacgacgacgactccgaacgaacgtaatcccgcgtacgcacacgcacacgccgccgcgcaaaaacacacgaaccccgccgccaaccgaccacacaaacgcgaaaacccgactcgacgcgcgctcctcgaacacacgctccccatcccgcgcgcgcgaaccgcgaacttacaaatacgcgtcctttacgaaatctaccccgaccccacgaacaaaccccgcaataaacaaataaaaatcgccccgccgcgactacccctccacgcctcgaccgtcttctccccctccaaaaccttcgcccaaccgaaacctcgaatcccctcctctaacttacgatctccgccaaccgcgacctccaccgacgaaaaacgaacgaaaccgacgccaacaaacctcccaaatctaaaataaaaccccctcccgccgtacgcccttcctacgcgtcaaactaacaccccccaacccaaatatctaacgctacgctcgaaacgaccgatcgccgca

SEQ ID NO: 4391 - DNA, 690 bp, Artificial Sequence
  chemically treated genomic DNA (Homo sapiens) CpG-island No: 4391
gtagtattttttttttagtttgtgaagtgagtagggggaggcggtggtcggtcgtttttttttagcgtttagtttggtttcgcggcggaggcggcgtttttttcgtaggacggagttaagttggattgtcgcgcgcgcggggcgggtaaagggggcgttgcgttcggtttcgggtagggagtgacggcggcggcggcggtttcgggcgagcgtggtttcgcgtgcgtatacgtatacgtcgtcgcgtagggatatacggatttcgtcgttagtcggttatataggcgcggagattcggttcggcgcgcgtttttcgggtatacgttttttatttcgcgcgcgcgggtcgcggatttgtaggtgcgcgttttttgcggagtttgtttcggttttacggataggtttcgtagtgagtaggtaagggtcgtttcgtcgcggttgtttttttacgtttcggtcgttttttttttttttagaattttcgtttagtcgggatttcggatttttttttttggtttgcggttttcgttagtcgcgatttttatcgacggagagcgggcgaggtcggcgttagtaagttttttagatttgaaatgaagttttttttcgtcgtgcgttttttttgcgcgttaggttgatattttttaatttaagtgtttggcgttgcgttcggggcggtcgatcgtcgta

SEQ ID NO: 4392 - DNA, 690 bp, Artificial Sequence
  chemically treated genomic DNA (Homo sapiens) CpG-island No: 4392
tacgacgatcgaccgccccgaacgcaacgccaaacacttaaattaaaaaatatcaacctaacgcgcaaaaaaaacgcacgacgaaaaaaaacttcatttcaaatctaaaaaacttactaacgccgacctcgcccgctctccgtcgataaaaatcgcgactaacgaaaaccgcaaaccaaaaaaaaaaatccgaaatcccgactaaacgaaaattctaaaaaaaaaaaaaacgaccgaaacgtaaaaaaacaaccgcgacgaaacgacccttacctactcactacgaaacctatccgtaaaaccgaaacaaactccgcaaaaaacgcgcacctacaaatccgcgacccgcgcgcgcgaaataaaaaacgtatacccgaaaaacgcgcgccgaaccgaatctccgcgcctatataaccgactaacgacgaaatccgtatatccctacgcgacgacgtatacgtatacgcacgcgaaaccacgctcgcccgaaaccgccgccgccgccgtcactccctacccgaaaccgaacgcaacgccccctttacccgccccgcgcgcgcgacaatccaacttaactccgtcctacgaaaaaaacgccgcctccgccgcgaaaccaaactaaacgctaaaaaaaaacgaccgaccaccgcctccccctactcacttcacaaactaaaaaaaaaatactac

SEQ ID NO: 4393 - DNA, 559 bp, Artificial Sequence
  chemically treated genomic DNA (Homo sapiens) CpG-island No: 4393
tcggtcggttggggttcgtcgttaggcgcgttggttgggtagtttttgggagatgaagcgacgtaggcgttttaggtattggttgtagagttcgatgtcgttgtgttcggcgttttttatttatagcggttttatcgttttggggtagcgttcgtagagcgttagttcgtgtgagaagtcgattatttcgttttttatgtcgtggatgatgagtacgggcgacgtgattttggatattttttcgatgttagggaaggcgtcgaagtagtaggttttggtgtcggggaaggcgacgcgtatgttcgaggtgagcggcgagtgtagtattatcgcggtatattcgtagcgcgaggttaggtttacggtgggtatcgtgtcgatgttttgttcgtataggatgatgttgttcgggttgatgtcgtatttggcggcgtcggagtagggttagtcgcggttttcgacgcgggcgtattttttttattagcgggcgttttcgggtttagtttcggatgcgattttttagtttttttatttagttaagttagtgggttagatttag

SEQ ID NO: 4394 - DNA, 559 bp, Artificial Sequence
  chemically treated genomic DNA (Homo sapiens) CpG-island No: 4394
ctaaatctaacccactaacttaactaaataaaaaaactaaaaaatcgcatccgaaactaaacccgaaaacgcccgctaataaaaaaaatacgcccgcgtcgaaaaccgcgactaaccctactccgacgccgccaaatacgacatcaacccgaacaacatcatcctatacgaacaaaacatcgacacgatacccaccgtaaacctaacctcgcgctacgaatataccgcgataatactacactcgccgctcacctcgaacatacgcgtcgccttccccgacaccaaaacctactacttcgacgccttccctaacatcgaaaaaatatccaaaatcacgtcgcccgtactcatcatccacgacataaaaaacgaaataatcgacttctcacacgaactaacgctctacgaacgctaccccaaaacgataaaaccgctataaataaaaaacgccgaacacaacgacatcgaactctacaaccaatacctaaaacgcctacgtcgcttcatctcccaaaaactacccaaccaacgcgcctaacgacgaaccccaaccgaccga

SEQ ID NO: 4395 - DNA, 559 bp, Artificial Sequence
  chemically treated genomic DNA (Homo sapiens) CpG-island No: 4395
ttgggtttgatttattgatttagttgagtggggagattggagggtcgtattcggagttgggttcggggacgttcgttggtgggaagggtgcgttcgcgtcggaggtcgcggttgattttgtttcggcgtcgttaggtacggtattagttcggatagtattattttgtacgggtagagtatcggtacggtgtttatcgtggatttggtttcgcgttacgagtgtgtcgcggtggtgttgtattcgtcgtttatttcgggtatgcgcgtcgtttttttcgatattaagatttattgtttcgacgttttttttaatatcgagaaggtgtttaagattacgtcgttcgtgtttattatttacggtatggaggacgaggtgatcgattttttatacgggttggcgttttacgagcgttgttttaaggcggtggagtcgttgtgggtggagggcgtcgggtataacgatatcgagttttatagttagtatttggagcgtttgcgtcgttttattttttaggagttgtttagttagcgcgtttagcggcgggttttaatcggtcgg

SEQ ID NO: 4396 - DNA, 559 bp, Artificial Sequence
  chemically treated genomic DNA (Homo sapiens) CpG-island No: 4396
ccgaccgattaaaacccgccgctaaacgcgctaactaaacaactcctaaaaaataaaacgacgcaaacgctccaaatactaactataaaactcgatatcgttatacccgacgccctccacccacaacgactccaccgccttaaaacaacgctcgtaaaacgccaacccgtataaaaaatcgatcacctcgtcctccataccgtaaataataaacacgaacgacgtaatcttaaacaccttctcgatattaaaaaaaacgtcgaaacaataaatcttaatatcgaaaaaaacgacgcgcatacccgaaataaacgacgaatacaacaccaccgcgacacactcgtaacgcgaaaccaaatccacgataaacaccgtaccgatactctacccgtacaaaataatactatccgaactaataccgtacctaacgacgccgaaacaaaatcaaccgcgacctccgacgcgaacgcacccttcccaccaacgaacgtccccgaacccaactccgaatacgaccctccaatctccccactcaactaaatcaataaatcaaacccaa

SEQ ID NO: 4397 - DNA, 525 bp, Artificial Sequence
  chemically treated genomic DNA (Homo sapiens) CpG-island No: 4397
gatcgagtgagcgtttgcgcgggttcgggcggggtgggttggagcgggatatttttttttatttttttcgcggtatcgtttttttttttttttggaaatcgggtcggcgtcgcgggcgcggaggtagttggatgcggtttttttttttcgtaggagacgcggttgttcggcggttttcgcgcgttggttattaggtgagtagggcggtgggcgcggtcgcggttttttacgtgttcgttcgagtcgtcgtttatttgttcgtttttcgttttgtaggcgttgttgacgttgtcgtttttttttttggggttgtcgttgttttggacggtgttgttggatttcggcgtcgttttcgcgtggttttggagttttatttcggagacgacgttgcgtcgtttgcgttatacgttgttttcgttgttggagttgcgcgttaacgggttgttgttaatttaagtgtagcgtttcgcgtttggttttaggtggattttagggtatcggttttatttttggtgtatttttttt

SEQ ID NO: 4398 - DNA, 525 bp, Artificial Sequence
  chemically treated genomic DNA (Homo sapiens) CpG-island No: 4398
aaaaaaaatacaccaaaaataaaaccgataccctaaaatccacctaaaaccaaacgcgaaacgctacacttaaattaacaacaacccgttaacgcgcaactccaacaacgaaaacaacgtataacgcaaacgacgcaacgtcgtctccgaaataaaactccaaaaccacgcgaaaacgacgccgaaatccaacaacaccgtccaaaacaacgacaaccccaaaaaaaaaaacgacaacgtcaacaacgcctacaaaacgaaaaacgaacaaataaacgacgactcgaacgaacacgtaaaaaaccgcgaccgcgcccaccgccctactcacctaataaccaacgcgcgaaaaccgccgaacaaccgcgtctcctacgaaaaaaaaaaaccgcatccaactacctccgcgcccgcgacgccgacccgatttccaaaaaaaaaaaaaaacgataccgcgaaaaaaataaaaaaaaatatcccgctccaacccaccccgcccgaacccgcgcaaacgctcactcgatc

SEQ ID NO: 4399 - DNA, 525 bp, Artificial Sequence
  chemically treated genomic DNA (Homo sapiens) CpG-island No: 4399
gagaggagtgtattagaaataaagtcggtgttttggagtttatttggagttaggcgcggggcgttgtatttaggttggtagtagttcgttagcgcgtagttttagtagcggggatagcgtgtagcgtaggcggcgtagcgtcgttttcgaggtgaggttttagagttacgcggagacggcgtcggggtttaatagtatcgtttagagtagcgatagttttaggaagaggagcggtagcgttagtagcgtttgtagggcgaaaggcgggtaggtgggcggcggttcgggcgggtacgtgggggatcgcggtcgcgtttatcgttttgtttatttgatggttagcgcgcgaggatcgtcgaatagtcgcgttttttgcggggagagagggtcgtatttagttattttcgcgttcgcggcgtcggttcggtttttaggaggagggggaggcggtatcgcgggggggatggggaggggtgtttcgttttagtttatttcgttcggattcgcgtaggcgtttattcggtt

SEQ ID NO: 4400 - DNA, 525 bp, Artificial Sequence
  chemically treated genomic DNA (Homo sapiens) CpG-island No: 4400
aaccgaataaacgcctacgcgaatccgaacgaaataaactaaaacgaaacacccctccccatcccccccgcgataccgcctccccctcctcctaaaaaccgaaccgacgccgcgaacgcgaaaataactaaatacgaccctctctccccgcaaaaaacgcgactattcgacgatcctcgcgcgctaaccatcaaataaacaaaacgataaacgcgaccgcgatcccccacgtacccgcccgaaccgccgcccacctacccgcctttcgccctacaaacgctactaacgctaccgctcctcttcctaaaactatcgctactctaaacgatactattaaaccccgacgccgtctccgcgtaactctaaaacctcacctcgaaaacgacgctacgccgcctacgctacacgctatccccgctactaaaactacgcgctaacgaactactaccaacctaaatacaacgccccgcgcctaactccaaataaactccaaaacaccgactttatttctaatacactcctctc

SEQ ID NO: 4401 - DNA, 524 bp, Artificial Sequence
  chemically treated genomic DNA (Homo sapiens) CpG-island No: 4401
ttacgacgttgggaaagcggggtcgagaaggagggattcggggcgattcgatagcgttagatagggcggtcggcgtcgagggtcgttatttcggtgcggcggtatagcgtggttttttcgaaggcgtcgcggtttaggacgcggatggggatgtagtgtagttttttttgtttcgtcgcgtcgtcgtcggttcgcggtttttgattggcgttaggtttcggattcgagttttcgtaattttcggattcgtttttaaagttcgagttgatggaatcgtagtgtcgttcgtattcgtttagtatcgatatggcggcggtcgcgggttttggggattagtttgcgtatgttcggaggttttggtcgcgttgcgtttcgttcgttttagatgtcggttcgcggattcgttagtttagtaatttcgcgaagttcgatggtggtttttgtttttcgattcggaaatagttttttgtgttttcggtttggttgagtttttttcgtttttgtttatttttttggttagttta

SEQ ID NO: 4402 - DNA, 524 bp, Artificial Sequence
  chemically treated genomic DNA (Homo sapiens) CpG-island No: 4402
taaactaaccaaaaaaataaacaaaaacgaaaaaaactcaaccaaaccgaaaacacaaaaaactatttccgaatcgaaaaacaaaaaccaccatcgaacttcgcgaaattactaaactaacgaatccgcgaaccgacatctaaaacgaacgaaacgcaacgcgaccaaaacctccgaacatacgcaaactaatccccaaaacccgcgaccgccgccatatcgatactaaacgaatacgaacgacactacgattccatcaactcgaactttaaaaacgaatccgaaaattacgaaaactcgaatccgaaacctaacgccaatcaaaaaccgcgaaccgacgacgacgcgacgaaacaaaaaaaactacactacatccccatccgcgtcctaaaccgcgacgccttcgaaaaaaccacgctataccgccgcaccgaaataacgaccctcgacgccgaccgccctatctaacgctatcgaatcgccccgaatccctccttctcgaccccgctttcccaacgtcgtaa

SEQ ID NO: 4403 - DNA, 524 bp, Artificial Sequence
  chemically treated genomic DNA (Homo sapiens) CpG-island No: 4403
tagattagttaagagggtaagtaaaggcggaggaaatttagttaggtcggaaatatagagaattgttttcgggtcggggggtaggagttattatcgagtttcgcggggttgttgggttgacggattcgcgggtcggtatttgaagcgagcgggacgtagcgcggttagggttttcgggtatacgtaggttggtttttaaggttcgcggtcgtcgttatgtcggtgttgggcgagtacgagcgatattgcgattttattaattcggattttgggagcgagttcgggggttgcggggattcgagttcggggtttagcgttagttaggggtcgcgagtcggcggcggcgcggcggagtaggaggaattgtattatatttttattcgcgttttgggtcgcggcgttttcggggaagttacgttgtatcgtcgtatcgaggtagcggttttcggcgtcggtcgttttgtttggcgttgtcgggtcgtttcgagtttttttttttcggtttcgtttttttagcgtcgtga

SEQ ID NO: 4404 - DNA, 524 bp, Artificial Sequence
  chemically treated genomic DNA (Homo sapiens) CpG-island No: 4404
tcacgacgctaaaaaaacgaaaccgaaaaaaaaaaactcgaaacgacccgacaacgccaaacaaaacgaccgacgccgaaaaccgctacctcgatacgacgatacaacgtaacttccccgaaaacgccgcgacccaaaacgcgaataaaaatataatacaattcctcctactccgccgcgccgccgccgactcgcgacccctaactaacgctaaaccccgaactcgaatccccgcaacccccgaactcgctcccaaaatccgaattaataaaatcgcaatatcgctcgtactcgcccaacaccgacataacgacgaccgcgaaccttaaaaaccaacctacgtatacccgaaaaccctaaccgcgctacgtcccgctcgcttcaaataccgacccgcgaatccgtcaacccaacaaccccgcgaaactcgataataactcctaccccccgacccgaaaacaattctctatatttccgacctaactaaatttcctccgcctttacttaccctcttaactaatcta

SEQ ID NO: 4405 - DNA, 807 bp, Artificial Sequence
  chemically treated genomic DNA (Homo sapiens) CpG-island No: 4405
ggggcggcggtatcggtaggcgggatttcgatttttttttttttatatttttttaagcgcgggtttttatcgggcgcgggagcggacgcgggttcgggtttcggtttcggttcggttttgggttcgtttcgcggcggcggtggcggtggcggtggtggtggcggcggcggcgggggtgggggcggcggcggcggcgcggggggtgtcgcggggttcgggttcggggggttgggcgggggcgttttcgcgggcgcgcgttttcgggcgtttttcgcgcgcggtttcgtcgtcgttttgtttttcgtttttgttattcggtattgggcggtggaggcggttattttggtttcggcgtacgcggggcggtcgttttaggcgggagtagttgagcgtcgagtgtcgagtgtcgttgtcgtcgtcgttaaattcgtttcgtttcgttttttagggcgcgtttaggttggtttgtcgagtgtcgagcgtcgagcgtcgagtgttacgagcgaaatcgttcgtttgggttttgagggcggacggttgtagttgttggaagtttgtcgcgcgttttggttagcggatgtatttacgttgggcgtttagcggtttttaatcgtcgttttagtttagttttcggatatttttatttttaggatgggaatttttcggttttatttagatttttttaaataacgttaaaatttttaagagtttcgacgggcggagttaggatttgttttaggattttgttttatttttttttcggaaagtttttattttcgagtcggggattttggaaaatatttgatt

SEQ ID NO: 4406 - DNA, 807 bp, Artificial Sequence
  chemically treated genomic DNA (Homo sapiens) CpG-island No: 4406
aatcaaatattttccaaaatccccgactcgaaaataaaaactttccgaaaaaaaaataaaacaaaatcctaaaacaaatcctaactccgcccgtcgaaactcttaaaaattttaacgttatttaaaaaaatctaaataaaaccgaaaaattcccatcctaaaaataaaaatatccgaaaactaaactaaaacgacgattaaaaaccgctaaacgcccaacgtaaatacatccgctaaccaaaacgcgcgacaaacttccaacaactacaaccgtccgccctcaaaacccaaacgaacgatttcgctcgtaacactcgacgctcgacgctcgacactcgacaaaccaacctaaacgcgccctaaaaaacgaaacgaaacgaatttaacgacgacgacaacgacactcgacactcgacgctcaactactcccgcctaaaacgaccgccccgcgtacgccgaaaccaaaataaccgcctccaccgcccaataccgaataacaaaaacgaaaaacaaaacgacgacgaaaccgcgcgcgaaaaacgcccgaaaacgcgcgcccgcgaaaacgcccccgcccaaccccccgaacccgaaccccgcgacaccccccgcgccgccgccgccgcccccacccccgccgccgccgccaccaccaccgccaccgccaccgccgccgcgaaacgaacccaaaaccgaaccgaaaccgaaacccgaacccgcgtccgctcccgcgcccgataaaaacccgcgcttaaaaaaatataaaaaaaaaaaaatcgaaatcccgcctaccgataccgccgcccc

SEQ ID NO: 4407 - DNA, 807 bp, Artificial Sequence
  chemically treated genomic DNA (Homo sapiens) CpG-island No: 4407
gattaggtgttttttaggattttcgattcggagatggagatttttcggaaagggaatggggtagggttttagggtaggttttagtttcgttcgtcggggtttttaagagttttgacgttgtttaagggggtttgagtgaggtcggaagatttttattttagggatagagatgttcggggattgggttggggcggcggttagaggtcgttgggcgtttagcgtgggtgtattcgttagttagggcgcgcgataagtttttagtagttgtagtcgttcgtttttagggtttagacgaacggtttcgttcgtggtattcggcgttcggcgttcggtattcggtaggttaatttgggcgcgttttgaggggcggggcggagcgggtttggcggcggcggtagcggtattcggtattcggcgtttagttgttttcgtttggggcggtcgtttcgcgtgcgtcggagttaagatggtcgtttttatcgtttagtgtcgagtgataaaagcggagagtaaggcggcggcggggtcgcgcgcggggggcgttcgggagcgcgcgttcgcgggggcgttttcgtttagtttttcgagttcgggtttcgcggtatttttcgcgtcgtcgtcgtcgtttttattttcgtcgtcgtcgttattattatcgttatcgttatcgtcgtcgcgggacgggtttaaggtcgagtcggagtcggggttcgggttcgcgttcgttttcgcgttcggtaagagttcgcgtttgggagggtgtggggaggggaaggtcggaatttcgtttgtcggtgtcgtcgtttt

SEQ ID NO: 4408 - DNA, 807 bp, Artificial Sequence
  chemically treated genomic DNA (Homo sapiens) CpG-island No: 4408
aaaacgacgacaccgacaaacgaaattccgaccttcccctccccacaccctcccaaacgcgaactcttaccgaacgcgaaaacgaacgcgaacccgaaccccgactccgactcgaccttaaacccgtcccgcgacgacgataacgataacgataataataacgacgacgacgaaaataaaaacgacgacgacgacgcgaaaaataccgcgaaacccgaactcgaaaaactaaacgaaaacgcccccgcgaacgcgcgctcccgaacgccccccgcgcgcgaccccgccgccgccttactctccgcttttatcactcgacactaaacgataaaaacgaccatcttaactccgacgcacgcgaaacgaccgccccaaacgaaaacaactaaacgccgaataccgaataccgctaccgccgccgccaaacccgctccgccccgcccctcaaaacgcgcccaaattaacctaccgaataccgaacgccgaacgccgaataccacgaacgaaaccgttcgtctaaaccctaaaaacgaacgactacaactactaaaaacttatcgcgcgccctaactaacgaatacacccacgctaaacgcccaacgacctctaaccgccgccccaacccaatccccgaacatctctatccctaaaataaaaatcttccgacctcactcaaacccccttaaacaacgtcaaaactcttaaaaaccccgacgaacgaaactaaaacctaccctaaaaccctaccccattccctttccgaaaaatctccatctccgaatcgaaaatcctaaaaaacacctaatc

SEQ ID NO: 4409 - DNA, 524 bp, Artificial Sequence
  chemically treated genomic DNA (Homo sapiens) CpG-island No: 4409
ggatcgcggtgggtgttcggggaggcggattttcggtgtatttttgcgcgtgtgtatttttttttgcgtgcgtgttcgcgcgtgcgtgttcgtatatgcgcgttattttcgtattgttttcgttttttgcgtttgtttaggttatcgtttgttttggtttttaggttttggtttttagtggacgagaattatcgagtttgcggggttagacgttgatcgttcgggttagtatttaggcgggcgggagttgtgcggtttagggttcgcgcgggtcgggtagaggttcgagttaggattttcgagcgtgaatttcggagtcggcggcgttggggttagaggggcgggcgggaggtgatggcggaggcgaaggggcgacgggatttgggtttggttcgtgtgtgtttttagaggtttggcgtcggtcgtcgttgtacggtgagttttagggaggcggatttgggtttcgagaaggatatttatttggatttgttttataggttcggttcgcgttttcgggagtagaa

SEQ ID NO: 4410 - DNA, 524 bp, Artificial Sequence
  chemically treated genomic DNA (Homo sapiens) CpG-island No: 4410
ttctactcccgaaaacgcgaaccgaacctataaaacaaatccaaataaatatccttctcgaaacccaaatccgcctccctaaaactcaccgtacaacgacgaccgacgccaaacctctaaaaacacacacgaaccaaacccaaatcccgtcgccccttcgcctccgccatcacctcccgcccgcccctctaaccccaacgccgccgactccgaaattcacgctcgaaaatcctaactcgaacctctacccgacccgcgcgaaccctaaaccgcacaactcccgcccgcctaaatactaacccgaacgatcaacgtctaaccccgcaaactcgataattctcgtccactaaaaaccaaaacctaaaaaccaaaacaaacgataacctaaacaaacgcaaaaaacgaaaacaatacgaaaataacgcgcatatacgaacacgcacgcgcgaacacgcacgcaaaaaaaaatacacacgcgcaaaaatacaccgaaaatccgcctccccgaacacccaccgcgatcc

SEQ ID NO: 4411 - DNA, 524 bp, Artificial Sequence
  chemically treated genomic DNA (Homo sapiens) CpG-island No: 4411
ttttgttttcgagggcgcgggtcgggtttatggggtaaatttaggtgggtgtttttttcggggtttagattcgtttttttggggtttatcgtatagcgacggtcggcgttaggtttttgaggatatatacgggttaggtttaggtttcgtcgttttttcgttttcgttattatttttcgttcgtttttttggttttagcgtcgtcggtttcggggtttacgttcgggggttttggttcgagtttttattcggttcgcgcgaattttgggtcgtatagttttcgttcgtttaggtgttggttcgggcggttagcgtttagtttcgtagattcggtgattttcgtttattagaggttaaagtttgggaattagagtaagcgatgatttgaataggcgtaggaagcgagggtagtgcggaggtggcgcgtatgtgcgagtacgtacgcgcgaatacgtacgtagggagaggtgtatacgcgtaggagtgtatcggaagttcgttttttcggatatttatcgcggttt

SEQ ID NO: 4412 - DNA, 524 bp, Artificial Sequence
  chemically treated genomic DNA (Homo sapiens) CpG-island No: 4412
aaaccgcgataaatatccgaaaaaacgaacttccgatacactcctacgcgtatacacctctccctacgtacgtattcgcgcgtacgtactcgcacatacgcgccacctccgcactaccctcgcttcctacgcctattcaaatcatcgcttactctaattcccaaactttaacctctaataaacgaaaatcaccgaatctacgaaactaaacgctaaccgcccgaaccaacacctaaacgaacgaaaactatacgacccaaaattcgcgcgaaccgaataaaaactcgaaccaaaacccccgaacgtaaaccccgaaaccgacgacgctaaaaccaaaaaaacgaacgaaaaataataacgaaaacgaaaaaacgacgaaacctaaacctaacccgtatatatcctcaaaaacctaacgccgaccgtcgctatacgataaaccccaaaaaaacgaatctaaaccccgaaaaaaacacccacctaaatttaccccataaacccgacccgcgccctcgaaaacaaaa

SEQ ID NO: 4413 - DNA, 701 bp, Artificial Sequence
  chemically treated genomic DNA (Homo sapiens) CpG-island No: 4413
cgggttcgtgtcgcggtcgcgtggaggtgttgtacgtcgggggttggggtatcgtgtgcgacgatgattgggattttgcggacgcgcgcgtggtttgtcgcgaagcgggttgcgggtttgcgttgggttaacgggattgggttatttcggttacggcgcggttcgtgttgttggataacgtgggttgcgtcggtatcgaggttcgtttgagcgattgtttttatttgggttggggtagtataattgcggttattacgaggacgcgggagcgtttgcgtaggtgaggttgatagcgaaggtgaggttgatagcggggtcgcgtattgcggcgtgggaggggcggggcggcgttacgcgcgaggttttttttgcggtattgtcgttcggggagtatgcgtatttcgtagaggggcgtcgcgttcgtgcgttcgttttgcggttgcgcggcggggcgaggtcggaacggagagttttttgtagtggaaaatggggcggggtttggggagcgtcgcgtggtgtagttgtgaggggcggtgttcgaaggttagggttaaggtcgattttagttcgagaaaggtattaagttcgtaaagggtggggtcgtttgttttcggttaaatttagatttcgtaaaattttattaagtagagagtggattatttttattagagttagcgtgtgatttttgggcggagttagtg

SEQ ID NO: 4414 - DNA, 701 bp, Artificial Sequence
  chemically treated genomic DNA (Homo sapiens) CpG-island No: 4414
cactaactccgcccaaaaatcacacgctaactctaataaaaataatccactctctacttaataaaattttacgaaatctaaatttaaccgaaaacaaacgaccccaccctttacgaacttaatacctttctcgaactaaaatcgaccttaaccctaaccttcgaacaccgcccctcacaactacaccacgcgacgctccccaaaccccgccccattttccactacaaaaaactctccgttccgacctcgccccgccgcgcaaccgcaaaacgaacgcacgaacgcgacgcccctctacgaaatacgcatactccccgaacgacaataccgcaaaaaaaacctcgcgcgtaacgccgccccgcccctcccacgccgcaatacgcgaccccgctatcaacctcaccttcgctatcaacctcacctacgcaaacgctcccgcgtcctcgtaataaccgcaattatactaccccaacccaaataaaaacaatcgctcaaacgaacctcgataccgacgcaacccacgttatccaacaacacgaaccgcgccgtaaccgaaataacccaatcccgttaacccaacgcaaacccgcaacccgcttcgcgacaaaccacgcgcgcgtccgcaaaatcccaatcatcgtcgcacacgataccccaacccccgacgtacaacacctccacgcgaccgcgacacgaacccg

SEQ ID NO: 4415 - DNA, 701 bp, Artificial Sequence
  chemically treated genomic DNA (Homo sapiens) CpG-island No: 4415
tattgatttcgtttaaaggttatacgttagttttggtaagggtgatttattttttgtttaatagagttttgcggggtttagatttagtcgggagtaaacggttttattttttacggatttgatgtttttttcgaattgggatcggttttagttttgattttcggatatcgttttttatagttgtattacgcggcgttttttaggtttcgttttattttttattgtagaaggtttttcgtttcggtttcgtttcgtcgcgtagtcgtagagcgggcgtacgagcgcggcgtttttttgcggagtgcgtatgtttttcgggcggtagtgtcgtaagagaggtttcgcgcgtggcgtcgtttcgttttttttacgtcgtagtgcgcggtttcgttgttagttttattttcgttgttagttttatttgcgtagacgttttcgcgttttcgtggtggtcgtagttgtgttgttttagtttaggtggaagtagtcgtttaggcgagtttcggtgtcggcgtagtttacgttgtttagtagtacgggtcgcgtcgtagtcgaagtggtttagtttcgttagtttagcgtaggttcgtagttcgtttcgcggtaggttacgcgcgcgttcgtaaagttttagttatcgtcgtatacggtgttttagttttcggcgtgtaatatttttacgcggtcgcggtacggattcg

SEQ ID NO: 4416 - DNA, 701 bp, Artificial Sequence
  chemically treated genomic DNA (Homo sapiens) CpG-island No: 4416
cgaatccgtaccgcgaccgcgtaaaaatattacacgccgaaaactaaaacaccgtatacgacgataactaaaactttacgaacgcgcgcgtaacctaccgcgaaacgaactacgaacctacgctaaactaacgaaactaaaccacttcgactacgacgcgacccgtactactaaacaacgtaaactacgccgacaccgaaactcgcctaaacgactacttccacctaaactaaaacaacacaactacgaccaccacgaaaacgcgaaaacgtctacgcaaataaaactaacaacgaaaataaaactaacaacgaaaccgcgcactacgacgtaaaaaaaacgaaacgacgccacgcgcgaaacctctcttacgacactaccgcccgaaaaacatacgcactccgcaaaaaaacgccgcgctcgtacgcccgctctacgactacgcgacgaaacgaaaccgaaacgaaaaaccttctacaataaaaaataaaacgaaacctaaaaaacgccgcgtaatacaactataaaaaacgatatccgaaaatcaaaactaaaaccgatcccaattcgaaaaaaacatcaaatccgtaaaaaataaaaccgtttactcccgactaaatctaaaccccgcaaaactctattaaacaaaaaataaatcacccttaccaaaactaacgtataacctttaaacgaaatcaata

SEQ ID NO: 4417 - DNA, 582 bp, Artificial Sequence
  chemically treated genomic DNA (Homo sapiens) CpG-island No: 4417
tcgttgttatttttttggacggttacgcgtgtggatacggtcgcggatggatgcgtaggatattattaaataaatttatacgttgtattttatttttttttttttggagtgttattagggttttcgcgaggagggttgatcgggtgcggggaggtcgagtgtatcgggcgtgtgttgattaattcgggtttagtgatagttttgcgacgaatttttattttttcgcgcggggcgaggggaacgggttgcggggtttgtttcgagttttcggttcgatcggtattcgcgattacgattttcggacgtttttttttaggtgggggtgatagcgcgtttcgggttttcgtcgtttcgggttttcgtcgtttcggattttttttttatttgtgttgttattcgtcgagaaatcgggcgagttgagtttggtttttttggggttgggcggttcgtttagtaagtttttagttatttttatttgttcgcgaaaatagtttcgggtacgggcggtcgggtcggcgagggttcggacgggggtcggggattatatagtttatatttgtaattttaattatttaggaagtt

SEQ ID NO: 4418 - DNA, 582 bp, Artificial Sequence
  chemically treated genomic DNA (Homo sapiens) CpG-island No: 4418
aacttcctaaataattaaaattacaaatataaactatataatccccgacccccgtccgaaccctcgccgacccgaccgcccgtacccgaaactattttcgcgaacaaataaaaataactaaaaacttactaaacgaaccgcccaaccccaaaaaaaccaaactcaactcgcccgatttctcgacgaataacaacacaaataaaaaaaaaatccgaaacgacgaaaacccgaaacgacgaaaacccgaaacgcgctatcacccccacctaaaaaaaaacgtccgaaaatcgtaatcgcgaataccgatcgaaccgaaaactcgaaacaaaccccgcaacccgttcccctcgccccgcgcgaaaaaataaaaattcgtcgcaaaactatcactaaacccgaattaatcaacacacgcccgatacactcgacctccccgcacccgatcaaccctcctcgcgaaaaccctaataacactccaaaaaaaaaaaaataaaatacaacgtataaatttatttaataatatcctacgcatccatccgcgaccgtatccacacgcgtaaccgtccaaaaaaataacaacga

SEQ ID NO: 4419 - DNA, 582 bp, Artificial Sequence
  chemically treated genomic DNA (Homo sapiens) CpG-island No: 4419
agttttttgagtaattgggattataggtgtgagttgtgtgattttcgattttcgttcgggttttcgtcggttcggtcgttcgtgttcggggttgttttcgcgagtaggtgaaaatggttgagaatttgttggacggatcgtttaattttaaaagagttaaatttagttcgttcggtttttcggcgaatgatagtataggtgaggagggggttcggggcggcgggggttcggggcggcgggggttcggggcgcgttgttatttttatttgaaagagagcgttcgggggtcgtggtcgcggatatcgatcgagtcgggagttcggagtaggtttcgtagttcgtttttttcgtttcgcgcgggagggtggaagttcgtcgtaggattgttattgggttcgagttggttagtatacgttcggtgtattcggttttttcgtattcgattagtttttttcgcggggattttagtggtattttaggagggaagaagtaaagtgtagcgtgtgggtttgtttggtaatgttttacgtatttattcgcggtcgtgtttatacgcgtggtcgtttagaggaatgatagcgg

SEQ ID NO: 4420 - DNA, 582 bp, Artificial Sequence
  chemically treated genomic DNA (Homo sapiens) CpG-island No: 4420
ccgctatcattcctctaaacgaccacgcgtataaacacgaccgcgaataaatacgtaaaacattaccaaacaaacccacacgctacactttacttcttccctcctaaaataccactaaaatccccgcgaaaaaaactaatcgaatacgaaaaaaccgaatacaccgaacgtatactaaccaactcgaacccaataacaatcctacgacgaacttccaccctcccgcgcgaaacgaaaaaaacgaactacgaaacctactccgaactcccgactcgatcgatatccgcgaccacgacccccgaacgctctctttcaaataaaaataacaacgcgccccgaacccccgccgccccgaacccccgccgccccgaaccccctcctcacctatactatcattcgccgaaaaaccgaacgaactaaatttaactcttttaaaattaaacgatccgtccaacaaattctcaaccattttcacctactcgcgaaaacaaccccgaacacgaacgaccgaaccgacgaaaacccgaacgaaaatcgaaaatcacacaactcacacctataatcccaattactcaaaaaact

SEQ ID NO: 4421 - DNA, 535 bp, Artificial Sequence
  chemically treated genomic DNA (Homo sapiens) CpG-island No: 4421
cgtcggtgcgttattttttcgcggcgttattacgtacggttttcgtttcgttttttttatttgcgtcggtcgtggcggaaagagtcgagcgtgttcgggtcgaagggttgaaggcgcggtcgttaagcgtagggaagttggcggttcggcgcgggttaggtttgcggggcgtttgggtttcgggttgagttatagtttttgttttgatggcgattaggcgtagagggtcggggtttcgggttttagcgggtttcgggagcggcggtttggtcgcgggttgggttttcgggcgcggattcgacgttagttcgggttcgttcgtttcgttggggcggcgttgcgtgtttttagtttttcgcgtttttttttttagatttttttaggtggcgtcggtcgggaacggtcggggcgattttagtttaggtcgcgttattagttttcgtcgtcggttagggaagtggaatggtttttgtaggttatagatcgtttttgggttttgtcgacgaggtgggcggatggggaaattgaggcgggg

SEQ ID NO: 4422 - DNA, 535 bp, Artificial Sequence
  chemically treated genomic DNA (Homo sapiens) CpG-island No: 4422
ccccgcctcaatttccccatccgcccacctcgtcgacaaaacccaaaaacgatctataacctacaaaaaccattccacttccctaaccgacgacgaaaactaataacgcgacctaaactaaaatcgccccgaccgttcccgaccgacgccacctaaaaaaatctaaaaaaaaaaacgcgaaaaactaaaaacacgcaacgccgccccaacgaaacgaacgaacccgaactaacgtcgaatccgcgcccgaaaacccaacccgcgaccaaaccgccgctcccgaaacccgctaaaacccgaaaccccgaccctctacgcctaatcgccatcaaaacaaaaactataactcaacccgaaacccaaacgccccgcaaacctaacccgcgccgaaccgccaacttccctacgcttaacgaccgcgccttcaacccttcgacccgaacacgctcgactctttccgccacgaccgacgcaaataaaaaaaacgaaacgaaaaccgtacgtaataacgccgcgaaaaaataacgcaccgacg

SEQ ID NO: 4423 - DNA, 535 bp, Artificial Sequence
  chemically treated genomic DNA (Homo sapiens) CpG-island No: 4423
tttcgttttagtttttttattcgtttatttcgtcggtaggatttaagggcggtttgtaatttgtagaggttattttatttttttggtcggcggcgaaggttagtggcgcggtttgggttggggtcgtttcgatcgttttcgatcgacgttatttaggagggtttggggaaggggacgcgaggagttgggaatacgtagcgtcgttttagcgggacgggcgggttcgggttggcgtcgaattcgcgttcgagagtttagttcgcggttaggtcgtcgttttcggagttcgttggggttcggagtttcggttttttacgtttggtcgttattagaataaaagttgtggtttagttcggagtttaggcgtttcgtaggtttggttcgcgtcgggtcgttagtttttttacgtttggcggtcgcgtttttagtttttcggttcgagtacgttcggtttttttcgttacggtcggcgtaggtggagggggcggggcgggggtcgtgcgtggtgacgtcgcgggggggtgacgtatcggcg

SEQ ID NO: 4424 - DNA, 535 bp, Artificial Sequence
  chemically treated genomic DNA (Homo sapiens) CpG-island No: 4424
cgccgatacgtcacccccccgcgacgtcaccacgcacgacccccgccccgccccctccacctacgccgaccgtaacgaaaaaaaccgaacgtactcgaaccgaaaaactaaaaacgcgaccgccaaacgtaaaaaaactaacgacccgacgcgaaccaaacctacgaaacgcctaaactccgaactaaaccacaacttttattctaataacgaccaaacgtaaaaaaccgaaactccgaaccccaacgaactccgaaaacgacgacctaaccgcgaactaaactctcgaacgcgaattcgacgccaacccgaacccgcccgtcccgctaaaacgacgctacgtattcccaactcctcgcgtccccttccccaaaccctcctaaataacgtcgatcgaaaacgatcgaaacgaccccaacccaaaccgcgccactaaccttcgccgccgaccaaaaaaataaaataacctctacaaattacaaaccgcccttaaatcctaccgacgaaataaacgaataaaaaaactaaaacgaaa

SEQ ID NO: 4425 - DNA, 819 bp, Artificial Sequence
  chemically treated genomic DNA (Homo sapiens) CpG-island No: 4425
gataggcggttagggtataaaggggatttcgttaggaggagagaaagtcgttcggggtagggcgtttaggttattggggcgttgttatggggttaaagatttggtcgtcgttttttttattcggtttgcgttttttttttttttcggcgttcgttcgttcgttcgcggttcgcgttcgtttttttttttcgtagtcggtagggttttcgattttcgttcgggttttcgtcggttcggtcgttcgtgttcggggttgttttcgcgagtaggtgaaaatggttgagaatttgttggacggatcgtttaattttaaaagagttaaatttagttcgttcggtttttcggcgaatgatagtataggtgaggagggggttcggggcggcgggggttcggggcgcgttgttatttttatttgaaagagagcgttcgggggtcgtggtcgcggatatcgatcgagtcgggagttcggagtaggtttcgtagttcgtttttttcgtttcgcgcgggagggtggaagttcgtcgtaggattgttattgggttcgagttggttagtatacgttcggtgtattcggttttttcgtattcgattagtttttttcgcggggattttagtggtattttaggagggaagaagtaaagtgtagcgtgtgggtttgtttggtaatgttttacgtatttattcgcggtcgtgtttatacgcgtggtcgtttagaggaatgatagcggagggtatttttgatgtttagagaaagtaagatcgcggttaaaggtagggtagtgtgttttttggattggcgatatattgattaggttgtat

SEQ ID NO: 4426 - DNA, 819 bp, Artificial Sequence
  chemically treated genomic DNA (Homo sapiens) CpG-island No: 4426
atacaacctaatcaatatatcgccaatccaaaaaacacactaccctacctttaaccgcgatcttactttctctaaacatcaaaaataccctccgctatcattcctctaaacgaccacgcgtataaacacgaccgcgaataaatacgtaaaacattaccaaacaaacccacacgctacactttacttcttccctcctaaaataccactaaaatccccgcgaaaaaaactaatcgaatacgaaaaaaccgaatacaccgaacgtatactaaccaactcgaacccaataacaatcctacgacgaacttccaccctcccgcgcgaaacgaaaaaaacgaactacgaaacctactccgaactcccgactcgatcgatatccgcgaccacgacccccgaacgctctctttcaaataaaaataacaacgcgccccgaacccccgccgccccgaaccccctcctcacctatactatcattcgccgaaaaaccgaacgaactaaatttaactcttttaaaattaaacgatccgtccaacaaattctcaaccattttcacctactcgcgaaaacaaccccgaacacgaacgaccgaaccgacgaaaacccgaacgaaaatcgaaaaccctaccgactacgaaaaaaaaaaacgaacgcgaaccgcgaacgaacgaacgaacgccgaaaaaaaaaaaaaacgcaaaccgaataaaaaaaacgacgaccaaatctttaaccccataacaacgccccaataacctaaacgccctaccccgaacgactttctctcctcctaacgaaatcccctttataccctaaccgcctatc

SEQ ID NO: 4427 - DNA, 819 bp, Artificial Sequence
  chemically treated genomic DNA (Homo sapiens) CpG-island No: 4427
atgtagtttggttaatgtgtcgttaatttagaaaatatattgttttatttttggtcgcgattttgttttttttaagtattaaaggtatttttcgttgttatttttttggacggttacgcgtgtggatacggtcgcggatggatgcgtaggatattattaaataaatttatacgttgtattttatttttttttttttggagtgttattagggttttcgcgaggagggttgatcgggtgcggggaggtcgagtgtatcgggcgtgtgttgattaattcgggtttagtgatagttttgcgacgaatttttattttttcgcgcggggcgaggggaacgggttgcggggtttgtttcgagttttcggttcgatcggtattcgcgattacgattttcggacgtttttttttaggtgggggtgatagcgcgtttcgggttttcgtcgtttcggattttttttttatttgtgttgttattcgtcgagaaatcgggcgagttgagtttggtttttttggggttgggcggttcgtttagtaagtttttagttatttttatttgttcgcgaaaatagtttcgggtacgggcggtcgggtcggcgagggttcggacgggggtcgggggttttgtcggttgcgagggagaggagcgagcgcgggtcgcgagcgggcgggcgggcgtcgagggagagggagggcgtaagtcgggtgggggaggcggcggttaaatttttaattttataatagcgttttaataatttaaacgttttgtttcggacgattttttttttttttgacggggttttttttatattttgatcgtttatt

SEQ ID NO: 4428 - DNA, 819 bp, Artificial Sequence
  chemically treated genomic DNA (Homo sapiens) CpG-island No: 4428
aataaacgatcaaaatataaaaaaaaccccgtcaaaaaaaaaaaaaatcgtccgaaacaaaacgtttaaattattaaaacgctattataaaattaaaaatttaaccgccgcctcccccacccgacttacgccctccctctccctcgacgcccgcccgcccgctcgcgacccgcgctcgctcctctccctcgcaaccgacaaaacccccgacccccgtccgaaccctcgccgacccgaccgcccgtacccgaaactattttcgcgaacaaataaaaataactaaaaacttactaaacgaaccgcccaaccccaaaaaaaccaaactcaactcgcccgatttctcgacgaataacaacacaaataaaaaaaaaatccgaaacgacgaaaacccgaaacgcgctatcacccccacctaaaaaaaaacgtccgaaaatcgtaatcgcgaataccgatcgaaccgaaaactcgaaacaaaccccgcaacccgttcccctcgccccgcgcgaaaaaataaaaattcgtcgcaaaactatcactaaacccgaattaatcaacacacgcccgatacactcgacctccccgcacccgatcaaccctcctcgcgaaaaccctaataacactccaaaaaaaaaaaaataaaatacaacgtataaatttatttaataatatcctacgcatccatccgcgaccgtatccacacgcgtaaccgtccaaaaaaataacaacgaaaaatacctttaatacttaaaaaaaacaaaatcgcgaccaaaaataaaacaatatattttctaaattaacgacacattaaccaaactacat

SEQ ID NO: 4429 - DNA, 930 bp, Artificial Sequence
  chemically treated genomic DNA (Homo sapiens) CpG-island No: 4429
tcgagtcgttagtgggaagcgagaggtgcggagttttaggggcgtagggatttttcggaggtgtaagtttagcgggacgaggttttgggagaatttcgagggtttttcgtaagttttttcgcgtatttatttcgatttaggtaatcggaggttatttacgtgttattgggcgggtttcggggcgtattgatttggcgcgggataggagggtcggcggttcgggcggttgcggtaatttttttttaggggttcggttcgtcgttgggtgcgggaggttaggggagtttcgttttttgtaggtcggttcgtaagaacgtacggttatttattcgcgtcgcggtttatagcgcgtatttatatttttattggtattcgtacgcgcgtttttaattataaagttcgttcgcggcgggatagtgtgagtttagcgcgtcgtgtggcgggtcgagtagtcgtcgcggtttttggtttcgcgtttagggggcgtcgtttttatacgtcgcgtcggtttttttatttgcgttcgttgtcgtcgcgcgttttttttttgtcgttttcgggttggttttaggtcgcgcgtttagtttcggcggttttcgttttatcgttagtcgagttcggtttttcgttcgtttttcggtagtcgtttagagcggggtcgttttttgcgtttatttcgtcggggtttcgtgttcggtcgggcggcggggagggtttcgcggtttcgggttttggtcgttttagattcggttcgcgtttcgtagcggggttggagacggagtcgttatttagggagcgttagtcgttagtcggtttttattgttcggttttggcgcgttggtaggaggagggggcgtagagggagggttagaggagtagcgtcgacgttagtttttttttttttttcgtttttttttttttttgtttgtt

SEQ ID NO: 4430 - DNA, 930 bp, Artificial Sequence
  chemically treated genomic DNA (Homo sapiens) CpG-island No: 4430
aacaaacaaaaaaaaaaaaaaacgaaaaaaaaaaaaaaactaacgtcgacgctactcctctaaccctccctctacgccccctcctcctaccaacgcgccaaaaccgaacaataaaaaccgactaacgactaacgctccctaaataacgactccgtctccaaccccgctacgaaacgcgaaccgaatctaaaacgaccaaaacccgaaaccgcgaaaccctccccgccgcccgaccgaacacgaaaccccgacgaaataaacgcaaaaaacgaccccgctctaaacgactaccgaaaaacgaacgaaaaaccgaactcgactaacgataaaacgaaaaccgccgaaactaaacgcgcgacctaaaaccaacccgaaaacgacaaaaaaaaaacgcgcgacgacaacgaacgcaaataaaaaaaccgacgcgacgtataaaaacgacgccccctaaacgcgaaaccaaaaaccgcgacgactactcgacccgccacacgacgcgctaaactcacactatcccgccgcgaacgaactttataattaaaaacgcgcgtacgaataccaataaaaatataaatacgcgctataaaccgcgacgcgaataaataaccgtacgttcttacgaaccgacctacaaaaaacgaaactcccctaacctcccgcacccaacgacgaaccgaacccctaaaaaaaaattaccgcaaccgcccgaaccgccgaccctcctatcccgcgccaaatcaatacgccccgaaacccgcccaataacacgtaaataacctccgattacctaaatcgaaataaatacgcgaaaaaacttacgaaaaaccctcgaaattctcccaaaacctcgtcccgctaaacttacacctccgaaaaatccctacgcccctaaaactccgcacctctcgcttcccactaacgactcga

SEQ ID NO: 4431 - DNA, 930 bp, Artificial Sequence
  chemically treated genomic DNA (Homo sapiens) CpG-island No: 4431
aataagtagaaaagaaggaaggcggaggaagagaggaggttggcgtcggcgttgtttttttggttttttttttgcgttttttttttttgttagcgcgttaaagtcgggtagtaggggtcgattggcggttgacgttttttgagtggcgatttcgtttttagtttcgttgcggagcgcgggtcggatttggggcggttagggttcggagtcgcggagtttttttcgtcgttcggtcgagtacgggatttcggcggggtgggcgtagggggcggtttcgttttgggcgattgtcgaggggcgggcggagggtcgggttcggttggcggtggggcgggggtcgtcgggattgggcgcgcggtttgaagttagttcgggggcggtaggagagggacgcgcggcggtagcgagcgtaggtaagggggtcggcgcggcgtgtggggacggcgttttttgggcgcgaagttagaggtcgcggcgattgttcggttcgttatacggcgcgttgggtttatattgtttcgtcgcggacgggttttgtggttgggggcgcgcgtgcgagtgttagtgagagtgtgggtgcgcgttgtgggtcgcggcgcgggtgggtggtcgtgcgtttttgcgagtcggtttgtaggaggcgaggtttttttggtttttcgtatttagcggcggatcgagtttttggagggaagttgtcgtagtcgttcgggtcgtcggtttttttgtttcgcgttaggttagtgcgtttcggggttcgtttagtgatacgtaggtggttttcggttatttgggtcggggtgggtgcgcgggagggtttgcgaggggttttcgaaatttttttaaaatttcgtttcgttggatttgtattttcgaggggtttttgcgtttttggggtttcgtatttttcgttttttattgacgattcgg

SEQ ID NO: 4432 - DNA, 930 bp, Artificial Sequence
  chemically treated genomic DNA (Homo sapiens) CpG-island No: 4432
ccgaatcgtcaataaaaaacgaaaaatacgaaaccccaaaaacgcaaaaacccctcgaaaatacaaatccaacgaaacgaaattttaaaaaaatttcgaaaacccctcgcaaaccctcccgcgcacccaccccgacccaaataaccgaaaaccacctacgtatcactaaacgaaccccgaaacgcactaacctaacgcgaaacaaaaaaaccgacgacccgaacgactacgacaacttccctccaaaaactcgatccgccgctaaatacgaaaaaccaaaaaaacctcgcctcctacaaaccgactcgcaaaaacgcacgaccacccacccgcgccgcgacccacaacgcgcacccacactctcactaacactcgcacgcgcgcccccaaccacaaaacccgtccgcgacgaaacaatataaacccaacgcgccgtataacgaaccgaacaatcgccgcgacctctaacttcgcgcccaaaaaacgccgtccccacacgccgcgccgacccccttacctacgctcgctaccgccgcgcgtccctctcctaccgcccccgaactaacttcaaaccgcgcgcccaatcccgacgacccccgccccaccgccaaccgaacccgaccctccgcccgcccctcgacaatcgcccaaaacgaaaccgccccctacgcccaccccgccgaaatcccgtactcgaccgaacgacgaaaaaaactccgcgactccgaaccctaaccgccccaaatccgacccgcgctccgcaacgaaactaaaaacgaaatcgccactcaaaaaacgtcaaccgccaatcgacccctactacccgactttaacgcgctaacaaaaaaaaaaaacgcaaaaaaaaaaccaaaaaaacaacgccgacgccaacctcctctcttcctccgccttccttcttttctacttatt

SEQ ID NO: 4433 - DNA, 768 bp, Artificial Sequence
  chemically treated genomic DNA (Homo sapiens) CpG-island No: 4433
ttttttcgttggacgttgttttattttttagcgtttttgtttaggtcgcggtttaggcgaggttttagaaaatttcggtgttggttaattagttttgagttcgagcgcgtttagtgcgtaacgtggtttttttattggtttatttagtgggtcgcgcgtcgacgtcggggtttcggattgaacggcgcgtttaggtttttgtttttagttagacgtggcgttatcgtttttagttcgtagtttcggcgtagttaatggcggcgtttttcgggcggtaagcgcggtttttcgtcgttagagggcgtcgtcgcgggcgtaatcgagtcgttgtcgtcgtcgttaatcgagggagagttgcgagcgagtatttaggtttcgtcgtcgtcgtcgttatcgttgttcgtttgtcgtcgttcgttttcgtttgttttttgtcgtcggtcggcgcgtcgtttttataggtaggggtagggggacgtcgtcgggtatgaaggaaacgcgcgcgttcgcgttttcgtttttttcgcgcgcgtcgtcgtttcgtgttcgcgcgcggtcgttaacggacggcgggcggggcgggggaggggcggcggggttcggggttcgcggattcgagaggattttgagaggagtcgggtcggggtttgtgcgcgcggagggacgggtgggcgcgtcgttttttttttttatcgagaataacgtgatttatttttgtttgttattttttcggtaaaatgttttttttttggtgattttattaaaaaa

SEQ ID NO: 4434 - DNA, 768 bp, Artificial Sequence
  chemically treated genomic DNA (Homo sapiens) CpG-island No: 4434
ttttttaataaaatcaccaaaaaaaaaacattttaccgaaaaaataacaaacaaaaataaatcacgttattctcgataaaaaaaaaaaacgacgcgcccacccgtccctccgcgcgcacaaaccccgacccgactcctctcaaaatcctctcgaatccgcgaaccccgaaccccgccgcccctcccccgccccgcccgccgtccgttaacgaccgcgcgcgaacacgaaacgacgacgcgcgcgaaaaaaacgaaaacgcgaacgcgcgcgtttccttcatacccgacgacgtccccctacccctacctataaaaacgacgcgccgaccgacgacaaaaaacaaacgaaaacgaacgacgacaaacgaacaacgataacgacgacgacgacgaaacctaaatactcgctcgcaactctccctcgattaacgacgacgacaacgactcgattacgcccgcgacgacgccctctaacgacgaaaaaccgcgcttaccgcccgaaaaacgccgccattaactacgccgaaactacgaactaaaaacgataacgccacgtctaactaaaaacaaaaacctaaacgcgccgttcaatccgaaaccccgacgtcgacgcgcgacccactaaataaaccaataaaaaaaccacgttacgcactaaacgcgctcgaactcaaaactaattaaccaacaccgaaattttctaaaacctcgcctaaaccgcgacctaaacaaaaacgctaaaaaataaaacaacgtccaacgaaaaaa

SEQ ID NO: 4435 - DNA, 768 bp, Artificial Sequence
  chemically treated genomic DNA (Homo sapiens) CpG-island No: 4435
ttttttagtgaaattattaaaaaggagatattttgtcgagggaatggtaggtagaagtgggttacgttattttcggtgggggaaggggacggcgcgtttattcgttttttcgcgcgtataggtttcggttcggttttttttagggttttttcgggttcgcgggtttcggatttcgtcgtttttttttcgtttcgttcgtcgttcgttaacggtcgcgcgcgagtacgaggcggcggcgcgcgcggggggggcgggggcgcgggcgcgcgcgttttttttatgttcggcggcgtttttttatttttatttgtggggacgacgcgtcggtcggcggtagaaggtaggcggaggcgggcggcggtaggcgggtagcggtggcggcggcggcggcggggtttgggtgttcgttcgtagttttttttcggttagcggcggcggtagcggttcggttgcgttcgcggcggcgttttttagcggcgggaggtcgcgtttgtcgttcgggagacgtcgttattggttgcgtcggagttacgggttgggggcggtggcgttacgtttgattgggggtagggatttgggcgcgtcgtttaattcggagtttcggcgtcgacgcgcggtttattgggtgagttaatgggaaggttacgttgcgtattggacgcgttcggatttaagattgattaattagtatcggggttttttggggtttcgtttgggtcgcggtttgagtagaagcgttaggaggtagaatagcgtttagcggggaga

SEQ ID NO: 4436 - DNA, 768 bp, Artificial Sequence
  chemically treated genomic DNA (Homo sapiens) CpG-island No: 4436
tctccccgctaaacgctattctacctcctaacgcttctactcaaaccgcgacccaaacgaaaccccaaaaaaccccgatactaattaatcaatcttaaatccgaacgcgtccaatacgcaacgtaaccttcccattaactcacccaataaaccgcgcgtcgacgccgaaactccgaattaaacgacgcgcccaaatccctacccccaatcaaacgtaacgccaccgcccccaacccgtaactccgacgcaaccaataacgacgtctcccgaacgacaaacgcgacctcccgccgctaaaaaacgccgccgcgaacgcaaccgaaccgctaccgccgccgctaaccgaaaaaaaactacgaacgaacacccaaaccccgccgccgccgccgccaccgctacccgcctaccgccgcccgcctccgcctaccttctaccgccgaccgacgcgtcgtccccacaaataaaaataaaaaaacgccgccgaacataaaaaaaacgcgcgcgcccgcgcccccgccccccccgcgcgcgccgccgcctcgtactcgcgcgcgaccgttaacgaacgacgaacgaaacgaaaaaaaaacgacgaaatccgaaacccgcgaacccgaaaaaaccctaaaaaaaaccgaaccgaaacctatacgcgcgaaaaaacgaataaacgcgccgtccccttcccccaccgaaaataacgtaacccacttctacctaccattccctcgacaaaatatctcctttttaataatttcactaaaaaa

SEQ ID NO: 4437 - DNA, 746 bp, Artificial Sequence
  chemically treated genomic DNA (Homo sapiens) CpG-island No: 4437
gcgcggcgagagtagattatagcggtgttaaggttttaagtatttttcgcgggttttattttaagggagtagtttttttacgtttcgcgacggcgtttgcgtagatttcgtgagcggggtcgtgatcggtggggttaagattgggttgcgggcggggaaggttttcgtgtatttacgtagggtgtagggcgtggttcgttgggggcggggatttgggcggtgtcggtgttcgttcggatttcgtgagcggtgggcggagttgcgtgttttggggtgtgaggtggggcggatttcgcggcggcggcgcggttgacgtggagcgttcgggttagcgggtgcggcgagttgcgggattggggagtaacgggtcgggtcgggttttcgggttcgaggcggcggcggcggtataaagtcggcgattgggagtatgtaatgtcggaatgcggaggtcgcggcggcggtagtagtagtagcgaggacgtcgaggacgagggagggggcggcggcggtttcgcgggtttagattgttttagttcgagttcgattttggttatagcgttttcggcgggtcggtttcgtcgcgggttgcgtggcgttttttttatggcgcgttagcggtcggagttgttttgcggggtcgtggcgttcggttgcgcgttgtttttcgtttttaagtttatttgtaggtgaggcggttcggattttggggtttcgttagggcgttttttttgttttgtcgtttggag

SEQ ID NO: 4438 - DNA, 746 bp, Artificial Sequence
  chemically treated genomic DNA (Homo sapiens) CpG-island No: 4438
ctccaaacgacaaaacaaaaaaaacgccctaacgaaaccccaaaatccgaaccgcctcacctacaaataaacttaaaaacgaaaaacaacgcgcaaccgaacgccacgaccccgcaaaacaactccgaccgctaacgcgccataaaaaaaacgccacgcaacccgcgacgaaaccgacccgccgaaaacgctataaccaaaatcgaactcgaactaaaacaatctaaacccgcgaaaccgccgccgccccctccctcgtcctcgacgtcctcgctactactactaccgccgccgcgacctccgcattccgacattacatactcccaatcgccgactttataccgccgccgccgcctcgaacccgaaaacccgacccgacccgttactccccaatcccgcaactcgccgcacccgctaacccgaacgctccacgtcaaccgcgccgccgccgcgaaatccgccccacctcacaccccaaaacacgcaactccgcccaccgctcacgaaatccgaacgaacaccgacaccgcccaaatccccgcccccaacgaaccacgccctacaccctacgtaaatacacgaaaaccttccccgcccgcaacccaatcttaaccccaccgatcacgaccccgctcacgaaatctacgcaaacgccgtcgcgaaacgtaaaaaaactactcccttaaaataaaacccgcgaaaaatacttaaaaccttaacaccgctataatctactctcgccgcgc

SEQ ID NO: 4439 - DNA, 746 bp, Artificial Sequence
  chemically treated genomic DNA (Homo sapiens) CpG-island No: 4439
ttttaggcggtagagtaaggggagcgttttagcggggttttagggttcgggtcgttttatttgtaggtgaatttgagggcgaggagtagcgcgtagtcgagcgttacggtttcgtagagtagtttcggtcgttggcgcgttatgaggaaggcgttacgtagttcgcgacggagtcggttcgtcgaggacgttgtggttagggtcgggttcgagttgaggtagtttgagttcgcggggtcgtcgtcgttttttttttcgttttcggcgttttcgttgttgttgttgtcgtcgtcgcggttttcgtatttcgatattatatgtttttagtcgtcggttttatatcgtcgtcgtcgtttcgggttcgaaggttcggttcggttcgttgttttttaatttcgtagttcgtcgtattcgttaattcggacgttttacgttagtcgcgtcgtcgtcgcggggttcgttttattttatattttagagtacgtagtttcgtttatcgtttacggagttcgggcgggtatcgatatcgtttaaattttcgtttttaacgggttacgttttgtattttacgtaaatgtacggaagtttttttcgttcgtagtttagttttggttttatcggttacgatttcgtttacggagtttgcgtaggcgtcgtcgcggggcgtggagaagttgtttttttgggataaggttcgcggggaatatttggaattttgatatcgttgtagtttgttttcgtcgcgt

SEQ ID NO: 4440 - DNA, 746 bp, Artificial Sequence
  chemically treated genomic DNA (Homo sapiens) CpG-island No: 4440
acgcgacgaaaacaaactacaacgatatcaaaattccaaatattccccgcgaaccttatcccaaaaaaacaacttctccacgccccgcgacgacgcctacgcaaactccgtaaacgaaatcgtaaccgataaaaccaaaactaaactacgaacgaaaaaaacttccgtacatttacgtaaaatacaaaacgtaacccgttaaaaacgaaaatttaaacgatatcgatacccgcccgaactccgtaaacgataaacgaaactacgtactctaaaatataaaataaaacgaaccccgcgacgacgacgcgactaacgtaaaacgtccgaattaacgaatacgacgaactacgaaattaaaaaacaacgaaccgaaccgaaccttcgaacccgaaacgacgacgacgatataaaaccgacgactaaaaacatataatatcgaaatacgaaaaccgcgacgacgacaacaacaacaacgaaaacgccgaaaacgaaaaaaaaaacgacgacgaccccgcgaactcaaactacctcaactcgaacccgaccctaaccacaacgtcctcgacgaaccgactccgtcgcgaactacgtaacgccttcctcataacgcgccaacgaccgaaactactctacgaaaccgtaacgctcgactacgcgctactcctcgccctcaaattcacctacaaataaaacgacccgaaccctaaaaccccgctaaaacgctccccttactctaccgcctaaaa

SEQ ID NO: 4441 - DNA, 698 bp, Artificial Sequence
  chemically treated genomic DNA (Homo sapiens) CpG-island No: 4441
gggagcgtcgtatttatattagttaatttagatttcgaggttcgatagcgttcggtttagatttttacgtttgttaggagtaagtcgagagttagtcggtcggcgtatttcgatttcgagtagtttttgtttttcgattcgagtttcgcgtttttttcgggatttttgtttcgcgggtagcgttgttaatttgtcggttatggagatttcgttttagcggcgcgttattcgtagcggggcgtaggttagttttatttcgttgtcgtttattcgtattattcggttgtaggagaaggaggatttgtaggagtttaatgatcgtttggcggtttatatcgatcgtgtgcgttcgttggaaacggagaacgtagggttgcgttttcgtattatcgagtttgaagaggtggttagtcgcgaggtgttcggtattaaggtcgtttacgaggtcgagttcggggatgttcgtaagatttttgatttagtagttaaggagcgcgttcgtttgtagttggagttgagtaaagtgcgtgaggagtttaaggagttgaaagcgcggtgagttcgtttaggtggttgcgtgtttggcggggagtggagagggcggcgggtcggcgtttttggtcggtcgtaggaagggagtgagagggtttggaggtcgataattttgttatagtttttttttttttcggaattgtttt

SEQ ID NO: 4442 - DNA, 698 bp, Artificial Sequence
  chemically treated genomic DNA (Homo sapiens) CpG-island No: 4442
aaaacaattccgaaaaaaaaaaaaactataacaaaattatcgacctccaaaccctctcactcccttcctacgaccgaccaaaaacgccgacccgccgccctctccactccccgccaaacacgcaaccacctaaacgaactcaccgcgctttcaactccttaaactcctcacgcactttactcaactccaactacaaacgaacgcgctccttaactactaaatcaaaaatcttacgaacatccccgaactcgacctcgtaaacgaccttaataccgaacacctcgcgactaaccacctcttcaaactcgataatacgaaaacgcaaccctacgttctccgtttccaacgaacgcacacgatcgatataaaccgccaaacgatcattaaactcctacaaatcctccttctcctacaaccgaataatacgaataaacgacaacgaaataaaactaacctacgccccgctacgaataacgcgccgctaaaacgaaatctccataaccgacaaattaacaacgctacccgcgaaacaaaaatcccgaaaaaaacgcgaaactcgaatcgaaaaacaaaaactactcgaaatcgaaatacgccgaccgactaactctcgacttactcctaacaaacgtaaaaatctaaaccgaacgctatcgaacctcgaaatctaaattaactaatataaatacgacgctccc

SEQ ID NO: 4443 - DNA, 698 bp, Artificial Sequence
  chemically treated genomic DNA (Homo sapiens) CpG-island No: 4443
ggggtagtttcggggagggaggagattatggtaaagttatcggtttttaggtttttttattttttttttgcggtcggttaggggcgtcggttcgtcgttttttttatttttcgttaggtacgtagttatttgggcgaatttatcgcgtttttagttttttaaattttttacgtattttgtttagttttagttgtaggcgggcgcgttttttggttattgagttaagggttttgcgggtattttcgagttcggtttcgtaggcggttttgatgtcggatatttcgcggttgattatttttttagattcggtgatgcgaaggcgtagttttgcgtttttcgtttttagcgagcgtatacggtcgatgtagatcgttaagcgattattgagtttttgtaggtttttttttttttgtagtcgggtgatgcgggtgggcgatagcggagtggagttggtttgcgtttcgttgcgggtggcgcgtcgttgggacggggtttttatggtcggtaggttggtagcgttgttcgcggggtaggggtttcggaaagggcgcggggttcgggtcgaaggatagagattgttcggagtcggagtgcgtcggtcggttggttttcggtttgtttttggtaggcgtggggatttgggtcgggcgttgtcggatttcgggatttgggttggttggtgtaggtgcggcgttttt

SEQ ID NO: 4444 - DNA, 698 bp, Artificial Sequence
  chemically treated genomic DNA (Homo sapiens) CpG-island No: 4444
aaaaacgccgcacctacaccaaccaacccaaatcccgaaatccgacaacgcccgacccaaatccccacgcctaccaaaaacaaaccgaaaaccaaccgaccgacgcactccgactccgaacaatctctatccttcgacccgaaccccgcgccctttccgaaacccctaccccgcgaacaacgctaccaacctaccgaccataaaaaccccgtcccaacgacgcgccacccgcaacgaaacgcaaaccaactccactccgctatcgcccacccgcatcacccgactacaaaaaaaaaaaaacctacaaaaactcaataatcgcttaacgatctacatcgaccgtatacgctcgctaaaaacgaaaaacgcaaaactacgccttcgcatcaccgaatctaaaaaaataatcaaccgcgaaatatccgacatcaaaaccgcctacgaaaccgaactcgaaaatacccgcaaaacccttaactcaataaccaaaaaacgcgcccgcctacaactaaaactaaacaaaatacgtaaaaaatttaaaaaactaaaaacgcgataaattcgcccaaataactacgtacctaacgaaaaataaaaaaaacgacgaaccgacgcccctaaccgaccgcaaaaaaaaaataaaaaaacctaaaaaccgataactttaccataatctcctccctccccgaaactacccc

SEQ ID NO: 4445 - DNA, 553 bp, Artificial Sequence
  chemically treated genomic DNA (Homo sapiens) CpG-island No: 4445
agtttcgttttttcgttgtttttagttttcgatgattttttcgttttcgttttgttcggtgatagacgttttattgtttttaatcggaggtatttttcgcgggagcggttaatcgggagtttcggtaggcggggaggtcgggttagttagatttggaggtttaattttaatatggtcgaagtaagtagcgttaatttaggtagcggttgtgaggaaaaaaggtatgaggggtcgttttcggaatttgtgttattcggtattattatttcgagggtgaagtttttcgatattatggtggatatttttttttagaagttggtcgtcgtcggtaggtaaagtggacgtagtcgcggtgggagtgtttgttggtatcgaagtttaaatttcgcgaggttaggacggtcgtaggttggcgcgcggtgacgtgggttcgcgttgggggcggggtagtcggacgaggcgatttagttaaattttgagttttaggagttagggtatttacgtattgataatttgtagcggatcgggatagttagttatttttttttatagg

SEQ ID NO: 4446 - DNA, 553 bp, Artificial Sequence
  chemically treated genomic DNA (Homo sapiens) CpG-island No: 4446
cctataaaaaaaaataactaactatcccgatccgctacaaattatcaatacgtaaataccctaactcctaaaactcaaaatttaactaaatcgcctcgtccgactaccccgcccccaacgcgaacccacgtcaccgcgcgccaacctacgaccgtcctaacctcgcgaaatttaaacttcgataccaacaaacactcccaccgcgactacgtccactttacctaccgacgacgaccaacttctaaaaaaaaatatccaccataatatcgaaaaacttcaccctcgaaataataataccgaataacacaaattccgaaaacgacccctcataccttttttcctcacaaccgctacctaaattaacgctacttacttcgaccatattaaaattaaacctccaaatctaactaacccgacctccccgcctaccgaaactcccgattaaccgctcccgcgaaaaatacctccgattaaaaacaataaaacgtctatcaccgaacaaaacgaaaacgaaaaaatcatcgaaaactaaaaacaacgaaaaaacgaaact

SEQ ID NO: 4447 - DNA, 553 bp, Artificial Sequence
  chemically treated genomic DNA (Homo sapiens) CpG-island No: 4447
tttgtaggaaggagtagttagttatttcggttcgttataggttattagtgcgtgaatattttgatttttaaggtttaggatttgattgggtcgtttcgttcgattgtttcgtttttaacgcggatttacgttatcgcgcgttagtttgcggtcgttttgatttcgcgggatttgagtttcggtgttaataaatatttttatcgcggttgcgtttattttatttgtcggcggcgattagtttttgaagaaaagtgtttattatggtgtcgaggagttttattttcgaaatggtagtgtcgggtggtatagatttcgaagacgattttttatgttttttttttttatagtcgttgtttagattggcgttatttgtttcggttatgttgaagttgaatttttaaatttaattggttcggttttttcgtttgtcggagttttcgattggtcgttttcgcgaagggtgttttcgattggaagtagtagaacgtttgttatcgagtagggcgggggcggggaagttatcggaggttgagggtagcggggaggcgaggtt

SEQ ID NO: 4448 - DNA, 553 bp, Artificial Sequence
  chemically treated genomic DNA (Homo sapiens) CpG-island No: 4448
aacctcgcctccccgctaccctcaacctccgataacttccccgcccccgccctactcgataacaaacgttctactacttccaatcgaaaacacccttcgcgaaaacgaccaatcgaaaactccgacaaacgaaaaaaccgaaccaattaaatttaaaaattcaacttcaacataaccgaaacaaataacgccaatctaaacaacgactataaaaaaaaaaaacataaaaaatcgtcttcgaaatctataccacccgacactaccatttcgaaaataaaactcctcgacaccataataaacacttttcttcaaaaactaatcgccgccgacaaataaaataaacgcaaccgcgataaaaatatttattaacaccgaaactcaaatcccgcgaaatcaaaacgaccgcaaactaacgcgcgataacgtaaatccgcgttaaaaacgaaacaatcgaacgaaacgacccaatcaaatcctaaaccttaaaaatcaaaatattcacgcactaataacctataacgaaccgaaataactaactactccttcctacaaa

SEQ ID NO: 4449 - DNA, 1128 bp, Artificial Sequence
  chemically treated genomic DNA (Homo sapiens) CpG-island No: 4449
gtttttgataaagtattaaaggatttatacgggagaaaagtcgtttgagtgtgatatttgtgggaagtattttatcgagcgttcgttttttattatttattagcgggtgtatacgggcgagaagttttatgtttgcggggattgcggtaaggtttttagttagcgtatgaattttattgtgtattagcgtacgtatacgggcgagaagtcgtatgtgtgcgacgtgtgtggtaaggtttttcggaagatttttttttttatttagtacgagcggatttatacgggggagaagttttacgcgtgcggggattgcggtaaggtttttagttagaatatgtattttatcgtgtattagcgtacgtatatcggggagaagtcgtacgtgtgtttcgagtgcgggcgagtttttagttagaatatgtatttgatcgagtattagcgtacgtatatcggggagaagtcgtacgtttgtaaggagtgcggtaaggtttttaataagagtttttcgtttattttgtattagaggaattatatcggcgagaagttttacgtgtgcggcgagtgcggtaaggtttttagttagagtttttattttatttagtattagcgtttttatatcggcgtgaagtcgttcgagtgtagcgagtgcggtaaggtttttagtaagaatttttcgtttacgtagtattagcgtatttatatcggcgagaagttttacgagtgttatatttgtaagaagtattttacggggcgttcgttttttatcgtgtattagatcgtgtatatcggggagaagttttacgtgtgcggcgagtgcggtaaggtttttagttagagcgtttattttatcgagtattagcggatttatatcggcgagaagtcgtataggtgcggttagtgcgggaagttttttattaagaattttttttttattgtgtattagcggatttatacgggcgagaagttttatcgatgcggcgagtgcgggaagatttttagtcgtaatacgaatttgacgcgttatttgcggatttatatttgagcgtttttgtgtagggtttttattggcggtgtttaggacggacgttagatggttgcgcgttttgttagtagtgttgtgagaagttt

SEQ ID NO: 4450 - DNA, 1128 bp, Artificial Sequence
  chemically treated genomic DNA (Homo sapiens) CpG-island No: 4450
aaacttctcacaacactactaacaaaacgcgcaaccatctaacgtccgtcctaaacaccgccaataaaaaccctacacaaaaacgctcaaatataaatccgcaaataacgcgtcaaattcgtattacgactaaaaatcttcccgcactcgccgcatcgataaaacttctcgcccgtataaatccgctaatacacaataaaaaaaaaattcttaataaaaaacttcccgcactaaccgcacctatacgacttctcgccgatataaatccgctaatactcgataaaataaacgctctaactaaaaaccttaccgcactcgccgcacacgtaaaacttctccccgatatacacgatctaatacacgataaaaaacgaacgccccgtaaaatacttcttacaaatataacactcgtaaaacttctcgccgatataaatacgctaatactacgtaaacgaaaaattcttactaaaaaccttaccgcactcgctacactcgaacgacttcacgccgatataaaaacgctaatactaaataaaataaaaactctaactaaaaaccttaccgcactcgccgcacacgtaaaacttctcgccgatataattcctctaatacaaaataaacgaaaaactcttattaaaaaccttaccgcactccttacaaacgtacgacttctccccgatatacgtacgctaatactcgatcaaatacatattctaactaaaaactcgcccgcactcgaaacacacgtacgacttctccccgatatacgtacgctaatacacgataaaatacatattctaactaaaaaccttaccgcaatccccgcacgcgtaaaacttctcccccgtataaatccgctcgtactaaataaaaaaaaaaatcttccgaaaaaccttaccacacacgtcgcacacatacgacttctcgcccgtatacgtacgctaatacacaataaaattcatacgctaactaaaaaccttaccgcaatccccgcaaacataaaacttctcgcccgtatacacccgctaataaataataaaaaacgaacgctcgataaaatacttcccacaaatatcacactcaaacgacttttctcccgtataaatcctttaatactttatcaaaaac

SEQ ID NO: 4451 - DNA, 1128 bp, Artificial Sequence
  chemically treated genomic DNA (Homo sapiens) CpG-island No: 4451
gaattttttatagtattgttgataaagcgcgtagttatttggcgttcgttttgggtatcgttagtgagagttttgtatagaggcgtttaggtgtgaattcgtaggtggcgcgttaggttcgtgttgcggttgaaggttttttcgtattcgtcgtatcggtagggtttttcgttcgtgtggattcgttggtgtatagtgagggaggagtttttgatgaaggatttttcgtattggtcgtatttgtacggtttttcgtcggtgtggattcgttggtgttcgatgaggtaggcgttttggttgaaggttttgtcgtattcgtcgtatacgtagggttttttttcggtgtgtacgatttggtgtacgatgagggacgagcgtttcgtgaagtgttttttgtagatgtagtattcgtagggtttttcgtcggtgtggatgcgttggtgttgcgtgagcgaggagtttttgttgaaggttttgtcgtattcgttgtattcgaacggttttacgtcgatgtggaagcgttggtgttggatgaggtaggagttttggttgaaggttttgtcgtattcgtcgtatacgtagggtttttcgtcggtgtggtttttttggtgtagggtgagcgaggagtttttgttgaaggttttgtcgtattttttgtaggcgtacggttttttttcggtgtgcgtgcgttggtgttcggttaggtgtatgttttggttgaaggttcgttcgtattcggggtatacgtacggttttttttcggtgtgcgtgcgttggtgtacgatgaggtgtatgttttggttgaaggttttgtcgtagttttcgtacgcgtagggtttttttttcgtgtggattcgttcgtgttgggtgagagaggaagtttttcggaaggttttgttatatacgtcgtatatatacggtttttcgttcgtgtgcgtgcgttggtgtatagtgaggtttatgcgttggttgaaggttttgtcgtagttttcgtaggtatagggtttttcgttcgtgtgtattcgttggtggatggtgagggacgagcgttcgatgaagtgttttttataggtgttatatttaaacggtttttttttcgtgtggattttttggtgttttattagggat

SEQ ID NO: 4452 - DNA, 1128 bp, Artificial Sequence
  chemically treated genomic DNA (Homo sapiens) CpG-island No: 4452
atccctaataaaacaccaaaaaatccacacgaaaaaaaaaccgtttaaatataacacctataaaaaacacttcatcgaacgctcgtccctcaccatccaccaacgaatacacacgaacgaaaaaccctatacctacgaaaactacgacaaaaccttcaaccaacgcataaacctcactatacaccaacgcacgcacacgaacgaaaaaccgtatatatacgacgtatataacaaaaccttccgaaaaacttcctctctcacccaacacgaacgaatccacacgaaaaaaaaaccctacgcgtacgaaaactacgacaaaaccttcaaccaaaacatacacctcatcgtacaccaacgcacgcacaccgaaaaaaaaccgtacgtataccccgaatacgaacgaaccttcaaccaaaacatacacctaaccgaacaccaacgcacgcacaccgaaaaaaaaccgtacgcctacaaaaaatacgacaaaaccttcaacaaaaactcctcgctcaccctacaccaaaaaaaccacaccgacgaaaaaccctacgtatacgacgaatacgacaaaaccttcaaccaaaactcctacctcatccaacaccaacgcttccacatcgacgtaaaaccgttcgaatacaacgaatacgacaaaaccttcaacaaaaactcctcgctcacgcaacaccaacgcatccacaccgacgaaaaaccctacgaatactacatctacaaaaaacacttcacgaaacgctcgtccctcatcgtacaccaaatcgtacacaccgaaaaaaaaccctacgtatacgacgaatacgacaaaaccttcaaccaaaacgcctacctcatcgaacaccaacgaatccacaccgacgaaaaaccgtacaaatacgaccaatacgaaaaatccttcatcaaaaactcctccctcactatacaccaacgaatccacacgaacgaaaaaccctaccgatacgacgaatacgaaaaaaccttcaaccgcaacacgaacctaacgcgccacctacgaattcacacctaaacgcctctatacaaaactctcactaacgatacccaaaacgaacgccaaataactacgcgctttatcaacaatactataaaaaattc

SEQ ID NO: 4453 - DNA, 1155 bp, Artificial Sequence
  chemically treated genomic DNA (Homo sapiens) CpG-island No: 4453
atgagcgcggaggagaagttgaaggttttttcgtagtcgttgtattcgtagggttttttttcggtgtgtacgatgtggtgttggattaggtaggagcggttgttgaaggttttgtcgtattcggggtaggtgtagggtcgttcgttcgtgtgcgtgcgttggtgtagggcgagcgaggagttttggttgaaagttttgtcgtattcgtcgtatttgtagggtcgtttttcggtgtggattttttggtgttttataagcgaggatacgtggttgaaggcggtttcgtattgtaggtatttgtagggtcgtttatcggtgtgtacgaggcggtgttggaggaggtgggagcggttgttgaagcgtttgtcgtagtcgtggtaggggtaaggtcgtttttcggtgtgcgtgcgttggtgttgcgttaggtgcgatatttgggtgaaggttttggcgtattggtcgtacgcgtagggtttttcgtttgtgtggatgcgtcggtgttcggttagagaggcgttttggttgaagagcgcgtcgtagttttggtacgtgtagggtttttcgttcgtgtgtacgcgtcggtgttgggttaggtgcgcgatttgcgcgaaggttttggcgtattggtcgtagcggtagggtttttttttcgtgtggatgcgttggtggcggatgagcgttgaggagaagcggaaggttttggcgtacgcggagtattcgtagggttttttatcggtgtggatgcgttggtgttttattagggacgagcggttgcggaacgttttggcgtattgggcgtacgcgtagggtcgttcgttcgtgtgtacgcgtcggtgttgggttaggtgcgtgacgcgcgtgaaggttttgtcgtagtcggcgtagcggtgcggtttttcgttcgtgtgcgtgcgttagtgggacgttaggtacgagttttggttgaaggttttgtcgtattcgtggtaggcgtagggtttttcgttcgtgtgcgtgcgttggtgtagggttaggtgtacgttttggttgaaggttttgtcgtattcggggtacgtaaatggttttttttcggtgtggattttttggtgtaagatgaacgttgaatagtagttgaaggttttttcgtagttttcgtatttttacggttttttgggg

SEQ ID NO: 4454 - DNA, 1155 bp, Artificial Sequence
  chemically treated genomic DNA (Homo sapiens) CpG-island No: 4454
ccccaaaaaaccgtaaaaatacgaaaactacgaaaaaaccttcaactactattcaacgttcatcttacaccaaaaaatccacaccgaaaaaaaaccatttacgtaccccgaatacgacaaaaccttcaaccaaaacgtacacctaaccctacaccaacgcacgcacacgaacgaaaaaccctacgcctaccacgaatacgacaaaaccttcaaccaaaactcgtacctaacgtcccactaacgcacgcacacgaacgaaaaaccgcaccgctacgccgactacgacaaaaccttcacgcgcgtcacgcacctaacccaacaccgacgcgtacacacgaacgaacgaccctacgcgtacgcccaatacgccaaaacgttccgcaaccgctcgtccctaataaaacaccaacgcatccacaccgataaaaaaccctacgaatactccgcgtacgccaaaaccttccgcttctcctcaacgctcatccgccaccaacgcatccacacgaaaaaaaaaccctaccgctacgaccaatacgccaaaaccttcgcgcaaatcgcgcacctaacccaacaccgacgcgtacacacgaacgaaaaaccctacacgtaccaaaactacgacgcgctcttcaaccaaaacgcctctctaaccgaacaccgacgcatccacacaaacgaaaaaccctacgcgtacgaccaatacgccaaaaccttcacccaaatatcgcacctaacgcaacaccaacgcacgcacaccgaaaaacgaccttacccctaccacgactacgacaaacgcttcaacaaccgctcccacctcctccaacaccgcctcgtacacaccgataaacgaccctacaaatacctacaatacgaaaccgccttcaaccacgtatcctcgcttataaaacaccaaaaaatccacaccgaaaaacgaccctacaaatacgacgaatacgacaaaactttcaaccaaaactcctcgctcgccctacaccaacgcacgcacacgaacgaacgaccctacacctaccccgaatacgacaaaaccttcaacaaccgctcctacctaatccaacaccacatcgtacacaccgaaaaaaaaccctacgaatacaacgactacgaaaaaaccttcaacttctcctccgcgctcat

SEQ ID NO: 4455 - DNA, 1155 bp, Artificial Sequence
  chemically treated genomic DNA (Homo sapiens) CpG-island No: 4455
ttttaagaagtcgtggaaatgcggggattgcgggaaggtttttagttattgtttagcgtttattttatattagagaatttatatcggggagaagttatttgcgtgtttcgagtgcggtaaggtttttagttagagcgtgtatttgattttgtattagcgtacgtatacgggcgagaagttttacgtttgttacgagtgcggtaaggtttttagttagggttcgtatttggcgttttattggcgtacgtatacgggcgagaagtcgtatcgttgcgtcgattgcggtaaggtttttacgcgcgttacgtatttgatttagtatcggcgcgtgtatacgggcgagcggttttacgcgtgcgtttagtgcgttaaggcgtttcgtaatcgttcgtttttgatagagtattagcgtatttatatcggtgagaagttttacgagtgtttcgcgtgcgttaaggtttttcgtttttttttagcgtttattcgttattagcgtatttatacggaggagaagttttatcgttgcggttagtgcgttaaggttttcgcgtagatcgcgtatttgatttagtatcggcgcgtgtatacgggcgagaagttttatacgtgttaggattgcggcgcgttttttagttagagcgtttttttggtcgagtatcggcgtatttatataggcgagaagttttacgcgtgcggttagtgcgttaaggtttttatttaggtgtcgtatttgacgtagtattagcgtacgtatatcggagagcggttttatttttgttacgattgcggtaagcgttttagtaatcgtttttattttttttagtatcgtttcgtgtatatcggtgagcggttttataggtgtttgtaatgcggggtcgtttttagttacgtgttttcgtttatagagtattagaagatttatatcggagagcggttttataagtgcggcgagtgcggtaaagtttttagttagggtttttcgttcgttttgtattagcgtacgtatacgggcgagcggttttatatttgtttcgagtgcggtaaggtttttagtaatcgtttttatttgatttagtattatatcgtgtatatcggggagaagttttacgagtgtagcggttgcgggaaggtttttagtttttttttcgcgtttat

SEQ ID NO: 4456 - DNA, 1155 bp, Artificial Sequence
  chemically treated genomic DNA (Homo sapiens) CpG-island No: 4456
ataaacgcgaaaaaaaaactaaaaaccttcccgcaaccgctacactcgtaaaacttctccccgatatacacgatataatactaaatcaaataaaaacgattactaaaaaccttaccgcactcgaaacaaatataaaaccgctcgcccgtatacgtacgctaatacaaaacgaacgaaaaaccctaactaaaaactttaccgcactcgccgcacttataaaaccgctctccgatataaatcttctaatactctataaacgaaaacacgtaactaaaaacgaccccgcattacaaacacctataaaaccgctcaccgatatacacgaaacgatactaaaaaaaataaaaacgattactaaaacgcttaccgcaatcgtaacaaaaataaaaccgctctccgatatacgtacgctaatactacgtcaaatacgacacctaaataaaaaccttaacgcactaaccgcacgcgtaaaacttctcgcctatataaatacgccgatactcgaccaaaaaaacgctctaactaaaaaacgcgccgcaatcctaacacgtataaaacttctcgcccgtatacacgcgccgatactaaatcaaatacgcgatctacgcgaaaaccttaacgcactaaccgcaacgataaaacttctcctccgtataaatacgctaataacgaataaacgctaaaaaaaaacgaaaaaccttaacgcacgcgaaacactcgtaaaacttctcaccgatataaatacgctaatactctatcaaaaacgaacgattacgaaacgccttaacgcactaaacgcacgcgtaaaaccgctcgcccgtatacacgcgccgatactaaatcaaatacgtaacgcgcgtaaaaaccttaccgcaatcgacgcaacgatacgacttctcgcccgtatacgtacgccaataaaacgccaaatacgaaccctaactaaaaaccttaccgcactcgtaacaaacgtaaaacttctcgcccgtatacgtacgctaatacaaaatcaaatacacgctctaactaaaaaccttaccgcactcgaaacacgcaaataacttctccccgatataaattctctaatataaaataaacgctaaacaataactaaaaaccttcccgcaatccccgcatttccacgacttcttaaaa

SEQ ID NO: 4457 - DNA, 852 bp, Artificial Sequence
  chemically treated genomic DNA (Homo sapiens) CpG-island No: 4457
ggtcgaggagtagcgaggtgtaggggttgcgagggtcgagtcgggcgttgagggttcggtagggggcgtggagggggcggggtcggatgtggcgtggcgtaggaaatttgagggtcgtttttggtcgcgcgtttcgtttcgttttcgttttttggtttcgtttttaggttcgttttcgcgttttttttttttcggagttggtaggcgggcgcggcggcggcgggtagcggacgggcggattgacgggcgtttttattttgttttttttttggttgtcggtttttttttgtttttttgggcggcgatgagcgtagggtcggcgtagtagttgcgggcgtacggaggtaacgcgttgttagttatttttttcggtttcggcgcgttatgtgtcggtagcgttcgggttcgttgtagcgtcgtcggcgtcgaatttgggttcgggaagtacggcggatcgcgttttgcgtcggagtaggtagggaaggggcgggttgcggtttgttggttgttgaagtgtgtttcgggcgtgtgtattcggcgtgtgtatcggcgagcgttgcgattcggttttttgcgtgtgtgttgtgcgcgcgtgtgtgtgttcgggagtgttcgcgtttttttgcgcggtggagttgtgggtgattgcggacggtggtgtgtttttcgaatggcgtgtattcgtgggtatttatgtgtgttttaggtgtgtatattttggattgcgtttgtggaattgtgtgtcggggcgtagttgttggtggggagcggtgtttggcgggtgtcgtgtgtgagtagttgtgcgtagagcggggtggcggggtgggtgtgggtggtttagttttacgttta

SEQ ID NO: 4458 - DNA, 852 bp, Artificial Sequence
  chemically treated genomic DNA (Homo sapiens) CpG-island No: 4458
taaacgtaaaactaaaccacccacacccaccccgccaccccgctctacgcacaactactcacacacgacacccgccaaacaccgctccccaccaacaactacgccccgacacacaattccacaaacgcaatccaaaatatacacacctaaaacacacataaatacccacgaatacacgccattcgaaaaacacaccaccgtccgcaatcacccacaactccaccgcgcaaaaaaacgcgaacactcccgaacacacacacgcgcgcacaacacacacgcaaaaaaccgaatcgcaacgctcgccgatacacacgccgaatacacacgcccgaaacacacttcaacaaccaacaaaccgcaacccgccccttccctacctactccgacgcaaaacgcgatccgccgtacttcccgaacccaaattcgacgccgacgacgctacaacgaacccgaacgctaccgacacataacgcgccgaaaccgaaaaaaataactaacaacgcgttacctccgtacgcccgcaactactacgccgaccctacgctcatcgccgcccaaaaaaacaaaaaaaaaccgacaaccaaaaaaaaaacaaaataaaaacgcccgtcaatccgcccgtccgctacccgccgccgccgcgcccgcctaccaactccgaaaaaaaaaaaacgcgaaaacgaacctaaaaacgaaaccaaaaaacgaaaacgaaacgaaacgcgcgaccaaaaacgaccctcaaatttcctacgccacgccacatccgaccccgccccctccacgccccctaccgaaccctcaacgcccgactcgaccctcgcaacccctacacctcgctactcctcgacc

SEQ ID NO: 4459 - DNA, 852 bp, Artificial Sequence
  chemically treated genomic DNA (Homo sapiens) CpG-island No: 4459
tgggcgtggggttggattatttatatttatttcgttatttcgttttgcgtatagttgtttatatacgatattcgttaggtatcgttttttattagtaattgcgtttcgatatataattttataaacgtagtttaaaatgtgtatatttaaggtatatatggatgtttacgagtatacgttattcgaaagatatattatcgttcgtagttatttataattttatcgcgtagagaaacgcgggtattttcggatatatatacgcgcgtataatatatacgtaaagagtcggatcgtagcgttcgtcggtgtatacgtcgggtgtatacgttcggggtatattttagtagttagtagatcgtagttcgttttttttttatttgtttcggcgtaggacgcggttcgtcgtgtttttcgagtttaagttcggcgtcggcggcgttgtagcgggttcgggcgttgtcgatatatagcgcgtcgaggtcgggaggagtgattagtagcgcgttgttttcgtgcgttcgtagttgttgcgtcggttttgcgtttatcgtcgtttagaaagataaaaggaagtcggtagttagggagggagtaaggtggaggcgttcgttagttcgttcgttcgttgttcgtcgtcgtcgcgttcgtttgttagtttcgggaaggaagggacgcgaaggcggatttggaggcgggattaggaggcgggggcggggcggggcgcgcggttagaggcggtttttaagttttttacgttacgttatattcggtttcgttttttttacgttttttgtcggatttttagcgttcggttcggttttcgtagtttttgtatttcgttgtttttcggtt

SEQ ID NO: 4460 - DNA, 852 bp, Artificial Sequence
  chemically treated genomic DNA (Homo sapiens) CpG-island No: 4460
aaccgaaaaacaacgaaatacaaaaactacgaaaaccgaaccgaacgctaaaaatccgacaaaaaacgtaaaaaaaacgaaaccgaatataacgtaacgtaaaaaacttaaaaaccgcctctaaccgcgcgccccgccccgcccccgcctcctaatcccgcctccaaatccgccttcgcgtcccttccttcccgaaactaacaaacgaacgcgacgacgacgaacaacgaacgaacgaactaacgaacgcctccaccttactccctccctaactaccgacttccttttatctttctaaacgacgataaacgcaaaaccgacgcaacaactacgaacgcacgaaaacaacgcgctactaatcactcctcccgacctcgacgcgctatatatcgacaacgcccgaacccgctacaacgccgccgacgccgaacttaaactcgaaaaacacgacgaaccgcgtcctacgccgaaacaaataaaaaaaaaacgaactacgatctactaactactaaaatataccccgaacgtatacacccgacgtatacaccgacgaacgctacgatccgactctttacgtatatattatacgcgcgtatatatatccgaaaatacccgcgtttctctacgcgataaaattataaataactacgaacgataatatatctttcgaataacgtatactcgtaaacatccatatataccttaaatatacacattttaaactacgtttataaaattatatatcgaaacgcaattactaataaaaaacgatacctaacgaatatcgtatataaacaactatacgcaaaacgaaataacgaaataaatataaataatccaaccccacgccca

SEQ ID NO: 4461 - DNA, 1164 bp, Artificial Sequence
  chemically treated genomic DNA (Homo sapiens) CpG-island No: 4461
gaggcgggaggtgcggtacggatttgaaaggacgcgtaggatgtggacgaaagaagagagttaaggagagggagaagaagggaggtagtggggaaagaaagggaagagataaagattggaggcggcgggaaggatgtaagaatgtttaggcgcggggtcgcggttgggagggggttgcggggatcggcgcgtttttgggaagtcgcgggttgcgttttacgcgcgggcgtcggggacgcggggtgcgttcgtcgtttattttttaggatgagggtgtcgatgtttcggtcgatgtttaggaagtagtattttttttagaggttcgagtaggtggcgaagaggggtcggtcgtattcgcgtttagttcgtcgagttttaggagcgagcgttaggattcggggtcggcgcgtttcgggtcgttcgggagtagtcggcgttttagcgggggcgagtttcgtagcggtaggtgcgatagcggtattaggcggtttttttggttcggggggtcggcgttcgcgtcggttgcgttcgtagttttttttgtggcgtcgggggtcggtttcgtattagtggtcggtgaagatggtcgtgacgagtagttttagggagtataggttgaggtcgaggttgagcgtcgtgacgagcgttcgcggttttatggtttttcgtttcgtcgtagtcgtcggtgggttcgcgcgtcgtcgttagatataatgtatttggttttagtttttcgttcgtttttttttttttttttttatttgttttttattttttttttacggttttttcgttttgcgagttcggttcggttcgtttttttttttttggtttgatttcgttttttatcgttcgttcgttttcggttcggttttcgggtttttagttttttttcgcgtcgttttcgtttttttgtttttttttttttttttagtttttttttttcgtttcggcgttttttatttcgcgtatttttttcgtttttttttttattttcgatttatagttcgtttttttttttagcgattttttttttttttttaattttttttcgtcgtttttatttttttttttttttttaattttgtttttattttttttcgatttttttttaatttttttttttatatttttttttatttatttgtttttttgtttttcggt

SEQ ID NO: 4462 - DNA, 1164 bp, Artificial Sequence
  chemically treated genomic DNA (Homo sapiens) CpG-island No: 4462
accgaaaaacaaaaaaacaaataaataaaaaaaaatataaaaaaaaaaattaaaaaaaaatcgaaaaaaaataaaaacaaaattaaaaaaaaaaaaaaaaataaaaacgacgaaaaaaaattaaaaaaaaaaaaaaaatcgctaaaaaaaaaaacgaactataaatcgaaaataaaaaaaaaaacgaaaaaaatacgcgaaataaaaaacgccgaaacgaaaaaaaaaaactaaaaaaaaaaaaaaaaacaaaaaaacgaaaacgacgcgaaaaaaaactaaaaacccgaaaaccgaaccgaaaacgaacgaacgataaaaaacgaaatcaaaccaaaaaaaaaaaaacgaaccgaaccgaactcgcaaaacgaaaaaaccgtaaaaaaaaaataaaaaacaaataaaaaaaaaaaaaaaaaaacgaacgaaaaactaaaaccaaatacattatatctaacgacgacgcgcgaacccaccgacgactacgacgaaacgaaaaaccataaaaccgcgaacgctcgtcacgacgctcaacctcgacctcaacctatactccctaaaactactcgtcacgaccatcttcaccgaccactaatacgaaaccgacccccgacgccacaaaaaaaactacgaacgcaaccgacgcgaacgccgaccccccgaaccaaaaaaaccgcctaataccgctatcgcacctaccgctacgaaactcgcccccgctaaaacgccgactactcccgaacgacccgaaacgcgccgaccccgaatcctaacgctcgctcctaaaactcgacgaactaaacgcgaatacgaccgacccctcttcgccacctactcgaacctctaaaaaaaatactacttcctaaacatcgaccgaaacatcgacaccctcatcctaaaaaataaacgacgaacgcaccccgcgtccccgacgcccgcgcgtaaaacgcaacccgcgacttcccaaaaacgcgccgatccccgcaaccccctcccaaccgcgaccccgcgcctaaacattcttacatccttcccgccgcctccaatctttatctcttccctttctttccccactacctcccttcttctccctctccttaactctcttctttcgtccacatcctacgcgtcctttcaaatccgtaccgcacctcccgcctc

SEQ ID NO: 4463 - DNA, 1164 bp, Artificial Sequence
  chemically treated genomic DNA (Homo sapiens) CpG-island No: 4463
gtcggggagtagaggagtaaatgagtgggggaaagtgtgagaggaagagttggagaaaagtcgggggaaagtagggatagggttaaggggagagaggaggatgagggcggcgaggagagattaaaaggggaaggggggtcgttggagaggagggcggattgtggatcggaggtagggagaggggcgagaggagtgcgcggggtggggggcgtcggggcgaggagagggggttggggaagaggaggggggtaagaaagcgagagcggcgcgggggagggttaggagttcgggggtcgggtcgggggcgggcgggcggtgggaggcgagattaggttaggggagagggagcgagtcgggtcgggttcgtagggcgaggaggtcgtaggagggaggtggggggtaggtggggggaagagggagggagcgggcggagagttggggttaagtgtattgtgtttggcggcggcgcgcgagtttatcggcggttgcggcggggcgggaagttatggagtcgcgggcgttcgttacggcgtttagtttcggttttagtttgtgttttttggggttgttcgttacggttatttttatcgattattggtacgagatcgattttcggcgttataaggagagttgcgagcgtagtcggcgcgggcgtcgatttttcggattagaagaatcgtttgatgtcgttgtcgtatttgtcgttgcgggattcgttttcgttggggcgtcggttgttttcgggcggttcggggcgcgtcgatttcgagttttggcgttcgtttttggggttcggcgggttggacgcgagtgcggtcggttttttttcgttatttattcgggtttttggaggaagtgttattttttgggtatcgatcgggatatcgatatttttattttgaaaggtgagcggcgggcgtatttcgcgttttcggcgttcgcgcgtggagcgtagttcgcggttttttaggggcgcgtcggttttcgtagtttttttttagtcgcggtttcgcgtttgggtatttttgtatttttttcgtcgtttttagtttttattttttttttttttttttttattgtttttttttttttttttttttttgatttttttttttcgtttatattttgcgcgtttttttaagttcgtgtcgtatttttcgtttt

SEQ ID NO: 4464 - DNA, 1164 bp, Artificial Sequence
  chemically treated genomic DNA (Homo sapiens) CpG-island No: 4464
aaaacgaaaaatacgacacgaacttaaaaaaacgcgcaaaatataaacgaaaaaaaaaaatcaaaaaaaaaaaaaaaaaaaaaaacaataaaaaaaaaaaaaaaaaaaataaaaactaaaaacgacgaaaaaaatacaaaaatacccaaacgcgaaaccgcgactaaaaaaaaactacgaaaaccgacgcgcccctaaaaaaccgcgaactacgctccacgcgcgaacgccgaaaacgcgaaatacgcccgccgctcacctttcaaaataaaaatatcgatatcccgatcgatacccaaaaaataacacttcctccaaaaacccgaataaataacgaaaaaaaaccgaccgcactcgcgtccaacccgccgaaccccaaaaacgaacgccaaaactcgaaatcgacgcgccccgaaccgcccgaaaacaaccgacgccccaacgaaaacgaatcccgcaacgacaaatacgacaacgacatcaaacgattcttctaatccgaaaaatcgacgcccgcgccgactacgctcgcaactctccttataacgccgaaaatcgatctcgtaccaataatcgataaaaataaccgtaacgaacaaccccaaaaaacacaaactaaaaccgaaactaaacgccgtaacgaacgcccgcgactccataacttcccgccccgccgcaaccgccgataaactcgcgcgccgccgccaaacacaatacacttaaccccaactctccgcccgctccctccctcttccccccacctaccccccacctccctcctacgacctcctcgccctacgaacccgacccgactcgctccctctcccctaacctaatctcgcctcccaccgcccgcccgcccccgacccgacccccgaactcctaaccctcccccgcgccgctctcgctttcttacccccctcctcttccccaaccccctctcctcgccccgacgccccccaccccgcgcactcctctcgcccctctccctacctccgatccacaatccgccctcctctccaacgaccccccttccccttttaatctctcctcgccgccctcatcctcctctctccccttaaccctatccctactttcccccgacttttctccaactcttcctctcacactttcccccactcatttactcctctactccccgac

SEQ ID NO: 4465 - DNA, 733 bp, Artificial Sequence
  chemically treated genomic DNA (Homo sapiens) CpG-island No: 4465
cgcgaggggttttcggttttacggggggcgtaggttataaagtacgtttcgttttggaacgttttgaggagataaaagtcgcgtaggtttcgcgttcgtcgcgtatttcgatcgtttcgacgagggagttttgtattcgttgaaaatgattcgaaagttgtttcgttttttcgttttttaatttcggcgttcgttcggcgttatttcgtagttttttggtagtcggtttttttttttttttattcgtttttcgtttttggattcgtagattacgtttttgttttagtttatttattcgtttttttgttttatttgttattcgtttttgaattaattcgttttcgtttattatttcgttttgggtatcgttttgtcgagttttttttgtttgaatttttataagatttgtatttgtcgtttttatgttcgttggggttttaatttttattacgtttttttttatttttttacgttttcgtttagtttttgtttttagaagttgtttatagttcgttttcgtttagttatttacgcggttttgacgatttacgattttacggaggggtttttgtaggtatcgtgttcgggtagcgaaggagcggattttagggttttcgcggtttggttgtggatacggggacgtaggattacggatatttattttcggttttcgttgtttgtttagttagtcgcgttagtttttgtatttggtaatggttttttcgtgggtttt

SEQ ID NO: 4466 - DNA, 733 bp, Artificial Sequence
  chemically treated genomic DNA (Homo sapiens) CpG-island No: 4466
aaaacccacgaaaaaaccattaccaaatacaaaaactaacgcgactaactaaacaaacaacgaaaaccgaaaataaatatccgtaatcctacgtccccgtatccacaaccaaaccgcgaaaaccctaaaatccgctccttcgctacccgaacacgatacctacaaaaacccctccgtaaaatcgtaaatcgtcaaaaccgcgtaaataactaaacgaaaacgaactataaacaacttctaaaaacaaaaactaaacgaaaacgtaaaaaaataaaaaaaaacgtaataaaaattaaaaccccaacgaacataaaaacgacaaatacaaatcttataaaaattcaaacaaaaaaaactcgacaaaacgatacccaaaacgaaataataaacgaaaacgaattaattcaaaaacgaataacaaataaaacaaaaaaacgaataaataaactaaaacaaaaacgtaatctacgaatccaaaaacgaaaaacgaataaaaaaaaaaaaaaaccgactaccaaaaaactacgaaataacgccgaacgaacgccgaaattaaaaaacgaaaaaacgaaacaactttcgaatcattttcaacgaatacaaaactccctcgtcgaaacgatcgaaatacgcgacgaacgcgaaacctacgcgacttttatctcctcaaaacgttccaaaacgaaacgtactttataacctacgccccccgtaaaaccgaaaacccctcgcg

SEQ ID NO: 4467 - DNA, 733 bp, Artificial Sequence
  chemically treated genomic DNA (Homo sapiens) CpG-island No: 4467
aaggtttacggggaagttattgttaaatgtagaggttggcgcggttggttgagtaggtagcggaggtcgagggtgggtgttcgtggttttgcgttttcgtgtttatagttaggtcgcggggattttagggttcgttttttcgttgttcgagtacggtgtttgtaggggttttttcgtggggtcgtggatcgttagggtcgcgtgggtggttgggcgggggcgggttgtaggtagtttttaaaagtaggggttgggcgggggcgtggggggatagggagggacgtagtggaagttggggttttaacggatatgagggcggtagatgtagattttatgaagatttaggtaggaagagttcggtagggcgatgtttaagacggggtagtggacggggacgaattggtttagagacgggtagtagatggggtagaaggacgagtaggtgggttggaataggagcgtagtttgcgggtttagaaacgggggacggatgggaggaaagaagagtcgattgttagggagttgcggggtggcgtcgagcgggcgtcggggttgggaggcggagaggcggggtagttttcgagttatttttagcgagtgtaaagttttttcgtcggaacggtcggagtgcgcggcgagcgcggggtttgcgcggtttttatttttttagggcgttttagggcggaacgtgttttgtgatttgcgtttttcgtgaagtcgggagtttttcgcg

SEQ ID NO: 4468 - DNA, 733 bp, Artificial Sequence
  chemically treated genomic DNA (Homo sapiens) CpG-island No: 4468
cgcgaaaaactcccgacttcacgaaaaacgcaaatcacaaaacacgttccgccctaaaacgccctaaaaaaataaaaaccgcgcaaaccccgcgctcgccgcgcactccgaccgttccgacgaaaaaactttacactcgctaaaaataactcgaaaactaccccgcctctccgcctcccaaccccgacgcccgctcgacgccaccccgcaactccctaacaatcgactcttctttcctcccatccgtcccccgtttctaaacccgcaaactacgctcctattccaacccacctactcgtccttctaccccatctactacccgtctctaaaccaattcgtccccgtccactaccccgtcttaaacatcgccctaccgaactcttcctacctaaatcttcataaaatctacatctaccgccctcatatccgttaaaaccccaacttccactacgtccctccctatccccccacgcccccgcccaacccctacttttaaaaactacctacaacccgcccccgcccaaccacccacgcgaccctaacgatccacgaccccacgaaaaaacccctacaaacaccgtactcgaacaacgaaaaaacgaaccctaaaatccccgcgacctaactataaacacgaaaacgcaaaaccacgaacacccaccctcgacctccgctacctactcaaccaaccgcgccaacctctacatttaacaataacttccccgtaaacctt

SEQ ID NO: 4469 - DNA, 736 bp, Artificial Sequence
  chemically treated genomic DNA (Homo sapiens) CpG-island No: 4469
tcggggttcgttcgtttgtattaaggcgagttcgggttttgcgtttttgtatttgttgcgcggtcgttagggtttttttaacggtttttcggttagcgcgcggtcgtcgaagggttgggaaagaggtcggcgcggggtcgtagggttttcgggtgggttttttttaggtttttttagtttcgagttgtgaagacgggggtagaacgaggcgttcggattatttttatttagtcgcgggagaatttcgggtcgggaggaagcggcgttttaaggtcgtggttcgttcggcgattacgtgttttcgtaggtcggcgaggcgcgtcgtatacgtgttcggggttcgggtttcgtagttcgtttcggttttcgttttcgtttttttttttttttcgcggtcggggagttttttattttagagcgtttaggttcgtaggttagttttatggggaagcgtagacgtcggagtttgagtcgtagtcgtaggagcgttcggtcgttttcgtcggttcgttagcgtttggttttcgttcgtcggagacgtcggttcgaggtggcgtcggagttgttggtagaggggcggcgggcggcggcggcggcggttataggagggattgataaagttttacggtacgtcgttttttatttatagtatcggcgggtcgttatggagacgttttagtttaaattattcgcgatcggtttcggtcgggatatcgttcggggaggggcgggggtt

SEQ ID NO: 4470 - DNA, 736 bp, Artificial Sequence
  chemically treated genomic DNA (Homo sapiens) CpG-island No: 4470
aacccccgcccctccccgaacgatatcccgaccgaaaccgatcgcgaataatttaaactaaaacgtctccataacgacccgccgatactataaataaaaaacgacgtaccgtaaaactttatcaatccctcctataaccgccgccgccgccgcccgccgcccctctaccaacaactccgacgccacctcgaaccgacgtctccgacgaacgaaaaccaaacgctaacgaaccgacgaaaacgaccgaacgctcctacgactacgactcaaactccgacgtctacgcttccccataaaactaacctacgaacctaaacgctctaaaataaaaaactccccgaccgcgaaaaaaaaaaaaaaacgaaaacgaaaaccgaaacgaactacgaaacccgaaccccgaacacgtatacgacgcgcctcgccgacctacgaaaacacgtaatcgccgaacgaaccacgaccttaaaacgccgcttcctcccgacccgaaattctcccgcgactaaataaaaataatccgaacgcctcgttctacccccgtcttcacaactcgaaactaaaaaaacctaaaaaaaacccacccgaaaaccctacgaccccgcgccgacctctttcccaacccttcgacgaccgcgcgctaaccgaaaaaccgttaaaaaaaccctaacgaccgcgcaacaaatacaaaaacgcaaaacccgaactcgccttaatacaaacgaacgaaccccga

SEQ ID NO: 4471 - DNA, 736 bp, Artificial Sequence
  chemically treated genomic DNA (Homo sapiens) CpG-island No: 4471
ggttttcgttttttttcgggcggtgtttcggtcggaatcgatcgcggatggtttgagttggagcgtttttatggcgattcgtcggtgttataagtagggagcggcgtgtcgtggggttttgttagttttttttgtagtcgtcgtcgtcgtcgttcgtcgtttttttgttagtagtttcggcgttatttcgggtcggcgttttcggcgggcgggagttaggcgttgacgggtcggcgggggcggtcgagcgtttttgcggttgcgatttaggtttcggcgtttgcgtttttttatggggttggtttgcgggtttgggcgttttgaggtgagggatttttcggtcgcggaggaagggagggagcgagggcgggagtcggggcgggttgcgggattcgggtttcgggtacgtgtgcggcgcgtttcgtcggtttgcggagatacgtggtcgtcgagcgggttacgattttgaggcgtcgttttttttcggttcggggttttttcgcggttggataagggtgattcgggcgtttcgttttgttttcgtttttatagttcggggttggaggggtttaggggagatttattcggagattttgcggtttcgcgtcggttttttttttaatttttcggcggtcgcgcgttggtcggggagtcgttggggaggttttggcggtcgcgtagtaggtgtaggggcgtagagttcgggttcgttttggtatagacgagcgggtttcgg

SEQ ID NO: 4472 - DNA, 736 bp, Artificial Sequence
  chemically treated genomic DNA (Homo sapiens) CpG-island No: 4472
ccgaaacccgctcgtctataccaaaacgaacccgaactctacgcccctacacctactacgcgaccgccaaaacctccccaacgactccccgaccaacgcgcgaccgccgaaaaattaaaaaaaaaaccgacgcgaaaccgcaaaatctccgaataaatctcccctaaacccctccaaccccgaactataaaaacgaaaacaaaacgaaacgcccgaatcacccttatccaaccgcgaaaaaaccccgaaccgaaaaaaaacgacgcctcaaaatcgtaacccgctcgacgaccacgtatctccgcaaaccgacgaaacgcgccgcacacgtacccgaaacccgaatcccgcaacccgccccgactcccgccctcgctccctcccttcctccgcgaccgaaaaatccctcacctcaaaacgcccaaacccgcaaaccaaccccataaaaaaacgcaaacgccgaaacctaaatcgcaaccgcaaaaacgctcgaccgcccccgccgacccgtcaacgcctaactcccgcccgccgaaaacgccgacccgaaataacgccgaaactactaacaaaaaaacgacgaacgacgacgacgacgactacaaaaaaaactaacaaaaccccacgacacgccgctccctacttataacaccgacgaatcgccataaaaacgctccaactcaaaccatccgcgatcgattccgaccgaaacaccgcccgaaaaaaaacgaaaacc

SEQ ID NO: 4473 - DNA, 1137 bp, Artificial Sequence
  chemically treated genomic DNA (Homo sapiens) CpG-island No: 4473
gttttcgcgatacgttgttagtagcgtagcgtcggttcgttcgtgtggtcggagttcggggaggggatagggtacgcgtcgtttgatttatttgttttatcgtttacggtcgcggtcgttttgggtcgcgggattcgcgtcggttattttcgtttcgcggggtttaagaggcgaggtcgcgcggtttagtttcggttttcgttttggttgagtgttggggcgcgcgaggggcgcgggtagggttcgtttcggcgggttagtgtttcgcgttttaggtcgttggcggttaggtttacgtttttttttttttcggtttttttcgtttttcgttttgttttttttttcgttttttttttttttcgcgttttttttttttttgtttggttatgtgtcgtttttttttgtttgtagtggaaataatttttcgtcgttcggcgcgtttcggttcgacgcgtcgcggcggaggcgagcgggaggcgggacggggcggggagagcggcggggtcggcgggaggacgcgcggcgcggcgtcggcggacgtcgtaggttttatgtcgcgtcggcgattttcgcgtttttgtcgttcgcgttcgcggtcgtttttcgtcgttcgtcgtttcgggttcgtcgcgtcgcgttcgcgcgtttttagcggggttatcgagcgatgttcgtcgggcgttcgcgaaagtttgtcggtttttgttgaagggtagcggcgttttcgtattttcgtgtttcgtttcggttaggtgagtttgtatttcgtttttgtcggttttcgcgtgggttcggggggtattcggggcgggaggcgcgttcgagacggttttggagattatttcgtcgttttgggaagacgagggatttcgtaggttttggggggagggtcgggtgtggatttcgggagttttcgagtcgggaagttgtcgggttcgaagagttttttgtttcgacgtgcgtgttgtttttcggtgtttcggttttcgaaaagacgttcgtaaggaatagagttggtattgtttgcggaggacggggttttcgtcgtttcgggtcggggagggggtttcgattaagtggagattttaagatgagaaataggtttttaataaagattatttttcggttaaattgtgt

SEQ ID NO: 4474 - DNA, 1137 bp, Artificial Sequence
  chemically treated genomic DNA (Homo sapiens) CpG-island No: 4474
acacaatttaaccgaaaaataatctttattaaaaacctatttctcatcttaaaatctccacttaatcgaaaccccctccccgacccgaaacgacgaaaaccccgtcctccgcaaacaataccaactctattccttacgaacgtcttttcgaaaaccgaaacaccgaaaaacaacacgcacgtcgaaacaaaaaactcttcgaacccgacaacttcccgactcgaaaactcccgaaatccacacccgaccctccccccaaaacctacgaaatccctcgtcttcccaaaacgacgaaataatctccaaaaccgtctcgaacgcgcctcccgccccgaataccccccgaacccacgcgaaaaccgacaaaaacgaaatacaaactcacctaaccgaaacgaaacacgaaaatacgaaaacgccgctacccttcaacaaaaaccgacaaactttcgcgaacgcccgacgaacatcgctcgataaccccgctaaaaacgcgcgaacgcgacgcgacgaacccgaaacgacgaacgacgaaaaacgaccgcgaacgcgaacgacaaaaacgcgaaaatcgccgacgcgacataaaacctacgacgtccgccgacgccgcgccgcgcgtcctcccgccgaccccgccgctctccccgccccgtcccgcctcccgctcgcctccgccgcgacgcgtcgaaccgaaacgcgccgaacgacgaaaaattatttccactacaaacaaaaaaaaacgacacataaccaaacaaaaaaaaaaaaaacgcgaaaaaaaaaaaaaacgaaaaaaaaaacaaaacgaaaaacgaaaaaaaccgaaaaaaaaaaaaacgtaaacctaaccgccaacgacctaaaacgcgaaacactaacccgccgaaacgaaccctacccgcgcccctcgcgcgccccaacactcaaccaaaacgaaaaccgaaactaaaccgcgcgacctcgcctcttaaaccccgcgaaacgaaaataaccgacgcgaatcccgcgacccaaaacgaccgcgaccgtaaacgataaaacaaataaatcaaacgacgcgtaccctatcccctccccgaactccgaccacacgaacgaaccgacgctacgctactaacaacgtatcgcgaaaac

SEQ ID NO: 4475 - DNA, 1137 bp, Artificial Sequence
  chemically treated genomic DNA (Homo sapiens) CpG-island No: 4475
gtatagtttggtcggggggtgatttttgttaggagtttgttttttattttggggtttttatttgatcggaatttttttttcggttcggaacggcggggatttcgtttttcgtagataatattaattttgttttttgcgggcgttttttcggaaatcgaggtatcgggaagtagtacgtacgtcggggtaggaaatttttcggattcggtaatttttcggttcgggggttttcggggtttatattcgattttttttttaggatttgcggggtttttcgtttttttagagcggcgaggtagtttttaggatcgtttcggacgcgtttttcgtttcgggtgtttttcgagtttacgcgggagtcggtaggagcggggtgtaaatttatttggtcggagcggggtacgggggtgcgggggcgtcgttgttttttagtaggagtcgataaattttcgcgggcgttcggcgggtatcgttcggtggtttcgttaaggacgcgcgggcgcggcgcggcgagttcggggcggcgggcggcggggggcggtcgcgggcgcgggcggtaggggcgcgggggtcgtcggcgcggtatgggatttgcggcgttcgtcggcgtcgcgtcgcgcgttttttcgtcggtttcgtcgtttttttcgtttcgtttcgtttttcgttcgttttcgtcgcggcgcgtcgggtcggggcgcgtcgagcggcgagaaattgtttttattgtaaataaaaaaaggcgatatatgattaggtaggaggaggggaagcgcggggagggaggagggcggagggagggatagagcggagggcggagggagtcggagaaagggaaaacgtgggtttggtcgttagcggtttggggcgcggggtattgattcgtcggggcggattttgttcgcgtttttcgcgcgttttagtatttagttagggcggaggtcggggttgggtcgcgcggtttcgttttttgggtttcgcggggcgggggtgatcggcgcgggtttcgcgatttagggcggtcgcgatcgtgggcggtggggtaggtgggttaggcggcgcgtgttttgtttttttttcgggtttcggttatacgagcgggtcggcgttgcgttgttggtaacgtgtcgcgggaat

SEQ ID NO: 4476 - DNA, 1137 bp, Artificial Sequence
  chemically treated genomic DNA (Homo sapiens) CpG-island No: 4476
attcccgcgacacgttaccaacaacgcaacgccgacccgctcgtataaccgaaacccgaaaaaaaaacaaaacacgcgccgcctaacccacctaccccaccgcccacgatcgcgaccgccctaaatcgcgaaacccgcgccgatcacccccgccccgcgaaacccaaaaaacgaaaccgcgcgacccaaccccgacctccgccctaactaaatactaaaacgcgcgaaaaacgcgaacaaaatccgccccgacgaatcaataccccgcgccccaaaccgctaacgaccaaacccacgttttccctttctccgactccctccgccctccgctctatccctccctccgccctcctccctccccgcgcttcccctcctcctacctaatcatatatcgcctttttttatttacaataaaaacaatttctcgccgctcgacgcgccccgacccgacgcgccgcgacgaaaacgaacgaaaaacgaaacgaaacgaaaaaaacgacgaaaccgacgaaaaaacgcgcgacgcgacgccgacgaacgccgcaaatcccataccgcgccgacgacccccgcgcccctaccgcccgcgcccgcgaccgccccccgccgcccgccgccccgaactcgccgcgccgcgcccgcgcgtccttaacgaaaccaccgaacgatacccgccgaacgcccgcgaaaatttatcgactcctactaaaaaacaacgacgcccccgcacccccgtaccccgctccgaccaaataaatttacaccccgctcctaccgactcccgcgtaaactcgaaaaacacccgaaacgaaaaacgcgtccgaaacgatcctaaaaactacctcgccgctctaaaaaaacgaaaaaccccgcaaatcctaaaaaaaaaatcgaatataaaccccgaaaacccccgaaccgaaaaattaccgaatccgaaaaatttcctaccccgacgtacgtactacttcccgatacctcgatttccgaaaaaacgcccgcaaaaaacaaaattaatattatctacgaaaaacgaaatccccgccgttccgaaccgaaaaaaaaattccgatcaaataaaaaccccaaaataaaaaacaaactcctaacaaaaatcaccccccgaccaaactatac

SEQ ID NO: 4477 - DNA, 519 bp, Artificial Sequence
  chemically treated genomic DNA (Homo sapiens) CpG-island No: 4477
gttagttgttgcggggggcggcgggttttagcgtcgggagtttgggtagggggaagcgttcgggtcgttttcgttattgtagttgtagttttcgaggtcgtcgtagtaattcggattcgtagtattcgtattttcggcggtcgtagttttagtatcgtagagcggagagcggagttcggagttcgtcgttttaggtgagtcgcgtttgggagcgtagggcgtttgtagcgttgttttttcggcggttttattttattcgttatcgttattttttgcgttttattttttttcgttgttttttcgaattcgcgggtagcgttattttaggtcgattttcggtgttggttcgggcggttgggagtttgggggcggttagaggagaggtggtttcgtttgaagtcggggtgattcggttcggggattgcgggggtgtagtggagggatgtcggtttcgggttttcgtatcgtagtcgggtttttcgcgttgttttttttgggttttttttttttggtagttaa

SEQ ID NO: 4478 - DNA, 519 bp, Artificial Sequence
  chemically treated genomic DNA (Homo sapiens) CpG-island No: 4478
ttaactaccaaaaaaaaaaaacccaaaaaaaacaacgcgaaaaacccgactacgatacgaaaacccgaaaccgacatccctccactacacccccgcaatccccgaaccgaatcaccccgacttcaaacgaaaccacctctcctctaaccgcccccaaactcccaaccgcccgaaccaacaccgaaaatcgacctaaaataacgctacccgcgaattcgaaaaaacaacgaaaaaaaataaaacgcaaaaaataacgataacgaataaaataaaaccgccgaaaaaacaacgctacaaacgccctacgctcccaaacgcgactcacctaaaacgacgaactccgaactccgctctccgctctacgatactaaaactacgaccgccgaaaatacgaatactacgaatccgaattactacgacgacctcgaaaactacaactacaataacgaaaacgacccgaacgcttccccctacccaaactcccgacgctaaaacccgccgccccccgcaacaactaac

SEQ ID NO: 4479 - DNA, 519 bp, Artificial Sequence
  chemically treated genomic DNA (Homo sapiens) CpG-island No: 4479
ttggttgttaggaaaaggaaatttaggaagagtagcgcggggaattcggttgcggtgcgggagttcggggtcggtatttttttattgtattttcgtagttttcgagtcgagttatttcggttttaggcgaggttattttttttttgatcgtttttaggtttttagtcgttcgggttagtatcgggaatcggtttggggtaacgttattcgcgggttcggagggatagcgggaggagatgaaacgtaggaggtggcgatggcgggtggggtgaaatcgtcgggaaagtagcgttgtaaacgttttgcgtttttagacgcggtttatttggggcggcgggtttcgggtttcgtttttcgttttgcggtgttgaggttgcggtcgtcgagggtgcgggtgttgcgggttcggattattgcggcgatttcgggggttgtagttgtagtggcggaggcggttcgggcgtttttttttatttagattttcggcgttggggttcgtcgtttttcgtagtagttggt

SEQ ID NO: 4480 - DNA, 519 bp, Artificial Sequence
  chemically treated genomic DNA (Homo sapiens) CpG-island No: 4480
accaactactacgaaaaacgacgaaccccaacgccgaaaatctaaataaaaaaaaacgcccgaaccgcctccgccactacaactacaacccccgaaatcgccgcaataatccgaacccgcaacacccgcaccctcgacgaccgcaacctcaacaccgcaaaacgaaaaacgaaacccgaaacccgccgccccaaataaaccgcgtctaaaaacgcaaaacgtttacaacgctactttcccgacgatttcaccccacccgccatcgccacctcctacgtttcatctcctcccgctatccctccgaacccgcgaataacgttaccccaaaccgattcccgatactaacccgaacgactaaaaacctaaaaacgatcaaaaaaaaaataacctcgcctaaaaccgaaataactcgactcgaaaactacgaaaatacaataaaaaaataccgaccccgaactcccgcaccgcaaccgaattccccgcgctactcttcctaaatttccttttcctaacaaccaa

SEQ ID NO: 4481 - DNA, 522 bp, Artificial Sequence
  chemically treated genomic DNA (Homo sapiens) CpG-island No: 4481
acgttcggttcgttttatattttcggttcgggggcggggttattgcggcggtttcggcgtttgaagtttagttagtcggtgaattcgtggggcgaagtcggtacgttgtttataaggaggttcgggttcgggttttacgtgggtcggaggggtagtcgaagtttttaaagtgcggcgaacgagttgtcggtcgtaggcggcgttacggcgtattatttgaattttcgattcgtcgggttcgggacgcgttcgcgtatgtttagggcgtcgttcgcgcgtttttttttaaaatttatttcgggatttcgcggtagcggcggcggggcggagtttgcgggaacggttcgtagggaaattgagtttcgagacgcggattgcggattaggcgacgggaggagggaggtttttgagataagtgtggagcgtagttttgattgtaaatggtgttcgtcgtttgagggtttacgtgattttttacgatattttttgagttttagtttttatttttgttttaaagttgtt

SEQ ID NO: 4482 - DNA, 522 bp, Artificial Sequence
  chemically treated genomic DNA (Homo sapiens) CpG-island No: 4482
aacaactttaaaacaaaaataaaaactaaaactcaaaaaatatcgtaaaaaatcacgtaaaccctcaaacgacgaacaccatttacaatcaaaactacgctccacacttatctcaaaaacctccctcctcccgtcgcctaatccgcaatccgcgtctcgaaactcaatttccctacgaaccgttcccgcaaactccgccccgccgccgctaccgcgaaatcccgaaataaattttaaaaaaaaacgcgcgaacgacgccctaaacatacgcgaacgcgtcccgaacccgacgaatcgaaaattcaaataatacgccgtaacgccgcctacgaccgacaactcgttcgccgcactttaaaaacttcgactacccctccgacccacgtaaaacccgaacccgaacctccttataaacaacgtaccgacttcgccccacgaattcaccgactaactaaacttcaaacgccgaaaccgccgcaataaccccgcccccgaaccgaaaatataaaacgaaccgaacgt

SEQ ID NO: 4483 - DNA, 522 bp, Artificial Sequence
  chemically treated genomic DNA (Homo sapiens) CpG-island No: 4483
ggtagttttggaataagaatagggattagaatttaggaggtatcgtgagaggttacgtagatttttaaacggcgggtattatttatagttagaattgcgttttatatttgttttaggggttttttttttttcgtcgtttagttcgtagttcgcgtttcgggatttaatttttttgcgggtcgttttcgtaaatttcgtttcgtcgtcgttgtcgcgaaatttcggagtggattttgggaaggggcgcgcgagcggcgttttgggtatgcgcgagcgcgtttcgggttcggcgagtcgagggtttaggtggtgcgtcgtggcgtcgtttgcgatcggtagttcgttcgtcgtattttggaggtttcggttgttttttcgatttacgtagggttcggattcgggtttttttgtgaatagcgtgtcggtttcgttttacgggtttatcggttggttgggttttaagcgtcgaggtcgtcgtagtgatttcgttttcgggtcgaggatgtgaggcgggtcgggcgt

SEQ ID NO: 4484 - DNA, 522 bp, Artificial Sequence
  chemically treated genomic DNA (Homo sapiens) CpG-island No: 4484
acgcccgacccgcctcacatcctcgacccgaaaacgaaatcactacgacgacctcgacgcttaaaacccaaccaaccgataaacccgtaaaacgaaaccgacacgctattcacaaaaaaacccgaatccgaaccctacgtaaatcgaaaaaacaaccgaaacctccaaaatacgacgaacgaactaccgatcgcaaacgacgccacgacgcaccacctaaaccctcgactcgccgaacccgaaacgcgctcgcgcatacccaaaacgccgctcgcgcgccccttcccaaaatccactccgaaatttcgcgacaacgacgacgaaacgaaatttacgaaaacgacccgcaaaaaaattaaatcccgaaacgcgaactacgaactaaacgacgaaaaaaaaaaaacccctaaaacaaatataaaacgcaattctaactataaataatacccgccgtttaaaaatctacgtaacctctcacgatacctcctaaattctaatccctattcttattccaaaactacc

SEQ ID NO: 4485 - DNA, 540 bp, Artificial Sequence
  chemically treated genomic DNA (Homo sapiens) CpG-island No: 4485
gttttttcggtcgtttttttagtttttaggttttttttttattcgacggtgagtagcgtcgcggttcgtgtagttagacgcgcggggtgcggcggggtttcgggggcggggtgggggaggcggagggtgggttcgcggttacgtgagtcgggttagttgttgcggggggcggcgggtttagcgtcggggagtttgggtagggggaagcgttcggcgtcgttttcgttattgtagttgtagttttcgaggtcgtcgtagtaattcggattcggtagtattcgtattttcggcggtcgtagttttagtatcgtagaagagtagcgacgtcggagttcgtcgttttaggtgagtcgcgtttgggagcgtagggcgtttgtagcgttgttttttcggcggttttatatattcgttatcgttattttttgcgtgttattttttttcgttgtttttttgaatcgcgggtaggttatacgtaggcgatttacggtgttgggtttggcggcgtgggagtatggtgcggttagaggagaggtggtttcg

SEQ ID NO: 4486 - DNA, 540 bp, Artificial Sequence
  chemically treated genomic DNA (Homo sapiens) CpG-island No: 4486
cgaaaccacctctcctctaaccgcaccatactcccacgccgccaaacccaacaccgtaaatcgcctacgtataacctacccgcgattcaaaaaaacaacgaaaaaaaataacacgcaaaaaataacgataacgaatatataaaaccgccgaaaaaacaacgctacaaacgccctacgctcccaaacgcgactcacctaaaacgacgaactccgacgtcgctactcttctacgatactaaaactacgaccgccgaaaatacgaatactaccgaatccgaattactacgacgacctcgaaaactacaactacaataacgaaaacgacgccgaacgcttccccctacccaaactccccgacgctaaacccgccgccccccgcaacaactaacccgactcacgtaaccgcgaacccaccctccgcctcccccaccccgcccccgaaaccccgccgcaccccgcgcgtctaactacacgaaccgcgacgctactcaccgtcgaataaaaaaaaaacctaaaaactaaaaaaacgaccgaaaaaac

SEQ ID NO: 4487 - DNA, 540 bp, Artificial Sequence
  chemically treated genomic DNA (Homo sapiens) CpG-island No: 4487
cgaggttattttttttttgatcgtattatgtttttacgtcgttaggtttagtatcgtgaatcgtttgcgtgtaatttattcgcggtttagagggatagcgggaggagatgatacgtaggaggtggcgatggcgggtgtgtgaaatcgtcgggaaagtagcgttgtaaacgttttgcgtttttagacgcggtttatttggggcggcgggtttcggcgtcgttatttttttgcggtgttgaggttgcggtcgtcgagggtgcgggtgttgtcgggttcggattattgcggcgatttcgggggttgtagttgtagtggcggaggcggcgtcgggcgtttttttttatttagatttttcggcgttgggttcgtcgtttttcgtagtagttggttcgatttacgtgatcgcgggtttatttttcgttttttttatttcgttttcggggtttcgtcgtatttcgcgcgtttggttgtacgggtcgcggcgttgtttatcgtcgagtagggagggggtttgggagttggaggagcggtcgagagggt

SEQ ID NO: 4488 - DNA, 540 bp, Artificial Sequence
  chemically treated genomic DNA (Homo sapiens) CpG-island No: 4488
accctctcgaccgctcctccaactcccaaaccccctccctactcgacgataaacaacgccgcgacccgtacaaccaaacgcgcgaaatacgacgaaaccccgaaaacgaaataaaaaaaacgaaaaataaacccgcgatcacgtaaatcgaaccaactactacgaaaaacgacgaacccaacgccgaaaaatctaaataaaaaaaaacgcccgacgccgcctccgccactacaactacaacccccgaaatcgccgcaataatccgaacccgacaacacccgcaccctcgacgaccgcaacctcaacaccgcaaaaaaataacgacgccgaaacccgccgccccaaataaaccgcgtctaaaaacgcaaaacgtttacaacgctactttcccgacgatttcacacacccgccatcgccacctcctacgtatcatctcctcccgctatccctctaaaccgcgaataaattacacgcaaacgattcacgatactaaacctaacgacgtaaaaacataatacgatcaaaaaaaaaataacctcg

SEQ ID NO: 4489 - DNA, 701 bp, Artificial Sequence
  chemically treated genomic DNA (Homo sapiens) CpG-island No: 4489
gttttcggttaatatttcgttacgttttagtttttcgaatgtttttagagggttgagttttcgatttttttttcgcgtgggtattttcgaggttttagttttttcgtttattttagcgcgtcgagtttttttttcgatttcggcgacggttaatggttggggcgtttttttttttttcggggcggggtcgcgtgacgtgtcgggaagtcggagtttagagtttcgggcgcggggaggcgcggttatggtaggtacggcgggtttagcggggcggaggcgcggggcgcggggttgtaggggcgcggggttgtagagtcgtggggcgagcggtttttttgtagtttttcgttgttcgtagtttcggagtcgttgttttcggcgggcggtgcgggcgaggaggcgtcggaggaggacgaggacgaagcggaggtcgaggattttgagcggtcgaatgcgggagcgggcggtggacgtagtggcggcggcggtagtagcgttagcggaggaggcggcggcggcggggtcggggcggggggttgcggcgggttcgggggcgcgtttattaggcgcgcggttatattgcgggtgttttttaaagacgcgttgttggagtttggcgtcggggtgttgtttatttattatttggtgagtatttcgtttttttcgttttatcgcggttcgggtaggaaggggaaattgag

SEQ ID NO: 4490 - DNA, 701 bp, Artificial Sequence
  chemically treated genomic DNA (Homo sapiens) CpG-island No: 4490
ctcaatttccccttcctacccgaaccgcgataaaacgaaaaaaacgaaatactcaccaaataataaataaacaacaccccgacgccaaactccaacaacgcgtctttaaaaaacacccgcaatataaccgcgcgcctaataaacgcgcccccgaacccgccgcaaccccccgccccgaccccgccgccgccgcctcctccgctaacgctactaccgccgccgccactacgtccaccgcccgctcccgcattcgaccgctcaaaatcctcgacctccgcttcgtcctcgtcctcctccgacgcctcctcgcccgcaccgcccgccgaaaacaacgactccgaaactacgaacaacgaaaaactacaaaaaaaccgctcgccccacgactctacaaccccgcgcccctacaaccccgcgccccgcgcctccgccccgctaaacccgccgtacctaccataaccgcgcctccccgcgcccgaaactctaaactccgacttcccgacacgtcacgcgaccccgccccgaaaaaaaaaaaaacgccccaaccattaaccgtcgccgaaatcgaaaaaaaaactcgacgcgctaaaataaacgaaaaaactaaaacctcgaaaatacccacgcgaaaaaaaaatcgaaaactcaaccctctaaaaacattcgaaaaactaaaacgtaacgaaatattaaccgaaaac

SEQ ID NO: 4491 - DNA, 701 bp, Artificial Sequence
  chemically treated genomic DNA (Homo sapiens) CpG-island No: 4491
tttagttttttttttttgttcgagtcgcgatgggacgagggaggcggggtgtttattaggtagtagatggatagtatttcggcgttaggttttagtagcgcgtttttgaggagtattcgtagtgtgatcgcgcgtttggtgagcgcgttttcgggttcgtcgtagtttttcgtttcggtttcgtcgtcgtcgtttttttcgttgacgttattgtcgtcgtcgttattgcgtttatcgttcgttttcgtattcggtcgtttagggttttcggttttcgtttcgttttcgttttttttcggcgttttttcgttcgtatcgttcgtcggggatagcggtttcggagttgcggatagcgagaggttgtagggaggtcgttcgttttacggttttgtagtttcgcgtttttgtagtttcgcgtttcgcgttttcgtttcgttgggttcgtcgtatttgttatggtcgcgttttttcgcgttcggagttttagatttcggtttttcggtacgttacgcggtttcgtttcggggaggggaggggcgttttaattattggtcgtcgtcggggtcgggggaagggttcggcgcgttggggtgggcggagaaattgaggtttcggggatgtttacgcgggagagagatcgggaatttagttttttgggaatattcgggaaattgaggcgtgacggggtgttgatcgggagt

SEQ ID NO: 4492 - DNA, 701 bp, Artificial Sequence
  chemically treated genomic DNA (Homo sapiens) CpG-island No: 4492
actcccgatcaacaccccgtcacgcctcaatttcccgaatattcccaaaaaactaaattcccgatctctctcccgcgtaaacatccccgaaacctcaatttctccgcccaccccaacgcgccgaacccttcccccgaccccgacgacgaccaataattaaaacgcccctcccctccccgaaacgaaaccgcgtaacgtaccgaaaaaccgaaatctaaaactccgaacgcgaaaaaacgcgaccataacaaatacgacgaacccaacgaaacgaaaacgcgaaacgcgaaactacaaaaacgcgaaactacaaaaccgtaaaacgaacgacctccctacaacctctcgctatccgcaactccgaaaccgctatccccgacgaacgatacgaacgaaaaaacgccgaaaaaaaacgaaaacgaaacgaaaaccgaaaaccctaaacgaccgaatacgaaaacgaacgataaacgcaataacgacgacgacaataacgtcaacgaaaaaaacgacgacgacgaaaccgaaacgaaaaactacgacgaacccgaaaacgcgctcaccaaacgcgcgatcacactacgaatactcctcaaaaacgcgctactaaaacctaacgccgaaatactatccatctactacctaataaacaccccgcctccctcgtcccatcgcgactcgaacaaaaaaaaaaaactaaa

SEQ ID NO: 4493 - DNA, 1232 bp, Artificial Sequence
  chemically treated genomic DNA (Homo sapiens) CpG-island No: 4493
tttaataacgggtatcgtcgttatttttggcgtcggtaacgttattttaggaaaagtaaaatgttgcgttttaagaattattttatcgtcgttgcgggtggttttcgttagaattatcgttcgatgaatagtatgttttagttcgcgtacgtttttcggaaaattgtagtgttgtagtaaatttcgcgtttcggtatttaatattacgcgggagagtttttgtcgtaaacgatattgttcgtagaaatatttcgttagtagaatgatattatcgtttcgtttacgtagcggcggtatcgaaagtggaaatacgtttaggcgatgaaataaatcggcgcggaatcgttttgttagtattttttcgcgtaaatcgcggttagtcgtcgttagtacgcgtatatcgattcgtaaataacggttatcgttaacgcgttgaatatcgttatattgtaatatttttagtagtttggtttgtaatgttaacgataattcgtcgattttatttagaaatagcgtgtcgttattcgttattttaaatttttcgttgcgattattgatagcgttagtaaacgttttttttatatgttcgaataatttattttttcgtatatttttcggtagtgtagtatagttgagatagattagcggatttatcgttcgtggcgaggttttatgaatcgttttcgttattagttttttatcggttttagttttatcgttgattaggacgttgagatcggacgtcgttataattttaatttttttttttagttgcgttatgttaggggataagttaattatttgcgtttgttttatcgttttaaacggcgtggtatcgtttggtagtatattttggttttttagttgtttaattagtaacgtattgtttaacgttttcgtcgttagcgtagtaattagtcgtagtttttcgtcgttgaaaatatcgaattgatcgggttgtatttcgtcgagcgttagtgcgtcgattaggttttgttcggtaaataatggtagattaacgtaggcgtgaatttttagatttttttgtttaggaattaaatcgttatagggatcgggtaattcgttgtttgcgggaaagcgtattatattttcggcgcgggtaatcgtttttagtcgtggatgtttttttagcgtaaagcgtttatcgagtatattttttgttagatcgtcgatggtaagcggaataaattgtcgcgaatcgtaacgtagta

SEQ ID NO: 4494 - DNA, 1232 bp, Artificial Sequence
  chemically treated genomic DNA (Homo sapiens) CpG-island No: 4494
tactacgttacgattcgcgacaatttattccgcttaccatcgacgatctaacaaaaaatatactcgataaacgctttacgctaaaaaaacatccacgactaaaaacgattacccgcgccgaaaatataatacgctttcccgcaaacaacgaattacccgatccctataacgatttaattcctaaacaaaaaaatctaaaaattcacgcctacgttaatctaccattatttaccgaacaaaacctaatcgacgcactaacgctcgacgaaatacaacccgatcaattcgatattttcaacgacgaaaaactacgactaattactacgctaacgacgaaaacgttaaacaatacgttactaattaaacaactaaaaaaccaaaatatactaccaaacgataccacgccgtttaaaacgataaaacaaacgcaaataattaacttatcccctaacataacgcaactaaaaaaaaaaattaaaattataacgacgtccgatctcaacgtcctaatcaacgataaaactaaaaccgataaaaaactaataacgaaaacgattcataaaacctcgccacgaacgataaatccgctaatctatctcaactatactacactaccgaaaaatatacgaaaaaataaattattcgaacatataaaaaaaacgtttactaacgctatcaataatcgcaacgaaaaatttaaaataacgaataacgacacgctatttctaaataaaatcgacgaattatcgttaacattacaaaccaaactactaaaaatattacaatataacgatattcaacgcgttaacgataaccgttatttacgaatcgatatacgcgtactaacgacgactaaccgcgatttacgcgaaaaaatactaacaaaacgattccgcgccgatttatttcatcgcctaaacgtatttccactttcgataccgccgctacgtaaacgaaacgataatatcattctactaacgaaatatttctacgaacaatatcgtttacgacaaaaactctcccgcgtaatattaaataccgaaacgcgaaatttactacaacactacaattttccgaaaaacgtacgcgaactaaaacatactattcatcgaacgataattctaacgaaaaccacccgcaacgacgataaaataattcttaaaacgcaacattttacttttcctaaaataacgttaccgacgccaaaaataacgacgatacccgttattaaa

SEQ ID NO: 4495 - DNA, 1232 bp, Artificial Sequence
  chemically treated genomic DNA (Homo sapiens) CpG-island No: 4495
tgttacgttacgattcgcggtagtttatttcgtttgttatcgacggtttggtaaaggatgtattcggtagacgttttgcgttggaagggtatttacggttggaagcgattgttcgcgtcggggatgtggtgcgttttttcgtagatagcgaattgttcgatttttatgacggtttgatttttgggtaggagagtttgaaggtttacgtttgcgttggtttgttattgtttgtcgggtaaaatttgatcggcgtattgacgttcgacgggatgtagttcgattagttcgatgtttttagcgacgaagagttacggttgattgttgcgttggcggcgggagcgttaagtaatgcgttgttgattgaataattggaaagttagaatatgttgttaggcgatgttacgtcgtttgaagcggtgaaatagacgtagatgattggtttgttttttggtatgacgtaattgaaaaaagagattgagattgtggcggcgttcgattttaacgttttgattagcggtgagattggaatcggtaaggagttggtggcgaaagcgatttatgaagtttcgttacgggcggtgaattcgttggtttattttaattgtgttgtattgtcggaaagtgtgcggaaaagtgagttgttcgggtatgtgaaaggagcgtttattggcgttattagtaatcgtagcgggaagtttgaaatggcggataacggtacgttgtttttggatgagatcggcgagttgtcgttggtattgtaggttaagttgttgagggtgttgtagtatggcgatatttagcgcgttggcgatgatcgttgtttgcgggtcgatgtgcgcgtgttggcggcgattaatcgcgatttacgcgaagaggtgttggtagggcgatttcgcgtcgatttgttttatcgtttgagcgtgtttttattttcggtgtcgtcgttgcgtgagcggggcgatgatgttattttgttggcggggtatttttgcgagtagtgtcgtttgcggtaggggttttttcgcgtggtattaagtgtcggagcgcgaaatttattgtaatattatagtttttcgggaaacgtgcgcgaattggaatatgttatttatcgggcggtagttttggcgagagttattcgtagcggcgatgaagtgatttttgaggcgtaatattttgttttttttgaggtgacgttgtcgacgttagaagtggcggcggtgttcgttgttaag

SEQ ID NO: 4496 - DNA, 1232 bp, Artificial Sequence
  chemically treated genomic DNA (Homo sapiens) CpG-island No: 4496
cttaacaacgaacaccgccgccacttctaacgtcgacaacgtcacctcaaaaaaaacaaaatattacgcctcaaaaatcacttcatcgccgctacgaataactctcgccaaaactaccgcccgataaataacatattccaattcgcgcacgtttcccgaaaaactataatattacaataaatttcgcgctccgacacttaataccacgcgaaaaaacccctaccgcaaacgacactactcgcaaaaataccccgccaacaaaataacatcatcgccccgctcacgcaacgacgacaccgaaaataaaaacacgctcaaacgataaaacaaatcgacgcgaaatcgccctaccaacacctcttcgcgtaaatcgcgattaatcgccgccaacacgcgcacatcgacccgcaaacaacgatcatcgccaacgcgctaaatatcgccatactacaacaccctcaacaacttaacctacaataccaacgacaactcgccgatctcatccaaaaacaacgtaccgttatccgccatttcaaacttcccgctacgattactaataacgccaataaacgctcctttcacatacccgaacaactcacttttccgcacactttccgacaatacaacacaattaaaataaaccaacgaattcaccgcccgtaacgaaacttcataaatcgctttcgccaccaactccttaccgattccaatctcaccgctaatcaaaacgttaaaatcgaacgccgccacaatctcaatctcttttttcaattacgtcataccaaaaaacaaaccaatcatctacgtctatttcaccgcttcaaacgacgtaacatcgcctaacaacatattctaactttccaattattcaatcaacaacgcattacttaacgctcccgccgccaacgcaacaatcaaccgtaactcttcgtcgctaaaaacatcgaactaatcgaactacatcccgtcgaacgtcaatacgccgatcaaattttacccgacaaacaataacaaaccaacgcaaacgtaaaccttcaaactctcctacccaaaaatcaaaccgtcataaaaatcgaacaattcgctatctacgaaaaaacgcaccacatccccgacgcgaacaatcgcttccaaccgtaaatacccttccaacgcaaaacgtctaccgaatacatcctttaccaaaccgtcgataacaaacgaaataaactaccgcgaatcgtaacgtaaca

SEQ ID NO: 4497 - DNA, 610 bp, Artificial Sequence
  chemically treated genomic DNA (Homo sapiens) CpG-island No: 4497
  unsure (567)
tcgcggaatacgtggtcgcgaacgaggcgaagatttttttcgaataggtcgagggttagatgggggaggacgaggcggcggttatgttggaagtcgcgtttttatcgatgttgggtttttttgcgattttgcgttagaaggtatttttgcgtatgatcggcgaacgtattcgcgatggggagattatcgaggtgaagggtttggatgatttcgtttagaatcggtcggtttcgaattcgtttgtttagaattcgtttgttacggatcgttcggttttgaataagttagcgcggcgtaggcgtttttcggttagcgacgcgttagtcgttttttgatttattgttcggttagcgttttttttagcgtatcgggattcgtttagaagcggcggatggtaaagtcggagattatcgcggcggtcgaacgaatcgcgttgcgcgtttcgttttcgttttattcggttacgattagtcgttcgttttagttttcgtagaacggcgcgcgtagttcggtgacgttgtttttgatcgtcggatagagtttcgcgtttttggtcgtttttatcgngatgttttttttttttttttttgtttttttttttttttgtatt

SEQ ID NO: 4498 - DNA, 610 bp, Artificial Sequence
  chemically treated genomic DNA (Homo sapiens) CpG-island No: 4498
  unsure (44)
aatacaaaaaaaaaaaaaaacaaaaaaaaaaaaaaaaaacatcncgataaaaacgaccaaaaacgcgaaactctatccgacgatcaaaaacaacgtcaccgaactacgcgcgccgttctacgaaaactaaaacgaacgactaatcgtaaccgaataaaacgaaaacgaaacgcgcaacgcgattcgttcgaccgccgcgataatctccgactttaccatccgccgcttctaaacgaatcccgatacgctaaaaaaaacgctaaccgaacaataaatcaaaaaacgactaacgcgtcgctaaccgaaaaacgcctacgccgcgctaacttattcaaaaccgaacgatccgtaacaaacgaattctaaacaaacgaattcgaaaccgaccgattctaaacgaaatcatccaaacccttcacctcgataatctccccatcgcgaatacgttcgccgatcatacgcaaaaataccttctaacgcaaaatcgcaaaaaaacccaacatcgataaaaacgcgacttccaacataaccgccgcctcgtcctcccccatctaaccctcgacctattcgaaaaaaatcttcgcctcgttcgcgaccacgtattccgcga

SEQ ID NO: 4499 - DNA, 610 bp, Artificial Sequence
  chemically treated genomic DNA (Homo sapiens) CpG-island No: 4499
  unsure (44)
aatataaagagagagagaggtagagagagagagagaaggtattncgatggaggcggttaaggacgcggaattttattcggcggttaggagtagcgttatcgggttgcgcgcgtcgttttacgaaggttggaacgagcggttggtcgtggtcggatggagcgaggacgaagcgcgtaacgcggttcgttcggtcgtcgcgatgattttcggttttgttattcgtcgtttttgggcggatttcgatacgttggaggaaacgttgatcgagtagtggattaaggagcggttggcgcgtcgttgatcggggagcgtttgcgtcgcgttggtttgtttagggtcggacgattcgtggtagacgggttttgggtaggcgggttcggggtcggtcggttttgggcggggttatttaggttttttatttcgatagtttttttatcgcgggtgcgttcgtcgattatgcgtaggaatgttttttggcgtaggatcgtaaagaagtttagtatcgatggaagcgcgatttttagtatagtcgtcgtttcgtttttttttatttggttttcgatttgttcgaggaagattttcgtttcgttcgcggttacgtatttcgcgg

SEQ ID NO: 4500 - DNA, 610 bp, Artificial Sequence
  chemically treated genomic DNA (Homo sapiens) CpG-island No: 4500
  unsure (567)
ccgcgaaatacgtaaccgcgaacgaaacgaaaatcttcctcgaacaaatcgaaaaccaaataaaaaaaaacgaaacgacgactatactaaaaatcgcgcttccatcgatactaaacttctttacgatcctacgccaaaaaacattcctacgcataatcgacgaacgcacccgcgataaaaaaactatcgaaataaaaaacctaaataaccccgcccaaaaccgaccgaccccgaacccgcctacccaaaacccgtctaccacgaatcgtccgaccctaaacaaaccaacgcgacgcaaacgctccccgatcaacgacgcgccaaccgctccttaatccactactcgatcaacgtttcctccaacgtatcgaaatccgcccaaaaacgacgaataacaaaaccgaaaatcatcgcgacgaccgaacgaaccgcgttacgcgcttcgtcctcgctccatccgaccacgaccaaccgctcgttccaaccttcgtaaaacgacgcgcgcaacccgataacgctactcctaaccgccgaataaaattccgcgtccttaaccgcctccatcgnaataccttctctctctctctctacctctctctctctttatatt

SEQ ID NO: 4501 - DNA, 622 bp, Artificial Sequence
  chemically treated genomic DNA (Homo sapiens) CpG-island No: 4501
tcgttagcggcgtttgaggggagcgaggatcgcgtagcgttttttcggggagagacgtgattaggagtcgcgttaggattgtaaaggttggttttggcggggttttcgggtcgtcgggtttttaatgtggggtttgggacgggacgagaagggggtgcgttttgcggatcgttttttttttttcggatttaaagagtttacgcgaggttatagtttttttttttttttttcgagttataaaaaggaggaggggtcgttttcgaggagaaattcgagtcgggcggagggggtcgagtgacggcgggaggaaggatttttcggaggaagggttcgaagtagggagagcggggaattcgggtttaggttatttcgttcgcgcgtacggtttggagtttggggaattggggtgattttagcgaggttttaaggaaacgaagacggcgttggggagattggttttagaagtaatttgagatcgagcgtttaggaatattttgtacgacgcgtcgggcgttttagtggtttcgtgtgttttggttttgcggcgtgtgttttttcgggattttattttcgttgtagaagtaattatttgattttttatttagaatttgcgtaggaatgt

SEQ ID NO: 4502 - DNA, 622 bp, Artificial Sequence
  chemically treated genomic DNA (Homo sapiens) CpG-island No: 4502
acattcctacgcaaattctaaataaaaaatcaaataattacttctacaacgaaaataaaatcccgaaaaaacacacgccgcaaaaccaaaacacacgaaaccactaaaacgcccgacgcgtcgtacaaaatattcctaaacgctcgatctcaaattacttctaaaaccaatctccccaacgccgtcttcgtttccttaaaacctcgctaaaatcaccccaattccccaaactccaaaccgtacgcgcgaacgaaataacctaaacccgaattccccgctctccctacttcgaacccttcctccgaaaaatccttcctcccgccgtcactcgaccccctccgcccgactcgaatttctcctcgaaaacgacccctcctcctttttataactcgaaaaaaaaaaaaaaaaactataacctcgcgtaaactctttaaatccgaaaaaaaaaaaacgatccgcaaaacgcacccccttctcgtcccgtcccaaaccccacattaaaaacccgacgacccgaaaaccccgccaaaaccaacctttacaatcctaacgcgactcctaatcacgtctctccccgaaaaaacgctacgcgatcctcgctcccctcaaacgccgctaacga

SEQ ID NO: 4503 - DNA, 622 bp, Artificial Sequence
  chemically treated genomic DNA (Homo sapiens) CpG-island No: 4503
atatttttacgtagattttaaatggaggattaaatggttgtttttgtaacgaagatgggatttcgaaagggtatacgtcgtagaattaaggtatacggggttattgagacgttcggcgcgtcgtatagagtgtttttgggcgttcggttttaggttatttttagaattagtttttttaacgtcgttttcgtttttttaaaatttcgttagagttattttagttttttagattttaggtcgtgcgcgcgggcggggtggtttgagttcgggtttttcgttttttttgtttcgggtttttttttcgaggggttttttttttcgtcgttattcggtttttttcgttcgattcgggttttttttcggaggcggtttttttttttttttataattcgggggaggggagaggggattgtggtttcgcgtggattttttgggttcggggggaaagaggcgattcgtaaggcgtatttttttttcgtttcgttttaaattttatattgaggattcggcgattcgaaagtttcgttagagttagtttttgtagttttaacgcgatttttggttacgttttttttcgaaggggcgttgcgcggttttcgttttttttaaacgtcgttggcga

SEQ ID NO: 4504 - DNA, 622 bp, Artificial Sequence
  chemically treated genomic DNA (Homo sapiens) CpG-island No: 4504
tcgccaacgacgtttaaaaaaaacgaaaaccgcgcaacgccccttcgaaaaaaaacgtaaccaaaaatcgcgttaaaactacaaaaactaactctaacgaaactttcgaatcgccgaatcctcaatataaaatttaaaacgaaacgaaaaaaaaatacgccttacgaatcgcctctttccccccgaacccaaaaaatccacgcgaaaccacaatcccctctcccctcccccgaattataaaaaaaaaaaaaaaccgcctccgaaaaaaaacccgaatcgaacgaaaaaaaccgaataacgacgaaaaaaaaaacccctcgaaaaaaaaacccgaaacaaaaaaaacgaaaaacccgaactcaaaccaccccgcccgcgcgcacgacctaaaatctaaaaaactaaaataactctaacgaaattttaaaaaaacgaaaacgacgttaaaaaaactaattctaaaaataacctaaaaccgaacgcccaaaaacactctatacgacgcgccgaacgtctcaataaccccgtataccttaattctacgacgtataccctttcgaaatcccatcttcgttacaaaaacaaccatttaatcctccatttaaaatctacgtaaaaatat

SEQ ID NO: 4505 - DNA, 615 bp, Artificial Sequence
  chemically treated genomic DNA (Homo sapiens) CpG-island No: 4505
gtcgcggtagagttattcgattacgcgtcggtttagggttcgttttttttgtgtttttgattaaagaggtagtcgcggagacgcgcggcgtagagtagagtgtcgcggtatttagttcgggcggggcggcgacggtttttttcgggtcgtcgtaggatcgaagttaaggcggcgtttattttattatttttcgttcgtttcgtatttttcgatcgttttcgcgtattttcgcgtcgggtcgtcggtgcgtaacgttttggggaagaagcgttttcgggtatttttagggcgcgtcgttttggtcgtgtcgtttttatttaagggagatttcggggggacggggggaaaagttttgttttttttaaattttacgatttcgatgttatatacgtagaatttaatataatgttacgcgcgatggcgttataagaggagttgggtggcgtacggtgtttggggtagcgagtcggtcggtagtttagttatgcgttcgaataggtagcggtgcgtggcggcgatatatatcgttagttcggtttgaataaaattttaaatattcgttgcgtttattatttagattttttgttatgttttaaatatgttttgttttttttt

SEQ ID NO: 4506 - DNA, 615 bp, Artificial Sequence
  chemically treated genomic DNA (Homo sapiens) CpG-island No: 4506
aaaaaaaaacaaaacatatttaaaacataacaaaaaatctaaataataaacgcaacgaatatttaaaattttattcaaaccgaactaacgatatatatcgccgccacgcaccgctacctattcgaacgcataactaaactaccgaccgactcgctaccccaaacaccgtacgccacccaactcctcttataacgccatcgcgcgtaacattatattaaattctacgtatataacatcgaaatcgtaaaatttaaaaaaaacaaaacttttccccccgtccccccgaaatctcccttaaataaaaacgacacgaccaaaacgacgcgccctaaaaatacccgaaaacgcttcttccccaaaacgttacgcaccgacgacccgacgcgaaaatacgcgaaaacgatcgaaaaatacgaaacgaacgaaaaataataaaataaacgccgccttaacttcgatcctacgacgacccgaaaaaaaccgtcgccgccccgcccgaactaaataccgcgacactctactctacgccgcgcgtctccgcgactacctctttaatcaaaaacacaaaaaaaacgaaccctaaaccgacgcgtaatcgaataactctaccgcgac

SEQ ID NO: 4507 - DNA, 615 bp, Artificial Sequence
  chemically treated genomic DNA (Homo sapiens) CpG-island No: 4507
agagaggagtagagtatgtttgggatataataaaggatttgagtagtaaacgtagcgagtgtttggggttttatttagatcgggttgacggtgtgtgtcgtcgttacgtatcgttgtttgttcgaacgtatggttgagttgtcgatcggttcgttattttaaatatcgtacgttatttaattttttttgtaacgttatcgcgcgtggtattgtgttgggttttgcgtgtgtggtatcggagtcgtggaatttagggggaataaggttttttttttcgttttttcggggttttttttgggtgggggcgatacggttaaggcggcgcgttttgggggtgttcgggggcgttttttttttagggcgttacgtatcggcggttcggcgcggaggtgcgcgggggcgatcgggagatgcggggcgggcgaggggtggtgggatgggcgtcgttttaatttcgattttgcggcggttcgagagaagtcgtcgtcgtttcgttcgagttgggtgtcgcggtattttgttttgcgtcgcgcgttttcgcggttgtttttttaattaggaatatagaaggggcgggttttgagtcggcgcgtaatcggatagttttgtcgcggt

SEQ ID NO: 4508 - DNA, 615 bp, Artificial Sequence
  chemically treated genomic DNA (Homo sapiens) CpG-island No: 4508
accgcgacaaaactatccgattacgcgccgactcaaaacccgccccttctatattcctaattaaaaaaacaaccgcgaaaacgcgcgacgcaaaacaaaataccgcgacacccaactcgaacgaaacgacgacgacttctctcgaaccgccgcaaaatcgaaattaaaacgacgcccatcccaccacccctcgcccgccccgcatctcccgatcgcccccgcgcacctccgcgccgaaccgccgatacgtaacgccctaaaaaaaaaacgcccccgaacacccccaaaacgcgccgccttaaccgtatcgcccccacccaaaaaaaaccccgaaaaaacgaaaaaaaaaaccttattccccctaaattccacgactccgataccacacacgcaaaacccaacacaataccacgcgcgataacgttacaaaaaaaattaaataacgtacgatatttaaaataacgaaccgatcgacaactcaaccatacgttcgaacaaacaacgatacgtaacgacgacacacaccgtcaacccgatctaaataaaaccccaaacactcgctacgtttactactcaaatcctttattatatcccaaacatactctactcctctct

SEQ ID NO: 4509 - DNA, 615 bp, Artificial Sequence
  chemically treated genomic DNA (Homo sapiens) CpG-island No: 4509
cgcgtataggaaggtatcggtgtattttgagtaaatattgttcgtttttaacgtttattgggaataggtttttcgggaaggttttaaatttttttagtttcgtttattttgcgggcgggagcgcggcgttcgggtgttttatttgcgtcgggcggttcggttttcgttggtcggagtttgtagatttggcgtttaggtcgattttttcggagttgggtcgcgcgcgtcgggttaatgagcgcgtttcgcgagggtttcgtttttttcgcgcgcgttgattggttcgcggttttcgaggcgagtcgcgacggttgcgggtttaagaatttttcggtcgagtgggagtggcgcgcgcgtttagtcgcgtttcgttttttttcgttgcgttttttcgttttttttttgagttttcgggtttcggtagcgggttggcggggcgtcgtattgtatattttgggggcgtcgtagtgttcgtgggatggggtagcgggttgtagttggcggtcggaattcgcgcgtagttcgggtgagtagaggcgggtttttcgggagagtataaaagaataggggattggtgttagcggttcggtttaggcggggtttggttaaggtagg

SEQ ID NO: 4510 - DNA, 615 bp, Artificial Sequence
  chemically treated genomic DNA (Homo sapiens) CpG-island No: 4510
cctaccttaaccaaaccccgcctaaaccgaaccgctaacaccaatcccctattcttttatactctcccgaaaaacccgcctctactcacccgaactacgcgcgaattccgaccgccaactacaacccgctaccccatcccacgaacactacgacgcccccaaaatatacaatacgacgccccgccaacccgctaccgaaacccgaaaactcaaaaaaaaaacgaaaaaacgcaacgaaaaaaaacgaaacgcgactaaacgcgcgcgccactcccactcgaccgaaaaattcttaaacccgcaaccgtcgcgactcgcctcgaaaaccgcgaaccaatcaacgcgcgcgaaaaaaacgaaaccctcgcgaaacgcgctcattaacccgacgcgcgcgacccaactccgaaaaaatcgacctaaacgccaaatctacaaactccgaccaacgaaaaccgaaccgcccgacgcaaataaaacacccgaacgccgcgctcccgcccgcaaaataaacgaaactaaaaaaatttaaaaccttcccgaaaaacctattcccaataaacgttaaaaacgaacaatatttactcaaaatacaccgataccttcctatacgcg

SEQ ID NO: 4511 - DNA, 615 bp, Artificial Sequence
  chemically treated genomic DNA (Homo sapiens) CpG-island No: 4511
tttgttttggttaggtttcgtttaagtcgggtcgttggtattaattttttgtttttttgtgttttttcgggaagttcgtttttatttattcgggttgcgcgcggatttcggtcgttagttgtagttcgttgttttattttacgaatattgcggcgtttttagagtgtgtaatgcggcgtttcgttagttcgttgtcggagttcgggagtttagggaaggagcgagggagcgtagcggggagaggcggggcgcggttagacgcgcgcgttatttttattcgatcggggaatttttagattcgtagtcgtcgcggttcgtttcgagggtcgcggattaattagcgcgcgcggggggagcggagttttcgcggggcgcgtttattggttcggcgcgcgcggtttaatttcgggagaatcggtttgagcgttaagtttgtaaatttcggttagcgggagtcgagtcgttcggcgtaggtggggtattcgggcgtcgcgttttcgttcgtagggtgagcggaattggagagatttgggattttttcgggaagtttgtttttagtgagcgttggaagcgagtagtgtttgtttagggtgtatcgatatttttttgtgcgcg

SEQ ID NO: 4512 - DNA, 615 bp, Artificial Sequence
  chemically treated genomic DNA (Homo sapiens) CpG-island No: 4512
cgcgcacaaaaaaatatcgatacaccctaaacaaacactactcgcttccaacgctcactaaaaacaaacttcccgaaaaaatcccaaatctctccaattccgctcaccctacgaacgaaaacgcgacgcccgaataccccacctacgccgaacgactcgactcccgctaaccgaaatttacaaacttaacgctcaaaccgattctcccgaaattaaaccgcgcgcgccgaaccaataaacgcgccccgcgaaaactccgctccccccgcgcgcgctaattaatccgcgaccctcgaaacgaaccgcgacgactacgaatctaaaaattccccgatcgaataaaaataacgcgcgcgtctaaccgcgccccgcctctccccgctacgctccctcgctccttccctaaactcccgaactccgacaacgaactaacgaaacgccgcattacacactctaaaaacgccgcaatattcgtaaaataaaacaacgaactacaactaacgaccgaaatccgcgcgcaacccgaataaataaaaacgaacttcccgaaaaaacacaaaaaaacaaaaaattaataccaacgacccgacttaaacgaaacctaaccaaaacaaa

SEQ ID NO: 4513 - DNA, 719 bp, Artificial Sequence
  chemically treated genomic DNA (Homo sapiens) CpG-island No: 4513
  unsure (9, 136, 416, 434, 440, 446, 488, 633, 642, 644)
ggtcgttanacgagtagttgtacggaggtgtagaagaaggaggttattgttatttttttgataagttgggggcgtgggaggtttcgggagttcgaagtcgtttcgagcgggggtgggcggtgagcggattttcggngtgttgattaggtgtttggtggtagagtagggaaggggggaacggacgtcgattttagggattttttattcgtttacgttttttggcgttggttatacgtcgtcgttttagtattaattggaggtttttagtggacgagtagtcgttcgagggtagtcgtttgagtcggtagatagcggttagttgggtagcggttcgaattttttcgtaatacgttttttagtatttcggtttgcggggtgtttaggagcgcgggcggtcggcgcggggatttaggatntcgggcgcggggtttatnggtagnggtcgnaggtcgttgaggtcgggtttttatttgcgtattcggggtcgntacgaggttcgggcgggggcggggcgggggcgggagttggattatttgtaattatttttcggttgcgtattttaatttcggttttttttttggaggttgcgtttaggtatcgcgttgaataagtcgtataggtgtgattcgggancgttggagntnagtttcggttgtatatttggaatcgtcgggagcgtggtagtggtgttttttttaatttatatgttacggttttag

SEQ ID NO: 4514 - DNA, 719 bp, Artificial Sequence
  chemically treated genomic DNA (Homo sapiens) CpG-island No: 4514
  unsure (76, 78, 87, 232, 274, 280, 286, 304, 584, 711)
ctaaaaccgtaacatataaattaaaaaaaacaccactaccacgctcccgacgattccaaatatacaaccgaaactnanctccaacgntcccgaatcacacctatacgacttattcaacgcgatacctaaacgcaacctccaaaaaaaaaaccgaaattaaaatacgcaaccgaaaaataattacaaataatccaactcccgcccccgccccgcccccgcccgaacctcgtancgaccccgaatacgcaaataaaaacccgacctcaacgacctncgaccnctaccnataaaccccgcgcccganatcctaaatccccgcgccgaccgcccgcgctcctaaacaccccgcaaaccgaaatactaaaaaacgtattacgaaaaaattcgaaccgctacccaactaaccgctatctaccgactcaaacgactaccctcgaacgactactcgtccactaaaaacctccaattaatactaaaacgacgacgtataaccaacgccaaaaaacgtaaacgaataaaaaatccctaaaatcgacgtccgttccccccttccctactctaccaccaaacacctaatcaacacnccgaaaatccgctcaccgcccacccccgctcgaaacgacttcgaactcccgaaacctcccacgcccccaacttatcaaaaaaataacaataacctccttcttctacacctccgtacaactactcgtntaacgacc

SEQ ID NO: 4515 - DNA, 719 bp, Artificial Sequence
  chemically treated genomic DNA (Homo sapiens) CpG-island No: 4515
  unsure (76, 78, 87, 232, 274, 280, 286, 304, 584, 711)
ttggaatcgtggtatgtggattgagaaaaatattattattacgttttcggcggttttaggtgtgtagtcggggttngnttttagcgntttcgagttatatttgtgcggtttatttaacgcgatgtttggacgtagtttttagagaggaggtcgggattggaatacgtagtcggggaatggttgtaggtggtttagttttcgttttcgtttcgttttcgttcgggtttcgtgncggtttcgggtgcgtaggtgaaagttcggttttagcggtttncggttnttgttnatggatttcgcgttcggngttttagattttcgcgtcggtcgttcgcgtttttgggtatttcgtaagtcgaggtgttggaggacgtgttgcgggagagttcgggtcgttgtttagttggtcgttgtttgtcggtttaagcggttgttttcgggcggttattcgtttattgaaaatttttagttggtgttggagcggcggcgtgtggttaacgttaaggagcgtgagcgggtgagggatttttagggtcgacgttcgttttttttttttttgttttattattaaatatttggttaatatntcgggggttcgtttatcgtttattttcgttcgaggcgatttcgagttttcgaggttttttacgtttttagtttgttaggagaatggtagtggttttttttttttgtattttcgtgtagttgttcgtntggcggtt

SEQ ID NO: 4516 - DNA, 719 bp, Artificial Sequence
  chemically treated genomic DNA (Homo sapiens) CpG-island No: 4516
  unsure (9, 136, 416, 434, 440, 446, 488, 633, 642, 644)
aaccgccanacgaacaactacacgaaaatacaaaaaaaaaaaaccactaccattctcctaacaaactaaaaacgtaaaaaacctcgaaaactcgaaatcgcctcgaacgaaaataaacgataaacgaacccccganatattaaccaaatatttaataataaaacaaaaaaaaaaaaaacgaacgtcgaccctaaaaatccctcacccgctcacgctccttaacgttaaccacacgccgccgctccaacaccaactaaaaattttcaataaacgaataaccgcccgaaaacaaccgcttaaaccgacaaacaacgaccaactaaacaacgacccgaactctcccgcaacacgtcctccaacacctcgacttacgaaatacccaaaaacgcgaacgaccgacgcgaaaatctaaaacnccgaacgcgaaatccatnaacaanaaccgnaaaccgctaaaaccgaactttcacctacgcacccgaaaccgncacgaaacccgaacgaaaacgaaacgaaaacgaaaactaaaccacctacaaccattccccgactacgtattccaatcccgacctcctctctaaaaactacgtccaaacatcgcgttaaataaaccgcacaaatataactcgaaancgctaaaancnaaccccgactacacacctaaaaccgccgaaaacgtaataataatatttttctcaatccacataccacgattccaa

SEQ ID NO: 4517 - DNA, 579 bp, Artificial Sequence
  chemically treated genomic DNA (Homo sapiens) CpG-island No: 4517
agagtattttgtatcgcggcgttcgggtggttgttgttgaagaagacgtcgtgatacgtttgttcgtttatggcggtcgtagagtatcggggagttgtttcggcgtttagtagcggaggtaatagcggcggtaagtagcgttttttttttttttcgtcgtttcgtttatattttagttagtagggagtagttttttgagcgcgggggtcggtcgaatcgtgacgggtcgggaaatgggttaaattgcggcgcgttggcggttcggggtttgtcgggaaatgtagtcgcggggcggggcgcgggtagcgcgttcgggcggtttgtagcggttgtgtttttagatttgcgtgtttcgggttcgttcgtttcggttcgtcgcgtagggggtcggttgggcggggagagcgggttttttttggggtcggttgggcgcgggcgggcgggtttttagtttttttcgtacgcggaagattcgcgggcggcgtattttgttgtatttaaaaatatatatatatatatatatatatatatacggaagttgttacgttaagatatttgttcgagttgtatattttttaa

SEQ ID NO: 4518 - DNA, 579 bp, Artificial Sequence
  chemically treated genomic DNA (Homo sapiens) CpG-island No: 4518
ttaaaaaatatacaactcgaacaaatatcttaacgtaacaacttccgtatatatatatatatatatatatatatatttttaaatacaacaaaatacgccgcccgcgaatcttccgcgtacgaaaaaaactaaaaacccgcccgcccgcgcccaaccgaccccaaaaaaaacccgctctccccgcccaaccgaccccctacgcgacgaaccgaaacgaacgaacccgaaacacgcaaatctaaaaacacaaccgctacaaaccgcccgaacgcgctacccgcgccccgccccgcgactacatttcccgacaaaccccgaaccgccaacgcgccgcaatttaacccatttcccgacccgtcacgattcgaccgacccccgcgctcaaaaaactactccctactaactaaaatataaacgaaacgacgaaaaaaaaaaaaaacgctacttaccgccgctattacctccgctactaaacgccgaaacaactccccgatactctacgaccgccataaacgaacaaacgtatcacgacgtcttcttcaacaacaaccacccgaacgccgcgatacaaaatactct

SEQ ID NO: 4519 - DNA, 579 bp, Artificial Sequence
  chemically treated genomic DNA (Homo sapiens) CpG-island No: 4519
ttaaaagatgtgtagttcgggtaggtattttggcgtgataattttcgtgtgtgtgtgtgtgtgtgtgtgtgtgtgtttttgaatgtaatagggtgcgtcgttcgcgaatttttcgcgtgcgaggaagattggagattcgttcgttcgcgtttagtcggttttagaggaaattcgtttttttcgtttagtcggttttttacgcggcgagtcggggcgggcgggttcgaggtacgtaagtttggaggtatagtcgttataggtcgttcgggcgcgttattcgcgtttcgtttcgcgattatatttttcggtaagtttcgggtcgttagcgcgtcgtagtttgatttatttttcggttcgttacggttcggtcggttttcgcgtttaggaggttgttttttgttgattggggtgtgggcgggacggcggagggaggaggaggcgttgtttgtcgtcgttgttgttttcgttgttgggcgtcggggtagtttttcggtattttgcggtcgttatggacgagtaggcgtgttacggcgttttttttagtaataattattcgggcgtcgcggtgtaaggtgtttt

SEQ ID NO: 4520 - DNA, 579 bp, Artificial Sequence
  chemically treated genomic DNA (Homo sapiens) CpG-island No: 4520
aaaacaccttacaccgcgacgcccgaataattattactaaaaaaaacgccgtaacacgcctactcgtccataacgaccgcaaaataccgaaaaactaccccgacgcccaacaacgaaaacaacaacgacgacaaacaacgcctcctcctccctccgccgtcccgcccacaccccaatcaacaaaaaacaacctcctaaacgcgaaaaccgaccgaaccgtaacgaaccgaaaaataaatcaaactacgacgcgctaacgacccgaaacttaccgaaaaatataatcgcgaaacgaaacgcgaataacgcgcccgaacgacctataacgactatacctccaaacttacgtacctcgaacccgcccgccccgactcgccgcgtaaaaaaccgactaaacgaaaaaaacgaatttcctctaaaaccgactaaacgcgaacgaacgaatctccaatcttcctcgcacgcgaaaaattcgcgaacgacgcaccctattacattcaaaaacacacacacacacacacacacacacacacgaaaattatcacgccaaaatacctacccgaactacacatcttttaa

SEQ ID NO: 4521 - DNA, 719 bp, Artificial Sequence
  chemically treated genomic DNA (Homo sapiens) CpG-island No: 4521
tcgtgcgtagtttcgaaggacggttgtaggtgcgttttttgcgcgttagttttaagttgggatgcgggggcggtagtgcgtttgcgagtgcgtcggtatgtcggcggtttacgggtggaagagtttggagggtgagtttagcgcggggtcgtagggtatttgtaggaagttacggcggtcgcgcgttcggttggcgatgcggttataggtggcggttagtaatgttaggggcgagtgtttgtttaggttcggggaggcgttgggggtgcggttttgtataggcggcgagggagggcggagaagagataaaaggttagttttaagcgcggatttcgggttagttcgtcgtttttacgttcgttattatatcgtcgtttttttttcgtttcggtcgtttttttttcgttatcgtattttacgtacgtatttatcggtcgagggaaatttttggtgtttgcgttatttgaacgtggggttcgcgagcgttttttgttaaattatttggtgtattgagacgttatttagttttagaggaagtaggcgcgaagtgggagggggaggtattcgacgggtttttttcggtttcgtggttagtaagagtcgggaaatatttataatttcgtcggtcggtcgtttttttttttattttttaagtttttttgtttttattgttttcgcgtttttttttggttcgttttaggttgaaattagtaggaggg

SEQ ID NO: 4522 - DNA, 719 bp, Artificial Sequence
  chemically treated genomic DNA (Homo sapiens) CpG-island No: 4522
ccctcctactaatttcaacctaaaacgaaccaaaaaaaaacgcgaaaacaataaaaacaaaaaaacttaaaaaataaaaaaaaaaacgaccgaccgacgaaattataaatatttcccgactcttactaaccacgaaaccgaaaaaaacccgtcgaatacctccccctcccacttcgcgcctacttcctctaaaactaaataacgtctcaatacaccaaataatttaacaaaaaacgctcgcgaaccccacgttcaaataacgcaaacaccaaaaatttccctcgaccgataaatacgtacgtaaaatacgataacgaaaaaaaaacgaccgaaacgaaaaaaaaacgacgatataataacgaacgtaaaaacgacgaactaacccgaaatccgcgcttaaaactaaccttttatctcttctccgccctccctcgccgcctatacaaaaccgcacccccaacgcctccccgaacctaaacaaacactcgcccctaacattactaaccgccacctataaccgcatcgccaaccgaacgcgcgaccgccgtaacttcctacaaataccctacgaccccgcgctaaactcaccctccaaactcttccacccgtaaaccgccgacataccgacgcactcgcaaacgcactaccgcccccgcatcccaacttaaaactaacgcgcaaaaaacgcacctacaaccgtccttcgaaactacgcacga

SEQ ID NO: 4523 - DNA, 719 bp, Artificial Sequence
  chemically treated genomic DNA (Homo sapiens) CpG-island No: 4523
tttttttgttgattttagtttggggcgggttagggaggagcgcgaaggtagtgaggataagagagtttaaaagatgggagggagagcggtcggtcggcggggttgtgggtgtttttcgatttttattgattacggagtcgggaggggttcgtcggatgttttttttttttatttcgcgtttgttttttttaaggttggatggcgttttagtgtattaagtagtttagtaagaagcgttcgcgggttttacgtttaggtagcgtaggtattaaaagtttttttcggtcggtgggtgcgtgcgtggggtgcggtggcgggggagggacggtcgggacggaggaggggcggcggtataatagcgggcgtgggggcggcgggttggttcggagttcgcgtttggagttaattttttgtttttttttcgttttttttcgtcgtttatgtaggatcgtatttttagcgttttttcggatttgggtaagtattcgtttttggtattgttggtcgttatttgtagtcgtatcgttagtcgggcgcgcggtcgtcgtgattttttgtaggtgttttacgatttcgcgttgggtttattttttaggtttttttattcgtggatcgtcgatatgtcggcgtattcgtaggcgtattgtcgttttcgtattttagtttggggttgacgcgtagaagacgtatttgtagtcgtttttcggggttgcgtacga

SEQ ID NO: 4524 - DNA, 719 bp, Artificial Sequence
  chemically treated genomic DNA (Homo sapiens) CpG-island No: 4524
tcgtacgcaaccccgaaaaacgactacaaatacgtcttctacgcgtcaaccccaaactaaaatacgaaaacgacaatacgcctacgaatacgccgacatatcgacgatccacgaataaaaaaacctaaaaaataaacccaacgcgaaatcgtaaaacacctacaaaaaatcacgacgaccgcgcgcccgactaacgatacgactacaaataacgaccaacaataccaaaaacgaatacttacccaaatccgaaaaaacgctaaaaatacgatcctacataaacgacgaaaaaaaacgaaaaaaaaacaaaaaattaactccaaacgcgaactccgaaccaacccgccgcccccacgcccgctattataccgccgcccctcctccgtcccgaccgtccctcccccgccaccgcaccccacgcacgcacccaccgaccgaaaaaaacttttaatacctacgctacctaaacgtaaaacccgcgaacgcttcttactaaactacttaatacactaaaacgccatccaaccttaaaaaaaacaaacgcgaaataaaaaaaaaaaacatccgacgaacccctcccgactccgtaatcaataaaaatcgaaaaacacccacaaccccgccgaccgaccgctctccctcccatcttttaaactctcttatcctcactaccttcgcgctcctccctaacccgccccaaactaaaatcaacaaaaaaa

SEQ ID NO: 4525 - DNA, 553 bp, Artificial Sequence
  chemically treated genomic DNA (Homo sapiens) CpG-island No: 4525
tttgcgtagcgtattcgtggagagtagggattagggcgggtaggaagtatttatttcgggaggttgggtggtcggcgttgggatggggttggttgagaagtcgcgggaggagaggatttggttgaaaagttacggttgggcgttgggaagtttaggtggtcgttagtttatttatttcggttttgcgatagcgagtcgggtattttcgttttttttttgtatagcgtttagcgattcgttcggttcggttttgataggcgtaatttgttcggcgttatttttagttgttttttcgttttcgttagttttttttcgtacgcgagcgttaggagaagagagagattcggagaggcggttgtacggtttcggggtaggcgggggtagagtggggaggcggggatcggatcggcggggaaattacgaggtcgttgttcgcgggggtagttagtcggcggagcggcggggtttttttgtaggtgtttgatcgtttttggagttttatagggcgattataaatttagtttacggttttgcgttcggaaggaaaaaaaaa

SEQ ID NO: 4526 - DNA, 553 bp, Artificial Sequence
  chemically treated genomic DNA (Homo sapiens) CpG-island No: 4526
tttttttttccttccgaacgcaaaaccgtaaactaaatttataatcgccctataaaactccaaaaacgatcaaacacctacaaaaaaaccccgccgctccgccgactaactacccccgcgaacaacgacctcgtaatttccccgccgatccgatccccgcctccccactctacccccgcctaccccgaaaccgtacaaccgcctctccgaatctctctcttctcctaacgctcgcgtacgaaaaaaaactaacgaaaacgaaaaaacaactaaaaataacgccgaacaaattacgcctatcaaaaccgaaccgaacgaatcgctaaacgctatacaaaaaaaaaacgaaaatacccgactcgctatcgcaaaaccgaaataaataaactaacgaccacctaaacttcccaacgcccaaccgtaacttttcaaccaaatcctctcctcccgcgacttctcaaccaaccccatcccaacgccgaccacccaacctcccgaaataaatacttcctacccgccctaatccctactctccacgaatacgctacgcaaa

SEQ ID NO: 4527 - DNA, 553 bp, Artificial Sequence
  chemically treated genomic DNA (Homo sapiens) CpG-island No: 4527
ttttttttttttttcgggcgtaaaatcgtgagttggatttataatcgttttataaagttttagaggcggttaggtatttgtagaggagtttcgtcgtttcgtcgattagttgttttcgcgagtaacggtttcgtgattttttcgtcgattcggttttcgtttttttattttgttttcgtttatttcggagtcgtgtagtcgttttttcgaatttttttttttttttggcgttcgcgtgcgagagggaattagcgagaacgaggaagtagttggaggtgacgtcgggtagattacgtttgttagggtcgagtcgagcggatcgttgggcgttgtgtagaggaaaggcgggagtgttcggttcgttgtcgtagagtcgaggtgggtaagttagcgattatttggattttttagcgtttaatcgtggttttttagttaggtttttttttttcgcggttttttaattaattttattttagcgtcggttatttaatttttcgaaatgagtgttttttgttcgttttagtttttgttttttacgggtgcgttgcgtagg

SEQ ID NO: 4528 - DNA, 553 bp, Artificial Sequence
  chemically treated genomic DNA (Homo sapiens) CpG-island No: 4528
cctacgcaacgcacccgtaaaaaacaaaaactaaaacgaacaaaaaacactcatttcgaaaaattaaataaccgacgctaaaataaaattaattaaaaaaccgcgaaaaaaaaaaacctaactaaaaaaccacgattaaacgctaaaaaatccaaataatcgctaacttacccacctcgactctacgacaacgaaccgaacactcccgcctttcctctacacaacgcccaacgatccgctcgactcgaccctaacaaacgtaatctacccgacgtcacctccaactacttcctcgttctcgctaattccctctcgcacgcgaacgccaaaaaaaaaaaaaaattcgaaaaaacgactacacgactccgaaataaacgaaaacaaaataaaaaaacgaaaaccgaatcgacgaaaaaatcacgaaaccgttactcgcgaaaacaactaatcgacgaaacgacgaaactcctctacaaatacctaaccgcctctaaaactttataaaacgattataaatccaactcacgattttacgcccgaaaaaaaaaaaaaa

SEQ ID NO: 4529 - DNA, 667 bp, Artificial Sequence
  chemically treated genomic DNA (Homo sapiens) CpG-island No: 4529
ttcgtttaatttcggttttagcgattttgagttttttattttggtgagttttgacgtgtttcgcgaggtggtcgttgcgtatgaagcgtttgtcgtattcgggataggtaaagcgtttttcgttcgtgtgagttcgtaggtgtcgttgtagttcgttcgagcgcgtgaagtttttttcgtagaagagttagttgtatacgaagggtcgttcgttcgtgtgttagcgtaggtgcgtttttaggtgcgacgttttttcgtatattttgtcgtagttcggtacgtggtatacgtgttgttttttttttttcggtttcgttcgggggcgtcgtcgtcgtttggtagttgggatagcggtagcggcggtattttttggtcgtggtcgttaggggggttttggtttgtagtagcgcggcgatttggttttggtattgcgtaaagttcgacgggtttaatattaggtttttttgtagggcggcggcggtagtagtagcggcgtagaggcggggaagcggggcgcgtggggggttcggtataggcgtcggagaggtcgtttttcggaatttcggagttttcggttcggcgttcgttgcgggatgttttattacgggaggtcgtcgggggtcgggttgggtgataattggcggtaggtgggcggcgggggcggtgg

SEQ ID NO: 4530 - DNA, 667 bp, Artificial Sequence
  chemically treated genomic DNA (Homo sapiens) CpG-island No: 4530
ccaccgcccccgccgcccacctaccgccaattatcacccaacccgacccccgacgacctcccgtaataaaacatcccgcaacgaacgccgaaccgaaaactccgaaattccgaaaaacgacctctccgacgcctataccgaaccccccacgcgccccgcttccccgcctctacgccgctactactaccgccgccgccctacaaaaaaacctaatattaaacccgtcgaactttacgcaataccaaaaccaaatcgccgcgctactacaaaccaaaacccccctaacgaccacgaccaaaaaataccgccgctaccgctatcccaactaccaaacgacgacgacgcccccgaacgaaaccgaaaaaaaaaaaacaacacgtataccacgtaccgaactacgacaaaatatacgaaaaaacgtcgcacctaaaaacgcacctacgctaacacacgaacgaacgacccttcgtatacaactaactcttctacgaaaaaaacttcacgcgctcgaacgaactacaacgacacctacgaactcacacgaacgaaaaacgctttacctatcccgaatacgacaaacgcttcatacgcaacgaccacctcgcgaaacacgtcaaaactcaccaaaataaaaaactcaaaatcgctaaaaccgaaattaaacgaa

SEQ ID NO: 4531 - DNA, 667 bp, Artificial Sequence
  chemically treated genomic DNA (Homo sapiens) CpG-island No: 4531
ttatcgttttcgtcgtttatttgtcgttagttgttatttaattcggttttcgacgatttttcgtggtggagtatttcgtagcgggcgtcgggtcgggggtttcggggtttcgggaagcggttttttcggcgtttgtgtcgggttttttacgcgtttcgttttttcgtttttgcgtcgttgttgttgtcgtcgtcgttttataaagaggtttggtgttgggttcgtcggattttgcgtagtattagagttagatcgtcgcgttgttgtagattaaggtttttttggcggttacggttaggaggtgtcgtcgttgtcgttgttttaattgttaggcggcggcggcgttttcgagcggagtcggggaagaagaagtagtacgtgtgttacgtgtcgggttgcggtaaggtgtacgggaagacgtcgtatttgaaggcgtatttgcgttggtatacgggcgagcgatttttcgtgtgtaattggtttttttgcgggaagagttttacgcgttcggacgagttgtagcggtatttgcggatttatacgggcgagaagcgttttgtttgtttcgagtgcggtaagcgttttatgcgtagcgattatttcgcgaagtacgttaagatttattagaataagaagtttaaagtcgttgaggtcggggttaagcggg

SEQ ID NO: 4532 - DNA, 667 bp, Artificial Sequence
  chemically treated genomic DNA (Homo sapiens) CpG-island No: 4532
cccgcttaaccccgacctcaacgactttaaacttcttattctaataaatcttaacgtacttcgcgaaataatcgctacgcataaaacgcttaccgcactcgaaacaaacaaaacgcttctcgcccgtataaatccgcaaataccgctacaactcgtccgaacgcgtaaaactcttcccgcaaaaaaaccaattacacacgaaaaatcgctcgcccgtataccaacgcaaatacgccttcaaatacgacgtcttcccgtacaccttaccgcaacccgacacgtaacacacgtactacttcttcttccccgactccgctcgaaaacgccgccgccgcctaacaattaaaacaacgacaacgacgacacctcctaaccgtaaccgccaaaaaaaccttaatctacaacaacgcgacgatctaactctaatactacgcaaaatccgacgaacccaacaccaaacctctttataaaacgacgacgacaacaacaacgacgcaaaaacgaaaaaacgaaacgcgtaaaaaacccgacacaaacgccgaaaaaaccgcttcccgaaaccccgaaacccccgacccgacgcccgctacgaaatactccaccacgaaaaatcgtcgaaaaccgaattaaataacaactaacgacaaataaacgacgaaaacgataa

SEQ ID NO: 4533 - DNA, 520 bp, Artificial Sequence
  chemically treated genomic DNA (Homo sapiens) CpG-island No: 4533
tatatatcgagagttagttcggttagttgttcgcgcggacgtgggggtttcgagtcgggaacgtagcgtcgtcgtggagattgtacggcgcgtggaggaagttcgggtagtagcgagggtgggggttgggggaattgggcgacggcgggggaggtggcgggggcgggggcgggggtaggggtagttcgggaattacggagaggtagggtggaggcgggtttaggcgtaggcggtggagggcgcgggacggagcgggcgcgcgaggagggtcggggcgggttgggaggcgggttcggggggcggggtaggttcggtcgtcgatttgagggatagtttcgcgttgtgggtgttcgcggcgtcggaaattgggttatatattttcggattgacgtgcgtatttacggttatttttaggagcgtcgaagaaggaagaaggttggaatgtcggtgtttatatttgatttttagcgagggagagggaaggggtcgggtggtttagagttttaatttggggagtaaa

SEQ ID NO: 4534 - DNA, 520 bp, Artificial Sequence
  chemically treated genomic DNA (Homo sapiens) CpG-island No: 4534
tttactccccaaattaaaactctaaaccacccgaccccttccctctccctcgctaaaaatcaaatataaacaccgacattccaaccttcttccttcttcgacgctcctaaaaataaccgtaaatacgcacgtcaatccgaaaatatataacccaatttccgacgccgcgaacacccacaacgcgaaactatccctcaaatcgacgaccgaacctaccccgccccccgaacccgcctcccaacccgccccgaccctcctcgcgcgcccgctccgtcccgcgccctccaccgcctacgcctaaacccgcctccaccctacctctccgtaattcccgaactacccctacccccgcccccgcccccgccacctcccccgccgtcgcccaattcccccaacccccaccctcgctactacccgaacttcctccacgcgccgtacaatctccacgacgacgctacgttcccgactcgaaacccccacgtccgcgcgaacaactaaccgaactaactctcgatatata

SEQ ID NO: 4535 - DNA, 520 bp, Artificial Sequence
  chemically treated genomic DNA (Homo sapiens) CpG-island No: 4535
tttattttttaagttaaaattttgagttattcggttttttttttttttttcgttaggaattaggtatggatatcgatattttaattttttttttttttcggcgtttttgaaggtaatcgtgggtgcgtacgttaattcgagggtgtgtggtttagttttcggcgtcgcggatatttataacgcggggttgttttttaagtcggcggtcgggtttgtttcgtttttcggattcgttttttagttcgtttcggtttttttcgcgcgttcgtttcgtttcgcgttttttatcgtttacgtttgggttcgtttttattttgttttttcgtggttttcgggttgtttttgttttcgttttcgttttcgttatttttttcgtcgtcgtttaatttttttagtttttattttcgttgttgttcgagttttttttacgcgtcgtgtagtttttacggcgacgttgcgttttcgattcggagtttttacgttcgcgcgagtagttagtcgggttggttttcggtgtgtg

SEQ ID NO: 4536 - DNA, 520 bp, Artificial Sequence
  chemically treated genomic DNA (Homo sapiens) CpG-island No: 4536
cacacaccgaaaaccaacccgactaactactcgcgcgaacgtaaaaactccgaatcgaaaacgcaacgtcgccgtaaaaactacacgacgcgtaaaaaaaactcgaacaacaacgaaaataaaaactaaaaaaattaaacgacgacgaaaaaaataacgaaaacgaaaacgaaaacaaaaacaacccgaaaaccacgaaaaaacaaaataaaaacgaacccaaacgtaaacgataaaaaacgcgaaacgaaacgaacgcgcgaaaaaaaccgaaacgaactaaaaaacgaatccgaaaaacgaaacaaacccgaccgccgacttaaaaaacaaccccgcgttataaatatccgcgacgccgaaaactaaaccacacaccctcgaattaacgtacgcacccacgattaccttcaaaaacgccgaaaaaaaaaaaaaattaaaatatcgatatccatacctaattcctaacgaaaaaaaaaaaaaaaaccgaataactcaaaattttaacttaaaaaataaa

SEQ ID NO: 4537 - DNA, 697 bp, Artificial Sequence
  chemically treated genomic DNA (Homo sapiens) CpG-island No: 4537
cggtttttatcgcgtagcggcgttggggcggttcgggcgttcgtcgcgggggtgggcgtggcgttgcgcgggagggattcgtagacggtagagggttcgcggggagcgggcggggcgttgagagcgcgtatatagatatttaaaaaatatataaataagcggtttttgtgtcgcggcggaacgcgttgtgttcgcggtcgttcggttcgttcggtagtttcgggttagttcggtgaattaagcggattcgggatggtcgagtcgggggtcggcgttttggtggggttgtttgggagaggggtcggggcggcgttgggtggagaaggggttcgcgggggagcgcgggggcgcgcgggggcgcgtttcgagttagtacggtagtttcgggagaggggagtgcggcgggcggagaggtcggtagagggcggggagggtagttcggattttttattagtatagcgcggtgtacgcgtttttcgttgagatgttaggttttgtcgtttttttgatttggaaaagaaggaaagagttacgattttttttttttcgtattttagtgtttcgtttgtttattttgatcgtggtattcgtataagtcgtttgtgtgttttagagaggttagttttgtatgtgttgttcgtgagcgtgtttggatttacgtataggatttagttgagcgggatatttatacgattgt

SEQ ID NO: 4538 - DNA, 697 bp, Artificial Sequence
  chemically treated genomic DNA (Homo sapiens) CpG-island No: 4538
acaatcgtataaatatcccgctcaactaaatcctatacgtaaatccaaacacgctcacgaacaacacatacaaaactaacctctctaaaacacacaaacgacttatacgaataccacgatcaaaataaacaaacgaaacactaaaatacgaaaaaaaaaaaatcgtaactctttccttcttttccaaatcaaaaaaacgacaaaacctaacatctcaacgaaaaacgcgtacaccgcgctatactaataaaaaatccgaactaccctccccgccctctaccgacctctccgcccgccgcactcccctctcccgaaactaccgtactaactcgaaacgcgcccccgcgcgcccccgcgctcccccgcgaaccccttctccacccaacgccgccccgacccctctcccaaacaaccccaccaaaacgccgacccccgactcgaccatcccgaatccgcttaattcaccgaactaacccgaaactaccgaacgaaccgaacgaccgcgaacacaacgcgttccgccgcgacacaaaaaccgcttatttatatattttttaaatatctatatacgcgctctcaacgccccgcccgctccccgcgaaccctctaccgtctacgaatccctcccgcgcaacgccacgcccacccccgcgacgaacgcccgaaccgccccaacgccgctacgcgataaaaaccg

SEQ ID NO: 4539 - DNA, 697 bp, Artificial Sequence
  chemically treated genomic DNA (Homo sapiens) CpG-island No: 4539
gtagtcgtgtaaatgtttcgtttagttgggttttatgcgtaggtttaagtacgtttacggatagtatatgtagggttggtttttttggaatatatagacggtttatgcgggtgttacggttagggtgagtaaacggagtattggaatgcgagaggagagaggtcgtggtttttttttttttttttaagttaaagaggcggtagggtttggtattttagcgggaagcgcgtgtatcgcgttgtgttggtgggaggttcgggttgtttttttcgttttttgtcggttttttcgttcgtcgtatttttttttttcggagttgtcgtattggttcgaggcgcgttttcgcgcgttttcgcgttttttcgcgagttttttttttatttagcgtcgtttcggttttttttttagatagttttattagaacgtcggttttcggttcggttatttcgggttcgtttagtttatcgggttgattcggggttgtcggacgggtcggacggtcgcgagtatagcgcgtttcgtcgcggtataggggtcgtttgtttgtgtgttttttgggtgtttgtgtgcgcgtttttaacgtttcgttcgtttttcgcggattttttgtcgtttgcgggtttttttcgcgtagcgttacgtttattttcgcggcggacgttcgggtcgttttaacgtcgttgcgcggtggagatcg

SEQ ID NO: 4540 - DNA, 697 bp, Artificial Sequence
  chemically treated genomic DNA (Homo sapiens) CpG-island No: 4540
cgatctccaccgcgcaacgacgttaaaacgacccgaacgtccgccgcgaaaataaacgtaacgctacgcgaaaaaaacccgcaaacgacaaaaaatccgcgaaaaacgaacgaaacgttaaaaacgcgcacacaaacacccaaaaaacacacaaacaaacgacccctataccgcgacgaaacgcgctatactcgcgaccgtccgacccgtccgacaaccccgaatcaacccgataaactaaacgaacccgaaataaccgaaccgaaaaccgacgttctaataaaactatctaaaaaaaaaaccgaaacgacgctaaataaaaaaaaaactcgcgaaaaaacgcgaaaacgcgcgaaaacgcgcctcgaaccaatacgacaactccgaaaaaaaaaaatacgacgaacgaaaaaaccgacaaaaaacgaaaaaaacaacccgaacctcccaccaacacaacgcgatacacgcgcttcccgctaaaataccaaaccctaccgcctctttaacttaaaaaaaaaaaaaaaaaccacgacctctctcctctcgcattccaatactccgtttactcaccctaaccgtaacacccgcataaaccgtctatatattccaaaaaaaccaaccctacatatactatccgtaaacgtacttaaacctacgcataaaacccaactaaacgaaacatttacacgactac

SEQ ID NO: 4541 - DNA, 748 bp, Artificial Sequence
  chemically treated genomic DNA (Homo sapiens) CpG-island No: 4541
  unsure (6, 75, 95, 108, 111, 135, 146, 153, 158, 165, 179, 181, 183)
  unsure (185, 187, 195, 231, 319, 542..543, 545, 548, 697, 739, 741)
tgtttntgcgtaagcgttagtaagcgattaggagggggagtgagagagtgaaagggaatgtggaagtttcgatgncgttatttggcgttatttgngggttttaatttntgnacgtttgcgcggtggttttcgggntttcgcgcgtngcgggtngggtngttcggntgcgtattgcgtangntnangngcggcggntggtagggggaggtggaggttgtggagcggtagttntagtagcgggtttcgggattgaggtagtagcgggggcggcggcgggcggaagttcgaggtgacgaaggtagcggcggcggcggtcgtntttttttacggtggcggagattaaggcggcggcggcggacggggagcggttcggtttcggttttttgttcgttggttgtggtaggtcgtcgtggggcggttcgttttcgtttttcgcggtttttttttcggtttttttttcggggagacgtcgggggtttggtcggttcgtatttagattgttgttgtagtcgtcgtcgggggagtcggaggcggtggcggtnntnatngggcggtttggtttttgggggggatgtggagtcgggattgttcgtcgaggtgcgcggttttaacggggttttttataaggtgagacggcgcgtcgattggggacgtcggtttttagtttttttttttggtcggagtaggaacgcgtggnggcgggatcgagtttttggagttgagttttggtttttagaantntttggat

SEQ ID NO: 4542 - DNA, 748 bp, Artificial Sequence
  chemically treated genomic DNA (Homo sapiens) CpG-island No: 4542
  unsure (8, 10, 52, 201, 204, 206..207, 430, 518, 554, 562, 564, 566)
  unsure (568, 570, 584, 591, 596, 603, 614, 638, 641, 654, 674, 743)
atccaaananttctaaaaaccaaaactcaactccaaaaactcgatcccgccnccacgcgttcctactccgaccaaaaaaaaaaactaaaaaccgacgtccccaatcgacgcgccgtctcaccttataaaaaaccccgttaaaaccgcgcacctcgacgaacaatcccgactccacatcccccccaaaaaccaaaccgcccnatnannaccgccaccgcctccgactcccccgacgacgactacaacaacaatctaaatacgaaccgaccaaacccccgacgtctccccgaaaaaaaaaccgaaaaaaaaaccgcgaaaaacgaaaacgaaccgccccacgacgacctaccacaaccaacgaacaaaaaaccgaaaccgaaccgctccccgtccgccgccgccgccttaatctccgccaccgtaaaaaaanacgaccgccgccgccgctaccttcgtcacctcgaacttccgcccgccgccgcccccgctactacctcaatcccgaaacccgctactanaactaccgctccacaacctccacctccccctaccanccgccgcncntnancntacgcaatacgcanccgaacnacccnacccgcnacgcgcgaaancccgaaaaccaccgcgcaaacgtncanaaattaaaacccncaaataacgccaaataacgncatcgaaacttccacattccctttcactctctcactccccctcctaatcgcttactaacgcttacgcanaaaca

SEQ ID NO: 4543 - DNA, 748 bp, Artificial Sequence
  chemically treated genomic DNA (Homo sapiens) CpG-island No: 4543
  unsure (8, 10, 52, 201, 204, 206..207, 430, 518, 554, 562, 564, 566)
  unsure (568, 570, 584, 591, 596, 603, 614, 638, 641, 654, 674, 743)
gtttaagnanttttaagggttaggatttagttttagaagttcgatttcgttnttacgcgtttttgtttcggttaggggagggggttaaggatcggcgtttttagtcggcgcgtcgttttattttgtagaaggtttcgttggagtcgcgtatttcgacgggtagtttcggttttatattttttttagaggttaggtcgtttnatngnngtcgttatcgttttcgattttttcggcggcggttgtagtagtagtttgagtgcgggtcggttaggttttcggcgttttttcggaggaggagtcggagggggagtcgcggggggcgggagcgggtcgttttacggcggtttgttatagttaacgagtagggggtcggggtcgggtcgtttttcgttcgtcgtcgtcgttttggttttcgttatcgtgagggaanacggtcgtcgtcgtcgttgttttcgttatttcgagttttcgttcgtcgtcgttttcgttgttgttttagtttcgggattcgttgttgnggttgtcgttttatagtttttatttttttttgttantcgtcgtntntnantntgcgtaatgcgtantcgggtnatttngttcgtnacgcgcggggnttcgagggttatcgcgtaggcgtntanaggttagagtttntaggtagcgttaagtagcgntatcggggtttttatatttttttttatttttttatttttttttttggtcgtttgttagcgtttgcgtangaata

SEQ ID NO: 4544 - DNA, 748 bp, Artificial Sequence
  chemically treated genomic DNA (Homo sapiens) CpG-island No: 4544
  unsure (6, 75, 95, 108, 111, 135, 146, 153, 158, 165, 179, 181, 183)
  unsure (185, 187, 195, 231, 319, 542..543, 545, 548, 697, 739, 741)
tattcntacgcaaacgctaacaaacgaccaaaaaaaaaaataaaaaaataaaaaaaaatataaaaaccccgatancgctacttaacgctacctanaaactctaacctntanacgcctacgcgataaccctcgaanccccgcgcgtnacgaacnaaatnacccgantacgcattacgcanantnananacgacgantaacaaaaaaaaataaaaactataaaacgacaaccncaacaacgaatcccgaaactaaaacaacaacgaaaacgacgacgaacgaaaactcgaaataacgaaaacaacgacgacgacgaccgtnttccctcacgataacgaaaaccaaaacgacgacgacgaacgaaaaacgacccgaccccgaccccctactcgttaactataacaaaccgccgtaaaacgacccgctcccgccccccgcgactccccctccgactcctcctccgaaaaaacgccgaaaacctaaccgacccgcactcaaactactactacaaccgccgccgaaaaaatcgaaaacgataacgacnncnatnaaacgacctaacctctaaaaaaaatataaaaccgaaactacccgtcgaaatacgcgactccaacgaaaccttctacaaaataaaacgacgcgccgactaaaaacgccgatccttaaccccctcccctaaccgaaacaaaaacgcgtaanaacgaaatcgaacttctaaaactaaatcctaacccttaaaantncttaaac

SEQ ID NO: 4545 - DNA, 905 bp, Artificial Sequence
  chemically treated genomic DNA (Homo sapiens) CpG-island No: 4545
aaaacggaagtttttagaaagaggaaagataggattcgagcggggttttaggtagatggagcgcgtcggtagtttgtggttagggattttagtatcgacgggaaagaggaggtttgggtattttgcgtttcgggcgcgcgcggcgcgtgaggtgagggggagggcgcggtttcgtattagttagcggtcgtttggcgtttagtcgtatttcggggggcggggttgagttttcgggtcgtagtgcgattggcggaggcgagtgggtgacgttaacggtcggcgcgaggttcgttttcggtttgtttcgttttcgcgcgcgtcggcggcggggtagtttcgttttggttcgcgtcgcgttttcgcgtttagttcgcgcgttagtcggtttttagcgcggttgcggggcggagagttgcggttggtttagcgcgtttatttgaggaggcggcggggttcgtaggcgtcgcgggacgaggagatcggagtcgggagattcgcgtagcgttatggtttttattggttttaaagttgttgtcggagagagtaagtggagtcgggatttttttagtaggcggggattgcggttttcgaggagtttcgcgcggtttttgtcggtagcgtttaggttttcgagcgggttgtcggttttgcgtttcgggtttgaggtttttggttcgtggggtttcgttatttaggcgtcgttcgcgcgagaggaaggtttgtttcgttttttttttttttattttatgttttattttagttttttttttgtagttcgtttttttttttcgttatttttttttttcgcggtttttgttttttttttttttgtatttttttttttttttattttttttttttttttttttttttatttttattttttttttttcgttttatttttt

SEQ ID NO: 4546 - DNA, 905 bp, Artificial Sequence
  chemically treated genomic DNA (Homo sapiens) CpG-island No: 4546
aaaaaataaaacgaaaaaaaaaaaataaaaataaaaaaaaaaaaaaaaaaaaaaaataaaaaaaaaaaaaaatacaaaaaaaaaaaaaacaaaaaccgcgaaaaaaaaaaataacgaaaaaaaaaaacgaactacaaaaaaaaaactaaaataaaacataaaataaaaaaaaaaaaaacgaaacaaaccttcctctcgcgcgaacgacgcctaaataacgaaaccccacgaaccaaaaacctcaaacccgaaacgcaaaaccgacaacccgctcgaaaacctaaacgctaccgacaaaaaccgcgcgaaactcctcgaaaaccgcaatccccgcctactaaaaaaatcccgactccacttactctctccgacaacaactttaaaaccaataaaaaccataacgctacgcgaatctcccgactccgatctcctcgtcccgcgacgcctacgaaccccgccgcctcctcaaataaacgcgctaaaccaaccgcaactctccgccccgcaaccgcgctaaaaaccgactaacgcgcgaactaaacgcgaaaacgcgacgcgaaccaaaacgaaactaccccgccgccgacgcgcgcgaaaacgaaacaaaccgaaaacgaacctcgcgccgaccgttaacgtcacccactcgcctccgccaatcgcactacgacccgaaaactcaaccccgccccccgaaatacgactaaacgccaaacgaccgctaactaatacgaaaccgcgccctccccctcacctcacgcgccgcgcgcgcccgaaacgcaaaatacccaaacctcctctttcccgtcgatactaaaatccctaaccacaaactaccgacgcgctccatctacctaaaaccccgctcgaatcctatctttcctctttctaaaaacttccgtttt

SEQ ID NO: 4547 - DNA, 905 bp, Artificial Sequence
  chemically treated genomic DNA (Homo sapiens) CpG-island No: 4547
gaaggatggggcgaggggagagaaatgggggtgaagggaagagagggagggagggatggaggggaaggaggatgtagggaaaagggagatagggatcgcgaggaaggaggatggcgagggaggagggcgggttgtagggggagggttggggtgaaatatgaggtgagggaggggagagcggggtaagtttttttttcgcgcgggcggcgtttgaataacgggattttacggattaggagttttaggttcggggcgtagggtcggtagttcgttcggaggtttgggcgttgtcggtaggggtcgcgcggggtttttcgggagtcgtagttttcgtttgttggaaggatttcggttttatttatttttttcgataatagttttgaggttaatgggggttatggcgttgcgcgagtttttcggtttcgattttttcgtttcgcgacgtttgcggatttcgtcgtttttttaggtgggcgcgttgggttagtcgtagtttttcgtttcgtagtcgcgttagggatcgattgacgcgcggattgggcgcgggggcgcggcgcgagttagagcgaggttgtttcgtcgtcggcgcgcgcgggggcggggtaagtcgggggcgggtttcgcgtcggtcgttggcgttatttattcgttttcgttaatcgtattgcggttcggaggtttaatttcgtttttcgagatgcggttgggcgttaggcggtcgttggttggtgcggagtcgcgtttttttttttattttacgcgtcgcgcgcgttcggggcgtagggtatttaggttttttttttttcgtcggtgttgggatttttggttataggttatcgacgcgttttatttgtttgaaatttcgttcgggttttgttttttttttttttgggagttttcgtttt

SEQ ID NO: 4548 - DNA, 905 bp, Artificial Sequence
  chemically treated genomic DNA (Homo sapiens) CpG-island No: 4548
aaaacgaaaactcccaaaaaaaaaaaaaacaaaacccgaacgaaatttcaaacaaataaaacgcgtcgataacctataaccaaaaatcccaacaccgacgaaaaaaaaaaaacctaaataccctacgccccgaacgcgcgcgacgcgtaaaataaaaaaaaaaacgcgactccgcaccaaccaacgaccgcctaacgcccaaccgcatctcgaaaaacgaaattaaacctccgaaccgcaatacgattaacgaaaacgaataaataacgccaacgaccgacgcgaaacccgcccccgacttaccccgcccccgcgcgcgccgacgacgaaacaacctcgctctaactcgcgccgcgcccccgcgcccaatccgcgcgtcaatcgatccctaacgcgactacgaaacgaaaaactacgactaacccaacgcgcccacctaaaaaaacgacgaaatccgcaaacgtcgcgaaacgaaaaaatcgaaaccgaaaaactcgcgcaacgccataacccccattaacctcaaaactattatcgaaaaaaataaataaaaccgaaatccttccaacaaacgaaaactacgactcccgaaaaaccccgcgcgacccctaccgacaacgcccaaacctccgaacgaactaccgaccctacgccccgaacctaaaactcctaatccgtaaaatcccgttattcaaacgccgcccgcgcgaaaaaaaaacttaccccgctctcccctccctcacctcatatttcaccccaaccctccccctacaacccgccctcctccctcgccatcctccttcctcgcgatccctatctcccttttccctacatcctccttcccctccatccctccctccctctcttcccttcacccccatttctctcccctcgccccatccttc

SEQ ID NO: 4549 - DNA, 511 bp, Artificial Sequence
  chemically treated genomic DNA (Homo sapiens) CpG-island No: 4549
tttcgcgtttgttcgcgttcgttcgtttttcgtttcgggttttttggcgttttattcggtaagtcgggtcggaagtcgtattcgtaaaaggcgtttaaggtgtagcgtagggaagttaggttttaggcggcggtcgcggtcgagattagttcgagtagttcgaggagcgagttttagggtcggtagtcgcgcgtcgtagtcgttattcgggtgaggttcgagttcgttgtggggtagttaattgtttcgttcgggaattgtaattttcggcgtgtatcgtttcgtagtagttacgtttatcgtttataattttcgacgttttttttttcgtttttaaggttcgttcgtcgtttcgtagtaggattagaaggtggtttttagggggaattcgcgaatcgtttaattcgggacggcgggtcgcgtttttatggttacggtaattaggggattatcgtagtggtttagaaagaataaataaaggattacgattataaagggcgacgtaataatt

SEQ ID NO: 4550 - DNA, 511 bp, Artificial Sequence
  chemically treated genomic DNA (Homo sapiens) CpG-island No: 4550
aattattacgtcgccctttataatcgtaatcctttatttattctttctaaaccactacgataatcccctaattaccgtaaccataaaaacgcgacccgccgtcccgaattaaacgattcgcgaattccccctaaaaaccaccttctaatcctactacgaaacgacgaacgaaccttaaaaacgaaaaaaaaaacgtcgaaaattataaacgataaacgtaactactacgaaacgatacacgccgaaaattacaattcccgaacgaaacaattaactaccccacaacgaactcgaacctcacccgaataacgactacgacgcgcgactaccgaccctaaaactcgctcctcgaactactcgaactaatctcgaccgcgaccgccgcctaaaacctaacttccctacgctacaccttaaacgccttttacgaatacgacttccgacccgacttaccgaataaaacgccaaaaaacccgaaacgaaaaacgaacgaacgcgaacaaacgcgaaa

SEQ ID NO: 4551 - DNA, 511 bp, Artificial Sequence
  chemically treated genomic DNA (Homo sapiens) CpG-island No: 4551
aattgttacgtcgttttttgtggtcgtgattttttatttattttttttgagttattacgatggttttttagttatcgtggttatggaaacgcggttcgtcgtttcggattggacggttcgcgggttttttttggaggttattttttggttttgttgcggaacgacgggcgggttttggaggcggggagaggagcgtcgggagttgtaggcgatgggcgtggttgttgcggagcggtgtacgtcgggagttgtagttttcgggcgaggtagttgattgttttataacgagttcgggttttattcggatggcggttgcgacgcgcggttgtcggttttggggttcgtttttcgggttgttcgggttggtttcggtcgcggtcgtcgtttgggatttggtttttttgcgttgtattttgggcgttttttgcgaatgcgattttcggttcgatttgtcgggtgaggcgttagggagttcggagcgaggggcgggcggacgcgggtagacgcggga

SEQ ID NO: 4552 - DNA, 511 bp, Artificial Sequence
  chemically treated genomic DNA (Homo sapiens) CpG-island No: 4552
tcccgcgtctacccgcgtccgcccgcccctcgctccgaactccctaacgcctcacccgacaaatcgaaccgaaaatcgcattcgcaaaaaacgcccaaaatacaacgcaaaaaaaccaaatcccaaacgacgaccgcgaccgaaaccaacccgaacaacccgaaaaacgaaccccaaaaccgacaaccgcgcgtcgcaaccgccatccgaataaaacccgaactcgttataaaacaatcaactacctcgcccgaaaactacaactcccgacgtacaccgctccgcaacaaccacgcccatcgcctacaactcccgacgctcctctccccgcctccaaaacccgcccgtcgttccgcaacaaaaccaaaaaataacctccaaaaaaaacccgcgaaccgtccaatccgaaacgacgaaccgcgtttccataaccacgataactaaaaaaccatcgtaataactcaaaaaaaataaataaaaaatcacgaccacaaaaaacgacgtaacaatt

SEQ ID NO: 4553 - DNA, 901 bp, Artificial Sequence
  chemically treated genomic DNA (Homo sapiens) CpG-island No: 4553
agtcggcgtttcgggcgttttaattttgcggtttcggttcgtttcgattttacgcgtcgcgtttttttttcgggcgtttaggttttttaggttttcgttttcgagtttcgggacgcggtttatttgcggcggcgcggggagacggttgtatttattaaatagggttagggttattgtaaaggcgttcgtcgtcgttcgcgagtttaggcgttttttttaggcgggttagggattattttattagttcgtcgtatttatatttcggagagagtggggtgttcgatggggcgtgttgggggcgtcggcgttcggggaggttgtaggtcgggacgcgggggatcgttgtaagaaaaagttatttacgcgttattgtcgggcgtatcgggtttagggagtttcgttagtttttcgcgagtcggtatttgtcgttgttattaggcgcggagcgtgcgcgcgggaggaggtatttgcgaggtaggaggtttggtcgcggcgtagtggttggcggagaggcggcgtcgtattggcggcggcggcggcggcgacggggagagtagtagtagtttcgtatagttttcggcggggcgcgtttatttcgtatttcgcggtttcgtagacgttattttgcgatagcgttttttacgagttcggtcgcgtcgttgtttttcgtttttttttcgggtttttcggtcgagtgcgtttttatggtaacgggcgcgcgcgggggtaagagggtgcgtttttattttcgcggttgcgaggagttattagcgtttttttggaggcggtcgttcggagcgggatggagcggggtcggtgtgcgttttagttgaaagtttaggtttttttttgaatggaatttgaggaggcgtagagaggagaaaaacgttgttattcgaaa

SEQ ID NO: 4554 - DNA, 901 bp, Artificial Sequence
  chemically treated genomic DNA (Homo sapiens) CpG-island No: 4554
tttcgaataacaacgtttttctcctctctacgcctcctcaaattccattcaaaaaaaaacctaaactttcaactaaaacgcacaccgaccccgctccatcccgctccgaacgaccgcctccaaaaaaacgctaataactcctcgcaaccgcgaaaataaaaacgcaccctcttacccccgcgcgcgcccgttaccataaaaacgcactcgaccgaaaaacccgaaaaaaaaacgaaaaacaacgacgcgaccgaactcgtaaaaaacgctatcgcaaaataacgtctacgaaaccgcgaaatacgaaataaacgcgccccgccgaaaactatacgaaactactactactctccccgtcgccgccgccgccgccgccaatacgacgccgcctctccgccaaccactacgccgcgaccaaacctcctacctcgcaaatacctcctcccgcgcgcacgctccgcgcctaataacaacgacaaataccgactcgcgaaaaactaacgaaactccctaaacccgatacgcccgacaataacgcgtaaataactttttcttacaacgatcccccgcgtcccgacctacaacctccccgaacgccgacgcccccaacacgccccatcgaacaccccactctctccgaaatataaatacgacgaactaataaaataatccctaacccgcctaaaaaaaacgcctaaactcgcgaacgacgacgaacgcctttacaataaccctaaccctatttaataaatacaaccgtctccccgcgccgccgcaaataaaccgcgtcccgaaactcgaaaacgaaaacctaaaaaacctaaacgcccgaaaaaaaaacgcgacgcgtaaaatcgaaacgaaccgaaaccgcaaaattaaaacgcccgaaacgccgact

SEQ ID NO: 4555 - DNA, 901 bp, Artificial Sequence
  chemically treated genomic DNA (Homo sapiens) CpG-island No: 4555
tttcgagtaatagcgttttttttttttttgcgtttttttaaattttatttaagaaaaaatttgggtttttagttaaaacgtatatcggtttcgttttatttcgtttcgggcggtcgtttttaggggggcgttggtggtttttcgtagtcgcgggaatgagggcgtatttttttattttcgcgcgcgttcgttgttatgggaacgtattcgatcgggaagttcgagggagaggcgggaggtagcggcgcggtcgagttcgtgggagacgttatcgtaagatggcgtttgcgaggtcgcgggatgcggagtgagcgcgtttcgtcgggggttgtgcgaggttgttgttgtttttttcgtcgtcgtcgtcgtcgtcgttagtgcggcgtcgttttttcgttagttattgcgtcgcggttaagttttttgtttcgtaggtattttttttcgcgcgtacgtttcgcgtttgatggtagcgataagtgtcggttcgcggagagttagcggggttttttgggttcggtgcgttcgataataacgcgtgaataatttttttttgtagcggtttttcgcgtttcggtttgtagttttttcgggcgtcggcgtttttagtacgttttatcgggtattttatttttttcgaggtgtgggtgcggcgggttgatgaggtgatttttagttcgtttgggaggagcgtttggattcgcgggcggcggcgagcgtttttataatggttttgattttgtttggtaagtgtagtcgttttttcgcgtcgtcgtaggtgggtcgcgtttcggggttcgggggcgggggtttggggggtttgggcgttcggggagggggcgcggcgcgtggggtcggggcgggtcggggtcgtagagttggggcgttcggggcgtcggtt

SEQ ID NO: 4556 - DNA, 901 bp, Artificial Sequence
  chemically treated genomic DNA (Homo sapiens) CpG-island No: 4556
aaccgacgccccgaacgccccaactctacgaccccgacccgccccgaccccacgcgccgcgccccctccccgaacgcccaaaccccccaaacccccgcccccgaaccccgaaacgcgacccacctacgacgacgcgaaaaaacgactacacttaccaaacaaaatcaaaaccattataaaaacgctcgccgccgcccgcgaatccaaacgctcctcccaaacgaactaaaaatcacctcatcaacccgccgcacccacacctcgaaaaaaataaaatacccgataaaacgtactaaaaacgccgacgcccgaaaaaactacaaaccgaaacgcgaaaaaccgctacaaaaaaaaattattcacgcgttattatcgaacgcaccgaacccaaaaaaccccgctaactctccgcgaaccgacacttatcgctaccatcaaacgcgaaacgtacgcgcgaaaaaaaatacctacgaaacaaaaaacttaaccgcgacgcaataactaacgaaaaaacgacgccgcactaacgacgacgacgacgacgacgaaaaaaacaacaacaacctcgcacaacccccgacgaaacgcgctcactccgcatcccgcgacctcgcaaacgccatcttacgataacgtctcccacgaactcgaccgcgccgctacctcccgcctctccctcgaacttcccgatcgaatacgttcccataacaacgaacgcgcgcgaaaataaaaaaatacgccctcattcccgcgactacgaaaaaccaccaacgcccccctaaaaacgaccgcccgaaacgaaataaaacgaaaccgatatacgttttaactaaaaacccaaattttttcttaaataaaatttaaaaaaacgcaaaaaaaaaaaaaacgctattactcgaaa

SEQ ID NO: 4557 - DNA, 667 bp, Artificial Sequence
  chemically treated genomic DNA (Homo sapiens) CpG-island No: 4557
tttgaagacgcgttttaggcggttttatttagagtttttttttaaggtttaggaatgcggcgttgtcggaggtgtgcgcggtggttatatcgttgttcgggtttttaaagcgggtttcgtttttatttttcgttttggtttcgaattttgggtttagttttagcgttttgtgtgcgaatatcgtttcgtttcggatttagtttcgttttggggtttttttttgtttgttttttcgtgttcgattatattgtttttttttcggcgggcgatttagttcggtttatcgtggcggtttttagggcggtaggtttcgggagtattttcggggtcggttttaaggattgttttttttttttttatttttatttcgcggcggcggcgggcgagagcggcgatatagggttagggttcggagcggtggaggtttttggtcggggagtacgtcgttttattcggtaacgcgaggatggtggcggcgtagtcggttgttttggggttttaaggtataggggacgcgaggtatagatgttttatagtagttattgcggttttcgtagttgtttcgtcgtcgttgttcgtttttttttgttgtagttggcgtgatggtagcggtagttttggacgttttattgttgttattattagttttgtgaaataggtattattt

SEQ ID NO: 4558 - DNA, 667 bp, Artificial Sequence
  chemically treated genomic DNA (Homo sapiens) CpG-island No: 4558
aaataatacctatttcacaaaactaataataacaacaataaaacgtccaaaactaccgctaccatcacgccaactacaacaaaaaaaaacgaacaacgacgacgaaacaactacgaaaaccgcaataactactataaaacatctatacctcgcgtcccctataccttaaaaccccaaaacaaccgactacgccgccaccatcctcgcgttaccgaataaaacgacgtactccccgaccaaaaacctccaccgctccgaaccctaaccctatatcgccgctctcgcccgccgccgccgcgaaataaaaataaaaaaaaaaaaaacaatccttaaaaccgaccccgaaaatactcccgaaacctaccgccctaaaaaccgccacgataaaccgaactaaatcgcccgccgaaaaaaaaacaatataatcgaacacgaaaaaacaaacaaaaaaaaaccccaaaacgaaactaaatccgaaacgaaacgatattcgcacacaaaacgctaaaactaaacccaaaattcgaaaccaaaacgaaaaataaaaacgaaacccgctttaaaaacccgaacaacgatataaccaccgcgcacacctccgacaacgccgcattcctaaaccttaaaaaaaaactctaaataaaaccgcctaaaacgcgtcttcaaa

SEQ ID NO: 4559 - DNA, 667 bp, Artificial Sequence
  chemically treated genomic DNA (Homo sapiens) CpG-island No: 4559
aggtagtatttattttataaggttgatggtggtagtagtggggcgtttagagttgtcgttgttattacgttagttgtagtagggaggggcgggtagcggcggcggagtagttgcgggagtcgtagtggttgttgtgggatatttgtgtttcgcgttttttgtgttttgagattttaaagtagtcgattgcgtcgttattattttcgcgttgtcgggtggggcgacgtgtttttcggttaggagtttttatcgtttcggattttggttttatgtcgtcgttttcgttcgtcgtcgtcgcggagtgggagtggggaggaggggaatagtttttggagtcggtttcgggagtattttcggagtttgtcgttttggaagtcgttacgatggatcgggttgagtcgttcgtcggaggggaagtagtgtagtcgggtacggaggggtaggtagagaggggttttaaggcggagttgggttcggggcggagcggtgttcgtatataaagcgttggggttggatttagggttcggggttaaggcgagaagtgggagcggggttcgttttggggattcggatagcggtgtggttatcgcgtatattttcgatagcgtcgtatttttgggttttgggaggaggttttgagtagggtcgtttggggcgcgtttttagg

SEQ ID NO: 4560 - DNA, 667 bp, Artificial Sequence
  chemically treated genomic DNA (Homo sapiens) CpG-island No: 4560
cctaaaaacgcgccccaaacgaccctactcaaaacctcctcccaaaacccaaaaatacgacgctatcgaaaatatacgcgataaccacaccgctatccgaatccccaaaacgaaccccgctcccacttctcgccttaaccccgaaccctaaatccaaccccaacgctttatatacgaacaccgctccgccccgaacccaactccgccttaaaacccctctctacctacccctccgtacccgactacactacttcccctccgacgaacgactcaacccgatccatcgtaacgacttccaaaacgacaaactccgaaaatactcccgaaaccgactccaaaaactattcccctcctccccactcccactccgcgacgacgacgaacgaaaacgacgacataaaaccaaaatccgaaacgataaaaactcctaaccgaaaaacacgtcgccccacccgacaacgcgaaaataataacgacgcaatcgactactttaaaatctcaaaacacaaaaaacgcgaaacacaaatatcccacaacaaccactacgactcccgcaactactccgccgccgctacccgcccctccctactacaactaacgtaataacaacgacaactctaaacgccccactactaccaccatcaaccttataaaataaatactacct

SEQ ID NO: 4561 - DNA, 582 bp, Artificial Sequence
  chemically treated genomic DNA (Homo sapiens) CpG-island No: 4561
tagtttcgagaagcggatagatatacgtggagatttaggagggggcgggtttcgtttgggttgttcggacgcggcgtcggggtagtttttacggtttttagttttttcgtagggtcggcgcggtttttacggtcgattcgtaatttcggggggcgtagggagtcggtcgaggttgtacggtcgcgacgtcgggtcgttaagttcggtttgattcgtttatttttttttttcgcgagcgtttagatatttttttttttattttggcggtcgtttttttcgcgtcgcggtttttttttttttttttgttttttttgtttattttgtcgggttttaagtcgcgacgggatattaggaaagaaaacggttcgcgtttttcgttcggaaataggtgttcgtggggcggagttcggcgtatagaaatggagttattttcggtttcgagttcgagtcgttttcgggtagaggtgcggttgggttttttacgaggttcggttttggagtttcgttttcggtagcgggttcgggggtttcggattttgtataaggtttcggaaaagatgatcggtttcgggttgggcgcgg

SEQ ID NO: 4562 - DNA, 582 bp, Artificial Sequence
  chemically treated genomic DNA (Homo sapiens) CpG-island No: 4562
ccgcgcccaacccgaaaccgatcatcttttccgaaaccttatacaaaatccgaaacccccgaacccgctaccgaaaacgaaactccaaaaccgaacctcgtaaaaaacccaaccgcacctctacccgaaaacgactcgaactcgaaaccgaaaataactccatttctatacgccgaactccgccccacgaacacctatttccgaacgaaaaacgcgaaccgttttctttcctaatatcccgtcgcgacttaaaacccgacaaaataaacaaaaaaaacaaaaaaaaaaaaaaaaaccgcgacgcgaaaaaaacgaccgccaaaataaaaaaaaaaatatctaaacgctcgcgaaaaaaaaaaataaacgaatcaaaccgaacttaacgacccgacgtcgcgaccgtacaacctcgaccgactccctacgccccccgaaattacgaatcgaccgtaaaaaccgcgccgaccctacgaaaaaactaaaaaccgtaaaaactaccccgacgccgcgtccgaacaacccaaacgaaacccgccccctcctaaatctccacgtatatctatccgcttctcgaaacta

SEQ ID NO: 4563 - DNA, 582 bp, Artificial Sequence
  chemically treated genomic DNA (Homo sapiens) CpG-island No: 4563
tcgcgtttagttcggggtcggttatttttttcggggttttatgtagagttcgaggttttcgagttcgttgtcgaagacggagttttaagatcgaatttcgtaaagggtttagtcgtatttttattcggaagcggttcgaattcggggtcggaagtgattttatttttgtgcgtcgagtttcgttttacgagtatttgttttcgagcggagagcgcgggtcgtttttttttttggtgtttcgtcgcggtttgggattcggtaagatgggtaagaagggtaagaaggagaagaagggtcgcggcgcggagaagacggtcgttaagatggagaagaaggtgtttaagcgttcgcggaaggaggaggtgagcgggttagatcgggtttagcggttcgacgtcgcggtcgtgtagtttcggtcgattttttgcgtttttcggggttacgggtcggtcgtgggagtcgcgtcggttttgcgggagagttggaggtcgtaggaattgtttcggcgtcgcgttcgggtagtttagacggggttcgtttttttttgagtttttacgtgtgtttgttcgtttttcggagttg

SEQ ID NO: 4564 - DNA, 582 bp, Artificial Sequence
  chemically treated genomic DNA (Homo sapiens) CpG-island No: 4564
caactccgaaaaacgaacaaacacacgtaaaaactcaaaaaaaaacgaaccccgtctaaactacccgaacgcgacgccgaaacaattcctacgacctccaactctcccgcaaaaccgacgcgactcccacgaccgacccgtaaccccgaaaaacgcaaaaaatcgaccgaaactacacgaccgcgacgtcgaaccgctaaacccgatctaacccgctcacctcctccttccgcgaacgcttaaacaccttcttctccatcttaacgaccgtcttctccgcgccgcgacccttcttctccttcttacccttcttacccatcttaccgaatcccaaaccgcgacgaaacaccaaaaaaaaaaacgacccgcgctctccgctcgaaaacaaatactcgtaaaacgaaactcgacgcacaaaaataaaatcacttccgaccccgaattcgaaccgcttccgaataaaaatacgactaaaccctttacgaaattcgatcttaaaactccgtcttcgacaacgaactcgaaaacctcgaactctacataaaaccccgaaaaaaataaccgaccccgaactaaacgcga

SEQ ID NO: 4565 - DNA, 554 bp, Artificial Sequence
  chemically treated genomic DNA (Homo sapiens) CpG-island No: 4565
gtatcgcgcgtagttttttttaaattcgcgcgtcgaggtcgtacgttaggtatacggattttttttagtaggtttaaacgaaagtaacgataagcgttcgaaagaattcgagttagtatcgtttaattatataatcgagtagatttcgtttttgtataagacggttttattttagtttttaattatatatttcgtatttaaacgaagagataggtagaattcgggggtacgttaagcgagatatatcgaattcgtatataaggacggcggttattaatagggaagcgtataattttttttatttcgttttttttttaaattttaaaaaaaaatttaaaatatattgttatttatcgtgttttcgcgtttcgagttttttcggtttcggtttgcgtttgttagcgagcgcggggaatttacggtagtgtattgtttttgtgttaggttgtaggtaagcgcgggttagggtgcggaaggggttggggcgttcgtaagcggcgcgggggtatattagaggatttcgaatatttaggaattaattaaagtagtgaaag

SEQ ID NO: 4566 - DNA, 554 bp, Artificial Sequence
  chemically treated genomic DNA (Homo sapiens) CpG-island No: 4566
ctttcactactttaattaattcctaaatattcgaaatcctctaatatacccccgcgccgcttacgaacgccccaaccccttccgcaccctaacccgcgcttacctacaacctaacacaaaaacaatacactaccgtaaattccccgcgctcgctaacaaacgcaaaccgaaaccgaaaaaactcgaaacgcgaaaacacgataaataacaatatattttaaatttttttttaaaatttaaaaaaaaaacgaaataaaaaaaattatacgcttccctattaataaccgccgtccttatatacgaattcgatatatctcgcttaacgtacccccgaattctacctatctcttcgtttaaatacgaaatatataattaaaaactaaaataaaaccgtcttatacaaaaacgaaatctactcgattatataattaaacgatactaactcgaattctttcgaacgcttatcgttactttcgtttaaacctactaaaaaaaatccgtatacctaacgtacgacctcgacgcgcgaatttaaaaaaaactacgcgcgatac

SEQ ID NO: 4567 - DNA, 554 bp, Artificial Sequence
  chemically treated genomic DNA (Homo sapiens) CpG-island No: 4567
tttttattgttttggttaatttttaggtattcgggattttttagtgtgttttcgcgtcgtttgcggacgttttagtttttttcgtattttggttcgcgtttatttgtagtttggtatagggatagtatattgtcgtgggtttttcgcgttcgttagtaaacgtaggtcgggatcggaggggttcggggcgcgggggtacggtgggtggtagtgtgttttggatttttttttggagtttggggagggggcggggtgggggaaattgtgcgtttttttgttggtggtcgtcgtttttgtgtgcgagttcggtgtgtttcgtttggcgtgttttcgggttttgtttgttttttcgtttgggtgcggggtgtgtggttgggggttggggtggggtcgttttgtgtagggacgggatttgttcggttgtgtgattgggcggtgttagttcgggttttttcgggcgtttgtcgttgttttcgtttgagtttgttggggggggttcgtgtgtttggcgtgcggtttcggcgcgcgggtttagggggggttgcgcgcggtgt

SEQ ID NO: 4568 - DNA, 554 bp, Artificial Sequence
  chemically treated genomic DNA (Homo sapiens) CpG-island No: 4568
acaccgcgcgcaaccccccctaaacccgcgcgccgaaaccgcacgccaaacacacgaaccccccccaacaaactcaaacgaaaacaacgacaaacgcccgaaaaaacccgaactaacaccgcccaatcacacaaccgaacaaatcccgtccctacacaaaacgaccccaccccaacccccaaccacacaccccgcacccaaacgaaaaaacaaacaaaacccgaaaacacgccaaacgaaacacaccgaactcgcacacaaaaacgacgaccaccaacaaaaaaacgcacaatttcccccaccccgccccctccccaaactccaaaaaaaaatccaaaacacactaccacccaccgtacccccgcgccccgaacccctccgatcccgacctacgtttactaacgaacgcgaaaaacccacgacaatatactatccctataccaaactacaaataaacgcgaaccaaaatacgaaaaaaactaaaacgtccgcaaacgacgcgaaaacacactaaaaaatcccgaatacctaaaaattaaccaaaacaataaaaa

SEQ ID NO: 4569 - DNA, 558 bp, Artificial Sequence
  chemically treated genomic DNA (Homo sapiens) CpG-island No: 4569
acgatgttagttcgggcgcgggtagtggtcgggcggatgagcgttgttcgtggttttgaagatgtttttgggtttcggcggtggcggcggtagcggtgtttaggagggtcggtagcggggacggttacgaggtaaggaattcgggcggaggttgcgtttgcggtagttgcggatgtttttataggttgcgattttaggcgtttagttcgtttagtcgtcgttttagttcgtcgatgttttggcgttgggtgcggacgagtttttgttggtttagtacgatggttttgagttttttgaggtagagttcggcgtatcggattttttagaagtttttttaagtcgttcgttagttttttgagttttttttgcgtttgggcggcggtggggagcgcgagggcgcgggattttagtagtttagcggtcggtttttttttttttttttttggtttagtttttttttcgtcgtaggcgtcgcgttattgttattttgatttttatatatttatcgcggggtagggttatggtttagggtagttttttttgttttttggcgtttag

SEQ ID NO: 4570 - DNA, 558 bp, Artificial Sequence
  chemically treated genomic DNA (Homo sapiens) CpG-island No: 4570
ctaaacgccaaaaaacaaaaaaaactaccctaaaccataaccctaccccgcgataaatatataaaaatcaaaataacaataacgcgacgcctacgacgaaaaaaaaactaaaccaaaaaaaaaaaaaaaaaaaccgaccgctaaactactaaaatcccgcgccctcgcgctccccaccgccgcccaaacgcaaaaaaaactcaaaaaactaacgaacgacttaaaaaaacttctaaaaaatccgatacgccgaactctacctcaaaaaactcaaaaccatcgtactaaaccaacaaaaactcgtccgcacccaacgccaaaacatcgacgaactaaaacgacgactaaacgaactaaacgcctaaaatcgcaacctataaaaacatccgcaactaccgcaaacgcaacctccgcccgaattccttacctcgtaaccgtccccgctaccgaccctcctaaacaccgctaccgccgccaccgccgaaacccaaaaacatcttcaaaaccacgaacaacgctcatccgcccgaccactacccgcgcccgaactaacatcgt

SEQ ID NO: 4571 - DNA, 558 bp, Artificial Sequence
  chemically treated genomic DNA (Homo sapiens) CpG-island No: 4571
ttggacgttaagagataggaagggttgttttgggttatgattttgtttcgcggtgggtgtgtgaaagttagggtggtagtgacgcggcgtttgcggcgagaggaagattaggttagggggagaaggaagaaagtcgatcgttgggttgttgggatttcgcgttttcgcgttttttatcgtcgtttaggcgtaggaagggtttaagaggttggcgggcggtttggagagatttttggagaattcggtgcgtcgggttttattttaaggagtttagggttatcgtgttgaattaatagaggttcgttcgtatttagcgttagagtatcgacgagttggagcggcggttgaacgagttgagcgtttagaatcgtagtttgtgggagtattcgtagttgtcgtaagcgtagttttcgttcggattttttatttcgtagtcgttttcgttgtcggtttttttaggtatcgttgtcgtcgttatcgtcggggtttaggaatatttttaggattacggatagcgtttattcgttcggttattgttcgcgttcgagttggtatcgt

SEQ ID NO: 4572 - DNA, 558 bp, Artificial Sequence
  chemically treated genomic DNA (Homo sapiens) CpG-island No: 4572
acgataccaactcgaacgcgaacaataaccgaacgaataaacgctatccgtaatcctaaaaatattcctaaaccccgacgataacgacgacaacgatacctaaaaaaaccgacaacgaaaacgactacgaaataaaaaatccgaacgaaaactacgcttacgacaactacgaatactcccacaaactacgattctaaacgctcaactcgttcaaccgccgctccaactcgtcgatactctaacgctaaatacgaacgaacctctattaattcaacacgataaccctaaactccttaaaataaaacccgacgcaccgaattctccaaaaatctctccaaaccgcccgccaacctcttaaacccttcctacgcctaaacgacgataaaaaacgcgaaaacgcgaaatcccaacaacccaacgatcgactttcttccttctccccctaacctaatcttcctctcgccgcaaacgccgcgtcactaccaccctaactttcacacacccaccgcgaaacaaaatcataacccaaaacaacccttcctatctcttaacgtccaa

SEQ ID NO: 4573 - DNA, 618 bp, Artificial Sequence
  chemically treated genomic DNA (Homo sapiens) CpG-island No: 4573
gttaataatgtgacgttgtcggtcggggagtagcgtaaagacgtgtacgtttagttttatttgtagtattttacggttcgtaatcggtcgtcgtttttcgtcggtattaatagtaaggggttttcggatttttttagtgacgaagagcgcgagtttatttcggttttcggttttggggtcgtcgtcgcgggtcggagtcgagtagtcgtcggtagggtaaggacgcggggtcggggttataaaggcgggcgtttggcggttgtcgcgcgcgttcgtcgtcgtttgtagtttttttttttcgggcgttttttcgggttttttaggtgcggggttgtttttgcgttttttcgcgtcgtttttttttcgcggggttgtaggcgtcggagcggagaggttagaagttggggtcgcggggttcgcgttttttgacgtgtgggtttgggaggtgtggagttgcgttggcggcggttgttttgtacgtagtcgacgtcgtttttttggattattagtcgtttgtagcgggcgtttagacggggattttcgtgttttttcgaaagttttggagggtggttttaaaatgttataggttaagttcgagcgttttttcgttttattaat

SEQ ID NO: 4574 - DNA, 618 bp, Artificial Sequence
  chemically treated genomic DNA (Homo sapiens) CpG-island No: 4574
attaataaaacgaaaaaacgctcgaacttaacctataacattttaaaaccaccctccaaaactttcgaaaaaacacgaaaatccccgtctaaacgcccgctacaaacgactaataatccaaaaaaacgacgtcgactacgtacaaaacaaccgccgccaacgcaactccacacctcccaaacccacacgtcaaaaaacgcgaaccccgcgaccccaacttctaacctctccgctccgacgcctacaaccccgcgaaaaaaaaacgacgcgaaaaaacgcaaaaacaaccccgcacctaaaaaacccgaaaaaacgcccgaaaaaaaaaaactacaaacgacgacgaacgcgcgcgacaaccgccaaacgcccgcctttataaccccgaccccgcgtccttaccctaccgacgactactcgactccgacccgcgacgacgaccccaaaaccgaaaaccgaaataaactcgcgctcttcgtcactaaaaaaatccgaaaaccccttactattaataccgacgaaaaacgacgaccgattacgaaccgtaaaatactacaaataaaactaaacgtacacgtctttacgctactccccgaccgacaacgtcacattattaac

SEQ ID NO: 4575 - DNA, 618 bp, Artificial Sequence
  chemically treated genomic DNA (Homo sapiens) CpG-island No: 4575
gttaataaagcgggaaaacgttcgaatttaatttatagtattttggggttattttttagagttttcgaaagggtacggaagttttcgtttaaacgttcgttgtaggcggttggtggtttagggaagcggcgtcgattgcgtgtaaaataatcgtcgttaacgtaattttatattttttagatttatacgttaaagaacgcgaatttcgcggttttaatttttggttttttcgtttcggcgtttgtagtttcgcggggaaggggcgacgcgagggggcgtagggatagtttcgtatttgggaggttcgagggggcgttcgggagggaggggttgtaaacggcggcgagcgcgcgcggtaatcgttaaacgttcgtttttgtagtttcggtttcgcgtttttattttgtcgacggttgttcggtttcggttcgcggcggcggttttagagtcgaggatcggggtgggttcgcgtttttcgttattggagaagttcgggggttttttgttgttggtgtcggcggggagcggcggtcggttgcgagtcgtgaggtgttgtaggtagagttggacgtatacgtttttgcgttgtttttcggtcggtagcgttatattgttggt

SEQ ID NO: 4576 - DNA, 618 bp, Artificial Sequence
  chemically treated genomic DNA (Homo sapiens) CpG-island No: 4576
accaacaatataacgctaccgaccgaaaaacaacgcaaaaacgtatacgtccaactctacctacaacacctcacgactcgcaaccgaccgccgctccccgccgacaccaacaacaaaaaacccccgaacttctccaataacgaaaaacgcgaacccaccccgatcctcgactctaaaaccgccgccgcgaaccgaaaccgaacaaccgtcgacaaaataaaaacgcgaaaccgaaactacaaaaacgaacgtttaacgattaccgcgcgcgctcgccgccgtttacaacccctccctcccgaacgccccctcgaacctcccaaatacgaaactatccctacgccccctcgcgtcgccccttccccgcgaaactacaaacgccgaaacgaaaaaaccaaaaattaaaaccgcgaaattcgcgttctttaacgtataaatctaaaaaatataaaattacgttaacgacgattattttacacgcaatcgacgccgcttccctaaaccaccaaccgcctacaacgaacgtttaaacgaaaacttccgtaccctttcgaaaactctaaaaaataaccccaaaatactataaattaaattcgaacgttttcccgctttattaac

SEQ ID NO: 4577 - DNA, 710 bp, Artificial Sequence
  chemically treated genomic DNA (Homo sapiens) CpG-island No: 4577
taagtttttagatttcgcgttattattggatttttttttttttttgcgcgtaatttacgtcgtattttcgttttaagtattttttttacgtttcggttggattatcgaaggtttattattattgggcgattaatttttttattcggtcgtttttttttttttattcgaacggttttttacgcgaatttattttaacgtattcgtatttttttcgattaggatcggaattcgttttcgaattcgtaagcgatcgtaattcgaatttacgtgtatatcggtatcgtaattcgggcgcggcgaacgtaattttcgtttacgagtcgttgtttattgatatttcggatacgcggattttcgtatttcgcgtatcgggtagatcgggtatattttttaatttttcgaattcgcgtaatatgagtatcgttcggaatacgtacgtttattcgcgttttttcgcgcgtttcggtgacgcgtcgcgttgacggttaattttcgcgatttttcgagatcgcgggtttttattatatcgtagtagttcgttatttttttatttcgcgaatcgcgcgtcgcggttcgtagttttcgttattcgcgaatgtcgttaatcgatacggttgatcggcgacgcggtattcgaatattgaattcgttatttgaatcgttttcgcgatttgtaacggcgattgcgatacgtatttttttcgcgcgtt

SEQ ID NO: 4578 - DNA, 710 bp, Artificial Sequence
  chemically treated genomic DNA (Homo sapiens) CpG-island No: 4578
aacgcgcgaaaaaaatacgtatcgcaatcgccgttacaaatcgcgaaaacgattcaaataacgaattcaatattcgaataccgcgtcgccgatcaaccgtatcgattaacgacattcgcgaataacgaaaactacgaaccgcgacgcgcgattcgcgaaataaaaaaataacgaactactacgatataataaaaacccgcgatctcgaaaaatcgcgaaaattaaccgtcaacgcgacgcgtcaccgaaacgcgcgaaaaaacgcgaataaacgtacgtattccgaacgatactcatattacgcgaattcgaaaaattaaaaaatatacccgatctacccgatacgcgaaatacgaaaatccgcgtatccgaaatatcaataaacaacgactcgtaaacgaaaattacgttcgccgcgcccgaattacgataccgatatacacgtaaattcgaattacgatcgcttacgaattcgaaaacgaattccgatcctaatcgaaaaaaatacgaatacgttaaaataaattcgcgtaaaaaaccgttcgaataaaaaaaaaaaaacgaccgaataaaaaaattaatcgcccaataataataaaccttcgataatccaaccgaaacgtaaaaaaaatacttaaaacgaaaatacgacgtaaattacgcgcaaaaaaaaaaaaaaatccaataataacgcgaaatctaaaaactta

SEQ ID NO: 4579 - DNA, 710 bp, Artificial Sequence
  chemically treated genomic DNA (Homo sapiens) CpG-island No: 4579
ggcgcgcggggggagtgcgtgtcgtagtcgtcgttgtaaatcgcgagagcggtttaggtggcgagtttagtgttcggatatcgcgtcgtcggttagtcgtatcggttggcggtattcgcgaatagcgagagttgcgagtcgcggcgcgcgattcgcgaaataggggagtggcggattgttgcgatatggtaggagttcgcgatttcgagaggtcgcggagattgatcgttagcgcgacgcgttatcggggcgcgcggaggagcgcgagtgagcgtgcgtatttcgagcggtgtttatattgcgcgggttcgagagattagggggtgtgttcgatttgttcgatgcgcggaatacgaaggttcgcgtattcgaggtattagtagatagcgattcgtaggcggagattacgttcgtcgcgttcgggttgcggtgtcggtgtgtacgtgggttcgagttgcggtcgtttgcggattcgggggcggatttcgattttggtcggagaggatgcgagtgcgttggaatgggttcgcgtgaggggtcgttcgggtgggagagaaggagcggtcgggtgggggaattgatcgtttaatagtgataggttttcggtggtttagtcgggacgtggggaaggtgtttggagcgggggtacggcgtgagttgcgcgtagggagggggagaggtttagtggtagcgcggggtttgagggtttg

SEQ ID NO: 4580 - DNA, 710 bp, Artificial Sequence
  chemically treated genomic DNA (Homo sapiens) CpG-island No: 4580
caaaccctcaaaccccgcgctaccactaaacctctccccctccctacgcgcaactcacgccgtacccccgctccaaacaccttccccacgtcccgactaaaccaccgaaaacctatcactattaaacgatcaattcccccacccgaccgctccttctctcccacccgaacgacccctcacgcgaacccattccaacgcactcgcatcctctccgaccaaaatcgaaatccgcccccgaatccgcaaacgaccgcaactcgaacccacgtacacaccgacaccgcaacccgaacgcgacgaacgtaatctccgcctacgaatcgctatctactaatacctcgaatacgcgaaccttcgtattccgcgcatcgaacaaatcgaacacaccccctaatctctcgaacccgcgcaatataaacaccgctcgaaatacgcacgctcactcgcgctcctccgcgcgccccgataacgcgtcgcgctaacgatcaatctccgcgacctctcgaaatcgcgaactcctaccatatcgcaacaatccgccactcccctatttcgcgaatcgcgcgccgcgactcgcaactctcgctattcgcgaataccgccaaccgatacgactaaccgacgacgcgatatccgaacactaaactcgccacctaaaccgctctcgcgatttacaacgacgactacgacacgcactccccccgcgcgcc

SEQ ID NO: 4581 - DNA, 876 bp, Artificial Sequence
  chemically treated genomic DNA (Homo sapiens) CpG-island No: 4581
gcgttttcgcgagtagtttaagaattttgttaaattttgagttatagttatattttatttttatttttaattttatttcgtcggttttcggaacggtaattttcgggcgatgggaggcggggcggggtaaattagttttgattagcgtttttagtcgtcgcgatgtttattttgtcgcgtcgttttcgtcgggttttatttttagagtttgtttagcgttttgttgagttcggcgttgtgtaagtgcgggtattggttcgcgagttttttgcgcgtcgtttgcgtttatattatgaaggcgtttatgggtcgtttgacgtgcggtttgtttttgttggagtcgttgacgcgtatcggtatgggtattagcgtttagtcgtagtttttgagtatttggttgatcgtttcgcggatgtatacggggaatttgtttttttcgttttttttttttagatcgggttcgtttttggggaacgtgtttttttggggtcgcgtgttttcggtgttcgagtcggagttcgacgggtagggcgagttcgcggagttttcggatatggtggggttgggggcgtcggataggttttttttttgttcgtcggttatttttatgaaggggtttaggagatttatacgcgggttcggggtagggggttggtggtcgggaaaggcgagaagtcgcggcggttcggggattcgaggcgcgggttttttttttttcggttgttcggatgcggagtaagcggttttcggggaagttggcgcgtcggtcggttatcgcggcgagtatttaggaaggcgcggggtggttagtttatagttgttcgttttaagtggggggaggcgaattggagaggaggaggaggggaggaaaaagag

SEQ ID NO: 4582 - DNA, 876 bp, Artificial Sequence
  chemically treated genomic DNA (Homo sapiens) CpG-island No: 4582
ctctttttcctcccctcctcctcctctccaattcgcctccccccacttaaaacgaacaactataaactaaccaccccgcgccttcctaaatactcgccgcgataaccgaccgacgcgccaacttccccgaaaaccgcttactccgcatccgaacaaccgaaaaaaaaaaaacccgcgcctcgaatccccgaaccgccgcgacttctcgcctttcccgaccaccaaccccctaccccgaacccgcgtataaatctcctaaaccccttcataaaaataaccgacgaacaaaaaaaaaacctatccgacgcccccaaccccaccatatccgaaaactccgcgaactcgccctacccgtcgaactccgactcgaacaccgaaaacacgcgaccccaaaaaaacacgttccccaaaaacgaacccgatctaaaaaaaaaaaacgaaaaaaacaaattccccgtatacatccgcgaaacgatcaaccaaatactcaaaaactacgactaaacgctaatacccataccgatacgcgtcaacgactccaacaaaaacaaaccgcacgtcaaacgacccataaacgccttcataatataaacgcaaacgacgcgcaaaaaactcgcgaaccaatacccgcacttacacaacgccgaactcaacaaaacgctaaacaaactctaaaaataaaacccgacgaaaacgacgcgacaaaataaacatcgcgacgactaaaaacgctaatcaaaactaatttaccccgccccgcctcccatcgcccgaaaattaccgttccgaaaaccgacgaaataaaattaaaaataaaaataaaatataactataactcaaaatttaacaaaattcttaaactactcgcgaaaacgc

SEQ ID NO: 4583 - DNA, 876 bp, Artificial Sequence
  chemically treated genomic DNA (Homo sapiens) CpG-island No: 4583
tttttttttttttttttttttttttttttaattcgtttttttttatttggagcgggtagttgtgaattggttatttcgcgtttttttaagtgttcgtcgcggtagtcggtcgacgcgttagttttttcgggagtcgtttgtttcgtattcgggtagtcgaggggagaggagttcgcgtttcgagttttcgagtcgtcgcggtttttcgtttttttcggttattagttttttgtttcgggttcgcgtatgaattttttggatttttttatgaagatgatcgacgagtaggagaagggtttgttcggcgtttttagttttattatgttcgaggatttcgcgggttcgttttgttcgtcgggtttcggttcggatatcgagaatacgcggttttaggagaatacgttttttaagggcgagttcgatttgaagaaggagagcgaggaggataagtttttcgtgtgtattcgcgaggcggttagttaggtgtttaaaggttacgattggacgttggtgtttatgtcggtgcgcgttaacggttttagtaagaataagtcgtacgttaagcggtttatgaacgtttttatggtgtgggcgtaggcggcgcgtaggaagttcgcggattagtattcgtatttgtataacgtcgagtttagtaagacgttgggtaagttttggaggtaggattcggcgggggcggcgcggtagggtgggtatcgcggcggttgggggcgttggttagggttgatttgtttcgtttcgttttttatcgttcgggagttgtcgtttcgggagtcggcgggatggggttgggagtgggaatggggtgtaattgtggtttagagtttgataaagtttttgggttgttcgcggggacgt

SEQ ID NO: 4584 - DNA, 876 bp, Artificial Sequence
  chemically treated genomic DNA (Homo sapiens) CpG-island No: 4584
acgtccccgcgaacaacccaaaaactttatcaaactctaaaccacaattacaccccattcccactcccaaccccatcccgccgactcccgaaacgacaactcccgaacgataaaaaacgaaacgaaacaaatcaaccctaaccaacgcccccaaccgccgcgatacccaccctaccgcgccgcccccgccgaatcctacctccaaaacttacccaacgtcttactaaactcgacgttatacaaatacgaatactaatccgcgaacttcctacgcgccgcctacgcccacaccataaaaacgttcataaaccgcttaacgtacgacttattcttactaaaaccgttaacgcgcaccgacataaacaccaacgtccaatcgtaacctttaaacacctaactaaccgcctcgcgaatacacacgaaaaacttatcctcctcgctctccttcttcaaatcgaactcgcccttaaaaaacgtattctcctaaaaccgcgtattctcgatatccgaaccgaaacccgacgaacaaaacgaacccgcgaaatcctcgaacataataaaactaaaaacgccgaacaaacccttctcctactcgtcgatcatcttcataaaaaaatccaaaaaattcatacgcgaacccgaaacaaaaaactaataaccgaaaaaaacgaaaaaccgcgacgactcgaaaactcgaaacgcgaactcctctcccctcgactacccgaatacgaaacaaacgactcccgaaaaaactaacgcgtcgaccgactaccgcgacgaacacttaaaaaaacgcgaaataaccaattcacaactacccgctccaaataaaaaaaaacgaattaaaaaaaaaaaaaaaaaaaaaaaaaaaaa

SEQ ID NO: 4585 - DNA, 679 bp, Artificial Sequence
  chemically treated genomic DNA (Homo sapiens) CpG-island No: 4585
cggcgcgagggcgtagttcggagggttttgttgggtttaggggttttttggtcgttttttcgattcgatttttttttttatacgcgtttcgcgaacgtcggtcggattcgtaggggtcggaagcggcgcgttcggagagtcggcggagtcgggtagggttcgcgtttcgcggttcgtttcgagtagtcgcgagtttcgttagataaagaggcgcgtcgggtttcgggcgcgggtaagggacgtagaggcgcgggtagggcggcgcgttagtttcggttcgtagggggcgtcgttcgtggttttagtttcggtttttatttttgaggatcgagtagagtcgttttagggttatgttttcgagttgttcggcgtttcgcgaaaggttgaggtagcggcggcggtggttcggcgtttacggttcggcgcggaggcgacggttttatttcgtttttatcgtcggttattagttgcgtttttcgtttttttgaagagagtttaagtattgcggttcgttatggttcgagttttatagtgggttgttcgggcgggtcgagtatttcgacggggcgtcgttataagttgttcgggttttttttttattgatcgttcgaaggttatagaatgttgattttttgtattgtaatatgatgtaaatttatacgtgtttttggagtcggta

SEQ ID NO: 4586 - DNA, 679 bp, Artificial Sequence
  chemically treated genomic DNA (Homo sapiens) CpG-island No: 4586
taccgactccaaaaacacgtataaatttacatcatattacaatacaaaaaatcaacattctataaccttcgaacgatcaataaaaaaaaaacccgaacaacttataacgacgccccgtcgaaatactcgacccgcccgaacaacccactataaaactcgaaccataacgaaccgcaatacttaaactctcttcaaaaaaacgaaaaacgcaactaataaccgacgataaaaacgaaataaaaccgtcgcctccgcgccgaaccgtaaacgccgaaccaccgccgccgctacctcaacctttcgcgaaacgccgaacaactcgaaaacataaccctaaaacgactctactcgatcctcaaaaataaaaaccgaaactaaaaccacgaacgacgccccctacgaaccgaaactaacgcgccgccctacccgcgcctctacgtcccttacccgcgcccgaaacccgacgcgcctctttatctaacgaaactcgcgactactcgaaacgaaccgcgaaacgcgaaccctacccgactccgccgactctccgaacgcgccgcttccgacccctacgaatccgaccgacgttcgcgaaacgcgtataaaaaaaaaaatcgaatcgaaaaaacgaccaaaaaacccctaaacccaacaaaaccctccgaactacgccctcgcgccg

SEQ ID NO: 4587 - DNA, 679 bp, Artificial Sequence
  chemically treated genomic DNA (Homo sapiens) CpG-island No: 4587
tatcgattttagagatacgtatgaatttgtattatgttatagtataggggattagtattttatggttttcgggcggttaatggaaaggggattcgagtagtttgtgacggcgtttcgtcggggtgttcggttcgttcggatagtttattgtggggttcgggttatgacgggtcgtagtatttaagttttttttaggggagcggggagcgtagttgatggtcggcgatgggaacggagtggggtcgtcgttttcgcgtcgagtcgtgagcgtcgagttatcgtcgtcgttattttagtttttcgcgaagcgtcgggtagttcgggaatatggttttggagcggttttgttcggtttttaaaggtaaggatcggggttggggttacggacggcgttttttgcgggtcgaggttggcgcgtcgttttgttcgcgtttttgcgttttttattcgcgttcgggattcgacgcgtttttttgtttggcggggttcgcggttattcggagcggatcgcggggcgcgagttttgttcggtttcgtcggtttttcgggcgcgtcgttttcgatttttgcgagttcggtcgacgttcgcggggcgcgtgtgggaagagggatcgggtcgggaaggcggttaggaggtttttgggtttagtagggtttttcgggttgcgttttcgcgtcg

SEQ ID NO: 4588 - DNA, 679 bp, Artificial Sequence
  chemically treated genomic DNA (Homo sapiens) CpG-island No: 4588
cgacgcgaaaacgcaacccgaaaaaccctactaaacccaaaaacctcctaaccgccttcccgacccgatccctcttcccacacgcgccccgcgaacgtcgaccgaactcgcaaaaatcgaaaacgacgcgcccgaaaaaccgacgaaaccgaacaaaactcgcgccccgcgatccgctccgaataaccgcgaaccccgccaaacaaaaaaacgcgtcgaatcccgaacgcgaataaaaaacgcaaaaacgcgaacaaaacgacgcgccaacctcgacccgcaaaaaacgccgtccgtaaccccaaccccgatccttacctttaaaaaccgaacaaaaccgctccaaaaccatattcccgaactacccgacgcttcgcgaaaaactaaaataacgacgacgataactcgacgctcacgactcgacgcgaaaacgacgaccccactccgttcccatcgccgaccatcaactacgctccccgctcccctaaaaaaaacttaaatactacgacccgtcataacccgaaccccacaataaactatccgaacgaaccgaacaccccgacgaaacgccgtcacaaactactcgaatcccctttccattaaccgcccgaaaaccataaaatactaatcccctatactataacataatacaaattcatacgtatctctaaaatcgata

SEQ ID NO: 4589 - DNA, 591 bp, Artificial Sequence
  chemically treated genomic DNA (Homo sapiens) CpG-island No: 4589
gcgcgttttttttcgacgttttgcgtttatttaggttcgggggtacgaggcggtttttagttttttcgcgggttcggggcgggtatagcgggtcgggggcggtttggttgggttggtagagtacgtttcggcggtaaaatgagcgtcgggtatgttttcggatgaatttggtagatttagatatttagttttaattgcggcgagttcgggtcgttgtattcgcgcggggtagatgtgtttcggcgttgttcggtttaattgtttttatttatttcggtttcgttcgtttagttgggagcgcgcggtcggttcgggtcgttaggaaaagtttttgttattaattagaggcggcggggcggtcgcgatcgatggcggttttcgtattgaggttttcgtttttcgattaatcggtcgtttgtcgtgttttatcgcggtttgcggacgtcgcgttgggagagacgggtcgatgcgtttcggggcgtcggggtacgcggggacggcggttttcgcggggttttgtttttattttggtatcgttttgtcgggttcgggtgatgttggttcgtttagtagaggtttttaaggtagttt

SEQ ID NO: 4590 - DNA, 591 bp, Artificial Sequence
  chemically treated genomic DNA (Homo sapiens) CpG-island No: 4590
aaactaccttaaaaacctctactaaacgaaccaacatcacccgaacccgacaaaacgataccaaaataaaaacaaaaccccgcgaaaaccgccgtccccgcgtaccccgacgccccgaaacgcatcgacccgtctctcccaacgcgacgtccgcaaaccgcgataaaacacgacaaacgaccgattaatcgaaaaacgaaaacctcaatacgaaaaccgccatcgatcgcgaccgccccgccgcctctaattaataacaaaaacttttcctaacgacccgaaccgaccgcgcgctcccaactaaacgaacgaaaccgaaataaataaaaacaattaaaccgaacaacgccgaaacacatctaccccgcgcgaatacaacgacccgaactcgccgcaattaaaactaaatatctaaatctaccaaattcatccgaaaacatacccgacgctcattttaccgccgaaacgtactctaccaacccaaccaaaccgcccccgacccgctatacccgccccgaacccgcgaaaaaactaaaaaccgcctcgtacccccgaacctaaataaacgcaaaacgtcgaaaaaaaacgcgc

SEQ ID NO: 4591 - DNA, 591 bp, Artificial Sequence
  chemically treated genomic DNA (Homo sapiens) CpG-island No: 4591
aggttgttttgggagtttttgttggacgggttagtattattcgggttcggtaggacgatgttagggtgagggtagagtttcgcgaaggtcgtcgttttcgcgtgtttcggcgtttcgagacgtatcgattcgttttttttagcgcggcgttcgtaggtcgcggtggaatacggtaggcggtcgattgatcgggaggcgggggttttagtgcgggggtcgttatcgatcgcggtcgtttcgtcgtttttgattgatggtagaggttttttttggcggttcgagtcggtcgcgcgtttttaattgggcgggcgaggtcgggataaatgggagtaattgggtcgggtagcgtcgaggtatatttgtttcgcgcgggtgtagcggttcgagttcgtcgtaattagggttgagtgtttaaatttgttaagtttattcgagagtatgttcggcgtttattttgtcgtcgagacgtgttttgttagtttagttaggtcgttttcgattcgttgtgttcgtttcggattcgcggggaagttggaggtcgtttcgtgttttcgggtttgggtgggcgtagggcgtcgaggagggacgcgt

SEQ ID NO: 4592 - DNA, 591 bp, Artificial Sequence
  chemically treated genomic DNA (Homo sapiens) CpG-island No: 4592
acgcgtccctcctcgacgccctacgcccacccaaacccgaaaacacgaaacgacctccaacttccccgcgaatccgaaacgaacacaacgaatcgaaaacgacctaactaaactaacaaaacacgtctcgacgacaaaataaacgccgaacatactctcgaataaacttaacaaatttaaacactcaaccctaattacgacgaactcgaaccgctacacccgcgcgaaacaaatatacctcgacgctacccgacccaattactcccatttatcccgacctcgcccgcccaattaaaaacgcgcgaccgactcgaaccgccaaaaaaaacctctaccatcaatcaaaaacgacgaaacgaccgcgatcgataacgacccccgcactaaaacccccgcctcccgatcaatcgaccgcctaccgtattccaccgcgacctacgaacgccgcgctaaaaaaaacgaatcgatacgtctcgaaacgccgaaacacgcgaaaacgacgaccttcgcgaaactctaccctcaccctaacatcgtcctaccgaacccgaataatactaacccgtccaacaaaaactcccaaaacaacct

SEQ ID NO: 4593 - DNA, 631 bp, Artificial Sequence
  chemically treated genomic DNA (Homo sapiens) CpG-island No: 4593
  unsure (35, 144, 462, 510, 518, 588)
gttatattcggtatagcgcgattaggtttattaanttgcgtttgcgcgaatcgagcgttttcgcgatattataggaaggttgagagaaagggtaggttttcgttgcgtggggttgggtttaaaggttcgtcgcgtttgcgtaanaggatttgacgacgtgttgcgtcgttatttttgaaacgtttggcggggaagtgttgttggagtcgttgtggttgttgttcgcggagtggaagcgcgtgtttttgtttgtgtttttggttatggcgttgtagttttttcgggagtagggaattattttgcgcgggagcgtcgaaatcgtggtcgagtttttttgtaagttttcgcgtaggttaatatatcggggggaacggagtcgtgacggtttagtaggtttatagttcggtttttgatattagagaagtaatttggggagaggcggttgtaggcgttttttttagnacgcgttgttaacgtggagttgtaggtttgcgtgttgttggggtttantttcgcgncgtagtttttttcggagcgtttttttttttaagtgtagattcgttttattttttattttttatttttcgnatataggatacggtgtgattggggtgggttttagtgtatgcgt

SEQ ID NO: 4594 - DNA, 631 bp, Artificial Sequence
  chemically treated genomic DNA (Homo sapiens) CpG-island No: 4594
  unsure (44, 114, 122, 170, 488, 597)
acgcatacactaaaacccaccccaatcacaccgtatcctatatncgaaaaataaaaaataaaaaataaaacgaatctacacttaaaaaaaaaaacgctccgaaaaaaactacgncgcgaaantaaaccccaacaacacgcaaacctacaactccacgttaacaacgcgtnctaaaaaaaacgcctacaaccgcctctccccaaattacttctctaatatcaaaaaccgaactataaacctactaaaccgtcacgactccgttccccccgatatattaacctacgcgaaaacttacaaaaaaactcgaccacgatttcgacgctcccgcgcaaaataattccctactcccgaaaaaactacaacgccataaccaaaaacacaaacaaaaacacgcgcttccactccgcgaacaacaaccacaacgactccaacaacacttccccgccaaacgtttcaaaaataacgacgcaacacgtcgtcaaatcctnttacgcaaacgcgacgaacctttaaacccaaccccacgcaacgaaaacctaccctttctctcaaccttcctataatatcgcgaaaacgctcgattcgcgcaaacgcaanttaataaacctaatcgcgctataccgaatataac

SEQ ID NO: 4595 - DNA, 631 bp, Artificial Sequence
  chemically treated genomic DNA (Homo sapiens) CpG-island No: 4595
  unsure (44, 114, 122, 170, 488, 597)
acgtatatattggggtttattttagttatatcgtgttttgtatncggaaagtaaggggtgggaggtgggacggatttgtatttaaaggaagaaacgtttcggaagaggttacgncgcgaggntaggttttagtagtacgtaggtttgtagttttacgttagtaacgcgtnttggaggaagcgtttgtagtcgtttttttttagattatttttttggtattagaggtcgagttgtgggtttattgagtcgttacgatttcgtttttttcgatatattggtttgcgcgagaatttatagaagaattcggttacgatttcggcgttttcgcgtagggtgattttttgttttcgggagagttgtagcgttatggttagggatataaataaaagtacgcgtttttatttcgcggatagtaattatagcggttttaatagtattttttcgttaagcgttttaaaagtaacgacgtagtacgtcgttaggttttnttgcgtaggcgcgacgagtttttaagtttagttttacgtagcggggatttgtttttttttttagtttttttgtgatgtcgcgggagcgttcggttcgcgtaggcgtagnttggtggatttggtcgcgttgtgtcgggtgtgat

SEQ ID NO: 4596 - DNA, 631 bp, Artificial Sequence
  chemically treated genomic DNA (Homo sapiens) CpG-island No: 4596
  unsure (35, 144, 462, 510, 518, 588)
atcacacccgacacaacgcgaccaaatccaccaanctacgcctacgcgaaccgaacgctcccgcgacatcacaaaaaaactaaaaaaaaaaacaaatccccgctacgtaaaactaaacttaaaaactcgtcgcgcctacgcaanaaaacctaacgacgtactacgtcgttacttttaaaacgcttaacgaaaaaatactattaaaaccgctataattactatccgcgaaataaaaacgcgtacttttatttatatccctaaccataacgctacaactctcccgaaaacaaaaaatcaccctacgcgaaaacgccgaaatcgtaaccgaattcttctataaattctcgcgcaaaccaatatatcgaaaaaaacgaaatcgtaacgactcaataaacccacaactcgacctctaataccaaaaaaataatctaaaaaaaaacgactacaaacgcttcctccaanacgcgttactaacgtaaaactacaaacctacgtactactaaaacctancctcgcgncgtaacctcttccgaaacgtttcttcctttaaatacaaatccgtcccacctcccaccccttactttccgnatacaaaacacgatataactaaaataaaccccaatatatacgt

SEQ ID NO: 4597 - DNA, 643 bp, Artificial Sequence
  chemically treated genomic DNA (Homo sapiens) CpG-island No: 4597
ggcgcgagcggcggcggcggtagtagtagtagtagtagtacggttatcggcgggagcggtagtagtatcggtagtttcggcggcgcggtttcggtttcggtttcggtttcggtcggtatgtatcgtttcggggagcgtttgttgggtagttacgcgttgttcgcggagtagcgggattttttgtttttagagacgattaataataataataattattattagttcggggtttgggttcgtcgggcgggtttttcggcgttttcgtttttttcggcgttttcgttttcgtatttttcggtcgtcgttttcgtcgtcgatttagtcgattcggtttcgggtagtagtaataagaggaagcgcgataataaggttagtacgtatggatttaattatagtttgttgtagtttagcggagggcgggtcgcggggggcggtcgagtagacggcggcggggtcgtgtatagcgggatttcgtggaaacggaggaattataattagggagtcgtggggtgagtgttggttttgcggttcgatggtttggtcggtgcgaatgcgtagtcgggtatacgtttatagaggggggttgtgagggtttaggagcggttatttttacggtttgttttcgttgttgttgtacgggggt

SEQ ID NO: 4598 - DNA, 643 bp, Artificial Sequence
  chemically treated genomic DNA (Homo sapiens) CpG-island No: 4598
acccccgtacaacaacaacgaaaacaaaccgtaaaaataaccgctcctaaaccctcacaacccccctctataaacgtatacccgactacgcattcgcaccgaccaaaccatcgaaccgcaaaaccaacactcaccccacgactccctaattataattcctccgtttccacgaaatcccgctatacacgaccccgccgccgtctactcgaccgccccccgcgacccgccctccgctaaactacaacaaactataattaaatccatacgtactaaccttattatcgcgcttcctcttattactactacccgaaaccgaatcgactaaatcgacgacgaaaacgacgaccgaaaaatacgaaaacgaaaacgccgaaaaaaacgaaaacgccgaaaaacccgcccgacgaacccaaaccccgaactaataataattattattattattaatcgtctctaaaaacaaaaaatcccgctactccgcgaacaacgcgtaactacccaacaaacgctccccgaaacgatacataccgaccgaaaccgaaaccgaaaccgaaaccgcgccgccgaaactaccgatactactaccgctcccgccgataaccgtactactactactactactaccgccgccgccgctcgcgcc

SEQ ID NO: 4599 - DNA, 643 bp, Artificial Sequence
  chemically treated genomic DNA (Homo sapiens) CpG-island No: 4599
attttcgtgtaatagtagcgaaggtaggtcgtgggggtggtcgtttttagatttttataatttttttttgtgggcgtgtgttcggttgcgtattcgtatcggttaggttatcgggtcgtagagttagtatttattttacgattttttggttgtagttttttcgtttttacggggtttcgttgtatacgatttcgtcgtcgtttgttcggtcgtttttcgcggttcgtttttcgttgggttgtagtaggttgtagttgagtttatacgtgttggttttgttgtcgcgtttttttttgttgttgttgttcgaggtcgaatcggttggatcggcggcggggacggcggtcgaagggtgcggggacgaggacgtcgagggaggcgaggacgtcgaggagttcgttcggcgggtttaggtttcgggttggtggtggttgttgttgttgttggtcgtttttaggggtaggaagtttcgttgtttcgcgggtagcgcgtggttgtttagtaggcgtttttcggagcgatatatgtcggtcggggtcggggtcggggtcgaggtcgcgtcgtcggggttgtcggtgttgttgtcgttttcgtcggtggtcgtgttgttgttgttgttgttgtcgtcgtcgtcgttcgcgtt

SEQ ID NO: 4600 - DNA, 643 bp, Artificial Sequence
  chemically treated genomic DNA (Homo sapiens) CpG-island No: 4600
aacgcgaacgacgacgacgacaacaacaacaacaacaacacgaccaccgacgaaaacgacaacaacaccgacaaccccgacgacgcgacctcgaccccgaccccgaccccgaccgacatatatcgctccgaaaaacgcctactaaacaaccacgcgctacccgcgaaacaacgaaacttcctacccctaaaaacgaccaacaacaacaacaaccaccaccaacccgaaacctaaacccgccgaacgaactcctcgacgtcctcgcctccctcgacgtcctcgtccccgcacccttcgaccgccgtccccgccgccgatccaaccgattcgacctcgaacaacaacaacaaaaaaaaacgcgacaacaaaaccaacacgtataaactcaactacaacctactacaacccaacgaaaaacgaaccgcgaaaaacgaccgaacaaacgacgacgaaatcgtatacaacgaaaccccgtaaaaacgaaaaaactacaaccaaaaaatcgtaaaataaatactaactctacgacccgataacctaaccgatacgaatacgcaaccgaacacacgcccacaaaaaaaaattataaaaatctaaaaacgaccacccccacgacctaccttcgctactattacacgaaaat

SEQ ID NO: 4601 - DNA, 1289 bp, Artificial Sequence
  chemically treated genomic DNA (Homo sapiens) CpG-island No: 4601
  unsure (275, 424, 576, 798, 902, 910, 993, 997, 1016, 1031, 1109)
  unsure (1111)
ttttttttcgtatacgttttttcggtcgggggacgatatatcggtcgcggatttatattttcgttttttcgagatttcgcgttatcgacgggtaaatttcggtcgcgttttacgattttcgtcggttatagcgattatttatattcgtcgtttatatttttcgttcggtcgcgtcgggtcgtttttttcgtcggaataaaatgcgagatttcgttcggtttttaatcgttttaggtagatcggtcggtcgggtagatcgttcggttagacgtaancggcggttttcgtcgcgatatttcgttattatgtcggtaacgttcgttttcggtttttcgcgcgttttcggcgtaatcgcgtcgcgtcgttcgtttcgcgatcgttcgggtcgttttaaggttcgcgtttttaattatttattttatantcgcggcggttcgggtcgttttttttttattatcgattcggtcgtttcgtttatgtatcgcgtcggggtcgttcggcgttcggttcgttttcgtttttcgtcgtttaacgagttcgtacgatgtcgcgttcggcgtcgggtcgggcgttttnttattaaattcgcggggtcggcgtcggcgttcggttcggcgttcgcgaagggagtttttcgtcgcgttcggcgcgcgttttcggttcgtcgcgcgcggcgttcggcgtcgcgggttcggattcgggcggacgcgtcgcgcgttttcggttcgcgtcgtcggtttcggttttcgcggcgttcgcggttcgtcgcggcgtcgttttaaaagcggtcgttcggtncgtcgggtcgatgtttttaatttcgtcggcgtcggcgcgttcgcgttcgggcgggtcggttttcggggttttcgcggttcgcgtcgtcgcgggcggttcggggncgatcgtngtcgcgtcgtttatcgcggtcgcggtttcgttcggcgcgtcgcgaaaatcgcggaaattcgcggcgttcgtcgtttttcgcgntttncgcgcgcgcggcggttttngcgcgttttcgcggntttcggcgttttcgcgcgtttcgtcggcgttcgcggggtttcgggcgcgcgcgggggcgtcggcgcgtcgtcgcgcgntngttcgttcggcgaaaatgcgaattgtggtagaagcggtatgtgtagaaggtgaaattatttataatatgtttggcggcgcgacgttagattaggtttacgtcgttttgttggtagtcgattagtattttaaggttatagttaagtagaagtggaaatatttttttcgtaggttttaaa

SEQ ID NO: 4602 - DNA, 1289 bp, Artificial Sequence
  chemically treated genomic DNA (Homo sapiens) CpG-island No: 4602
  unsure (179, 181, 259, 274, 293, 297, 380, 388, 492, 714, 866, 1015)
tttaaaacctacgaaaaaaatatttccacttctacttaactataaccttaaaatactaatcgactaccaacaaaacgacgtaaacctaatctaacgtcgcgccgccaaacatattataaataatttcaccttctacacataccgcttctaccacaattcgcattttcgccgaacgaacnancgcgcgacgacgcgccgacgcccccgcgcgcgcccgaaaccccgcgaacgccgacgaaacgcgcgaaaacgccgaaanccgcgaaaacgcgcnaaaaccgccgcgcgcgcgnaaancgcgaaaaacgacgaacgccgcgaatttccgcgattttcgcgacgcgccgaacgaaaccgcgaccgcgataaacgacgcgacnacgatcgnccccgaaccgcccgcgacgacgcgaaccgcgaaaaccccgaaaaccgacccgcccgaacgcgaacgcgccgacgccgacgaaattaaaaacatcgacccgacgnaccgaacgaccgcttttaaaacgacgccgcgacgaaccgcgaacgccgcgaaaaccgaaaccgacgacgcgaaccgaaaacgcgcgacgcgtccgcccgaatccgaacccgcgacgccgaacgccgcgcgcgacgaaccgaaaacgcgcgccgaacgcgacgaaaaactcccttcgcgaacgccgaaccgaacgccgacgccgaccccgcgaatttaataanaaaacgcccgacccgacgccgaacgcgacatcgtacgaactcgttaaacgacgaaaaacgaaaacgaaccgaacgccgaacgaccccgacgcgatacataaacgaaacgaccgaatcgataataaaaaaaaaacgacccgaaccgccgcgantataaaataaataattaaaaacgcgaaccttaaaacgacccgaacgatcgcgaaacgaacgacgcgacgcgattacgccgaaaacgcgcgaaaaaccgaaaacgaacgttaccgacataataacgaaatatcgcgacgaaaaccgccgnttacgtctaaccgaacgatctacccgaccgaccgatctacctaaaacgattaaaaaccgaacgaaatctcgcattttattccgacgaaaaaaacgacccgacgcgaccgaacgaaaaatataaacgacgaatataaataatcgctataaccgacgaaaatcgtaaaacgcgaccgaaatttacccgtcgataacgcgaaatctcgaaaaaacgaaaatataaatccgcgaccgatatatcgtcccccgaccgaaaaaacgtatacgaaaaaaaa

SEQ ID NO: 4603 - DNA, 1289 bp, Artificial Sequence
  chemically treated genomic DNA (Homo sapiens) CpG-island No: 4603
  unsure (179, 181, 259, 274, 293, 297, 380, 388, 492, 714, 866, 1015)
tttgggatttacgaagagggtgtttttatttttgtttagttgtggttttggggtattggtcggttattagtagagcggcgtaaatttgatttggcgtcgcgtcgttaggtatgttgtgaatggttttattttttgtatatgtcgtttttgttataattcgtattttcgtcgggcgggtngncgcgcggcggcgcgtcggcgttttcgcgcgcgttcggggtttcgcgggcgtcggcggggcgcgcgggggcgtcggggntcgcgggggcgcgtnggggtcgtcgcgcgcgcgngggncgcggggggcggcgggcgtcgcggattttcgcggttttcgcggcgcgtcgggcggggtcgcggtcgcgataggcggcgcggtngcgatcgntttcgggtcgttcgcggcggcgcgggtcgcgggggtttcgggggtcggttcgttcgggcgcgggcgcgtcggcgtcggcgggattgggggtatcggttcggcgngtcgggcggtcgtttttggggcggcgtcgcggcgggtcgcgggcgtcgcgggggtcggggtcggcggcgcgggtcgggggcgcgcggcgcgttcgttcggattcgggttcgcggcgtcgggcgtcgcgcgcggcgggtcgggggcgcgcgtcgggcgcggcggggggtttttttcgcgggcgtcgggtcgggcgtcggcgtcggtttcgcgaatttgatggnggggcgttcggttcggcgtcgggcgcggtatcgtgcgggttcgttgggcggcggggggcgggggcgggtcgggcgtcgggcggtttcggcgcggtgtatgggcggggcggtcggatcgatgatggggggggggcggttcgggtcgtcgcggntatgggatggatggttgggggcgcgggttttggggcggttcgggcggtcgcggggcgggcggcgcggcgcggttgcgtcgggggcgcgcggggggtcgggggcgggcgttgtcggtatgatggcggggtatcgcggcgggggtcgtcgnttgcgtttggtcgggcgatttgttcggtcggtcgatttgtttggggcggttgggggtcgggcgggatttcgtattttgtttcggcggggggggcggttcggcgcggtcgggcgggggatgtgggcggcgggtatgggtggtcgttgtggtcggcgggggtcgtggggcgcggtcggggtttgttcgtcggtggcgcggggtttcgggggggcgggggtgtgggttcgcggtcggtgtgtcgtttttcggtcgggggggcgtatgcggggggggg

SEQ ID NO: 4604 - DNA, 1289 bp, Artificial Sequence
  chemically treated genomic DNA (Homo sapiens) CpG-island No: 4604
  unsure (275, 424, 576, 798, 902, 910, 993, 997, 1016, 1031, 1109)
  unsure (1111)
cccccccccgcatacgcccccccgaccgaaaaacgacacaccgaccgcgaacccacacccccgcccccccgaaaccccgcgccaccgacgaacaaaccccgaccgcgccccacgacccccgccgaccacaacgaccacccatacccgccgcccacatcccccgcccgaccgcgccgaaccgccccccccgccgaaacaaaatacgaaatcccgcccgacccccaaccgccccaaacaaatcgaccgaccgaacaaatcgcccgaccaaacgcaancgacgacccccgccgcgataccccgccatcataccgacaacgcccgcccccgaccccccgcgcgcccccgacgcaaccgcgccgcgccgcccgccccgcgaccgcccgaaccgccccaaaacccgcgcccccaaccatccatcccatanccgcgacgacccgaaccgccccccccccatcatcgatccgaccgccccgcccatacaccgcgccgaaaccgcccgacgcccgacccgcccccgccccccgccgcccaacgaacccgcacgataccgcgcccgacgccgaaccgaacgccccnccatcaaattcgcgaaaccgacgccgacgcccgacccgacgcccgcgaaaaaaaccccccgccgcgcccgacgcgcgcccccgacccgccgcgcgcgacgcccgacgccgcgaacccgaatccgaacgaacgcgccgcgcgcccccgacccgcgccgccgaccccgacccccgcgacgcccgcgacccgccgcgacgccgccccaaaaacgaccgcccgacncgccgaaccgatacccccaatcccgccgacgccgacgcgcccgcgcccgaacgaaccgacccccgaaacccccgcgacccgcgccgccgcgaacgacccgaaancgatcgcnaccgcgccgcctatcgcgaccgcgaccccgcccgacgcgccgcgaaaaccgcgaaaatccgcgacgcccgccgccccccgcgncccncgcgcgcgcgacgaccccnacgcgcccccgcganccccgacgcccccgcgcgccccgccgacgcccgcgaaaccccgaacgcgcgcgaaaacgccgacgcgccgccgcgcgncnacccgcccgacgaaaatacgaattataacaaaaacgacatatacaaaaaataaaaccattcacaacatacctaacgacgcgacgccaaatcaaatttacgccgctctactaataaccgaccaataccccaaaaccacaactaaacaaaaataaaaacaccctcttcgtaaatcccaaa

SEQ ID NO: 4605 - DNA, 1384 bp, Artificial Sequence
  chemically treated genomic DNA (Homo sapiens) CpG-island No: 4605
  unsure (292, 318, 399, 592, 908, 966, 975, 997, 1052, 1062, 1165)
  unsure (1174, 1184..1185, 1209)
ggttttcgcgtttcgttatatatttcgcgcggcgttcggggcggggggatggattatatcgtcgcgtcgtcgattatatagcgtttcgcgtttcggcgtatattcgcgtttttcggatttcgatcgtcgcgatatacgttttcgtcgttcggttcgtattttacgttttcgtcgttcggaaatatggcgtatcgatcgttatatcgttcgtttttcgagtattcgcggcggcgttcgttttttttttcggtttcgttttcgcgttcgtttcgattataatatgtttatgatntttcggcgtcgttcgttttaattttngttatatggtattatgtcgcgtcgcgtcgcgggttagtatcgcgtcgtcgtttatgatgcggaatcgttcggtcgtcggtnttttcggataatttttttttattatcgtttttcgatgttttcgtcgcgtcgttcgcgttttcgcgtcgttttttttcgatacggttttcgggtttttttcgcgttcgtcgatcgttttcgttttttttcgggatttcgtcggtttcggggaattattcgatgtcgatagtcgcgcgcgcgttttttttcgttntcgcgtcgcgaatatttatgtttcgttcgcgtttcggcgtaatttacgtttcgcggttcggtcggcggtttttcgtttcgcgttcggtttcgggcgcgcgcgttaacgattttcgtatggaatcgtcgttcgcgttcggtttttcgtttcgtttttcgatcgatattttcggcgcgttcgtcgcgggcgtcgtcgcggttttttttcgagcgagcgtcgcggttttcgtcggcgcggttcgtcgcggcgcgttttcgtcggtcgttcgggcgtcgggttcgatgcggcgggaagcgcgtcgtcgcgtttcgttcgngcgtcgcgcgcggtttcggtttcgcgcgtttttcgcgcgcgcgtcgcgttatagtcgngtcgttcgnttcgttttcgggatcgtcgaangttcgtcgtttcgttcgttcggtcgcgtcggcgtcgtcgcggttcggcggttcgncggttcgttngcgtcgggttttttaaatatcgtttcgcgcgggatacgcggttcggcggttcggtcgttcgcggatacgtcgagaattcgcgcggttcgcgcggtttcgtcgngcgcgcgtntttcggtttnntcgttttcggttttttcgcggggntttcgtcgtcgttcgggcgttcgcgcgcgttttcggcgggttcggcggcgttttcggcggttttcgttaggtttggggtatgtcgtaaatgggttttaaagagagtattacgggtttttttagtatcgcgtttatcggagatagtaaattataagttgaaaatttattacgtttg

SEQ ID NO: 4606 - DNA, 1384 bp, Artificial Sequence
  chemically treated genomic DNA (Homo sapiens) CpG-island No: 4606
  unsure (176, 200..201, 211, 220, 323, 333, 388, 410, 419, 477, 793)
  unsure (986, 1067, 1093)
caaacgtaataaattttcaacttataatttactatctccgataaacgcgatactaaaaaaacccgtaatactctctttaaaacccatttacgacataccccaaacctaacgaaaaccgccgaaaacgccgccgaacccgccgaaaacgcgcgcgaacgcccgaacgacgacgaaanccccgcgaaaaaaccgaaaacgannaaaccgaaanacgcgcgcncgacgaaaccgcgcgaaccgcgcgaattctcgacgtatccgcgaacgaccgaaccgccgaaccgcgtatcccgcgcgaaacgatatttaaaaaacccgacgcnaacgaaccgncgaaccgccgaaccgcgacgacgccgacgcgaccgaacgaacgaaacgacgaacnttcgacgatcccgaaaacgaancgaacgacncgactataacgcgacgcgcgcgcgaaaaacgcgcgaaaccgaaaccgcgcgcgacgcncgaacgaaacgcgacgacgcgcttcccgccgcatcgaacccgacgcccgaacgaccgacgaaaacgcgccgcgacgaaccgcgccgacgaaaaccgcgacgctcgctcgaaaaaaaaccgcgacgacgcccgcgacgaacgcgccgaaaatatcgatcgaaaaacgaaacgaaaaaccgaacgcgaacgacgattccatacgaaaatcgttaacgcgcgcgcccgaaaccgaacgcgaaacgaaaaaccgccgaccgaaccgcgaaacgtaaattacgccgaaacgcgaacgaaacataaatattcgcgacgcganaacgaaaaaaaacgcgcgcgcgactatcgacatcgaataattccccgaaaccgacgaaatcccgaaaaaaaacgaaaacgatcgacgaacgcgaaaaaaacccgaaaaccgtatcgaaaaaaaacgacgcgaaaacgcgaacgacgcgacgaaaacatcgaaaaacgataataaaaaaaaattatccgaaaanaccgacgaccgaacgattccgcatcataaacgacgacgcgatactaacccgcgacgcgacgcgacataataccatataacnaaaattaaaacgaacgacgccgaaanatcataaacatattataatcgaaacgaacgcgaaaacgaaaccgaaaaaaaaaacgaacgccgccgcgaatactcgaaaaacgaacgatataacgatcgatacgccatatttccgaacgacgaaaacgtaaaatacgaaccgaacgacgaaaacgtatatcgcgacgatcgaaatccgaaaaacgcgaatatacgccgaaacgcgaaacgctatataatcgacgacgcgacgatataatccatccccccgccccgaacgccgcgcgaaatatataacgaaacgcgaaaacc

SEQ ID NO: 4607 - DNA, 1384 bp, Artificial Sequence
  chemically treated genomic DNA (Homo sapiens) CpG-island No: 4607
  unsure (176, 200..201, 211, 220, 323, 333, 388, 410, 419, 477, 793)
  unsure (986, 1067, 1093)
taaacgtagtgaatttttagtttgtaatttgttgttttcggtgagcgcggtgttgagaagattcgtgatgttttttttgaagtttatttgcggtatgttttaggtttggcgggggtcgtcgggggcgtcgtcgggttcgtcgggggcgcgcgcgggcgttcgggcggcggcggggntttcgcgggggggtcgggggcggnngggtcggggngcgcgcgtncggcggggtcgcgcgggtcgcgcgggttttcggcgtattcgcgggcggtcgggtcgtcgggtcgcgtatttcgcgcggggcggtatttggggggttcggcgtnggcgggtcgncgggtcgtcgggtcgcggcggcgtcggcgcggtcgggcgggcggggcggcgggtnttcggcgatttcgggggcgggncgggcggtncgattatggcgcggcgcgcgcgcggggggcgcgcggggtcggggtcgcgcgcggcgtncgggcggggcgcggcggcgcgtttttcgtcgtatcgggttcggcgttcgggcggtcggcgggggcgcgtcgcggcgggtcgcgtcggcgggggtcgcggcgttcgttcgggggggggtcgcggcggcgttcgcggcgggcgcgtcggaaatgtcggtcggggggcggggcggggggtcgggcgcgggcggcggttttatgcgggggtcgttggcgcgcgcgttcggggtcgggcgcggggcggggggtcgtcggtcgggtcgcggggcgtgggttgcgtcggggcgcgggcggggtatgggtgttcgcggcgcggnggcgggggggggcgcgcgcgcggttatcggtatcggatggtttttcggggtcggcgggatttcgggggggggcgggggcgatcggcgggcgcggggggggttcgggggtcgtatcgggggggggcggcgcgggggcgcgggcggcgcggcgggggtatcggggggcggtgatgggggggggttattcgggggngtcggcggtcgggcgatttcgtattatgggcggcggcgcgatgttggttcgcggcgcggcgcggtatgatgttatatggtngggattggggcgggcggcgtcggggnattatgggtatgttataatcggggcgggcgcgggggcggggtcgggggggggggcgggcgtcgtcgcgggtgttcggggggcgggcggtatggcgatcgatgcgttatgttttcgggcggcgggggcgtgggatgcgggtcgggcggcgggggcgtatgtcgcggcggtcggggttcggggggcgcggatatgcgtcggggcgcggggcgttatgtggtcggcggcgcggcgatatggtttattttttcgtttcgggcgtcgcgcggggtatatggcggggcgcggggatt

SEQ ID NO: 4608 - DNA, 1384 bp, Artificial Sequence
  chemically treated genomic DNA (Homo sapiens) CpG-island No: 4608
  unsure (292, 318, 399, 592, 908, 966, 975, 997, 1052, 1062, 1165)
  unsure (1174, 1184..1185, 1209)
aatccccgcgccccgccatataccccgcgcgacgcccgaaacgaaaaaataaaccatatcgccgcgccgccgaccacataacgccccgcgccccgacgcatatccgcgccccccgaaccccgaccgccgcgacatacgcccccgccgcccgacccgcatcccacgcccccgccgcccgaaaacataacgcatcgatcgccataccgcccgccccccgaacacccgcgacgacgcccgcccccccccccgaccccgcccccgcgcccgccccgattataacatacccataatnccccgacgccgcccgccccaatcccnaccatataacatcataccgcgccgcgccgcgaaccaacatcgcgccgccgcccataatacgaaatcgcccgaccgccgacncccccgaataacccccccccatcaccgccccccgatacccccgccgcgccgcccgcgcccccgcgccgcccccccccgatacgacccccgaaccccccccgcgcccgccgatcgcccccgcccccccccgaaatcccgccgaccccgaaaaaccatccgataccgataaccgcgcgcgcgcccccccccgccnccgcgccgcgaacacccataccccgcccgcgccccgacgcaacccacgccccgcgacccgaccgacgaccccccgccccgcgcccgaccccgaacgcgcgcgccaacgacccccgcataaaaccgccgcccgcgcccgaccccccgccccgccccccgaccgacatttccgacgcgcccgccgcgaacgccgccgcgacccccccccgaacgaacgccgcgacccccgccgacgcgacccgccgcgacgcgcccccgccgaccgcccgaacgccgaacccgatacgacgaaaaacgcgccgccgcgccccgcccgnacgccgcgcgcgaccccgaccccgcgcgccccccgcgcgcgcgccgcgccataatcgnaccgcccgncccgcccccgaaatcgccgaanacccgccgccccgcccgcccgaccgcgccgacgccgccgcgacccgacgacccgncgacccgccnacgccgaaccccccaaataccgccccgcgcgaaatacgcgacccgacgacccgaccgcccgcgaatacgccgaaaacccgcgcgacccgcgcgaccccgccgnacgcgcgcnccccgacccnnccgcccccgacccccccgcgaaanccccgccgccgcccgaacgcccgcgcgcgcccccgacgaacccgacgacgcccccgacgacccccgccaaacctaaaacataccgcaaataaacttcaaaaaaaacatcacgaatcttctcaacaccgcgctcaccgaaaacaacaaattacaaactaaaaattcactacgttta

SEQ ID NO: 4609 - DNA, 502 bp, Artificial Sequence
  chemically treated genomic DNA (Homo sapiens) CpG-island No: 4609
ttcggtgttatagttcgttacgttaagtgttcgtttcgataggtattttttttagattcgtgcgataatattataggtttgtttcgacgaggcgggcgataatttggttgcgtttcgttatgtagttgagtagtaatagttgtcgtaagtggtttggttggcggaatatttggcggtataattggaagttatcgcgcgtgaagttttcgtttggttattgcgcgagtgggatagtgtattatcgaaaattgttcgttggtagcgtaaacgtatttagtattaggattttgagcggcggttacgtgagatggttgtcgaacgtagagttcgtttggcgcgggtgatcgatttcgtggaatagtaaacgttgtatcgtgaagtggaagtttatgaagcgcgtttggtacgttgtcgttatgcgttggaaaaaatcgaaaataggttagcgcgtttaattcgttagtaatggagagaatatgttattggaaaatgtttttgacga

SEQ ID NO: 4610 - DNA, 502 bp, Artificial Sequence
  chemically treated genomic DNA (Homo sapiens) CpG-island No: 4610
tcgtcaaaaacattttccaataacatattctctccattactaacgaattaaacgcgctaacctattttcgattttttccaacgcataacgacaacgtaccaaacgcgcttcataaacttccacttcacgatacaacgtttactattccacgaaatcgatcacccgcgccaaacgaactctacgttcgacaaccatctcacgtaaccgccgctcaaaatcctaatactaaatacgtttacgctaccaacgaacaattttcgataatacactatcccactcgcgcaataaccaaacgaaaacttcacgcgcgataacttccaattataccgccaaatattccgccaaccaaaccacttacgacaactattactactcaactacataacgaaacgcaaccaaattatcgcccgcctcgtcgaaacaaacctataatattatcgcacgaatctaaaaaaaatacctatcgaaacgaacacttaacgtaacgaactataacaccgaa

SEQ ID NO: 4611 - DNA, 502 bp, Artificial Sequence
  chemically treated genomic DNA (Homo sapiens) CpG-island No: 4611
tcgttaggggtattttttagtgatatattttttttattgttagcgggttaaacgcgttaatttgttttcgattttttttagcgtatggcggtagcgtgttaggcgcgttttataggtttttattttacgatgtagcgtttgttgttttacgagatcggttattcgcgttagacgggttttgcgttcggtaattattttacgtagtcgtcgtttaaaattttgatgttgaatacgtttacgttgttagcgggtaattttcggtggtgtattgttttattcgcgtaatgattaggcggaggttttacgcgcgatggtttttagttgtgtcgttagatgtttcgttagttaggttatttgcggtagttgttgttgtttaattgtatgacgaagcgtagttagattatcgttcgtttcgtcgagataagtttgtagtgttgtcgtacgagtttgaaaaagatgtttgtcgaaacgagtatttagcgtggcgaattgtgatatcggg

SEQ ID NO: 4612 - DNA, 502 bp, Artificial Sequence
  chemically treated genomic DNA (Homo sapiens) CpG-island No: 4612
cccgatatcacaattcgccacgctaaatactcgtttcgacaaacatctttttcaaactcgtacgacaacactacaaacttatctcgacgaaacgaacgataatctaactacgcttcgtcatacaattaaacaacaacaactaccgcaaataacctaactaacgaaacatctaacgacacaactaaaaaccatcgcgcgtaaaacctccgcctaatcattacgcgaataaaacaatacaccaccgaaaattacccgctaacaacgtaaacgtattcaacatcaaaattttaaacgacgactacgtaaaataattaccgaacgcaaaacccgtctaacgcgaataaccgatctcgtaaaacaacaaacgctacatcgtaaaataaaaacctataaaacgcgcctaacacgctaccgccatacgctaaaaaaaatcgaaaacaaattaacgcgtttaacccgctaacaataaaaaaaatatatcactaaaaaatacccctaacga

SEQ ID NO: 4613 - DNA, 664 bp, Artificial Sequence
  chemically treated genomic DNA (Homo sapiens) CpG-island No: 4613
cgtagtacgaagagattcgtttgtttgtcggagttgaggttttcgaaagtcgtaagggtgttttaggtttcggttttaaagagttcggtcgtgacgttgtgtagcgttcgcgttgggatcggttcgatttttagtagtgtaagttttgcgaggagcggcgagaagagggtttaggagttcgggagtcggttcgtcgtcgttatggtagttttttagttttcgttcgtcggtttaacgtcgcgtttgacgatagtcgtaaagtatcgcgttatcggtcgagagagtggcgcgtagtttcgggacgcgtaagagtcgttgtcggttttttttttttttttttattagggttgttttttcgacgttaaaaaagtagtggagttagggtgaaagtcgtttttacgtttattttcggtaggcgcgtttttcgatagtgtcgtgcggggggcgtggttcggtattgttgataggcggtttcgggggcggtggttaaggcggcgatcggagcgcgatggcgggggcggcgggatttacggtagaagtgagttggaaggttttggagcgaagagttcggattaagcgtttaggtttggttggttggggcgtcgttttttattcgagtattttgggtggtgtttcgttttaagcgttttggcgggaggtaggt

SEQ ID NO: 4614 - DNA, 664 bp, Artificial Sequence
  chemically treated genomic DNA (Homo sapiens) CpG-island No: 4614
acctacctcccgccaaaacgcttaaaacgaaacaccacccaaaatactcgaataaaaaacgacgccccaaccaaccaaacctaaacgcttaatccgaactcttcgctccaaaaccttccaactcacttctaccgtaaatcccgccgcccccgccatcgcgctccgatcgccgccttaaccaccgcccccgaaaccgcctatcaacaataccgaaccacgccccccgcacgacactatcgaaaaacgcgcctaccgaaaataaacgtaaaaacgactttcaccctaactccactacttttttaacgtcgaaaaaacaaccctaataaaaaaaaaaaaaaaaaaccgacaacgactcttacgcgtcccgaaactacgcgccactctctcgaccgataacgcgatactttacgactatcgtcaaacgcgacgttaaaccgacgaacgaaaactaaaaaactaccataacgacgacgaaccgactcccgaactcctaaaccctcttctcgccgctcctcgcaaaacttacactactaaaaatcgaaccgatcccaacgcgaacgctacacaacgtcacgaccgaactctttaaaaccgaaacctaaaacacccttacgactttcgaaaacctcaactccgacaaacaaacgaatctcttcgtactacg

SEQ ID NO: 4615 - DNA, 664 bp, Artificial Sequence
  chemically treated genomic DNA (Homo sapiens) CpG-island No: 4615
atttgtttttcgttaaggcgtttgaggcgaagtattatttaaggtattcgggtggggggcggcgttttagttagttaaatttgagcgtttggttcgagtttttcgttttaagattttttagtttatttttgtcgtgagtttcgtcgttttcgttatcgcgtttcggtcgtcgttttggttatcgttttcggggtcgtttgttagtaatgtcgggttacgtttttcgtacgatattgtcgggaggcgcgtttgtcggaagtgagcgtgagggcggtttttattttagttttattgtttttttagcgtcggaagggtagttttagtgggagagagaaaaaggagtcggtagcggtttttacgcgtttcggggttgcgcgttattttttcggtcggtaacgcggtgttttgcggttgtcgttaagcgcggcgttgggtcggcgggcgggggttgaggggttgttatggcggcggcgggtcggttttcgagtttttgggtttttttttcgtcgtttttcgtagggtttgtattattgggagtcgggtcggttttagcgcgggcgttgtataacgttacggtcgagttttttggggtcgaggtttggggtatttttgcggttttcggggattttaatttcgataagtagacggattttttcgtgttgcg

SEQ ID NO: 4616 - DNA, 664 bp, Artificial Sequence
  chemically treated genomic DNA (Homo sapiens) CpG-island No: 4616
cgcaacacgaaaaaatccgtctacttatcgaaattaaaatccccgaaaaccgcaaaaataccccaaacctcgaccccaaaaaactcgaccgtaacgttatacaacgcccgcgctaaaaccgacccgactcccaataatacaaaccctacgaaaaacgacgaaaaaaaaacccaaaaactcgaaaaccgacccgccgccgccataacaacccctcaacccccgcccgccgacccaacgccgcgcttaacgacaaccgcaaaacaccgcgttaccgaccgaaaaaataacgcgcaaccccgaaacgcgtaaaaaccgctaccgactcctttttctctctcccactaaaactacccttccgacgctaaaaaaacaataaaactaaaataaaaaccgccctcacgctcacttccgacaaacgcgcctcccgacaatatcgtacgaaaaacgtaacccgacattactaacaaacgaccccgaaaacgataaccaaaacgacgaccgaaacgcgataacgaaaacgacgaaactcacgacaaaaataaactaaaaaatcttaaaacgaaaaactcgaaccaaacgctcaaatttaactaactaaaacgccgccccccacccgaataccttaaataatacttcgcctcaaacgccttaacgaaaaacaaat

SEQ ID NO: 4617 - DNA, 536 bp, Artificial Sequence
  chemically treated genomic DNA (Homo sapiens) CpG-island No: 4617
  unsure (176)
gtcgcgaaggtcgtttcgaattgagtttcgcgtttaaggtaggtcgtggtttgggtataggttttcggagaaggtcgcgtcgttcgtcgtcgtcgcgggggtagttaggtttatttgtgtagcgacggtaggttttgcgtgtcgttggcggggttaggcgtgttggggatgacgtntaggatggtgttttgtagcgacgtgttttttagaaggcggtttcgtattagttgtaggttgcgggtcgagtttacgttggtgcgtatggtggagtcgggtagtaggacgttttcgtgggtgagtagtagcgggaggcgtttggggatttggatggggtttattgattgatgagagattcgttttaacgttttcgatttcggtacgcgttacgttcgttttcgggtttaaaagttatgcgtatgcgttgttttttaggagagtttttcggtaagatttgagcgttttatttatgcggaaagacgtgtatttaagcgtgtagcgattttcgttttatttatagagtatatttggaaggatga

SEQ ID NO: 4618 - DNA, 536 bp, Artificial Sequence
  chemically treated genomic DNA (Homo sapiens) CpG-island No: 4618
  unsure (361)
tcatccttccaaatatactctataaataaaacgaaaatcgctacacgcttaaatacacgtctttccgcataaataaaacgctcaaatcttaccgaaaaactctcctaaaaaacaacgcatacgcataacttttaaacccgaaaacgaacgtaacgcgtaccgaaatcgaaaacgttaaaacgaatctctcatcaatcaataaaccccatccaaatccccaaacgcctcccgctactactcacccacgaaaacgtcctactacccgactccaccatacgcaccaacgtaaactcgacccgcaacctacaactaatacgaaaccgccttctaaaaaacacgtcgctacaaaacaccatcctanacgtcatccccaacacgcctaaccccgccaacgacacgcaaaacctaccgtcgctacacaaataaacctaactacccccgcgacgacgacgaacgacgcgaccttctccgaaaacctatacccaaaccacgacctaccttaaacgcgaaactcaattcgaaacgaccttcgcgac

SEQ ID NO: 4619 - DNA, 536 bp, Artificial Sequence
  chemically treated genomic DNA (Homo sapiens) CpG-island No: 4619
  unsure (361)
ttatttttttaaatatattttgtaagtgaggcgaaggtcgttgtacgtttgagtgtacgttttttcgtataggtaggacgtttaagttttatcgggaggtttttttagagagtagcgtatacgtatggtttttgggttcggggacggacgtagcgcgtatcggaatcggaagcgttgaggcgggttttttattaattagtgagttttatttagatttttagacgtttttcgttgttgtttatttacgagggcgttttgttgttcggttttattatgcgtattagcgtggattcggttcgtaatttgtagttggtgcggagtcgttttttgaagggtacgtcgttgtaaagtattattttgngcgttatttttaatacgtttgatttcgttagcgatacgtaagatttgtcgtcgttgtataggtaggtttggttgttttcgcggcggcggcgggcggcgcggtttttttcggggatttgtgtttaggttacggtttgttttgagcgcgaggtttagttcggggcggttttcgcggt

SEQ ID NO: 4620 - DNA, 536 bp, Artificial Sequence
  chemically treated genomic DNA (Homo sapiens) CpG-island No: 4620
  unsure (176)
accgcgaaaaccgccccgaactaaacctcgcgctcaaaacaaaccgtaacctaaacacaaatccccgaaaaaaaccgcgccgcccgccgccgccgcgaaaacaaccaaacctacctatacaacgacgacaaatcttacgtatcgctaacgaaatcaaacgtattaaaaataacgcncaaaataatactttacaacgacgtacccttcaaaaaacgactccgcaccaactacaaattacgaaccgaatccacgctaatacgcataataaaaccgaacaacaaaacgccctcgtaaataaacaacaacgaaaaacgtctaaaaatctaaataaaactcactaattaataaaaaacccgcctcaacgcttccgattccgatacgcgctacgtccgtccccgaacccaaaaaccatacgtatacgctactctctaaaaaaacctcccgataaaacttaaacgtcctacctatacgaaaaaacgtacactcaaacgtacaacgaccttcgcctcacttacaaaatatatttaaaaaaataa

SEQ ID NO: 4621 - DNA, 637 bp, Artificial Sequence
  chemically treated genomic DNA (Homo sapiens) CpG-island No: 4621
attattcgttagttattttattggagacgacggaagatcgttgtcgaagcggcgttttatcgtttttagtatgacgttttgtattgttttattgttgaagtcgtcggtagtgatcgtttagtgtagtgttttacgattatagtagtttagcgcgaacgtgatacgtagttttttttcgttattatagtagaattcgaattcgttagagtattatcgttgattgtttttttttacggttattttgtttgtatgtgttcgtttcgatggcggtatagtaggttttcgtttaagtaatagcgtattttggcgtatgattcggtaaatacgtttggtattgatcgtaggtatattattaagttttgtttgtttgcgaagtagcgtttatattcgacgataattatacgttggtagtttttcgataatatggtgtatacggagaagtatattcgtattattagtgtgacgattgcggcgggtatttatttagttatcgggtcgtttgagaatgacgtgtaattgtgtacgcgatattcggagataacggttgatttagttttattttttattttcgggtaataaaggcgcgtgcgttttttattttttttgttcgtttatattttaacgggttttttgaaga

SEQ ID NO: 4622 - DNA, 637 bp, Artificial Sequence
  chemically treated genomic DNA (Homo sapiens) CpG-island No: 4622
tcttcaaaaaacccgttaaaatataaacgaacaaaaaaaataaaaaacgcacgcgcctttattacccgaaaataaaaaataaaactaaatcaaccgttatctccgaatatcgcgtacacaattacacgtcattctcaaacgacccgataactaaataaatacccgccgcaatcgtcacactaataatacgaatatacttctccgtatacaccatattatcgaaaaactaccaacgtataattatcgtcgaatataaacgctacttcgcaaacaaacaaaacttaataatatacctacgatcaataccaaacgtatttaccgaatcatacgccaaaatacgctattacttaaacgaaaacctactataccgccatcgaaacgaacacatacaaacaaaataaccgtaaaaaaaaacaatcaacgataatactctaacgaattcgaattctactataataacgaaaaaaaactacgtatcacgttcgcgctaaactactataatcgtaaaacactacactaaacgatcactaccgacgacttcaacaataaaacaatacaaaacgtcatactaaaaacgataaaacgccgcttcgacaacgatcttccgtcgtctccaataaaataactaacgaataat

SEQ ID NO: 4623 - DNA, 637 bp, Artificial Sequence
  chemically treated genomic DNA (Homo sapiens) CpG-island No: 4623
tttttaaagaattcgttgaaatatggacgggtaaaaaaagtggaaagcgtacgcgtttttattgttcggggatggggagtaaagttaagttagtcgttgttttcgggtgtcgcgtgtatagttgtacgttatttttagacgattcgatgattggatgaatgttcgtcgtagtcgttatattgatgatacggatgtgttttttcgtatatattatgttatcggagagttgttaacgtatggttatcgtcgggtatgggcgttgtttcgtagataggtagaatttgatggtatgtttgcgattaatgttaaacgtgtttatcggattatgcgttagaatgcgttgttgtttgagcgaaaatttgttgtatcgttatcgaaacgggtatatataggtagagtggtcgtgaaagaaagtaattagcgatggtgttttgacgggttcgagttttgttgtgataacggagagagattgcgtgttacgttcgcgttggattgttgtgatcgtgaggtattgtattgggcggttattatcggcggttttaatagtgaaatagtataggacgttatgttgggagcggtggaacgtcgtttcggtaacgatttttcgtcgtttttagtggagtggttgacggataat

SEQ ID NO: 4624 - DNA, 637 bp, Artificial Sequence
  chemically treated genomic DNA (Homo sapiens) CpG-island No: 4624
attatccgtcaaccactccactaaaaacgacgaaaaatcgttaccgaaacgacgttccaccgctcccaacataacgtcctatactatttcactattaaaaccgccgataataaccgcccaatacaatacctcacgatcacaacaatccaacgcgaacgtaacacgcaatctctctccgttatcacaacaaaactcgaacccgtcaaaacaccatcgctaattactttctttcacgaccactctacctatatatacccgtttcgataacgatacaacaaattttcgctcaaacaacaacgcattctaacgcataatccgataaacacgtttaacattaatcgcaaacataccatcaaattctacctatctacgaaacaacgcccatacccgacgataaccatacgttaacaactctccgataacataatatatacgaaaaaacacatccgtatcatcaatataacgactacgacgaacattcatccaatcatcgaatcgtctaaaaataacgtacaactatacacgcgacacccgaaaacaacgactaacttaactttactccccatccccgaacaataaaaacgcgtacgctttccactttttttacccgtccatatttcaacgaattctttaaaaa

SEQ ID NO: 4625 - DNA, 566 bp, Artificial Sequence
  chemically treated genomic DNA (Homo sapiens) CpG-island No: 4625
ggcgggggtgaaaagcgtgtagtaggttcgtattcgtgtcgtttagtcgttgggtgttagtcgtgcgtaggtgttgtggtttgttattttgttcggtgcgttgtcggaaatttttatcggattacgtattggtttgggggtgggttggtttacgttggtggcggcggagttgattgtcgcgacgcgcggtttaggatttatggtttagttagcgggtgaatttttcgtaattgacgtggtgttggcggggatcgcggtgattgcgattatcggtttttttttagattgggtttgcgcgcgttataacgttcgttgacgttttggtatggagaagtataatgagtgaacgttttgaatattatttcgttggggtcggatttcgcgtataaatttcggtgtcgattgcgcgttcgtaagcgatattagtttgatagttttatatgcggtgttggttatatagggggggttttattcgaataaatttttacgtcggaatataaatcgcgtttggtcgacgttttggttaattgttatttattttgtttttttttatgtttaaagggttg

SEQ ID NO: 4626 - DNA, 566 bp, Artificial Sequence
  chemically treated genomic DNA (Homo sapiens) CpG-island No: 4626
caaccctttaaacataaaaaaaaacaaaataaataacaattaaccaaaacgtcgaccaaacgcgatttatattccgacgtaaaaatttattcgaataaaaccccccctatataaccaacaccgcatataaaactatcaaactaatatcgcttacgaacgcgcaatcgacaccgaaatttatacgcgaaatccgaccccaacgaaataatattcaaaacgttcactcattatacttctccataccaaaacgtcaacgaacgttataacgcgcgcaaacccaatctaaaaaaaaaccgataatcgcaatcaccgcgatccccgccaacaccacgtcaattacgaaaaattcacccgctaactaaaccataaatcctaaaccgcgcgtcgcgacaatcaactccgccgccaccaacgtaaaccaacccacccccaaaccaatacgtaatccgataaaaatttccgacaacgcaccgaacaaaataacaaaccacaacacctacgcacgactaacacccaacgactaaacgacacgaatacgaacctactacacgcttttcacccccgcc

SEQ ID NO: 4627 - DNA, 566 bp, Artificial Sequence
  chemically treated genomic DNA (Homo sapiens) CpG-island No: 4627
taattttttgggtatggggggaaatagggtaaataataattggttaaaacgtcggttaagcgcggtttgtgtttcggcgtaaaagtttgttcgggtaaaattttttttatatggttagtatcgtatgtaaagttgttaaattgatatcgtttacgggcgcgtagtcggtatcgaaatttgtgcgcgaaattcggttttagcggggtaatgtttaagacgtttatttattgtatttttttatgttagggcgttagcgggcgttgtaacgcgcgtagatttagtttaaaagaaagtcgataatcgtaattatcgcgattttcgttagtattacgttagttgcgagaaatttattcgttgattgaattataaattttaaatcgcgcgtcgcggtaattagtttcgtcgttattagcgtagattagtttatttttagattaatacgtaattcggtgaggattttcggtagcgtatcgggtaaaatgataaattatagtatttgcgtacggttggtatttagcgattgggcggtacgaatgcgaatttgttgtacgttttttattttcgtt

SEQ ID NO: 4628 - DNA, 566 bp, Artificial Sequence
  chemically treated genomic DNA (Homo sapiens) CpG-island No: 4628
aacgaaaataaaaaacgtacaacaaattcgcattcgtaccgcccaatcgctaaataccaaccgtacgcaaatactataatttatcattttacccgatacgctaccgaaaatcctcaccgaattacgtattaatctaaaaataaactaatctacgctaataacgacgaaactaattaccgcgacgcgcgatttaaaatttataattcaatcaacgaataaatttctcgcaactaacgtaatactaacgaaaatcgcgataattacgattatcgactttcttttaaactaaatctacgcgcgttacaacgcccgctaacgccctaacataaaaaaatacaataaataaacgtcttaaacattaccccgctaaaaccgaatttcgcgcacaaatttcgataccgactacgcgcccgtaaacgatatcaatttaacaactttacatacgatactaaccatataaaaaaaattttacccgaacaaacttttacgccgaaacacaaaccgcgcttaaccgacgttttaaccaattattatttaccctatttccccccatacccaaaaaatta

SEQ ID NO: 4629 - DNA, 854 bp, Artificial Sequence
  chemically treated genomic DNA (Homo sapiens) CpG-island No: 4629
gttttcgttgataagcgttagcggtagttttcggtggtcgtagtgataaagatgagtttttcgcgtcggtgtgtatttcggttttatttgtttggttagttgttttatcgttagttcgtattgcgtaagttacgttcggtttttattgtttacgcggtttgttcggatttttttttttagtttgtttagtagtcgtattagtttagtcgggaatattacgtcgtggtcgtttttattttttttttgttggagcgtttttgttaggttgcgtcgttgcgttttttttcgttcgtcgttttttgtttcgattcggatgagcggcgtgaagtttttcggttcgtatatcgtttggatacgtgtggtgttagtttgtatcgtcgttagtttgttttcgttttagttatattacgttattttcggtttacgcgatagcgatatttatttcgttaggttacgttttcgtcgttagattcgttttgttattcgtcgttttaatcggtcgtagaggtagcggttttcgattaatggttcgttatgttgtattcgcgtgtagaatattaggcggtgttggttgtcgtaatggtagtggtgggttttttcgtcgtttcgtttttttatatttcgtcggaatgtcggttcgttttttcgttaatttggcgtatttattcggggcggtagatataatgggttttttttttcgatgtcggtatttcgttttattttgaatggtatggttcgggggtaaatttcgggtttcggaaatcggttgtttcgtcgggttttcggggttatcgggatgtcgggaagttttagtttggttttaagggggtttttgatttttatattttggttgt

SEQ ID NO: 4630 - DNA, 854 bp, Artificial Sequence
  chemically treated genomic DNA (Homo sapiens) CpG-island No: 4630
acaaccaaaatataaaaatcaaaaacccccttaaaaccaaactaaaacttcccgacatcccgataaccccgaaaacccgacgaaacaaccgatttccgaaacccgaaatttacccccgaaccataccattcaaaataaaacgaaataccgacatcgaaaaaaaaaacccattatatctaccgccccgaataaatacgccaaattaacgaaaaaacgaaccgacattccgacgaaatataaaaaaacgaaacgacgaaaaaacccaccactaccattacgacaaccaacaccgcctaatattctacacgcgaatacaacataacgaaccattaatcgaaaaccgctacctctacgaccgattaaaacgacgaataacaaaacgaatctaacgacgaaaacgtaacctaacgaaataaatatcgctatcgcgtaaaccgaaaataacgtaatataactaaaacgaaaacaaactaacgacgatacaaactaacaccacacgtatccaaacgatatacgaaccgaaaaacttcacgccgctcatccgaatcgaaacaaaaaacgacgaacgaaaaaaaacgcaacgacgcaacctaacaaaaacgctccaacaaaaaaaaaataaaaacgaccacgacgtaatattcccgactaaactaatacgactactaaacaaactaaaaaaaaaaatccgaacaaaccgcgtaaacaataaaaaccgaacgtaacttacgcaatacgaactaacgataaaacaactaaccaaacaaataaaaccgaaatacacaccgacgcgaaaaactcatctttatcactacgaccaccgaaaactaccgctaacgcttatcaacgaaaac

SEQ ID NO: 4631 - DNA, 854 bp, Artificial Sequence
  chemically treated genomic DNA (Homo sapiens) CpG-island No: 4631
atagttagggtgtggaaattaggggtttttttggaattaaattgggatttttcgatatttcggtaatttcgggaattcggcggggtaatcggttttcggaattcggaatttgttttcggattatattatttaaagtggggcgaaatatcggtatcggggaggaaggtttattatgtttatcgtttcgaatgaatacgttaggttaacgaagaaacggatcggtatttcggcggggtgtgaaaggacgggacgacgaggggatttattattattattacgatagttagtatcgtttggtgttttatacgcgaatatagtatggcgagttattggtcgagagtcgttatttttacgatcggttgggacggcgaatggtaaaacgggtttggcggcgggagcgtgatttgacggggtggatgtcgttgtcgcgtaaatcggaggtgacgtggtatggttgggacggagataggttgacgacggtgtagattgatattatacgtatttagacggtatacgagtcgggaagttttacgtcgtttattcgggtcgagatagagaacggcgagcgggaaaaagcgtagcggcgtagtttggtagagacgttttagtaggaagggagtgagaacggttacggcgtggtgttttcggttgaattggtgcggttgttggataggttggaggaagaaattcgggtagatcgcgtgagtagtgaaagtcgggcgtggtttgcgtagtgcgggttgacggtggagtaattggttagataggtggagtcggaatatatatcggcgcgaaaagtttatttttattattgcgattatcggggattgtcgttggcgtttattagcgaagat

SEQ ID NO: 4632 - DNA, 854 bp, Artificial Sequence
  chemically treated genomic DNA (Homo sapiens) CpG-island No: 4632
atcttcgctaataaacgccaacgacaatccccgataatcgcaataataaaaataaacttttcgcgccgatatatattccgactccacctatctaaccaattactccaccgtcaacccgcactacgcaaaccacgcccgactttcactactcacgcgatctacccgaatttcttcctccaacctatccaacaaccgcaccaattcaaccgaaaacaccacgccgtaaccgttctcactcccttcctactaaaacgtctctaccaaactacgccgctacgctttttcccgctcgccgttctctatctcgacccgaataaacgacgtaaaacttcccgactcgtataccgtctaaatacgtataatatcaatctacaccgtcgtcaacctatctccgtcccaaccataccacgtcacctccgatttacgcgacaacgacatccaccccgtcaaatcacgctcccgccgccaaacccgttttaccattcgccgtcccaaccgatcgtaaaaataacgactctcgaccaataactcgccatactatattcgcgtataaaacaccaaacgatactaactatcgtaataataataataaatcccctcgtcgtcccgtcctttcacaccccgccgaaataccgatccgtttcttcgttaacctaacgtattcattcgaaacgataaacataataaaccttcctccccgataccgatatttcgccccactttaaataatataatccgaaaacaaattccgaattccgaaaaccgattaccccgccgaattcccgaaattaccgaaatatcgaaaaatcccaatttaattccaaaaaaacccctaatttccacaccctaactat

SEQ ID NO: 4633 - DNA, 1015 bp, Artificial Sequence
  chemically treated genomic DNA (Homo sapiens) CpG-island No: 4633
ttcgtttggtaggtcgtttattagatttaagataatattaatagggaagagagacgaaatttcgattattatcgaagagaaacgtacgaatgcgcggtttcgaggaggggagggacgaaaaataagtgagatttaacgttaagagttcgtcgatttgaataattttgacgatagatagtacgggaggcgacgcgataggggtattcgtttttcggcggtgtggttgatgtacgattcggtatattcggagagtttgttcgttgcgttattggtgcggtatacgtatacggaagtcggtgaattgttggcggtatatgatcgtagtaatacgtaggtgcgcgtttttacgtatgacgcgtagtattcgggtcggatggtggcgtatcgttacgcgggaaggtcggagatgcgttatcgttacgacgatacggggcgggtggtggagtaattgaattcggtagggttaagttatcgttatttttatgagtaggatcgtattatcgttatcgatagtttgaatcggcgtgaggtgttgtatatagaaagcggggtcgggttgaaacgggtggtgaaaaaagaattggcggacggtagcgttacgcgtagcgggtatgacgcggtaagaaggtttacggcgtaaattgacgcggcgggacggaggatagagtacggtttgaatgtggtgttcggcgatattacggatattattatatcggacgggcgggagacgaaattttattataacgacgggaattaattgacggcgggggtgtttttcgacgggttggagagttttcgggaatatgaagaatcgggtaggttggtatcggagatatcgcgtatcggggagaaaggacgttatcgttattatgacgcgtatagtgaattatcggcgacgataacggatgcgacgggtaggatttcggtaaatgattggaatttttttcggtagttttttggttttatcgaatggttgggtttataaaatcggtttgaatataatcgttttggtaaa

SEQ ID NO: 4634 - DNA, 1015 bp, Artificial Sequence
  chemically treated genomic DNA (Homo sapiens) CpG-island No: 4634
tttaccaaaacgattatattcaaaccgattttataaacccaaccattcgataaaaccaaaaaactaccgaaaaaaattccaatcatttaccgaaatcctacccgtcgcatccgttatcgtcgccgataattcactatacgcgtcataataacgataacgtcctttctccccgatacgcgatatctccgataccaacctacccgattcttcatattcccgaaaactctccaacccgtcgaaaaacacccccgccgtcaattaattcccgtcgttataataaaatttcgtctcccgcccgtccgatataataatatccgtaatatcgccgaacaccacattcaaaccgtactctatcctccgtcccgccgcgtcaatttacgccgtaaaccttcttaccgcgtcatacccgctacgcgtaacgctaccgtccgccaattcttttttcaccacccgtttcaacccgaccccgctttctatatacaacacctcacgccgattcaaactatcgataacgataatacgatcctactcataaaaataacgataacttaaccctaccgaattcaattactccaccacccgccccgtatcgtcgtaacgataacgcatctccgaccttcccgcgtaacgatacgccaccatccgacccgaatactacgcgtcatacgtaaaaacgcgcacctacgtattactacgatcatataccgccaacaattcaccgacttccgtatacgtataccgcaccaataacgcaacgaacaaactctccgaatataccgaatcgtacatcaaccacaccgccgaaaaacgaatacccctatcgcgtcgcctcccgtactatctatcgtcaaaattattcaaatcgacgaactcttaacgttaaatctcacttatttttcgtccctcccctcctcgaaaccgcgcattcgtacgtttctcttcgataataatcgaaatttcgtctctcttccctattaatattatcttaaatctaataaacgacctaccaaacgaa

SEQ ID NO: 4635 - DNA, 1015 bp, Artificial Sequence
  chemically treated genomic DNA (Homo sapiens) CpG-island No: 4635
tttgttaaagcggttgtatttaaatcggttttgtaagtttaattattcggtaaagttaagaaattgtcggaaggggttttagttatttgtcggggttttgttcgtcgtattcgttgtcgtcgtcggtaatttattgtgcgcgttatggtagcggtagcgtttttttttttcggtgcgcgatgttttcgatattagtttgttcggttttttatattttcgggggttttttagttcgtcgggggatattttcgtcgttagttggttttcgtcgttatagtaaaatttcgtttttcgttcgttcggtgtggtaatgttcgtgatatcgtcggatattatatttagatcgtattttgtttttcgtttcgtcgcgttagtttgcgtcgtgagtttttttgtcgcgttatattcgttgcgcgtgacgttgtcgttcgttagttttttttttattattcgttttagttcggtttcgttttttgtatgtagtattttacgtcggtttaggttgtcggtgacggtgatgcggttttgtttataaagatagcggtagtttaattttgtcgggtttagttgttttattattcgtttcgtatcgtcgtagcggtagcgtattttcggttttttcgcgtaacggtgcgttattattcggttcgggtgttgcgcgttatacgtgaaagcgcgtatttgcgtattgttgcggttatatatcgttagtagtttatcggttttcgtatacgtgtatcgtattagtggcgtagcgggtaggtttttcgggtatgtcgggtcgtgtattagttatatcgtcgaaaggcggatatttttgtcgcgtcgtttttcgtgttgtttgtcgttagagttgtttaggtcgacgagtttttagcgttgggttttatttatttttcgtttttttttttttcgagatcgcgtattcgtacgttttttttcggtggtggtcgaagtttcgttttttttttttattggtgttgttttgggtttgatgagcgatttattaggcggg

SEQ ID NO: 4636 - DNA, 1015 bp, Artificial Sequence
  chemically treated genomic DNA (Homo sapiens) CpG-island No: 4636
cccgcctaataaatcgctcatcaaacccaaaacaacaccaataaaaaaaaaaaacgaaacttcgaccaccaccgaaaaaaaacgtacgaatacgcgatctcgaaaaaaaaaaaaacgaaaaataaataaaacccaacgctaaaaactcgtcgacctaaacaactctaacgacaaacaacacgaaaaacgacgcgacaaaaatatccgcctttcgacgatataactaatacacgacccgacatacccgaaaaacctacccgctacgccactaatacgatacacgtatacgaaaaccgataaactactaacgatatataaccgcaacaatacgcaaatacgcgctttcacgtataacgcgcaacacccgaaccgaataataacgcaccgttacgcgaaaaaaccgaaaatacgctaccgctacgacgatacgaaacgaataataaaacaactaaacccgacaaaattaaactaccgctatctttataaacaaaaccgcatcaccgtcaccgacaacctaaaccgacgtaaaatactacatacaaaaaacgaaaccgaactaaaacgaataataaaaaaaaaactaacgaacgacaacgtcacgcgcaacgaatataacgcgacaaaaaaactcacgacgcaaactaacgcgacgaaacgaaaaacaaaatacgatctaaatataatatccgacgatatcacgaacattaccacaccgaacgaacgaaaaacgaaattttactataacgacgaaaaccaactaacgacgaaaatatcccccgacgaactaaaaaacccccgaaaatataaaaaaccgaacaaactaatatcgaaaacatcgcgcaccgaaaaaaaaaaacgctaccgctaccataacgcgcacaataaattaccgacgacgacaacgaatacgacgaacaaaaccccgacaaataactaaaaccccttccgacaatttcttaactttaccgaataattaaacttacaaaaccgatttaaatacaaccgctttaacaaa

SEQ ID NO: 4637 - DNA, 587 bp, Artificial Sequence
  chemically treated genomic DNA (Homo sapiens) CpG-island No: 4637
tcggcgcgtttcggagttaggagaacggagcgggtgtacggcgcggcgttgggggttattaatttttcggatcgataagttgttatttggagaggggagggttacgttttttcggagacgagttatttagggtaattttttacggaaaaattcgttgttcgtcgagaatagcgtcggggtcggtcgggtcgcggcgttcgttttacgtagggtgttcgcgtttcgtcgttttttagtttgtcggttagtcgggttcggtttcgtttagttttgttcgcggtttcgcggggttttgttcgttaatttcgtgttgggttgattgtcgaggtagatgttattacgtatttttcgcggttggggagcgcgagttggaggatgcgtagcgttttgaggtaggggggttaggcgcgcgcgttttaggtagttttagaggtagagtcgggtgacgggttaaacgcgacgtttagttggatattttgatagcggtagcgggcgagcgaggttttttagaggggcggaggttaggatcgagacgttttttaattagatttaagttttgagggtcgtttttttttaggttagcgtta

SEQ ID NO: 4638 - DNA, 587 bp, Artificial Sequence
  chemically treated genomic DNA (Homo sapiens) CpG-island No: 4638
taacgctaacctaaaaaaaaacgaccctcaaaacttaaatctaattaaaaaacgtctcgatcctaacctccgcccctctaaaaaacctcgctcgcccgctaccgctatcaaaatatccaactaaacgtcgcgtttaacccgtcacccgactctacctctaaaactacctaaaacgcgcgcgcctaacccccctacctcaaaacgctacgcatcctccaactcgcgctccccaaccgcgaaaaatacgtaataacatctacctcgacaatcaacccaacacgaaattaacgaacaaaaccccgcgaaaccgcgaacaaaactaaacgaaaccgaacccgactaaccgacaaactaaaaaacgacgaaacgcgaacaccctacgtaaaacgaacgccgcgacccgaccgaccccgacgctattctcgacgaacaacgaatttttccgtaaaaaattaccctaaataactcgtctccgaaaaaacgtaaccctcccctctccaaataacaacttatcgatccgaaaaattaataacccccaacgccgcgccgtacacccgctccgttctcctaactccgaaacgcgccga

SEQ ID NO: 4639 - DNA, 587 bp, Artificial Sequence
  chemically treated genomic DNA (Homo sapiens) CpG-island No: 4639
tagcgttaatttggggaggggcggtttttaaggtttaggtttagttaggggacgtttcggttttggttttcgtttttttggggagtttcgttcgttcgttgtcgttgttagggtgtttagttaggcgtcgcgtttagttcgttattcgattttatttttgagattgtttagggcgcgcgcgtttggtttttttgttttaagacgttgcgtattttttagttcgcgttttttaatcgcggggggtgcgtggtggtatttatttcggtaattagtttagtacggggttggcgagtagggtttcgcgggatcgcggatagagttgagcggggtcgggttcggttggtcggtaggttggggagcggcggggcgcgggtattttgcgtggggcgggcgtcgcggttcggtcggtttcggcgttgttttcggcgggtagcgggttttttcgtgaaaggttgttttgggtaattcgttttcgaggggacgtagtttttttttttttaagtggtaatttatcgattcgagagattgataatttttagcgtcgcgtcgtgtattcgtttcgtttttttggtttcggggcgcgtcgg

SEQ ID NO: 4640 - DNA, 587 bp, Artificial Sequence
  chemically treated genomic DNA (Homo sapiens) CpG-island No: 4640
ccgacgcgccccgaaaccaaaaaaacgaaacgaatacacgacgcgacgctaaaaattatcaatctctcgaatcgataaattaccacttaaaaaaaaaaaaactacgtcccctcgaaaacgaattacccaaaacaacctttcacgaaaaaacccgctacccgccgaaaacaacgccgaaaccgaccgaaccgcgacgcccgccccacgcaaaatacccgcgccccgccgctccccaacctaccgaccaaccgaacccgaccccgctcaactctatccgcgatcccgcgaaaccctactcgccaaccccgtactaaactaattaccgaaataaataccaccacgcaccccccgcgattaaaaaacgcgaactaaaaaatacgcaacgtcttaaaacaaaaaaaccaaacgcgcgcgccctaaacaatctcaaaaataaaatcgaataacgaactaaacgcgacgcctaactaaacaccctaacaacgacaacgaacgaacgaaactccccaaaaaaacgaaaaccaaaaccgaaacgtcccctaactaaacctaaaccttaaaaaccgcccctccccaaattaacgcta

SEQ ID NO: 4641 - DNA, 699 bp, Artificial Sequence
  chemically treated genomic DNA (Homo sapiens) CpG-island No: 4641
aaaatacgtttgcggttcgtttttttttttaaagtacgattatttcgttcgggtttttcgaggatttatttaagtttacgacgggttcgttttttcggtggtttgattatcggttggtggagtgggttttggggtcgttaggcgattaaggcgtatgcgggggcggatagtttattgtgaagggcgtcggggtatagtgcggggttcgttttatttttaggtgtttttttttcgttttcgtttcgtaggtatcgtatcgggttcgggaatcggttcggatttggcggtgggcgttgggaagaggatttatttttacgtggttcgtttcgtttcgggggcgtagttagttttcggcgtttattgttttttttttttcggttttcgtttttttttgcgtaggcgtcgtttcgtttcggttttaggggtgttttcgtggtcggcggttgttgggtttcgcgtcggggttcgagttttacgaagtttcggttcgagtcgtcggatgttcgcgcgtagcggggtttaggtgagcgagcgtatcgttcgtttcgcggaatagacgcgtttatttttaggcgtagtagcgagcgcggtcgcgggagcgggagcggggggtgtagtttcgcgtacggaaagttatcggtatatagtttagtattagtgtttcgtgtttttaagaaatttataatatcgattgtgtaa

SEQ ID NO: 4642 - DNA, 699 bp, Artificial Sequence
  chemically treated genomic DNA (Homo sapiens) CpG-island No: 4642
ttacacaatcgatattataaatttcttaaaaacacgaaacactaatactaaactatataccgataactttccgtacgcgaaactacaccccccgctcccgctcccgcgaccgcgctcgctactacgcctaaaaataaacgcgtctattccgcgaaacgaacgatacgctcgctcacctaaaccccgctacgcgcgaacatccgacgactcgaaccgaaacttcgtaaaactcgaaccccgacgcgaaacccaacaaccgccgaccacgaaaacacccctaaaaccgaaacgaaacgacgcctacgcaaaaaaaaacgaaaaccgaaaaaaaaaaaacaataaacgccgaaaactaactacgcccccgaaacgaaacgaaccacgtaaaaataaatcctcttcccaacgcccaccgccaaatccgaaccgattcccgaacccgatacgatacctacgaaacgaaaacgaaaaaaaaacacctaaaaataaaacgaaccccgcactataccccgacgcccttcacaataaactatccgcccccgcatacgccttaatcgcctaacgaccccaaaacccactccaccaaccgataatcaaaccaccgaaaaaacgaacccgtcgtaaacttaaataaatcctcgaaaaacccgaacgaaataatcgtactttaaaaaaaaaaacgaaccgcaaacgtatttt

SEQ ID NO: 4643 - DNA, 699 bp, Artificial Sequence
  chemically treated genomic DNA (Homo sapiens) CpG-island No: 4643
ttgtatagtcgatattataggttttttaaaagtacggaatattggtgttaaattatatgtcggtgatttttcgtgcgcgggattatatttttcgttttcgttttcgcggtcgcgttcgttgttgcgtttgggggtgggcgcgtttgtttcgcggggcgggcgatgcgttcgtttatttgggtttcgttgcgcgcgggtattcggcggttcgggtcggggtttcgtgggattcggatttcggcgcggagtttagtagtcgtcgattacggaagtatttttaggatcggggcggagcggcgtttgcgtagaaggggacggaagtcgggagagggggggtagtgagcgtcgggaattggttgcgttttcggggcggggcgggttacgtggaggtggattttttttttagcgtttatcgttaggttcggatcgattttcgggttcgatgcggtgtttgcgaggcgagagcggggaaggggtatttgggggtggggcgagtttcgtattgtgtttcggcgttttttataatgagttgttcgttttcgtatgcgttttggtcgtttggcggttttagagtttattttattagtcggtggttagattatcgagaggacgggttcgtcgtgaatttgagtggattttcgaggggttcgggcggagtggtcgtgttttgggggagggggcgggtcgtagacgtgtttt

SEQ ID NO: 4644 - DNA, 699 bp, Artificial Sequence
  chemically treated genomic DNA (Homo sapiens) CpG-island No: 4644
aaaacacgtctacgacccgccccctcccccaaaacacgaccactccgcccgaacccctcgaaaatccactcaaattcacgacgaacccgtcctctcgataatctaaccaccgactaataaaataaactctaaaaccgccaaacgaccaaaacgcatacgaaaacgaacaactcattataaaaaacgccgaaacacaatacgaaactcgccccacccccaaataccccttccccgctctcgcctcgcaaacaccgcatcgaacccgaaaatcgatccgaacctaacgataaacgctaaaaaaaaaatccacctccacgtaacccgccccgccccgaaaacgcaaccaattcccgacgctcactaccccccctctcccgacttccgtccccttctacgcaaacgccgctccgccccgatcctaaaaatacttccgtaatcgacgactactaaactccgcgccgaaatccgaatcccacgaaaccccgacccgaaccgccgaatacccgcgcgcaacgaaacccaaataaacgaacgcatcgcccgccccgcgaaacaaacgcgcccacccccaaacgcaacaacgaacgcgaccgcgaaaacgaaaacgaaaaatataatcccgcgcacgaaaaatcaccgacatataatttaacaccaatattccgtacttttaaaaaacctataatatcgactatacaa

SEQ ID NO: 4645 - DNA, 549 bp, Artificial Sequence
  chemically treated genomic DNA (Homo sapiens) CpG-island No: 4645
tatgtgtcgaagggggcggttgggttcggagcggtaagacgtttgtttcgagatatcggggtttcgcgatttatttcgtgttttttgggttcgatttttttttttttttcgtttttttcggttttagttattcgtttttcggttcgggttttatcggttggagtgattttttcgtcgcggtttgggcgggataagttttaggagttcgggatttcgattttgcggtcgagtttattgtagaggcggggatggagttgcgcgttaggcgttaatttttttttcgtagtttcggttttatttggtagagcgtcgtttacggaagtttagcgtcggaggatttttggttgtagtcgttaatttcgacgtgtcggtcgaaatttttttttcggcgtagttggttttttttggatttcgcgggattcggcgtcgttttcgggtttgttcgttttaggtacgtgtatagtgagtttgtgtaaatttagttagattaaaatgagcgaggtggagagttttttaatcggatgttacgggtgatgattgggaggagga

SEQ ID NO: 4646 - DNA, 549 bp, Artificial Sequence
  chemically treated genomic DNA (Homo sapiens) CpG-island No: 4646
tcctcctcccaatcatcacccgtaacatccgattaaaaaactctccacctcgctcattttaatctaactaaatttacacaaactcactatacacgtacctaaaacgaacaaacccgaaaacgacgccgaatcccgcgaaatccaaaaaaaaccaactacgccgaaaaaaaaatttcgaccgacacgtcgaaattaacgactacaaccaaaaatcctccgacgctaaacttccgtaaacgacgctctaccaaataaaaccgaaactacgaaaaaaaaattaacgcctaacgcgcaactccatccccgcctctacaataaactcgaccgcaaaatcgaaatcccgaactcctaaaacttatcccgcccaaaccgcgacgaaaaaatcactccaaccgataaaacccgaaccgaaaaacgaataactaaaaccgaaaaaaacgaaaaaaaaaaaaaaatcgaacccaaaaaacacgaaataaatcgcgaaaccccgatatctcgaaacaaacgtcttaccgctccgaacccaaccgcccccttcgacacata

SEQ ID NO: 4647 - DNA, 549 bp, Artificial Sequence
  chemically treated genomic DNA (Homo sapiens) CpG-island No: 4647
ttttttttttagttattattcgtagtattcggttaagaggttttttatttcgtttattttggtttaattggatttatataaatttattgtgtacgtgtttggggcgggtaaattcggaaacgacgtcgagtttcgcgggatttaggaggagttaattgcgtcggaggaggggtttcggtcgatacgtcgggattggcggttgtagttaggggtttttcgacgttgggttttcgtgagcggcgttttgttaggtggggtcggagttgcggggagggagttggcgtttagcgcgtagttttattttcgtttttgtagtggattcggtcgtagaatcggggtttcgggtttttggaatttgtttcgtttaggtcgcggcgaggaggttattttagtcggtgggattcgggtcggggggcgggtgattggaatcgggggaggcgggaaggaggaggggatcgggtttaagggatacgaggtgggtcgcgggatttcgatatttcgggataggcgttttgtcgtttcgggtttagtcgtttttttcgatatata

SEQ ID NO: 4648 - DNA, 549 bp, Artificial Sequence
  chemically treated genomic DNA (Homo sapiens) CpG-island No: 4648
tatatatcgaaaaaaacgactaaacccgaaacgacaaaacgcctatcccgaaatatcgaaatcccgcgacccacctcgtatcccttaaacccgatcccctcctccttcccgcctcccccgattccaatcacccgccccccgacccgaatcccaccgactaaaataacctcctcgccgcgacctaaacgaaacaaattccaaaaacccgaaaccccgattctacgaccgaatccactacaaaaacgaaaataaaactacgcgctaaacgccaactccctccccgcaactccgaccccacctaacaaaacgccgctcacgaaaacccaacgtcgaaaaacccctaactacaaccgccaatcccgacgtatcgaccgaaacccctcctccgacgcaattaactcctcctaaatcccgcgaaactcgacgtcgtttccgaatttacccgccccaaacacgtacacaataaatttatataaatccaattaaaccaaaataaacgaaataaaaaacctcttaaccgaatactacgaataataactaaaaaaaaaa

SEQ ID NO: 4649 - DNA, 570 bp, Artificial Sequence
  chemically treated genomic DNA (Homo sapiens) CpG-island No: 4649
cggcgttatttcgatttcgcgaagttttagaaagcgttgttgaagacgtttagggaggagatcgaagacgtggagttttttaggaagtatttgattgggaatttcgttgaggagatgatttgtgagcgtcggcgcgttttgtaggagtatttgggtttgttttacgttattcgttgcgtgcgtcgttttcgggagtttttggatttttttacgcggtcggagttgcgcgaggttttcggttgtttgcgggtcggttagtattcgcgcgttttggagttgttgttgcgcgtgttgtcgttgtaggagaagtttatcgtttattgttttgcggtcgtcgtttcggttttgtgcgtcgtgttgttgtgttatcgcgatttcgatcgtttcgtcgaggttttcgcggtcggagagagggttttgtagcgtttgtaggttcgggagggttatcgttattatgcgtttttgttggacgttatggttcgtttggtttacgcgttgggtaaggatttcgtgattttgtaggagaggttggaggagagttagtttcggaggtttacgtttcgaggtatt

SEQ ID NO: 4650 - DNA, 570 bp, Artificial Sequence
  chemically treated genomic DNA (Homo sapiens) CpG-island No: 4650
aatacctcgaaacgtaaacctccgaaactaactctcctccaacctctcctacaaaatcacgaaatccttacccaacgcgtaaaccaaacgaaccataacgtccaacaaaaacgcataataacgataaccctcccgaacctacaaacgctacaaaaccctctctccgaccgcgaaaacctcgacgaaacgatcgaaatcgcgataacacaacaacacgacgcacaaaaccgaaacgacgaccgcaaaacaataaacgataaacttctcctacaacgacaacacgcgcaacaacaactccaaaacgcgcgaatactaaccgacccgcaaacaaccgaaaacctcgcgcaactccgaccgcgtaaaaaaatccaaaaactcccgaaaacgacgcacgcaacgaataacgtaaaacaaacccaaatactcctacaaaacgcgccgacgctcacaaatcatctcctcaacgaaattcccaatcaaatacttcctaaaaaactccacgtcttcgatctcctccctaaacgtcttcaacaacgctttctaaaacttcgcgaaatcgaaataacgccg

SEQ ID NO: 4651 - DNA, 570 bp, Artificial Sequence
  chemically treated genomic DNA (Homo sapiens) CpG-island No: 4651
gatgtttcggggcgtgggttttcggagttggtttttttttagttttttttgtagagttacgaagtttttgtttagcgcgtaggttaggcggattatggcgtttagtagaggcgtatagtagcgatggttttttcgggtttgtaggcgttgtagggtttttttttcggtcgcgaaggtttcggcggggcggtcgaggtcgcggtggtatagtagtacggcgtatagggtcgggacggcggtcgtagggtagtgggcggtgagttttttttgtagcggtagtacgcgtagtagtagttttagggcgcgcgggtattggtcggttcgtaggtagtcgaaagtttcgcgtagtttcggtcgcgtgaggaagtttaggaattttcgggagcggcgtacgtagcggatggcgtagagtaggtttaggtatttttgtagggcgcgtcgacgtttatagattatttttttagcgaagtttttagttaggtgttttttgggaaattttacgttttcgattttttttttgaacgtttttagtagcgttttttggagtttcgcgaagtcggaatagcgtcg

SEQ ID NO: 4652 - DNA, 570 bp, Artificial Sequence
  chemically treated genomic DNA (Homo sapiens) CpG-island No: 4652
cgacgctattccgacttcgcgaaactccaaaaaacgctactaaaaacgttcaaaaaaaaaatcgaaaacgtaaaatttcccaaaaaacacctaactaaaaacttcgctaaaaaaataatctataaacgtcgacgcgccctacaaaaatacctaaacctactctacgccatccgctacgtacgccgctcccgaaaattcctaaacttcctcacgcgaccgaaactacgcgaaactttcgactacctacgaaccgaccaatacccgcgcgccctaaaactactactacgcgtactaccgctacaaaaaaaactcaccgcccactaccctacgaccgccgtcccgaccctatacgccgtactactataccaccgcgacctcgaccgccccgccgaaaccttcgcgaccgaaaaaaaaaccctacaacgcctacaaacccgaaaaaaccatcgctactatacgcctctactaaacgccataatccgcctaacctacgcgctaaacaaaaacttcgtaactctacaaaaaaaactaaaaaaaaaccaactccgaaaacccacgccccgaaacatc

SEQ ID NO: 4653 - DNA, 736 bp, Artificial Sequence
  chemically treated genomic DNA (Homo sapiens) CpG-island No: 4653
tgtatgcgtggcgggttagagtgcgtgtgtagcgggtagttcgtaggagtaagatagtgtatgcgtggcgggttagagtgcgtgtgtagcgggtatttcgtaggagtaagatagtgtatgcgtggcgggttagagtgcgtgtgtagcgggtagttcgtaggattaagatagtgtatgcgtggcgggttagagtgcgtgtgtagtgggtatttcgtaggagtaagatagtgtatgcgtggcgggttagagtgcgtgtgtagcgggtagttcgtaggattaagatagtgtatgcgtggcgggttagagtgcgtgtgtagcgggtagttcgtaggattaagatagtgtatgtgtggttggttagagtgcgtgtgtagcgggtagttcgtaggagtaagatagtgtatgcgtggtgggttagagtgcgtgtgtagcgggtagttcgtaggagtaagatagggtatgcgtggcgggttagagtgcgtgtgtagcgggtagttagtaggagtaagatagtgtatgcgtggcgggttagagtgcgtgtgtagcgggtagtttgtaggagtaagatagtgtatgtgtggttggttagagtgcgtgtgttgcgggtagttcgtaggagtaagatagtgtatgtgtggcgggttagagtggtagcgggtagttcgtgggattgagagaatgtatgtgtagtaggttagagtgcgtgtatagtgggtagtttgtgggattgagagag

SEQ ID NO: 4654 - DNA, 736 bp, Artificial Sequence
  chemically treated genomic DNA (Homo sapiens) CpG-island No: 4654
ctctctcaatcccacaaactacccactatacacgcactctaacctactacacatacattctctcaatcccacgaactacccgctaccactctaacccgccacacatacactatcttactcctacgaactacccgcaacacacgcactctaaccaaccacacatacactatcttactcctacaaactacccgctacacacgcactctaacccgccacgcatacactatcttactcctactaactacccgctacacacgcactctaacccgccacgcataccctatcttactcctacgaactacccgctacacacgcactctaacccaccacgcatacactatcttactcctacgaactacccgctacacacgcactctaaccaaccacacatacactatcttaatcctacgaactacccgctacacacgcactctaacccgccacgcatacactatcttaatcctacgaactacccgctacacacgcactctaacccgccacgcatacactatcttactcctacgaaatacccactacacacgcactctaacccgccacgcatacactatcttaatcctacgaactacccgctacacacgcactctaacccgccacgcatacactatcttactcctacgaaatacccgctacacacgcactctaacccgccacgcatacactatcttactcctacgaactacccgctacacacgcactctaacccgccacgcataca

SEQ ID NO: 4655 - DNA, 736 bp, Artificial Sequence
  chemically treated genomic DNA (Homo sapiens) CpG-island No: 4655
tttttttagttttataggttgtttattatatacgtattttaatttgttatatatgtatttttttagttttacgggttattcgttattattttaattcgttatatatgtattgttttatttttgcgggttattcgtaatatacgtattttaattagttatatatgtattgttttatttttgtaggttattcgttatatacgtattttaattcgttacgtatgtattgttttatttttgttggttattcgttatatacgtattttaattcgttacgtatgttttgttttatttttgcgggttattcgttatatacgtattttaatttattacgtatgtattgttttatttttgcgggttattcgttatatacgtattttaattagttatatatgtattgttttagttttgcgggttattcgttatatacgtattttaattcgttacgtatgtattgttttagttttgcgggttattcgttatatacgtattttaattcgttacgtatgtattgttttatttttgcggggtatttattatatacgtattttaattcgttacgtatgtattgttttagttttgcgggttattcgttatatacgtattttaattcgttacgtatgtattgttttatttttgcggggtattcgttatatacgtattttaattcgttacgtatgtattgttttatttttgcgggttattcgttatatacgtattttaattcgttacgtatgta

SEQ ID NO: 4656 - DNA, 736 bp, Artificial Sequence
  chemically treated genomic DNA (Homo sapiens) CpG-island No: 4656
tacatacgtaacgaattaaaatacgtatataacgaataacccgcaaaaataaaacaatacatacgtaacgaattaaaatacgtatataacgaataccccgcaaaaataaaacaatacatacgtaacgaattaaaatacgtatataacgaataacccgcaaaactaaaacaatacatacgtaacgaattaaaatacgtatataataaataccccgcaaaaataaaacaatacatacgtaacgaattaaaatacgtatataacgaataacccgcaaaactaaaacaatacatacgtaacgaattaaaatacgtatataacgaataacccgcaaaactaaaacaatacatatataactaattaaaatacgtatataacgaataacccgcaaaaataaaacaatacatacgtaataaattaaaatacgtatataacgaataacccgcaaaaataaaacaaaacatacgtaacgaattaaaatacgtatataacgaataaccaacaaaaataaaacaatacatacgtaacgaattaaaatacgtatataacgaataacctacaaaaataaaacaatacatatataactaattaaaatacgtatattacgaataacccgcaaaaataaaacaatacatatataacgaattaaaataataacgaataacccgtaaaactaaaaaaatacatatataacaaattaaaatacgtatataataaacaacctataaaactaaaaaaa

SEQ ID NO: 4657 - DNA, 637 bp, Artificial Sequence
  chemically treated genomic DNA (Homo sapiens) CpG-island No: 4657
gtgaaatacgtagcgtagttttcgtaattgttagtatcgtaatttagtaggttattgttaggtcgagtatcgttatcgttataattttgttttcgaatagttacggtaatagtagcgatagtattagcgtagagatgaaggcgataattaataaattgcggattttacgcgggcgatttcgtttttagcgtattagaggatcgatattaagtagtagcgtaaacggtattattagttaggtaaatatggtgttgaagaacggttcgttaatcgaaatattgtttagttttagttgtttatgtattaacggtagtagcgtttttagtaatattattagtatcgtagcgattagtaaaatattgttcgttaatagtaaagattttcgcgattatagcgtattgtttacgcgtgagcgaattttgtgtttacgcgcggtaaatagtagtagcgaattcgttaattattagtattataaaggcgaagattaatatatcgcgcgttcgattagacgtaaacgcgtgtatcgatattaatacgtcggaacgtacgaagaaaagttttaatagatataatcgagaaggtattgaatgttaatagttaatgtttacgttttgaagtttgtttcgttgtttaatga

SEQ ID NO: 4658 - DNA, 637 bp, Artificial Sequence
  chemically treated genomic DNA (Homo sapiens) CpG-island No: 4658
tcattaaacaacgaaacaaacttcaaaacgtaaacattaactattaacattcaataccttctcgattatatctattaaaacttttcttcgtacgttccgacgtattaatatcgatacacgcgtttacgtctaatcgaacgcgcgatatattaatcttcgcctttataatactaataattaacgaattcgctactactatttaccgcgcgtaaacacaaaattcgctcacgcgtaaacaatacgctataatcgcgaaaatctttactattaacgaacaatattttactaatcgctacgatactaataatattactaaaaacgctactaccgttaatacataaacaactaaaactaaacaatatttcgattaacgaaccgttcttcaacaccatatttacctaactaataataccgtttacgctactacttaatatcgatcctctaatacgctaaaaacgaaatcgcccgcgtaaaatccgcaatttattaattatcgccttcatctctacgctaatactatcgctactattaccgtaactattcgaaaacaaaattataacgataacgatactcgacctaacaataacctactaaattacgatactaacaattacgaaaactacgctacgtatttcac

SEQ ID NO: 4659 - DNA, 637 bp, Artificial Sequence
  chemically treated genomic DNA (Homo sapiens) CpG-island No: 4659
ttattgaataacggggtaagttttaaagcgtggatattaattgttggtatttagtgttttttcggttgtgtttgttgggattttttttcgtgcgtttcggcgtgttggtatcggtatacgcgtttgcgtttgatcgggcgcgcggtatgttaattttcgtttttatggtgttggtgattggcgggttcgttgttgttgtttgtcgcgcgtggatataaagttcgtttacgcgtaaataatgcgttgtggtcgcgggaatttttgttgttagcgaataatgttttgttggtcgttgcgatgttggtggtgttgttggggacgttgttgtcgttggtgtataagtaattgggattgggtagtatttcgattggcgaatcgttttttaatattatgtttatttggttgatggtgtcgtttgcgttattgtttggtgtcggttttttggtgcgttgggggcgggatcgttcgcgtaagattcgtaatttattgattatcgtttttatttttacgttggtgttgtcgttgttgttgtcgtggttgttcgaaagtaaagttgtggcgatgacggtgttcggtttggtaatggtttgttggattgcggtgttggtaattgcggaagttgcgttacgtattttat

SEQ ID NO: 4660 - DNA, 637 bp, Artificial Sequence
  chemically treated genomic DNA (Homo sapiens) CpG-island No: 4660
ataaaatacgtaacgcaacttccgcaattaccaacaccgcaatccaacaaaccattaccaaaccgaacaccgtcatcgccacaactttactttcgaacaaccacgacaacaacaacgacaacaccaacgtaaaaataaaaacgataatcaataaattacgaatcttacgcgaacgatcccgcccccaacgcaccaaaaaaccgacaccaaacaataacgcaaacgacaccatcaaccaaataaacataatattaaaaaacgattcgccaatcgaaatactacccaatcccaattacttatacaccaacgacaacaacgtccccaacaacaccaccaacatcgcaacgaccaacaaaacattattcgctaacaacaaaaattcccgcgaccacaacgcattatttacgcgtaaacgaactttatatccacgcgcgacaaacaacaacaacgaacccgccaatcaccaacaccataaaaacgaaaattaacataccgcgcgcccgatcaaacgcaaacgcgtataccgataccaacacgccgaaacgcacgaaaaaaaatcccaacaaacacaaccgaaaaaacactaaataccaacaattaatatccacgctttaaaacttaccccgttattcaataa

SEQ ID NO: 4661 - DNA, 571 bp, Artificial Sequence
  chemically treated genomic DNA (Homo sapiens) CpG-island No: 4661
gcgtttggttaggtacggtcgtttacgcgtttttaagtttcgggtttttagttttattttttgcggttttttttcggggcgggggtttttacgacgtcggttttttcggagtatcgttagttttcgaggggagacgggggacgggttcgggcggtttattttatttttcgtttgttttagcgagtttatgtcgggcggtagttcgggttatcgtcgttgttttgttcgtatcgtagttttcgcggttttcgttcggttcgtagcgttaatttttatttttaatcgtttttcgttgttttttttcgtcgtatcgttttttgtttagattcgttacgtttattggatttttttattagatttttaattaagatagttttttattggttgttttttgtatcggtttcggcgtttagcgttggacggttagtcggagggattaagaattgtcggcggttaggcgggcgtaacgttggcgtcgtttgttgtttcggggaggaattgtagtttttcggagttagttcgtttatttatttatttttcgtttttcgtttggtttttttattcgttaaat

SEQ ID NO: 4662 - DNA, 571 bp, Artificial Sequence
  chemically treated genomic DNA (Homo sapiens) CpG-island No: 4662
atttaacgaataaaaaaaccaaacgaaaaacgaaaaataaataaataaacgaactaactccgaaaaactacaattcctccccgaaacaacaaacgacgccaacgttacgcccgcctaaccgccgacaattcttaatccctccgactaaccgtccaacgctaaacgccgaaaccgatacaaaaaacaaccaataaaaaactatcttaattaaaaatctaataaaaaaatccaataaacgtaacgaatctaaacaaaaaacgatacgacgaaaaaaaacaacgaaaaacgattaaaaataaaaattaacgctacgaaccgaacgaaaaccgcgaaaactacgatacgaacaaaacaacgacgataacccgaactaccgcccgacataaactcgctaaaacaaacgaaaaataaaataaaccgcccgaacccgtcccccgtctcccctcgaaaactaacgatactccgaaaaaaccgacgtcgtaaaaacccccgccccgaaaaaaaaccgcaaaaaataaaactaaaaacccgaaacttaaaaacgcgtaaacgaccgtacctaaccaaacgc

SEQ ID NO: 4663 - DNA, 571 bp, Artificial Sequence
  chemically treated genomic DNA (Homo sapiens) CpG-island No: 4663
atttgacgaatgaaagaattaagcggggaacgggggataaatgaatgaacgaattggtttcggagggttgtagttttttttcggggtagtaggcgacgttagcgttacgttcgtttggtcgtcggtagtttttggttttttcggttgatcgtttaacgttaggcgtcgaggtcggtgtaagagatagttaatagaaagttgttttagttggaggtttagtagaggaatttaatgagcgtagcgggtttaggtaaggggcggtgcgacggggaggggtagcggggagcggttagaggtgggagttggcgttgcgggtcgggcgggggtcgcggaagttgcgatgcggatagggtagcggcggtgattcgagttgtcgttcgatatgaattcgttggagtaggcggaaggtagggtgggtcgttcgggttcgtttttcgttttttttcggaagttggcggtgtttcggaggagtcggcgtcgtgaagattttcgtttcgggaggaggtcgtagaggatggagttaggggttcggagtttgggggcgcgtaggcggtcgtatttggttagacgt

SEQ ID NO: 4664 - DNA, 571 bp, Artificial Sequence
  chemically treated genomic DNA (Homo sapiens) CpG-island No: 4664
acgtctaaccaaatacgaccgcctacgcgcccccaaactccgaacccctaactccatcctctacgacctcctcccgaaacgaaaatcttcacgacgccgactcctccgaaacaccgccaacttccgaaaaaaaacgaaaaacgaacccgaacgacccaccctaccttccgcctactccaacgaattcatatcgaacgacaactcgaatcaccgccgctaccctatccgcatcgcaacttccgcgacccccgcccgacccgcaacgccaactcccacctctaaccgctccccgctacccctccccgtcgcaccgccccttacctaaacccgctacgctcattaaattcctctactaaacctccaactaaaacaactttctattaactatctcttacaccgacctcgacgcctaacgttaaacgatcaaccgaaaaaaccaaaaactaccgacgaccaaacgaacgtaacgctaacgtcgcctactaccccgaaaaaaaactacaaccctccgaaaccaattcgttcattcatttatcccccgttccccgcttaattctttcattcgtcaaat

SEQ ID NO: 4665 - DNA, 663 bp, Artificial Sequence
  chemically treated genomic DNA (Homo sapiens) CpG-island No: 4665
attcgtatcggttaggttatcgggtcgtagagttagtatttattttacgattttttggttgtagttttttcgtttttacggggtttcgttgtatacgatttcgtcgtcgtttgttcggtcgtttttcgcggttcgtttttcgttgggttgtagtaggttgtagttgagtttatacgtgttggttttgttgtcgcgtttttttttgttgttgttgttcgaggtcgaatcggttggatcggcggcggggacggcggtcgaagggtgcggggacgaggacgtcgagggaggcgaggacgtcgaggagttcgttcggcgggtttaggtttcgggttggtggtggttgttgttgttgttggtcgtttttaggggtaggaagtttcgttgtttcgcgggtagcgcgtggttgtttagtaggcgtttttcggagcgatatatgtcggtcggggtcggggtcggggtcgaggtcgcgtcgtcggggttgtcggtgttgttgtcgttttcgtcggtggtcgtgttgttgttgttgttgttgtcgtcgtcgtcgttcgcgtcgtcgttgttgtgatagtggtggttgaagtagaggttttttagtttttgggtcgttttttagatttagtttgaaggtgtttcgcgtttttttttttatcgggttcgtggttt

SEQ ID NO: 4666 - DNA, 663 bp, Artificial Sequence
  chemically treated genomic DNA (Homo sapiens) CpG-island No: 4666
aaaccacgaacccgataaaaaaaaaaacgcgaaacaccttcaaactaaatctaaaaaacgacccaaaaactaaaaaacctctacttcaaccaccactatcacaacaacgacgacgcgaacgacgacgacgacaacaacaacaacaacaacacgaccaccgacgaaaacgacaacaacaccgacaaccccgacgacgcgacctcgaccccgaccccgaccccgaccgacatatatcgctccgaaaaacgcctactaaacaaccacgcgctacccgcgaaacaacgaaacttcctacccctaaaaacgaccaacaacaacaacaaccaccaccaacccgaaacctaaacccgccgaacgaactcctcgacgtcctcgcctccctcgacgtcctcgtccccgcacccttcgaccgccgtccccgccgccgatccaaccgattcgacctcgaacaacaacaacaaaaaaaaacgcgacaacaaaaccaacacgtataaactcaactacaacctactacaacccaacgaaaaacgaaccgcgaaaaacgaccgaacaaacgacgacgaaatcgtatacaacgaaaccccgtaaaaacgaaaaaactacaaccaaaaaatcgtaaaataaatactaactctacgacccgataacctaaccgatacgaat

SEQ ID NO: 4667 - DNA, 663 bp, Artificial Sequence
  chemically treated genomic DNA (Homo sapiens) CpG-island No: 4667
aaattacgaattcggtaaaaaaaaaaacgcggagtatttttaaattagatttgggagacgatttaggggttgaggaatttttattttaattattattgttatagtagcggcggcgcgagcggcggcggcggtagtagtagtagtagtagtacggttatcggcgggagcggtagtagtatcggtagtttcggcggcgcggtttcggtttcggtttcggtttcggtcggtatgtatcgtttcggggagcgtttgttgggtagttacgcgttgttcgcggagtagcgggattttttgtttttagagacgattaataataataataattattattagttcggggtttgggttcgtcgggcgggtttttcggcgttttcgtttttttcggcgttttcgttttcgtatttttcggtcgtcgttttcgtcgtcgatttagtcgattcggtttcgggtagtagtaataagaggaagcgcgataataaggttagtacgtatggatttaattatagtttgttgtagtttagcggagggcgggtcgcggggggcggtcgagtagacggcggcggggtcgtgtatagcgggatttcgtggaaacggaggaattataattagggagtcgtggggtgagtgttggttttgcggttcgatggtttggtcggtgcgaat

SEQ ID NO: 4668 - DNA, 663 bp, Artificial Sequence
  chemically treated genomic DNA (Homo sapiens) CpG-island No: 4668
attcgcaccgaccaaaccatcgaaccgcaaaaccaacactcaccccacgactccctaattataattcctccgtttccacgaaatcccgctatacacgaccccgccgccgtctactcgaccgccccccgcgacccgccctccgctaaactacaacaaactataattaaatccatacgtactaaccttattatcgcgcttcctcttattactactacccgaaaccgaatcgactaaatcgacgacgaaaacgacgaccgaaaaatacgaaaacgaaaacgccgaaaaaaacgaaaacgccgaaaaacccgcccgacgaacccaaaccccgaactaataataattattattattattaatcgtctctaaaaacaaaaaatcccgctactccgcgaacaacgcgtaactacccaacaaacgctccccgaaacgatacataccgaccgaaaccgaaaccgaaaccgaaaccgcgccgccgaaactaccgatactactaccgctcccgccgataaccgtactactactactactactaccgccgccgccgctcgcgccgccgctactataacaataataattaaaataaaaattcctcaacccctaaatcgtctcccaaatctaatttaaaaatactccgcgtttttttttttaccgaattcgtaattt

SEQ ID NO: 4669 - DNA, 1270 bp, Artificial Sequence
  chemically treated genomic DNA (Homo sapiens) CpG-island No: 4669
tgttcgcgggtcgggttcgttagttacgtagtttttagtagtagtagttttaggacgtttagtatcgcgtcgtcggcgtttatttcgttttttatttttagggttgttcgcgttagtcgtttttttcgttttagtttcgtttcgaagttttttttttagtttcgtgcgtagtttcgtcgtcgtcgttttggatattatatttttttttcgtatttcggggattagcgtttttttcgcgattagcgtttttttcgcgttgtgttttcggagtttttttcgggttttaggggtgtcgcggttgtttagtcgtatttggatgtatagtcgttgttgttcggtttcgttgttgtcgtcgttttttgttcgtattcgtcgttgtcgtcgtcgtcgtcgttttgaattattgatgtagtcggcgttgtagtcggagcgggcggagagcgcgcgtcgggtataaaggcgcggatttcggtttggtttcgttttcgtcgtttttcggttcgttttttttcgaggttttgttttcgtttcggtcgagattacgttttttagttaattttgacgcgtcgcgttttttatcgagttaatggcggcgttgttcgcgttcggttatttgatttcgggcgtcgttgttattaggcgcggcgaggcgggtggcgcgcggtagtagggttgggttttcgtcgtgagtcgacgaagggagcgcgggcgcgcgttcgcgttcgcgtattgagagtcgttttagtcgttcgttttttcgattttcgtttcgcgtttcgattttgtttcgtttttttcggtttttttgttcgtttttattcgtcggtttttaggtaggaggcggcgcgtttcggggtcgggagtggaatcgttggaggttgcgagtcgtttgttcgtttgtgggcgcgttcgttgggaggggagcgttttttagcgggcgcgggcgcgagggtagtcggcgcgttgggcgagtttggtttagggtttcggcggtcggggtgtagggcgcgtgcgcgcgcggcggggcggggtttgcgcggttttggcgggcgtacgtggtgttcgggagttgttgggcgggtatttatcgcggggattcggtgcggagtcggggcgtcgagtgttttcgtgtttttttgttttagtcggcggtcgcgatggtggagtttggtttttcgttttttttcgtttttttagcgattgttttgtcggtcgcggaggtcggatcgagcggttatttatttatttgttaattcgtttatttatttag

SEQ ID NO: 4670 - DNA, 1270 bp, Artificial Sequence
  chemically treated genomic DNA (Homo sapiens) CpG-island No: 4670
ctaaataaataaacgaattaacaaataaataaataaccgctcgatccgacctccgcgaccgacaaaacaatcgctaaaaaaacgaaaaaaaacgaaaaaccaaactccaccatcgcgaccgccgactaaaacaaaaaaacacgaaaacactcgacgccccgactccgcaccgaatccccgcgataaatacccgcccaacaactcccgaacaccacgtacgcccgccaaaaccgcgcaaaccccgccccgccgcgcgcgcacgcgccctacaccccgaccgccgaaaccctaaaccaaactcgcccaacgcgccgactaccctcgcgcccgcgcccgctaaaaaacgctcccctcccaacgaacgcgcccacaaacgaacaaacgactcgcaacctccaacgattccactcccgaccccgaaacgcgccgcctcctacctaaaaaccgacgaataaaaacgaacaaaaaaaccgaaaaaaacgaaacaaaatcgaaacgcgaaacgaaaatcgaaaaaacgaacgactaaaacgactctcaatacgcgaacgcgaacgcgcgcccgcgctcccttcgtcgactcacgacgaaaacccaaccctactaccgcgcgccacccgcctcgccgcgcctaataacaacgacgcccgaaatcaaataaccgaacgcgaacaacgccgccattaactcgataaaaaacgcgacgcgtcaaaattaactaaaaaacgtaatctcgaccgaaacgaaaacaaaacctcgaaaaaaaacgaaccgaaaaacgacgaaaacgaaaccaaaccgaaatccgcgcctttatacccgacgcgcgctctccgcccgctccgactacaacgccgactacatcaataattcaaaacgacgacgacgacgacaacgacgaatacgaacaaaaaacgacgacaacaacgaaaccgaacaacaacgactatacatccaaatacgactaaacaaccgcgacacccctaaaacccgaaaaaaactccgaaaacacaacgcgaaaaaaacgctaatcgcgaaaaaaacgctaatccccgaaatacgaaaaaaaaatataatatccaaaacgacgacgacgaaactacgcacgaaactaaaaaaaaaacttcgaaacgaaactaaaacgaaaaaaacgactaacgcgaacaaccctaaaaataaaaaacgaaataaacgccgacgacgcgatactaaacgtcctaaaactactactactaaaaactacgtaactaacgaacccgacccgcgaaca

SEQ ID NO: 4671 - DNA, 1270 bp, Artificial Sequence
  chemically treated genomic DNA (Homo sapiens) CpG-island No: 4671
ttgaataagtgaacgaattaataaatgaatgaatgatcgttcgattcgattttcgcggtcggtagagtagtcgttggagaggcgggagagagcgagaggttaagttttattatcgcggtcgtcggttggggtagagggatacggagatattcggcgtttcggtttcgtatcgagttttcgcggtgagtgttcgtttagtagttttcgggtattacgtgcgttcgttagagtcgcgtaggtttcgtttcgtcgcgcgcgtacgcgttttgtatttcggtcgtcgggattttgagttaggttcgtttagcgcgtcggttgttttcgcgttcgcgttcgttggggggcgttttttttttaacgggcgcgtttataggcgggtaggcgattcgtagtttttagcgattttattttcgatttcggggcgcgtcgttttttatttgagggtcgacgagtgggggcgggtaggagggtcgagggaggcggaataggatcgaggcgcgaggcgggagtcgagaaagcgagcggttgaggcgatttttagtgcgcggacgcgggcgcgcgttcgcgtttttttcgtcgatttacggcgagagtttaattttgttgtcgcgcgttattcgtttcgtcgcgtttaataataacggcgttcggggttaggtggtcgagcgcggatagcgtcgttattggttcggtggggagcgcggcgcgttaggattggttggggggcgtggtttcggtcggggcgggggtagggtttcggagggaggcgggtcgggaggcggcgggggcggggttaggtcgaggttcgcgtttttgtgttcggcgcgcgtttttcgttcgtttcggttgtagcgtcggttgtattaataatttagagcggcggcggcggcggtagcggcgggtgcgggtaggaggcggcggtagtagcgggatcgagtagtagcggttatgtatttaagtgcggttgggtagtcgcggtatttttgaggttcgggaggggtttcgggaatatagcgcggaggggacgttagtcgcggaggggacgttagttttcggagtgcgaggaaaaggtgtagtgtttagagcggcggcggcggagttgcgtacggagttgaggagggggtttcggagcgggattgggacggggggggcggttggcgcgagtagttttgggggtggggggcggggtgggcgtcggcggcgcgatgttgggcgttttggagttgttgttgttgggggttgcgtggttggcgggttcggttcgcgggta

SEQ ID NO: 4672 - DNA, 1270 bp, Artificial Sequence
  chemically treated genomic DNA (Homo sapiens) CpG-island No: 4672
tacccgcgaaccgaacccgccaaccacgcaacccccaacaacaacaactccaaaacgcccaacatcgcgccgccgacgcccaccccgccccccacccccaaaactactcgcgccaaccgccccccccgtcccaatcccgctccgaaaccccctcctcaactccgtacgcaactccgccgccgccgctctaaacactacaccttttcctcgcactccgaaaactaacgtcccctccgcgactaacgtcccctccgcgctatattcccgaaacccctcccgaacctcaaaaataccgcgactacccaaccgcacttaaatacataaccgctactactcgatcccgctactaccgccgcctcctacccgcacccgccgctaccgccgccgccgccgctctaaattattaatacaaccgacgctacaaccgaaacgaacgaaaaacgcgcgccgaacacaaaaacgcgaacctcgacctaaccccgcccccgccgcctcccgacccgcctccctccgaaaccctacccccgccccgaccgaaaccacgccccccaaccaatcctaacgcgccgcgctccccaccgaaccaataacgacgctatccgcgctcgaccacctaaccccgaacgccgttattattaaacgcgacgaaacgaataacgcgcgacaacaaaattaaactctcgccgtaaatcgacgaaaaaaacgcgaacgcgcgcccgcgtccgcgcactaaaaatcgcctcaaccgctcgctttctcgactcccgcctcgcgcctcgatcctattccgcctccctcgaccctcctacccgcccccactcgtcgaccctcaaataaaaaacgacgcgccccgaaatcgaaaataaaatcgctaaaaactacgaatcgcctacccgcctataaacgcgcccgttaaaaaaaaaacgccccccaacgaacgcgaacgcgaaaacaaccgacgcgctaaacgaacctaactcaaaatcccgacgaccgaaatacaaaacgcgtacgcgcgcgacgaaacgaaacctacgcgactctaacgaacgcacgtaatacccgaaaactactaaacgaacactcaccgcgaaaactcgatacgaaaccgaaacgccgaatatctccgtatccctctaccccaaccgacgaccgcgataataaaacttaacctctcgctctctcccgcctctccaacgactactctaccgaccgcgaaaatcgaatcgaacgatcattcattcatttattaattcgttcacttattcaa

SEQ ID NO: 4673 - DNA, 604 bp, Artificial Sequence
  chemically treated genomic DNA (Homo sapiens) CpG-island No: 4673
  unsure (537, 564, 566)
acgatcggatgatcgaagattacgtcggtgttatggttgatattattcgttaatacggcgtatacggtttggtgttgttgttaaatattcgtcgcggtaaattattggcggtaaaaattgggttatcgttttaaagcggcggtgtttaacgatgttagtatcgttagcgtataggcgggtaaagcgatagtgaaatatatggtttacggtggtttggcgattggcgaagaacgtattgttacgcggtatgcggtattgattattagtagcggtacgttcgatgcggtttagttagacgcgttacgtattggcgaaacgtatatcgtggagtggtaggtttcggttgtggcgattattcgtacggtaatttaggcgcgttagagtaatagcgtcgatttcgataaagttcgtatggtggttagcgtcggtcgcggtattggtagtaaagagaatattgcgttggtagaatagttttgtaaggcgataggtgcgtagttggtttgttatcgttcggtggcggaaatcgatatattgttntgggagttttatatcgttatttagtgntnttttatgggtttataaaggtcgttgatattcgatagta

SEQ ID NO: 4674 - DNA, 604 bp, Artificial Sequence
  chemically treated genomic DNA (Homo sapiens) CpG-island No: 4674
  unsure (39, 41, 68)
tactatcgaatatcaacgacctttataaacccataaaanancactaaataacgatataaaactcccanaacaatatatcgatttccgccaccgaacgataacaaaccaactacgcacctatcgccttacaaaactattctaccaacgcaatattctctttactaccaataccgcgaccgacgctaaccaccatacgaactttatcgaaatcgacgctattactctaacgcgcctaaattaccgtacgaataatcgccacaaccgaaacctaccactccacgatatacgtttcgccaatacgtaacgcgtctaactaaaccgcatcgaacgtaccgctactaataatcaataccgcataccgcgtaacaatacgttcttcgccaatcgccaaaccaccgtaaaccatatatttcactatcgctttacccgcctatacgctaacgatactaacatcgttaaacaccgccgctttaaaacgataacccaatttttaccgccaataatttaccgcgacgaatatttaacaacaacaccaaaccgtatacgccgtattaacgaataatatcaaccataacaccgacgtaatcttcgatcatccgatcgt

SEQ ID NO: 4675 - DNA, 604 bp, Artificial Sequence
  chemically treated genomic DNA (Homo sapiens) CpG-island No: 4675
  unsure (39, 41, 68)
tattatcgaatattagcgatttttgtaggtttatagganantattgagtggcgatgtgaagtttttanggtaatatgtcggttttcgttatcggacgataataggttaattacgtatttatcgttttgtaaagttgttttgttagcgtaatgttttttttgttgttaatatcgcgatcgacgttgattattatacgggttttgtcgagatcgacgttgttgttttggcgcgtttgggttgtcgtgcgggtaatcgttatagtcggagtttgttattttacggtgtgcgtttcgttagtgcgtgacgcgtttggttgagtcgtatcgaacgtgtcgttgttgatggttagtatcgtatatcgcgtggtaatgcgtttttcgttaatcgttagattatcgtaaattatgtgttttattgtcgttttattcgtttgtacgttgacggtgttggtatcgttagatatcgtcgttttaaggcgataatttagtttttgtcgttagtaatttgtcgcgacgggtgtttggtagtagtattaagtcgtatgcgtcgtgttggcgaatagtgttagttatgatatcggcgtaattttcgattattcgatcgt

SEQ ID NO: 4676 - DNA, 604 bp, Artificial Sequence
  chemically treated genomic DNA (Homo sapiens) CpG-island No: 4676
  unsure (537, 564, 566)
acgatcgaataatcgaaaattacgccgatatcataactaacactattcgccaacacgacgcatacgacttaatactactaccaaacacccgtcgcgacaaattactaacgacaaaaactaaattatcgccttaaaacgacgatatctaacgataccaacaccgtcaacgtacaaacgaataaaacgacaataaaacacataatttacgataatctaacgattaacgaaaaacgcattaccacgcgatatacgatactaaccatcaacaacgacacgttcgatacgactcaaccaaacgcgtcacgcactaacgaaacgcacaccgtaaaataacaaactccgactataacgattacccgcacgacaacccaaacgcgccaaaacaacaacgtcgatctcgacaaaacccgtataataatcaacgtcgatcgcgatattaacaacaaaaaaaacattacgctaacaaaacaactttacaaaacgataaatacgtaattaacctattatcgtccgataacgaaaaccgacatattaccntaaaaacttcacatcgccactcaatantntcctataaacctacaaaaatcgctaatattcgataata

SEQ ID NO: 4677 - DNA, 535 bp, Artificial Sequence
  chemically treated genomic DNA (Homo sapiens) CpG-island No: 4677
acgggttagtagggtgttaatttcgtcgtagcgatgttggttttgtattagttacgtttgtaataatattaattgcggattttttagtaagttgttttacggtagggttttaagcgatttttttagtagcgatagttcgttatggttgaatagattttaggcgtgattaagtagaatatcgcgtagtattagcgtatcgtttgtcgttagcgtatgatgaattgtttcgttgggaaatttttgggttatttagttttttgcggcggtacggtggattttcggtagtttcgtcgttagtttttattggtagcgttggcgtaggaagttattaaatagcgggtgatagtagaattattcgtcggtattatttattcgttgtaaaaatagtttttgacgtttaattttttcgaggcgtatttgttcgtttttttcgtcggttatacgggtgatgagggtatcgtttattgagcgtaaaatggcgttttttaatagaaaatggcgcgttgcgagatcgacgttatttaaaattttatcg

SEQ ID NO: 4678 - DNA, 535 bp, Artificial Sequence
  chemically treated genomic DNA (Homo sapiens) CpG-island No: 4678
cgataaaattttaaataacgtcgatctcgcaacgcgccattttctattaaaaaacgccattttacgctcaataaacgataccctcatcacccgtataaccgacgaaaaaaacgaacaaatacgcctcgaaaaaattaaacgtcaaaaactatttttacaacgaataaataataccgacgaataattctactatcacccgctatttaataacttcctacgccaacgctaccaataaaaactaacgacgaaactaccgaaaatccaccgtaccgccgcaaaaaactaaataacccaaaaatttcccaacgaaacaattcatcatacgctaacgacaaacgatacgctaatactacgcgatattctacttaatcacgcctaaaatctattcaaccataacgaactatcgctactaaaaaaatcgcttaaaaccctaccgtaaaacaacttactaaaaaatccgcaattaatattattacaaacgtaactaatacaaaaccaacatcgctacgacgaaattaacaccctactaacccgt

SEQ ID NO: 4679 - DNA, 535 bp, Artificial Sequence
  chemically treated genomic DNA (Homo sapiens) CpG-island No: 4679
cgatgaggttttggataacgtcgatttcgtaacgcgttattttttgttgaaaagcgttattttgcgtttaatgaacgatgtttttattattcgtgtgatcggcgaagaaaacgggtaaatgcgtttcgaagagattgagcgttaggggttgtttttatagcggatggatgatatcggcgagtggttttgttattattcgttgtttggtaattttttgcgttagcgttgttagtgggaattggcggcggagttgtcggaaatttatcgtgtcgtcgtagaaagttggatggtttagggattttttagcgaagtaatttattatgcgttggcggtaggcgatgcgttgatgttgcgcgatattttgtttaattacgtttggagtttgtttaattatagcgaattgtcgttgttggaagagtcgtttaaggttttgtcgtgggatagtttgttggaaaattcgtagttggtgttattgtaggcgtggttgatgtaaagttaatatcgttacggcgaagttaatattttgttagttcgt

SEQ ID NO: 4680 - DNA, 535 bp, Artificial Sequence
  chemically treated genomic DNA (Homo sapiens) CpG-island No: 4680
acgaactaacaaaatattaacttcgccgtaacgatattaactttacatcaaccacgcctacaataacaccaactacgaattttccaacaaactatcccacgacaaaaccttaaacgactcttccaacaacgacaattcgctataattaaacaaactccaaacgtaattaaacaaaatatcgcgcaacatcaacgcatcgcctaccgccaacgcataataaattacttcgctaaaaaatccctaaaccatccaactttctacgacgacacgataaatttccgacaactccgccgccaattcccactaacaacgctaacgcaaaaaattaccaaacaacgaataataacaaaaccactcgccgatatcatccatccgctataaaaacaacccctaacgctcaatctcttcgaaacgcatttacccgttttcttcgccgatcacacgaataataaaaacatcgttcattaaacgcaaaataacgcttttcaacaaaaaataacgcgttacgaaatcgacgttatccaaaacctcatcg

SEQ ID NO: 4681 - DNA, 582 bp, Artificial Sequence
  chemically treated genomic DNA (Homo sapiens) CpG-island No: 4681
  unsure (514)
ttgttgtcgtcgtagaagacgtgtttttggcgtagggcgacgatgcgttcgtagtagcgtagggcgtaatttatttgatgtagcgtgacgattacggtgatgtcgtcgttttggttgatgtcgcgtagggtgtttattacgatgcgcgttgattttgggtttagcgaggcgatgggtttatcggttagaattattttcgtttgttgtattagcgtacgggtaatcgttatacgttgttgttggtcgtcggaaagggtggaaacgcgttgatgggtaaaatgtattatgttaacgcgggttagcgtttgtaacgcgcgttggttttgttcgtcggtgaattaattaaaataggtgcgttagaacggcgtgttgtcgagcgcgttaattagtacgttttttagtacgtttaagcggtttattaggttgaattgttggaatatgtattcggtatgggcgcggtttttgcggatatcgcgggtttaggcggttttttttttggattgtgcgggtttantagtttgatatggttatcggtaaaattttttgtcgggaaattaaatcgtttaaatgattttaaagggg

SEQ ID NO: 4682 - DNA, 582 bp, Artificial Sequence
  chemically treated genomic DNA (Homo sapiens) CpG-island No: 4682
  unsure (69)
cccctttaaaatcatttaaacgatttaatttcccgacaaaaaattttaccgataaccatatcaaactantaaacccgcacaatccaaaaaaaaaaccgcctaaacccgcgatatccgcaaaaaccgcgcccataccgaatacatattccaacaattcaacctaataaaccgcttaaacgtactaaaaaacgtactaattaacgcgctcgacaacacgccgttctaacgcacctattttaattaattcaccgacgaacaaaaccaacgcgcgttacaaacgctaacccgcgttaacataatacattttacccatcaacgcgtttccaccctttccgacgaccaacaacaacgtataacgattacccgtacgctaatacaacaaacgaaaataattctaaccgataaacccatcgcctcgctaaacccaaaatcaacgcgcatcgtaataaacaccctacgcgacatcaaccaaaacgacgacatcaccgtaatcgtcacgctacatcaaataaattacgccctacgctactacgaacgcatcgtcgccctacgccaaaaacacgtcttctacgacgacaacaa

SEQ ID NO: 4683 - DNA, 582 bp, Artificial Sequence
  chemically treated genomic DNA (Homo sapiens) CpG-island No: 4683
  unsure (69)
tttttttaaggttatttaagcggtttgatttttcggtaaaaaattttgtcggtagttatattaagttgntgggttcgtatagtttagggggaaagtcgtttgggttcgcgatattcgtaaaagtcgcgtttatatcgggtatatattttaataatttaatttggtgaatcgtttgagcgtattggagaacgtgttgattggcgcgttcggtagtacgtcgttttggcgtatttgttttagttggtttatcggcgagtagaattagcgcgcgttataggcgttgattcgcgttggtatggtgtattttgtttattagcgcgtttttatttttttcggcggttagtagtaacgtgtggcgattgttcgtgcgttgatgtagtaggcgaaagtgattttggtcgatgaatttatcgtttcgttggatttagaattagcgcgtatcgtgatggatattttgcgcgatattaattagaacgacggtattatcgtggtcgttacgttgtattaggtggattacgttttgcgttattgcgaacgtatcgtcgttttgcgttaggggtacgttttttacgacggtagtag

SEQ ID NO: 4684 - DNA, 582 bp, Artificial Sequence
  chemically treated genomic DNA (Homo sapiens) CpG-island No: 4684
  unsure (514)
ctactaccgtcgtaaaaaacgtacccctaacgcaaaacgacgatacgttcgcaataacgcaaaacgtaatccacctaatacaacgtaacgaccacgataataccgtcgttctaattaatatcgcgcaaaatatccatcacgatacgcgctaattctaaatccaacgaaacgataaattcatcgaccaaaatcactttcgcctactacatcaacgcacgaacaatcgccacacgttactactaaccgccgaaaaaaataaaaacgcgctaataaacaaaatacaccataccaacgcgaatcaacgcctataacgcgcgctaattctactcgccgataaaccaactaaaacaaatacgccaaaacgacgtactaccgaacgcgccaatcaacacgttctccaatacgctcaaacgattcaccaaattaaattattaaaatatatacccgatataaacgcgacttttacgaatatcgcgaacccaaacgactttccccctaaactatacgaacccancaacttaatataactaccgacaaaattttttaccgaaaaatcaaaccgcttaaataaccttaaaaaaa

SEQ ID NO: 4685 - DNA, 647 bp, Artificial Sequence
  chemically treated genomic DNA (Homo sapiens) CpG-island No: 4685
tttaattttcgtcgtatatttttttttttagggtattagcgggaagcgatttttcgttttttacgttattcgttgttcgtgggcggttgatgagatttttttaagtagagttgacgtttatttaacgtattatttacgttattttatacgtcgtttattttgggacggttatagtatataggtcgtgtcgtgacggtatgatcggcggcgttttatagttttattcggatacgtttacgtcggcgattttttttgttataacgattttttttttttatttgcgttcgttttttcgtattttgtttcgatgtttttttcgttaatttcgttgtagcgtatagttacggcgtttttatattaattattgttcgtcgcgatttttttttcgatagttatatttttgtatacgtcgtcgtgcgtgcgttattcgcgttatttattagatagcgtttaagtgtttgtatttaacgattacgttttgagtgtcgtagttttcggtttatattttattttcgttttttcgttcgatgtagtgacggtattatattgttgtttagattacgtgttcgtttgcgtaacggattcgatgttttttttacgacgtgagttacgcgttattttcgttcgtatttcgtattttatatata

SEQ ID NO: 4686 - DNA, 647 bp, Artificial Sequence
  chemically treated genomic DNA (Homo sapiens) CpG-island No: 4686
tatatataaaatacgaaatacgaacgaaaataacgcgtaactcacgtcgtaaaaaaaacatcgaatccgttacgcaaacgaacacgtaatctaaacaacaatataataccgtcactacatcgaacgaaaaaacgaaaataaaatataaaccgaaaactacgacactcaaaacgtaatcgttaaatacaaacacttaaacgctatctaataaataacgcgaataacgcacgcacgacgacgtatacaaaaatataactatcgaaaaaaaaatcgcgacgaacaataattaatataaaaacgccgtaactatacgctacaacgaaattaacgaaaaaaacatcgaaacaaaatacgaaaaaacgaacgcaaataaaaaaaaaaaatcgttataacaaaaaaaatcgccgacgtaaacgtatccgaataaaactataaaacgccgccgatcataccgtcacgacacgacctatatactataaccgtcccaaaataaacgacgtataaaataacgtaaataatacgttaaataaacgtcaactctacttaaaaaaatctcatcaaccgcccacgaacaacgaataacgtaaaaaacgaaaaatcgcttcccgctaataccctaaaaaaaaaaatatacgacgaaaattaaa

SEQ ID NO: 4687 - DNA, 647 bp, Artificial Sequence
  chemically treated genomic DNA (Homo sapiens) CpG-island No: 4687
tatatgtggggtgcggagtgcggacgaaagtggcgcgtaatttacgtcgtgagggagatatcgagttcgttgcgtaggcgagtacgtgatttgggtaatagtgtggtgtcgttattatatcgggcgagaggacgggagtggagtatagatcgggagttgcggtatttagagcgtagtcgttggatgtaagtatttgagcgttgtttagtgaatggcgcgagtgacgtacgtacggcggcgtgtatagagatgtggttgtcggggagagagtcgcggcgagtaatgattggtgtagggacgtcgtagttgtgcgttataacgagattagcggaggggatatcgggatagggtacgggagagcgagcgtagataggagaagaggatcgttgtgataggagaagtcgtcgacgtagacgtgttcgagtgaagttgtggagcgtcgtcgattatgtcgttacggtacggtttgtgtgttatagtcgttttaggataagcggcgtgtagggtggcgtaagtggtacgttaagtgagcgttagttttatttggagagattttattagtcgtttacgagtagcgggtgacgtagaagacgggaggtcgtttttcgttagtgttttaggaggaggggtgtacggcgaaggttggg

SEQ ID NO: 4688 - DNA, 647 bp, Artificial Sequence
  chemically treated genomic DNA (Homo sapiens) CpG-island No: 4688
cccaaccttcgccgtacacccctcctcctaaaacactaacgaaaaacgacctcccgtcttctacgtcacccgctactcgtaaacgactaataaaatctctccaaataaaactaacgctcacttaacgtaccacttacgccaccctacacgccgcttatcctaaaacgactataacacacaaaccgtaccgtaacgacataatcgacgacgctccacaacttcactcgaacacgtctacgtcgacgacttctcctatcacaacgatcctcttctcctatctacgctcgctctcccgtaccctatcccgatatcccctccgctaatctcgttataacgcacaactacgacgtccctacaccaatcattactcgccgcgactctctccccgacaaccacatctctatacacgccgccgtacgtacgtcactcgcgccattcactaaacaacgctcaaatacttacatccaacgactacgctctaaataccgcaactcccgatctatactccactcccgtcctctcgcccgatataataacgacaccacactattacccaaatcacgtactcgcctacgcaacgaactcgatatctccctcacgacgtaaattacgcgccactttcgtccgcactccgcaccccacatata

SEQ ID NO: 4689 - DNA, 558 bp, Artificial Sequence
  chemically treated genomic DNA (Homo sapiens) CpG-island No: 4689
  unsure (5, 128..129, 132, 154, 186, 438, 490)
taatnatttcgtttttaattattttttttaattttcgtttttttttttattttttatttaattttattttatttttttttttatttacgttttattttttaggcgttattttcgttaattttatcgtnngantataatttatttatattttttnttaacgcgtttttcgttttattttattttttntgtttttatttttcgttttatttttattttttgttttttatttttttttttttacgatatgattttttatttattcgtatcggttgtatattattttatttttttattatttatattttttttttatttatgttttatttatatcgattttatttttttttgtttatttacgcgtatttttcgtttttatttttatcgtatttttatattattatttttttacgttatattatatacgtagtttaatttatngttatttttattttatttatatttttatcgtagttttttttatttttatttntagtttatttcgtatttgtatattttttttattttttttattataatatttttattaattgtagttta

SEQ ID NO: 4690 - DNA, 558 bp, Artificial Sequence
  chemically treated genomic DNA (Homo sapiens) CpG-island No: 4690
  unsure (69, 121, 373, 405, 427, 430..431, 554)
taaactacaattaataaaaatattataataaaaaaaataaaaaaaatatacaaatacgaaataaactanaaataaaaataaaaaaaactacgataaaaatataaataaaataaaaataacnataaattaaactacgtatataatataacgtaaaaaaataataatataaaaatacgataaaaataaaaacgaaaaatacgcgtaaataaacaaaaaaaaataaaatcgatataaataaaacataaataaaaaaaaaatataaataataaaaaaataaaataatatacaaccgatacgaataaataaaaaatcatatcgtaaaaaaaaaaaaataaaaaacaaaaaataaaaataaaacgaaaaataaaaacanaaaaaataaaataaaacgaaaaacgcgttaanaaaaaatataaataaattatantcnnacgataaaattaacgaaaataacgcctaaaaaataaaacgtaaataaaaaaaaaaataaaataaaattaaataaaaaataaaaaaaaaaacgaaaattaaaaaaaataattaaaaacgaaatnatta

SEQ ID NO: 4691 - DNA, 558 bp, Artificial Sequence
  chemically treated genomic DNA (Homo sapiens) CpG-island No: 4691
  unsure (69, 121, 373, 405, 427, 430..431, 554)
tggattatagttggtagggatgttgtggtagaagaagtagaggaagtgtataggtacggggtgagttgngaatgggggtgggaaggattacggtgggagtataggtggagtgagggtgatngtgggttggattgcgtgtgtaatgtgacgtgagggagtagtagtgtggaggtgcggtagagatagggacggggagtacgcgtgaatgagtaaggagaagtagagtcggtgtgaatggagtatggatgagagagggatgtgagtgatgggaaggtgaggtgatgtatagtcgatgcgggtgggtgaagaattatgtcgtggggggaagggagtgaggagtagagggtaagggtgaggcgaggagtggggatanagggagtagggtgagacgagaggcgcgttggngggggatataggtagattatgnttnnacgatggagttggcgggagtggcgtttggaggatagagcgtgggtgaggggagaagtggaataggattggatggggggtgaaagagaaagcgagagttgaggggggtaattaggggcgaaatnatta

SEQ ID NO: 4692 - DNA, 558 bp, Artificial Sequence
  chemically treated genomic DNA (Homo sapiens) CpG-island No: 4692
  unsure (5, 128..129, 132, 154, 186, 438, 490)
taatnatttcgcccctaattacccccctcaactctcgctttctctttcaccccccatccaatcctattccacttctcccctcacccacgctctatcctccaaacgccactcccgccaactccatcgtnnaancataatctacctatatcccccnccaacgcgcctctcgtctcaccctactccctntatccccactcctcgcctcacccttaccctctactcctcactcccttccccccacgacataattcttcacccacccgcatcgactatacatcacctcaccttcccatcactcacatccctctctcatccatactccattcacaccgactctacttctccttactcattcacgcgtactccccgtccctatctctaccgcacctccacactactactccctcacgtcacattacacacgcaatccaacccacnatcaccctcactccacctatactcccaccgtaatccttcccacccccattcncaactcaccccgtacctatacacttcctctacttcttctaccacaacatccctaccaactataatcca

SEQ ID NO: 4693 - DNA, 773 bp, Artificial Sequence
  chemically treated genomic DNA (Homo sapiens) CpG-island No: 4693
gtagtgcgttttgattacgagtgataatggtatagcgtagggttcgtgttttgtagttgtaggttatagagtaattcggcgaggtcgtcgtttataatgatagtattaaagcgtatttttttgttttttttttagattatataatttttgataaatttacggggtaaatttcgttttcgcgtagtgtatttttttagtcgaaggggttgtacgtttttttaacggtcgttaaaggaaggggggaaagttgttcgatagattgcgcggacgtcgtgacgtttaaacgttgtagtagttcggtagcgcggtaggcgtagagttcgttttggtaggtgtttatttttatacgggtacgacggcgtaaatttagtaggttattaacgtttaaattttttatcgcgtattgtattttattcgtagttatcgtttcgtatttatatattaggttacggtgtagacggttttcgtttagttaggtaggcgtgcgatcgttatgacgataaatcgtagaatcgcgtagcggggtaggtagggagatgattttacgtaaggtaattttagcgggtttttgtgaattagaaagaagttagatcggtagtcgtataggggcgcgtgttgtttagtttgcggtatatcgcgtcggtagtttatttagttattagtcgataggttattagtttgttatcggtgatggtgataaattcgtttagattatcgcgtttagtatggtcgagtagtacgatgttacggttgacgttacgttcgttcgggtt

SEQ ID NO: 4694 - DNA, 773 bp, Artificial Sequence
  chemically treated genomic DNA (Homo sapiens) CpG-island No: 4694
aacccgaacgaacgtaacgtcaaccgtaacatcgtactactcgaccatactaaacgcgataatctaaacgaatttatcaccatcaccgataacaaactaataacctatcgactaataactaaataaactaccgacgcgatataccgcaaactaaacaacacgcgcccctatacgactaccgatctaacttctttctaattcacaaaaacccgctaaaattaccttacgtaaaatcatctccctacctaccccgctacgcgattctacgatttatcgtcataacgatcgcacgcctacctaactaaacgaaaaccgtctacaccgtaacctaatatataaatacgaaacgataactacgaataaaatacaatacgcgataaaaaatttaaacgttaataacctactaaatttacgccgtcgtacccgtataaaaataaacacctaccaaaacgaactctacgcctaccgcgctaccgaactactacaacgtttaaacgtcacgacgtccgcgcaatctatcgaacaactttccccccttcctttaacgaccgttaaaaaaacgtacaaccccttcgactaaaaaaatacactacgcgaaaacgaaatttaccccgtaaatttatcaaaaattatataatctaaaaaaaaaacaaaaaaatacgctttaatactatcattataaacgacgacctcgccgaattactctataacctacaactacaaaacacgaaccctacgctataccattatcactcgtaatcaaaacgcactac

SEQ ID NO: 4695 - DNA, 773 bp, Artificial Sequence
  chemically treated genomic DNA (Homo sapiens) CpG-island No: 4695
gattcgagcggacgtaacgttagtcgtggtatcgtgttgttcgattatgttgaacgcgatggtttggacggatttattattattatcggtggtaaattgatgatttatcggttgatggttgaatgggttatcgacgcggtatgtcgtaaattgggtaatacgcgtttttgtacgattgtcgatttggtttttttttggtttataagaattcgttgaagttattttgcgtaaagttatttttttgtttgtttcgttgcgcggttttgcggtttatcgttatggcgatcgtacgtttgtttggttgagcgaaggtcgtttgtatcgtagtttggtatgtgagtgcgaagcggtaattgcgggtgaagtgtagtacgcggtagaaaatttaaacgttaatagtttgttggatttacgtcgtcgtattcgtgtggggatgggtatttgttagggcgaattttgcgtttgtcgcgttgtcggattgttgtaacgtttaaacgttacgacgttcgcgtaatttatcgagtaatttttttttttttttttaacgatcgttggaaaggcgtgtaattttttcggttggggagatgtattgcgcgaaagcggaatttatttcgtgggtttattagggattgtgtggtttggagaaggagtagaaagatgcgttttgatattgttattatgggcggcggtttcgtcggattattttgtggtttgtaattgtaaaatacgggttttgcgttgtgttattgttattcgtggttaaagcgtattgt

SEQ ID NO: 4696 - DNA, 773 bp, Artificial Sequence
  chemically treated genomic DNA (Homo sapiens) CpG-island No: 4696
acaatacgctttaaccacgaataacaataacacaacgcaaaacccgtattttacaattacaaaccacaaaataatccgacgaaaccgccgcccataataacaatatcaaaacgcatctttctactccttctccaaaccacacaatccctaataaacccacgaaataaattccgctttcgcgcaatacatctccccaaccgaaaaaattacacgcctttccaacgatcgttaaaaaaaaaaaaaaaaattactcgataaattacgcgaacgtcgtaacgtttaaacgttacaacaatccgacaacgcgacaaacgcaaaattcgccctaacaaatacccatccccacacgaatacgacgacgtaaatccaacaaactattaacgtttaaattttctaccgcgtactacacttcacccgcaattaccgcttcgcactcacataccaaactacgatacaaacgaccttcgctcaaccaaacaaacgtacgatcgccataacgataaaccgcaaaaccgcgcaacgaaacaaacaaaaaaataactttacgcaaaataacttcaacgaattcttataaaccaaaaaaaaaccaaatcgacaatcgtacaaaaacgcgtattacccaatttacgacataccgcgtcgataacccattcaaccatcaaccgataaatcatcaatttaccaccgataataataataaatccgtccaaaccatcgcgttcaacataatcgaacaacacgataccacgactaacgttacgtccgctcgaatc

SEQ ID NO: 4697 - DNA, 695 bp, Artificial Sequence
  chemically treated genomic DNA (Homo sapiens) CpG-island No: 4697
gatagtgtgtttgtattagcgaggtcgtcgttcgcgtttgttcgaaggtttcggttattattagcgtaatggtttgatgatagtgtttaatagtggggtcgtttaatagtttggcggtgtttttgtcgtttttgtttagtgtttcggcgttattggcggtaatgatagttagtacgttcggcgttttttgcgcggcgttcgtattaagggcggtgaggcgttttttggtaatggcggaatcgacgatatagttataggcggcgttgggggtttttttatgttattcgtaggcgtagcgtgtcgtgtcggtagtttttagcggttcgtcgatgcggttatggggacgatcgataatttttagttgatcgatcgggtttttttttgcgggtttattaaattttatgtttgtgttttcgttttagttagtacggaggtaagcgttcgtttcgttaataggagtttaaaggtgtttttagcggtgggatgggcgttggcgaatagcgtgttatatacggtttgcgttttttgggatagttgagtattcgtagtttttatgcgttagggtttatgtgttatttcgtttagcgcgacgcgttcgttgtcgttaggttgaataaatcgcgcgatcgatattagggtaaaggcgtaggaggcgcgatcgcgtattttacggtagatatgtttttcgtcgagcg

SEQ ID NO: 4698 - DNA, 695 bp, Artificial Sequence
  chemically treated genomic DNA (Homo sapiens) CpG-island No: 4698
cgctcgacgaaaaacatatctaccgtaaaatacgcgatcgcgcctcctacgcctttaccctaatatcgatcgcgcgatttattcaacctaacgacaacgaacgcgtcgcgctaaacgaaataacacataaaccctaacgcataaaaactacgaatactcaactatcccaaaaaacgcaaaccgtatataacacgctattcgccaacgcccatcccaccgctaaaaacacctttaaactcctattaacgaaacgaacgcttacctccgtactaactaaaacgaaaacacaaacataaaatttaataaacccgcaaaaaaaaacccgatcgatcaactaaaaattatcgatcgtccccataaccgcatcgacgaaccgctaaaaactaccgacacgacacgctacgcctacgaataacataaaaaaacccccaacgccgcctataactatatcgtcgattccgccattaccaaaaaacgcctcaccgcccttaatacgaacgccgcgcaaaaaacgccgaacgtactaactatcattaccgccaataacgccgaaacactaaacaaaaacgacaaaaacaccgccaaactattaaacgaccccactattaaacactatcatcaaaccattacgctaataataaccgaaaccttcgaacaaacgcgaacgacgacctcgctaatacaaacacactatc

SEQ ID NO: 4699 - DNA, 695 bp, Artificial Sequence
  chemically treated genomic DNA (Homo sapiens) CpG-island No: 4699
cgttcggcggaaaatatatttatcgtaaggtgcgcgatcgcgttttttacgtttttgttttggtatcggtcgcgcgatttatttagtttgacggtagcgggcgcgtcgcgttgggcggagtagtatataagttttggcgtatggaggttgcggatgtttagttattttagggggcgtaggtcgtatatgatacgttgttcgttagcgtttattttatcgttgaaaatatttttaaatttttgttggcgaagcgaacgtttgttttcgtattggttgaagcgagggtataggtatgaaatttgataaattcgtaggggaaaattcgatcgattagttgaaggttgtcggtcgtttttatgatcgtatcgacggatcgttgaaaattatcggtacggtacgttacgtttacgaatggtatgaagaagtttttaacgtcgtttatggttatatcgtcggtttcgttattgttaaaggacgttttatcgtttttgatacggacgtcgcgtaaaaagcgtcgggcgtattggttgttattatcgttagtaacgtcggggtattagataaaggcgataaaaatatcgttaggttgttaggcggttttattattgagtattattattaggttattgcgttggtagtggtcgagattttcgaataggcgcgagcggcggtttcgttggtgtaggtatattatt

SEQ ID NO: 4700 - DNA, 695 bp, Artificial Sequence
  chemically treated genomic DNA (Homo sapiens) CpG-island No: 4700
aataatatacctacaccaacgaaaccgccgctcgcgcctattcgaaaatctcgaccactaccaacgcaataacctaataataatactcaataataaaaccgcctaacaacctaacgatatttttatcgcctttatctaataccccgacgttactaacgataataacaaccaatacgcccgacgctttttacgcgacgtccgtatcaaaaacgataaaacgtcctttaacaataacgaaaccgacgatataaccataaacgacgttaaaaacttcttcataccattcgtaaacgtaacgtaccgtaccgataattttcaacgatccgtcgatacgatcataaaaacgaccgacaaccttcaactaatcgatcgaattttcccctacgaatttatcaaatttcatacctataccctcgcttcaaccaatacgaaaacaaacgttcgcttcgccaacaaaaatttaaaaatattttcaacgataaaataaacgctaacgaacaacgtatcatatacgacctacgccccctaaaataactaaacatccgcaacctccatacgccaaaacttatatactactccgcccaacgcgacgcgcccgctaccgtcaaactaaataaatcgcgcgaccgataccaaaacaaaaacgtaaaaaacgcgatcgcgcaccttacgataaatatattttccgccgaacg

SEQ ID NO: 4701 - DNA, 730 bp, Artificial Sequence
  chemically treated genomic DNA (Homo sapiens) CpG-island No: 4701
cgcggcgttcgtttttttcgtttttcgttcgggttgcgcgcgtttcgagggtttgcgcgttttcggtacgttttcgtcgggttcgcgcgtttcgtgtttcgcgtttcgcgtttttagttacgttttcgtttcggtttcggcgcgtcgcggagttggttgttgggaggtgcgggattgggtgtggtcggcggttttggtttcggttgtgagttgcgttttttacgtcggtttcgcgttttaggggttgttgagcgtttagcggatatcggtagcgcgcggtcgacgcgggtttgagttttttttaggtaggcggcgagttcgcgagcggcggttcgtcggtgcgtttcgcgaagcgatttcgggtttttcgtagggacgtggggcgtcgcgagttatttttgcggaacggggttcgggtgacggcgcggggcggggcgggttttttcgggttcgggcggtcgacgttgttcgggagggacgaggagggcgcgtttgtgtcgcgtttagttgttacgcgggaattggttttacgatcgtcggcgtaggtatttttcgggcggtttagatcgttcgtttcggggagcgaggaacggtcggcggtttaagttttgtagatttttttggtttttcgttatttttcgaggtttttttttaggaatttagagtacgagttcgtgcgtgtttttaaaataacgggtattcgggattgtttagtagggttgttgggtgg

SEQ ID NO: 4702 - DNA, 730 bp, Artificial Sequence
  chemically treated genomic DNA (Homo sapiens) CpG-island No: 4702
ccacccaacaaccctactaaacaatcccgaatacccgttattttaaaaacacgcacgaactcgtactctaaattcctaaaaaaaaacctcgaaaaataacgaaaaaccaaaaaaatctacaaaacttaaaccgccgaccgttcctcgctccccgaaacgaacgatctaaaccgcccgaaaaatacctacgccgacgatcgtaaaaccaattcccgcgtaacaactaaacgcgacacaaacgcgccctcctcgtccctcccgaacaacgtcgaccgcccgaacccgaaaaaacccgccccgccccgcgccgtcacccgaaccccgttccgcaaaaataactcgcgacgccccacgtccctacgaaaaacccgaaatcgcttcgcgaaacgcaccgacgaaccgccgctcgcgaactcgccgcctacctaaaaaaaactcaaacccgcgtcgaccgcgcgctaccgatatccgctaaacgctcaacaacccctaaaacgcgaaaccgacgtaaaaaacgcaactcacaaccgaaaccaaaaccgccgaccacacccaatcccgcacctcccaacaaccaactccgcgacgcgccgaaaccgaaacgaaaacgtaactaaaaacgcgaaacgcgaaacacgaaacgcgcgaacccgacgaaaacgtaccgaaaacgcgcaaaccctcgaaacgcgcgcaacccgaacgaaaaacgaaaaaaacgaacgccgcg

SEQ ID NO: 4703 - DNA, 730 bp, Artificial Sequence
  chemically treated genomic DNA (Homo sapiens) CpG-island No: 4703
ttatttaatagttttgttgggtagtttcgaatattcgttattttgggggtacgtacgggttcgtgttttgagtttttggaaggaggtttcggggagtgacgagaaattaggggggtttgtaggatttggatcgtcgatcgtttttcgtttttcggggcgagcggtttggatcgttcgggaagtgtttgcgtcggcggtcgtggggttagttttcgcgtggtagttgggcgcgatataggcgcgtttttttcgtttttttcgggtagcgtcggtcgttcgagttcggggagattcgtttcgtttcgcgtcgttattcgggtttcgtttcgtaggggtggttcgcggcgttttacgtttttgcgagaagttcgggatcgtttcgcggggcgtatcgacgagtcgtcgttcgcgagttcgtcgtttatttggagggagtttaggttcgcgtcgatcgcgcgttgtcggtgttcgttgggcgtttagtagtttttggagcgcggagtcggcgtggagagcgtagtttatagtcgagattagagtcgtcggttatatttagtttcgtattttttagtagttaatttcgcggcgcgtcggagtcggggcggggacgtggttggaggcgcgaggcgcgaggtacgaggcgcgcgggttcggcggggacgtgtcggggacgcgtagattttcggagcgcgcgtagttcgggcggggggcgaagggagcgggcgtcgcg

SEQ ID NO: 4704 - DNA, 730 bp, Artificial Sequence
  chemically treated genomic DNA (Homo sapiens) CpG-island No: 4704
cgcgacgcccgctcccttcgccccccgcccgaactacgcgcgctccgaaaatctacgcgtccccgacacgtccccgccgaacccgcgcgcctcgtacctcgcgcctcgcgcctccaaccacgtccccgccccgactccgacgcgccgcgaaattaactactaaaaaatacgaaactaaatataaccgacgactctaatctcgactataaactacgctctccacgccgactccgcgctccaaaaactactaaacgcccaacgaacaccgacaacgcgcgatcgacgcgaacctaaactccctccaaataaacgacgaactcgcgaacgacgactcgtcgatacgccccgcgaaacgatcccgaacttctcgcaaaaacgtaaaacgccgcgaaccacccctacgaaacgaaacccgaataacgacgcgaaacgaaacgaatctccccgaactcgaacgaccgacgctacccgaaaaaaacgaaaaaaacgcgcctatatcgcgcccaactaccacgcgaaaactaaccccacgaccgccgacgcaaacacttcccgaacgatccaaaccgctcgccccgaaaaacgaaaaacgatcgacgatccaaatcctacaaacccccctaatttctcgtcactccccgaaacctccttccaaaaactcaaaacacgaacccgtacgtacccccaaaataacgaatattcgaaactacccaacaaaactattaaataa

SEQ ID NO: 4705 - DNA, 564 bp, Artificial Sequence
  chemically treated genomic DNA (Homo sapiens) CpG-island No: 4705
ttttaagtcgtaggagcgggttttttcgtttttttttcgggtcggggggcggggttttttaattcggaattgaaggttttgcgtagcggtatcgtttatttgcgtttcggaaggagcgagtttgcggagcgtgaattagtgagtgaaagcggcgtcgttcgtcggtcgtaggtgcggtaaagttagtgttatttgtcggtttttttagggttttcggaaagaaggagggttagtcgcgtgcgttcgcgtcgcgtttttttgcgtttttgttttttaaatagggtttttttttttttcgtcgtttaggtttttgcgtgggttggacgcgttagttttatatattagtttcgttgcggcgtttagattttgttttgttttttcgtttcggtttttggtttttgttttgtcgttcgtcgtcggagcggtgatcgttcggttcgtcgtttttttgttgttatcgttgtcggtattatgggtagtgagtagagtttcgaggtcgagagtcgatttaacgatttgaattttttaggtcggtgttttaattttttatttttttttagttcg

SEQ ID NO: 4706 - DNA, 564 bp, Artificial Sequence
  chemically treated genomic DNA (Homo sapiens) CpG-island No: 4706
cgaactaaaaaaaaataaaaaattaaaacaccgacctaaaaaattcaaatcgttaaatcgactctcgacctcgaaactctactcactacccataataccgacaacgataacaacaaaaaaacgacgaaccgaacgatcaccgctccgacgacgaacgacaaaacaaaaaccaaaaaccgaaacgaaaaaacaaaacaaaatctaaacgccgcaacgaaactaatatataaaactaacgcgtccaacccacgcaaaaacctaaacgacgaaaaaaaaaaaaaccctatttaaaaaacaaaaacgcaaaaaaacgcgacgcgaacgcacgcgactaaccctccttctttccgaaaaccctaaaaaaaccgacaaataacactaactttaccgcacctacgaccgacgaacgacgccgctttcactcactaattcacgctccgcaaactcgctccttccgaaacgcaaataaacgataccgctacgcaaaaccttcaattccgaattaaaaaaccccgccccccgacccgaaaaaaaaacgaaaaaacccgctcctacgacttaaaa

SEQ ID NO: 4707 - DNA, 564 bp, Artificial Sequence
  chemically treated genomic DNA (Homo sapiens) CpG-island No: 4707
cgggttggaggagggtgggaggttaggatatcgatttgaggagtttagatcgttgggtcggttttcggtttcggagttttgtttattgtttatggtgtcgatagcggtggtagtagaagaacggcgggtcgggcggttatcgtttcggcggcgggcgatagggtaggggttagggatcgggacggggaggtaaagtagagtttgggcgtcgtagcgaggttaatgtgtggggttgacgcgtttagtttacgtaggggtttgggcggcgggagaaggagaggttttatttggggaatagaaacgtaaggaggcgcggcgcgaacgtacgcggttagtttttttttttttcgggagttttaagagaatcggtagatgatattggttttgtcgtatttgcggtcggcgggcggcgtcgtttttatttattggtttacgtttcgtaagttcgtttttttcgggacgtagatgggcggtgtcgttacgtaagatttttagtttcggattaggaggtttcgtttttcggttcgagggaggggcggagagattcgtttttgcgatttaggg

SEQ ID NO: 4708 - DNA, 564 bp, Artificial Sequence
  chemically treated genomic DNA (Homo sapiens) CpG-island No: 4708
ccctaaatcgcaaaaacgaatctctccgcccctccctcgaaccgaaaaacgaaacctcctaatccgaaactaaaaatcttacgtaacgacaccgcccatctacgtcccgaaaaaaacgaacttacgaaacgtaaaccaataaataaaaacgacgccgcccgccgaccgcaaatacgacaaaaccaatatcatctaccgattctcttaaaactcccgaaaaaaaaaaaaactaaccgcgtacgttcgcgccgcgcctccttacgtttctattccccaaataaaacctctccttctcccgccgcccaaacccctacgtaaactaaacgcgtcaaccccacacattaacctcgctacgacgcccaaactctactttacctccccgtcccgatccctaacccctaccctatcgcccgccgccgaaacgataaccgcccgacccgccgttcttctactaccaccgctatcgacaccataaacaataaacaaaactccgaaaccgaaaaccgacccaacgatctaaactcctcaaatcgatatcctaacctcccaccctcctccaacccg

SEQ ID NO: 4709 - DNA, 660 bp, Artificial Sequence
  chemically treated genomic DNA (Homo sapiens) CpG-island No: 4709
  unsure (103)
cgttcgatttgattggatggtggcgggaagaagcggggagatttcggatgagggcgcgtaggcggtcgggggttttacggatgcgttagggggcgaagggcgngacgggtttcggagcgtcgcgcgtgcgtaattgggattagcgggttgggattgttgggagggcgggatttttcgagaacgggttgggcgtttgtacggtgggcgcgggaatgggttcgggttgtacgagcgcgcgtgcgttcggaattggagttgcgggaggtgcgggattgaggaggcggcggagggggcgggtcgcgtcgggcgttacgttcgtagttagaggttttcgtttttattatcgtcgttatagttttttagttttatattttgagaaggacgtttttggagtcgcgattgttcggggttgtgtcggtcgtagttgtcgtttaggtcgttttagtttttttttgcgacggttcgtttatttcgttcggttttagttttagcgtttggcgcgatttcggcggtgagtgagtcgggatgttagggtaggggcgtattacggttttttgtattttttcgtcgttttttgtcgtcggcgtttttgttttttattttttagtgtacggtttggttgtttagcggggttttggcgaggttttagcgggaaagggg

SEQ ID NO: 4710 - DNA, 660 bp, Artificial Sequence
  chemically treated genomic DNA (Homo sapiens) CpG-island No: 4710
  unsure (558)
cccctttcccgctaaaacctcgccaaaaccccgctaaacaaccaaaccgtacactaaaaaataaaaaacaaaaacgccgacgacaaaaaacgacgaaaaaatacaaaaaaccgtaatacgcccctaccctaacatcccgactcactcaccgccgaaatcgcgccaaacgctaaaactaaaaccgaacgaaataaacgaaccgtcgcaaaaaaaaactaaaacgacctaaacgacaactacgaccgacacaaccccgaacaatcgcgactccaaaaacgtccttctcaaaatataaaactaaaaaactataacgacgataataaaaacgaaaacctctaactacgaacgtaacgcccgacgcgacccgccccctccgccgcctcctcaatcccgcacctcccgcaactccaattccgaacgcacgcgcgctcgtacaacccgaacccattcccgcgcccaccgtacaaacgcccaacccgttctcgaaaaatcccgccctcccaacaatcccaacccgctaatcccaattacgcacgcgcgacgctccgaaacccgtcncgcccttcgccccctaacgcatccgtaaaacccccgaccgcctacgcgccctcatccgaaatctccccgcttcttcccgccaccatccaatcaaatcgaacg

SEQ ID NO: 4711 - DNA, 660 bp, Artificial Sequence
  chemically treated genomic DNA (Homo sapiens) CpG-island No: 4711
  unsure (558)
tttttttttcgttggggtttcgttaaggtttcgttgggtagttaggtcgtgtattgggaggtgaggggtaggggcgtcgacggtagagggcgacggaggagtgtaggaagtcgtgatgcgtttttgttttagtatttcgatttatttatcgtcggggtcgcgttaagcgttagggttggggtcgggcggagtgagcgggtcgtcgtagaggagagttgaggcggtttgagcggtagttgcggtcggtataatttcgggtagtcgcggttttagaggcgttttttttaggatgtggagttggaagattgtagcggcggtggtggaggcggaggtttttggttgcggacgtggcgttcgacgcgattcgtttttttcgtcgtttttttagtttcgtatttttcgtagttttagtttcgagcgtacgcgcgttcgtgtagttcgggtttattttcgcgtttatcgtgtaaacgtttaattcgttttcggagggtttcgtttttttagtagttttagttcgttggttttaattgcgtacgcgcgacgtttcgaggttcgttncgtttttcgttttttgacgtattcgtggaattttcggtcgtttgcgcgtttttattcggggttttttcgttttttttcgttattatttaattaaatcgggcg

SEQ ID NO: 4712 - DNA, 660 bp, Artificial Sequence
  chemically treated genomic DNA (Homo sapiens) CpG-island No: 4712
  unsure (103)
cgcccgatttaattaaataataacgaaaaaaaacgaaaaaaccccgaataaaaacgcgcaaacgaccgaaaattccacgaatacgtcaaaaaacgaaaaacgnaacgaacctcgaaacgtcgcgcgtacgcaattaaaaccaacgaactaaaactactaaaaaaacgaaaccctccgaaaacgaattaaacgtttacacgataaacgcgaaaataaacccgaactacacgaacgcgcgtacgctcgaaactaaaactacgaaaaatacgaaactaaaaaaacgacgaaaaaaacgaatcgcgtcgaacgccacgtccgcaaccaaaaacctccgcctccaccaccgccgctacaatcttccaactccacatcctaaaaaaaacgcctctaaaaccgcgactacccgaaattataccgaccgcaactaccgctcaaaccgcctcaactctcctctacgacgacccgctcactccgcccgaccccaaccctaacgcttaacgcgaccccgacgataaataaatcgaaatactaaaacaaaaacgcatcacgacttcctacactcctccgtcgccctctaccgtcgacgcccctacccctcacctcccaatacacgacctaactacccaacgaaaccttaacgaaaccccaacgaaaaaaaaa

SEQ ID NO: 4713 - DNA, 574 bp, Artificial Sequence
  chemically treated genomic DNA (Homo sapiens) CpG-island No: 4713
tgtggattagttcgttcgcggttcgtaggtcgggtcgtcgcgtttcgtttcgtttcggtcgggttcgcgcgtagtttatttgttagttgcgttgggggcgtacgcgtttgttttattgttttgttttttattcgggtagagttcgtttcggggttttgttcgttcgttcggtttttttatttcgggggtcgttgttttaacgtttttcgtttcgttcggtttttttcggttcgcggttttttttgggtcgtattttttgcggcgcgttttcggatttttagttatttttagcgttcgtcgtttcgtttttcgtgcgtgcgtttttttcgtcgcggttcgtaagcggcgttcgcgtatcgcgtcgttttttttttagtttaggttttttcgcgcgtgcgtacggtagaggtattggtcgcgagaggttcggtcgggagtttcgcgtttttattcggtcgggtagaatcgagcgtcgagcgatcggtttatggttgttaggcgattagggttgttgtttttgtagggattgagttttgaattttttaaatttcgtagatttaggatttcgttttta

SEQ ID NO: 4714 - DNA, 574 bp, Artificial Sequence
  chemically treated genomic DNA (Homo sapiens) CpG-island No: 4714
taaaaacgaaatcctaaatctacgaaatttaaaaaattcaaaactcaatccctacaaaaacaacaaccctaatcgcctaacaaccataaaccgatcgctcgacgctcgattctacccgaccgaataaaaacgcgaaactcccgaccgaacctctcgcgaccaatacctctaccgtacgcacgcgcgaaaaaacctaaactaaaaaaaaaacgacgcgatacgcgaacgccgcttacgaaccgcgacgaaaaaaacgcacgcacgaaaaacgaaacgacgaacgctaaaaataactaaaaatccgaaaacgcgccgcaaaaaatacgacccaaaaaaaaccgcgaaccgaaaaaaaccgaacgaaacgaaaaacgttaaaacaacgacccccgaaataaaaaaaccgaacgaacgaacaaaaccccgaaacgaactctacccgaataaaaaacaaaacaataaaacaaacgcgtacgcccccaacgcaactaacaaataaactacgcgcgaacccgaccgaaacgaaacgaaacgcgacgacccgacctacgaaccgcgaacgaactaatccaca

SEQ ID NO: 4715 - DNA, 574 bp, Artificial Sequence
  chemically treated genomic DNA (Homo sapiens) CpG-island No: 4715
tgaagacgaaattttgagtttgcgggatttaggggatttaaaatttaatttttgtaggaatagtagttttggtcgtttagtaattatgggtcgatcgttcggcgttcgattttattcggtcggatggagacgcggaattttcggtcgagtttttcgcggttagtgtttttgtcgtgcgtacgcgcggaggggtttgggttgggagaagggcgacgcggtgcgcgggcgtcgtttgcgggtcgcggcggggagggcgtacgtacgaggggcggagcggcgggcgttgagagtggttgaggattcggaaacgcgtcgtagagggtgcggtttagaggaggtcgcgggtcgggaagggtcgggcgggacgggaaacgttagggtagcggttttcggggtgagggggtcgagcggacgggtagggtttcgaggcgaattttgttcggatgaggaataaagtagtggggtaggcgcgtgcgtttttagcgtagttggtaggtgggttgcgcgcgggttcggtcggagcggggcggggcgcggcggttcggtttgcgggtcgcgggcgggttaatttata

SEQ ID NO: 4716 - DNA, 574 bp, Artificial Sequence
  chemically treated genomic DNA (Homo sapiens) CpG-island No: 4716
tataaattaacccgcccgcgacccgcaaaccgaaccgccgcgccccgccccgctccgaccgaacccgcgcgcaacccacctaccaactacgctaaaaacgcacgcgcctaccccactactttattcctcatccgaacaaaattcgcctcgaaaccctacccgtccgctcgaccccctcaccccgaaaaccgctaccctaacgtttcccgtcccgcccgacccttcccgacccgcgacctcctctaaaccgcaccctctacgacgcgtttccgaatcctcaaccactctcaacgcccgccgctccgcccctcgtacgtacgccctccccgccgcgacccgcaaacgacgcccgcgcaccgcgtcgcccttctcccaacccaaacccctccgcgcgtacgcacgacaaaaacactaaccgcgaaaaactcgaccgaaaattccgcgtctccatccgaccgaataaaatcgaacgccgaacgatcgacccataattactaaacgaccaaaactactattcctacaaaaattaaattttaaatcccctaaatcccgcaaactcaaaatttcgtcttca

SEQ ID NO: 4717 - DNA, 617 bp, Artificial Sequence
  chemically treated genomic DNA (Homo sapiens) CpG-island No: 4717
gttatattcgttgcgtatcgcgtttttgggcgtttcggggattttgttcggattttcgcggagggatttttttagggtcgttttgcgtttggacgtcgcgtgttgggagtgggcgcgtagcggttgcgtacggggatggtagtatttgttcgtgtcgttggatagcgttttcgagttcgttttttttcgtaagcgtaacgagcgcgagcggtagcgggtgcgttgcgtgaacgagggttatgcgcgttttcgagattatttgtttcgggagttggtagataagcgttttagtaaagtggagacgtttcgcgttgttatcgattatattaagtatttgtaggagttgttggagcgttaggtttgggggttcgagggcgcggtcggcgtcgttttttagcgtagggcggaatgtaatagcgacggggagtttaaggttttttcggcgttttcgtttagtagcgagttcgaggaggggggtagttagcgagcgttcgaattggttaggattttcgcgttcgtcgtatagcgcgtagtcgggcgtttaatttaaggtttttttcgaaggtggtttgtatttttaatttggtattttttttaggtttaaattttaagaaaaa

SEQ ID NO: 4718 - DNA, 617 bp, Artificial Sequence
  chemically treated genomic DNA (Homo sapiens) CpG-island No: 4718
tttttcttaaaatttaaacctaaaaaaaataccaaattaaaaatacaaaccaccttcgaaaaaaaccttaaattaaacgcccgactacgcgctatacgacgaacgcgaaaatcctaaccaattcgaacgctcgctaactacccccctcctcgaactcgctactaaacgaaaacgccgaaaaaaccttaaactccccgtcgctattacattccgccctacgctaaaaaacgacgccgaccgcgccctcgaacccccaaacctaacgctccaacaactcctacaaatacttaatataatcgataacaacgcgaaacgtctccactttactaaaacgcttatctaccaactcccgaaacaaataatctcgaaaacgcgcataaccctcgttcacgcaacgcacccgctaccgctcgcgctcgttacgcttacgaaaaaaaacgaactcgaaaacgctatccaacgacacgaacaaatactaccatccccgtacgcaaccgctacgcgcccactcccaacacgcgacgtccaaacgcaaaacgaccctaaaaaaatccctccgcgaaaatccgaacaaaatccccgaaacgcccaaaaacgcgatacgcaacgaatataac

SEQ ID NO: 4719 - DNA, 617 bp, Artificial Sequence
  chemically treated genomic DNA (Homo sapiens) CpG-island No: 4719
ttttttttaagatttaggtttggagaagatgttagattaagaatgtaaattattttcgaagaggattttaggttgagcgttcggttgcgcgttgtgcggcgggcgcgggggttttggttagttcgggcgttcgttagttgttttttttttcgggttcgttgttgggcgaaggcgtcgaagaggttttggatttttcgtcgttgttgtatttcgttttgcgttgggggacggcgtcggtcgcgttttcgagtttttaggtttggcgttttagtagtttttgtaggtgtttgatgtagtcgatggtagcgcggagcgtttttattttgttgaggcgtttgtttgttagttttcggggtaggtggtttcggaggcgcgtatagttttcgtttacgtagcgtattcgttgtcgttcgcgttcgttgcgtttgcggaggaaggcgggttcgaaggcgttgtttagcggtacgggtaagtattgttattttcgtgcgtagtcgttgcgcgtttatttttagtacgcggcgtttagacgtagggcgattttgagggggttttttcgcgggagttcgggtagggttttcggaacgtttaggggcgcggtgcgtagcgagtatggt

SEQ ID NO: 4720 - DNA, 617 bp, Artificial Sequence
  chemically treated genomic DNA (Homo sapiens) CpG-island No: 4720
accatactcgctacgcaccgcgcccctaaacgttccgaaaaccctacccgaactcccgcgaaaaaaccccctcaaaatcgccctacgtctaaacgccgcgtactaaaaataaacgcgcaacgactacgcacgaaaataacaatacttacccgtaccgctaaacaacgccttcgaacccgccttcctccgcaaacgcaacgaacgcgaacgacaacgaatacgctacgtaaacgaaaactatacgcgcctccgaaaccacctaccccgaaaactaacaaacaaacgcctcaacaaaataaaaacgctccgcgctaccatcgactacatcaaacacctacaaaaactactaaaacgccaaacctaaaaactcgaaaacgcgaccgacgccgtcccccaacgcaaaacgaaatacaacaacgacgaaaaatccaaaacctcttcgacgccttcgcccaacaacgaacccgaaaaaaaaaacaactaacgaacgcccgaactaaccaaaacccccgcgcccgccgcacaacgcgcaaccgaacgctcaacctaaaatcctcttcgaaaataatttacattcttaatctaacatcttctccaaacctaaatcttaaaaaaaa

SEQ ID NO: 4721 - DNA, 759 bp, Artificial Sequence
  chemically treated genomic DNA (Homo sapiens) CpG-island No: 4721
agcggcggcggcggcggtagcgggcgacgtaagttcggatgtagtttcgggggtttcggcgttgagaaatagtcgattttagtggcgtaggacggatacgaggacggttcgggggattgtgtatcgggtgtgcgagttcgtaagtcgtagtaggggtcgcgcgcgttgggtttttacgcgtttatggtttcgggcggcgcgcgggggttttcggggtcgtagtttcgcgtcgtttggcgcgcgtcggcgtttcgtttggttttaggttcgggtgtcgcgcgtcgcgttttataggcgtcgggttcggttgttcgtttttttcggtcggcgcgcgtagttttttcgcggagtagtcggttaggtagttttgttcgttgttcggttttggttcgattgataggcgcgagcgtcggtagtagttttcgcgtttcgtttttcgttcgtttttcgcggtttagtttaattagcggcggttgagaggcggttattagggtgacgcggtatcgcgttttgcgaggggcggagtcgggggtcgttacgcgcgtttttcgcggtaaaatttaaaggtcggtagggcggttttttaatttttttttttaagtagggacgaggcggaatttgtttcgcgaggattgtaattttcggtatgttgcgcgtcggcgtcgggtggaggggtttcgattgggggcgtagggcgtgttggtttttgtagttttattaggggtggtaaaattagtgttatttattgattatatattt

SEQ ID NO: 4722 - DNA, 759 bp, Artificial Sequence
  chemically treated genomic DNA (Homo sapiens) CpG-island No: 4722
aaatatataatcaataaataacactaattttaccacccctaataaaactacaaaaaccaacacgccctacgcccccaatcgaaacccctccacccgacgccgacgcgcaacataccgaaaattacaatcctcgcgaaacaaattccgcctcgtccctacttaaaaaaaaaaattaaaaaaccgccctaccgacctttaaattttaccgcgaaaaacgcgcgtaacgacccccgactccgcccctcgcaaaacgcgataccgcgtcaccctaataaccgcctctcaaccgccgctaattaaactaaaccgcgaaaaacgaacgaaaaacgaaacgcgaaaactactaccgacgctcgcgcctatcaatcgaaccaaaaccgaacaacgaacaaaactacctaaccgactactccgcgaaaaaactacgcgcgccgaccgaaaaaaacgaacaaccgaacccgacgcctataaaacgcgacgcgcgacacccgaacctaaaaccaaacgaaacgccgacgcgcgccaaacgacgcgaaactacgaccccgaaaacccccgcgcgccgcccgaaaccataaacgcgtaaaaacccaacgcgcgcgacccctactacgacttacgaactcgcacacccgatacacaatcccccgaaccgtcctcgtatccgtcctacgccactaaaatcgactatttctcaacgccgaaacccccgaaactacatccgaacttacgtcgcccgctaccgccgccgccgccgct

SEQ ID NO: 4723 - DNA, 759 bp, Artificial Sequence
  chemically treated genomic DNA (Homo sapiens) CpG-island No: 4723
aaatatgtgattagtaaatgatattggttttgttatttttagtgggattataaaaattagtacgttttgcgtttttagtcggggtttttttattcggcgtcggcgcgtagtatgtcgggagttgtagttttcgcgaggtaagtttcgtttcgtttttgtttgggggaggaggttggagagtcgttttgtcggtttttgaattttgtcgcgaaaagcgcgcgtggcggttttcggtttcgtttttcgtaggacgcggtgtcgcgttattttggtaatcgttttttagtcgtcgttgattgggttgggtcgcggggggcgggcgggggacgagacgcgggggttgttgtcggcgttcgcgtttgttagtcgggttagagtcgagtagcgggtaggattgtttggtcggttgtttcgcggagaggttgcgcgcgtcggtcgggggaggcggatagtcgggttcggcgtttgtggggcgcggcgcgcggtattcgggtttgagattaggcgaggcgtcggcgcgcgttagacggcgcgaggttgcggtttcgggagttttcgcgcgtcgttcggggttatgggcgcgtgagagtttagcgcgcgcggtttttgttgcggtttgcgagttcgtatattcggtgtatagtttttcgggtcgttttcgtgttcgttttgcgttattgggatcggttgttttttagcgtcgaggttttcgaggttgtattcgagtttgcgtcgttcgttgtcgtcgtcgtcgtcgtt

SEQ ID NO: 4724 - DNA, 759 bp, Artificial Sequence
  chemically treated genomic DNA (Homo sapiens) CpG-island No: 4724
aacgacgacgacgacgacaacgaacgacgcaaactcgaatacaacctcgaaaacctcgacgctaaaaaacaaccgatcccaataacgcaaaacgaacacgaaaacgacccgaaaaactatacaccgaatatacgaactcgcaaaccgcaacaaaaaccgcgcgcgctaaactctcacgcgcccataaccccgaacgacgcgcgaaaactcccgaaaccgcaacctcgcgccgtctaacgcgcgccgacgcctcgcctaatctcaaacccgaataccgcgcgccgcgccccacaaacgccgaacccgactatccgcctcccccgaccgacgcgcgcaacctctccgcgaaacaaccgaccaaacaatcctacccgctactcgactctaacccgactaacaaacgcgaacgccgacaacaacccccgcgtctcgtcccccgcccgccccccgcgacccaacccaatcaacgacgactaaaaaacgattaccaaaataacgcgacaccgcgtcctacgaaaaacgaaaccgaaaaccgccacgcgcgcttttcgcgacaaaattcaaaaaccgacaaaacgactctccaacctcctcccccaaacaaaaacgaaacgaaacttacctcgcgaaaactacaactcccgacatactacgcgccgacgccgaataaaaaaaccccgactaaaaacgcaaaacgtactaatttttataatcccactaaaaataacaaaaccaatatcatttactaatcacatattt

SEQ ID NO: 4725 - DNA, 680 bp, Artificial Sequence
  chemically treated genomic DNA (Homo sapiens) CpG-island No: 4725
tttcgtttcggtttttagtgagatcgattttttttttaatttattcgcgtcggacgtagttagtttacgtttttttttcgcgtcgattgtaacgtcgtttattttttgttagtttttattatttattttcggttttttcgtcgttttttttatttttatgttttttttcggtaggcgttgttaagtatatttcgttttttatttggtcgtatttgttggtagtcgtacgtagttttgttttatcggtgttaataaatatggtatttttattcgatcgttatcgtatatgcgtacgtattacgatattcgtttgttttttcgagcgtttgtcgattttagcggtatagtttattacgattcgttttagttacgtattcgttattcgacgcgtatatatgtattggacgtttatcgtattttgttattgtttttatcgtagttttcgtatatgtgttgttgtattttgttcgtagttagttcgatcggacgattttttatacgtattgcgtacgtttgcgtaacgttatgtacgtcgggaggtacgggagatttttgttggttattttgtttttatttgtacgttcgttttatttttatagtagtatttgtatattcgacgagtttatgcgtttttatgtttattaatttttgtagatttttatatatagtcgttttgattg

SEQ ID NO: 4726 - DNA, 680 bp, Artificial Sequence
  chemically treated genomic DNA (Homo sapiens) CpG-island No: 4726
caatcaaaacgactatatataaaaatctacaaaaattaataaacataaaaacgcataaactcgtcgaatatacaaatactactataaaaataaaacgaacgtacaaataaaaacaaaataaccaacaaaaatctcccgtacctcccgacgtacataacgttacgcaaacgtacgcaatacgtataaaaaatcgtccgatcgaactaactacgaacaaaatacaacaacacatatacgaaaactacgataaaaacaataacaaaatacgataaacgtccaatacatatatacgcgtcgaataacgaatacgtaactaaaacgaatcgtaataaactataccgctaaaatcgacaaacgctcgaaaaaacaaacgaatatcgtaatacgtacgcatatacgataacgatcgaataaaaataccatatttattaacaccgataaaacaaaactacgtacgactaccaacaaatacgaccaaataaaaaacgaaatatacttaacaacgcctaccgaaaaaaaacataaaaataaaaaaaacgacgaaaaaaccgaaaataaataataaaaactaacaaaaaataaacgacgttacaatcgacgcgaaaaaaaaacgtaaactaactacgtccgacgcgaataaattaaaaaaaaaatcgatctcactaaaaaccgaaacgaaa

SEQ ID NO: 4727 - DNA, 680 bp, Artificial Sequence
  chemically treated genomic DNA (Homo sapiens) CpG-island No: 4727
tagttaaggcgattgtatgtaggggtttgtaaaggttaatgggtataagagcgtatgagttcgtcgagtatgtaagtattgttgtggaaataaggcgggcgtataagtaggagtagagtagttagtaggaatttttcgtatttttcgacgtgtatgacgttgcgtagacgtgcgtagtacgtatgagaggtcgttcgatcggattagttacgagtagagtgtagtagtatatgtacgagagttgcgatagaggtagtgatagaatgcgatgagcgtttagtatatatatacgcgtcgagtggcgagtgcgtagttagagcgagtcgtgatagattatgtcgttagagtcgataggcgttcgagaagatagacgagtatcgtagtacgtgcgtatatgcggtagcgatcggatgaggatattatgtttgttgatatcgatggagtagagttgcgtacgattattagtagatgcgattagatagaagacgagatgtatttggtagcgtttgtcgagaggaagtatgggagtgaggggagcgacgggagagtcggggatggatagtggaaattagtaagaagtaaacggcgttgtaatcgacgcgagaaggaggcgtaagttagttacgttcgacgcggataaattggagagggagtcgattttattgagaatcgaagcggag

SEQ ID NO: 4728 - DNA, 680 bp, Artificial Sequence
  chemically treated genomic DNA (Homo sapiens) CpG-island No: 4728
ctccgcttcgattctcaataaaatcgactccctctccaatttatccgcgtcgaacgtaactaacttacgcctccttctcgcgtcgattacaacgccgtttacttcttactaatttccactatccatccccgactctcccgtcgctcccctcactcccatacttcctctcgacaaacgctaccaaatacatctcgtcttctatctaatcgcatctactaataatcgtacgcaactctactccatcgatatcaacaaacataatatcctcatccgatcgctaccgcatatacgcacgtactacgatactcgtctatcttctcgaacgcctatcgactctaacgacataatctatcacgactcgctctaactacgcactcgccactcgacgcgtatatatatactaaacgctcatcgcattctatcactacctctatcgcaactctcgtacatatactactacactctactcgtaactaatccgatcgaacgacctctcatacgtactacgcacgtctacgcaacgtcatacacgtcgaaaaatacgaaaaattcctactaactactctactcctacttatacgcccgccttatttccacaacaatacttacatactcgacgaactcatacgctcttatacccattaacctttacaaacccctacatacaatcgccttaacta

SEQ ID NO: 4729 - DNA, 590 bp, Artificial Sequence
  chemically treated genomic DNA (Homo sapiens) CpG-island No: 4729
  unsure (29, 46, 49, 107, 130, 134, 184, 194, 203, 239..240, 347, 391)
  unsure (413, 428, 434, 549, 568, 581)
gtttttataacgtcggaagatgcgttttngggcggtttaataacgnttnaggcggtttataagaatattttaggcgcgggaggggggttttttttaacgacggtaantttgttaaattacgaaataattnttangtacgatacgggtgcggcgtttaatttttatagcggggataaaaaaattngggtgttatntcgtttcgntttttttttaataacgattatcggtcgcggttagtnngttttttcgaggcgaggagaatatttattttatttaaagttggggcgacgggggggagcgggaggtgttgtttttttaatcgacgatcgttgtagtaaatagttttnatataattacgacgaattaatttcgggcggtttgtttttttttnttttaggcggatattaatattnggcggggcgtagttngcgtantatcgtttaataaattttatatattttcgcgttacgggggtacggtagcgttttttttaagcgagcggagggttgtgcgtaataatatttagttttggcggcgtgcgagaatagnagttaataatttgtttcgnggtaagaatgtantttgtttat

SEQ ID NO: 4730 - DNA, 590 bp, Artificial Sequence
  chemically treated genomic DNA (Homo sapiens) CpG-island No: 4730
  unsure (10, 23, 42, 157, 163, 178, 200, 244, 351..352, 388, 397, 407)
  unsure (457, 461, 484, 542, 545, 562)
ataaacaaantacattcttaccncgaaacaaattattaactnctattctcgcacgccgccaaaactaaatattattacgcacaaccctccgctcgcttaaaaaaaacgctaccgtacccccgtaacgcgaaaatatataaaatttattaaacgatantacgcnaactacgccccgccnaatattaatatccgcctaaaanaaaaaaaaacaaaccgcccgaaattaattcgtcgtaattatatnaaaactatttactacaacgatcgtcgattaaaaaaacaacacctcccgctcccccccgtcgccccaactttaaataaaataaatattctcctcgcctcgaaaaaacnnactaaccgcgaccgataatcgttattaaaaaaaaancgaaacganataacacccnaatttttttatccccgctataaaaattaaacgccgcacccgtatcgtacntaanaattatttcgtaatttaacaaanttaccgtcgttaaaaaaaacccccctcccgcgcctaaaatattcttataaaccgcctnaancgttattaaaccgcccnaaaacgcatcttccgacgttataaaaac

SEQ ID NO: 4731 - DNA, 590 bp, Artificial Sequence
  chemically treated genomic DNA (Homo sapiens) CpG-island No: 4731
  unsure (10, 23, 42, 157, 163, 178, 200, 244, 351..352, 388, 397, 407)
  unsure (457, 461, 484, 542, 545, 562)
gtggataggntgtatttttgttncggagtaggttgttgattnttgttttcgtacgtcgttaagattaggtgttgttgcgtataatttttcgttcgtttggggaagacgttgtcgtgttttcgtagcgcgaagatgtataaggtttgttggacggtgntgcgtnggttgcgtttcgttngatgttggtgttcgtttgagangaagaaaggtagatcgttcgagattggttcgtcgtggttgtgtnggggttgtttgttgtagcggtcgtcggttaaggagatagtatttttcgttttttttcgtcgttttagttttagatgaagtgagtatttttttcgtttcgggaaggtnngttggtcgcgatcgatggtcgttgttggagaaggancgagacgangtggtatttngatttttttgttttcgttgtgggggttgaacgtcgtattcgtatcgtgtntggnagttgtttcgtggtttgataganttgtcgtcgttgagaagagtttttttttcgcgtttagagtgtttttgtagatcgtttnggncgttgttgaatcgtttnagaacgtatttttcgacgttgtgaaagt

SEQ ID NO: 4732 - DNA, 590 bp, Artificial Sequence
  chemically treated genomic DNA (Homo sapiens) CpG-island No: 4732
  unsure (29, 46, 49, 107, 130, 134, 184, 194, 203, 239..240, 347, 391)
  unsure (413, 428, 434, 549, 568, 581)
actttcacaacgtcgaaaaatacgttctnaaacgattcaacaacgnccnaaacgatctacaaaaacactctaaacgcgaaaaaaaaactcttctcaacgacgacaantctatcaaaccacgaaacaactnccanacacgatacgaatacgacgttcaacccccacaacgaaaacaaaaaaatcnaaataccacntcgtctcgntccttctccaacaacgaccatcgatcgcgaccaacnnaccttcccgaaacgaaaaaaatactcacttcatctaaaactaaaacgacgaaaaaaaacgaaaaatactatctccttaaccgacgaccgctacaacaaacaaccccnacacaaccacgacgaaccaatctcgaacgatctacctttcttcntctcaaacgaacaccaacatcnaacgaaacgcaaccnacgcancaccgtccaacaaaccttatacatcttcgcgctacgaaaacacgacaacgtcttccccaaacgaacgaaaaattatacgcaacaacacctaatcttaacgacgtacgaaaacaanaatcaacaacctactccgnaacaaaaatacancctatccac

SEQ ID NO: 4733 - DNA, 714 bp, Artificial Sequence
  chemically treated genomic DNA (Homo sapiens) CpG-island No: 4733
gttcgtgcggtaattttgttttattagtgtgtttatttttttatttatttatatatagagttggtttttcgttcgtattatatagtattattcgggcgcggtatgacgagcgaaggggatattggtggatgttgtaacgggggggtaatcgtgtaggtcggtcggtcgacgttagagtgggttcgtagggagagggataggtataggggaaagaaggaggagggtatagcggcgaacgaatttcgaagagttaggcgattcggcgggacgaagaaaacgcgggaggggtagcgggaatataacggtttagaaaaagaagataggggcgagtcgttcgagggggtagggggatagtacgagggggagttcggtcggcggcggtacgataagcgggataagcggagtttaggaaggagaattcgaggcggaaaaggcgagaagaggaagcgaggagagagcgaggagagaggacgaggagaggacgagaagacgagttcggaggacgggaagacgacgggagtagtacgggatcggtaagagggggaaagatagaaagaaagggagcggggaagcgaatcgaatagggaaggcgggcgaggttttatagaaaagtcgaaggttaacgaaaaggttaggaaatagagacgtaggggaggaaaaagaggggggaaaggaataaggggaagaacgttaaaagagagagaaaagaagtaa

SEQ ID NO: 4734 - DNA, 714 bp, Artificial Sequence
  chemically treated genomic DNA (Homo sapiens) CpG-island No: 4734
ttacttcttttctctctcttttaacgttcttccccttattcctttcccccctctttttcctcccctacgtctctatttcctaaccttttcgttaaccttcgacttttctataaaacctcgcccgccttccctattcgattcgcttccccgctccctttctttctatctttccccctcttaccgatcccgtactactcccgtcgtcttcccgtcctccgaactcgtcttctcgtcctctcctcgtcctctctcctcgctctctcctcgcttcctcttctcgccttttccgcctcgaattctccttcctaaactccgcttatcccgcttatcgtaccgccgccgaccgaactccccctcgtactatccccctaccccctcgaacgactcgcccctatcttctttttctaaaccgttatattcccgctacccctcccgcgttttcttcgtcccgccgaatcgcctaactcttcgaaattcgttcgccgctataccctcctccttctttcccctatacctatccctctccctacgaacccactctaacgtcgaccgaccgacctacacgattacccccccgttacaacatccaccaatatccccttcgctcgtcataccgcgcccgaataatactatataatacgaacgaaaaaccaactctatatataaataaataaaaaaataaacacactaataaaacaaaattaccgcacgaac

SEQ ID NO: 4735 - DNA, 714 bp, Artificial Sequence
  chemically treated genomic DNA (Homo sapiens) CpG-island No: 4735
ttgtttttttttttttttttttggcgtttttttttttgttttttttttttttttttttttttttttgcgtttttgttttttggttttttcgttggttttcggtttttttgtggggtttcgttcgttttttttgttcggttcgttttttcgttttttttttttttgttttttttttttttgtcggtttcgtgttgttttcgtcgttttttcgtttttcgggttcgttttttcgtttttttttcgtttttttttttcgtttttttttcgtttttttttttcgtttttttcgtttcgggtttttttttttgggtttcgtttgtttcgtttgtcgtgtcgtcgtcggtcgggttttttttcgtgttgtttttttgttttttcgggcggttcgtttttgttttttttttttgggtcgttgtgttttcgttgtttttttcgcgtttttttcgtttcgtcgggtcgtttggtttttcggggttcgttcgtcgttgtgttttttttttttttttttttgtgtttgtttttttttttgcgggtttattttagcgtcgatcggtcggtttgtacggttgttttttcgttgtagtatttattagtgtttttttcgttcgttatatcgcgttcgagtaatattatataatacgagcgaggggttagttttgtatatagatgggtgaaggagtaggtatattgatggggtaagattatcgtacggat

SEQ ID NO: 4736 - DNA, 714 bp, Artificial Sequence
  chemically treated genomic DNA (Homo sapiens) CpG-island No: 4736
atccgtacgataatcttaccccatcaatatacctactccttcacccatctatatacaaaactaacccctcgctcgtattatataatattactcgaacgcgatataacgaacgaaaaaaacactaataaatactacaacgaaaaaacaaccgtacaaaccgaccgatcgacgctaaaataaacccgcaaaaaaaaaaacaaacacaaaaaaaaaaaaaaaaaaaacacaacgacgaacgaaccccgaaaaaccaaacgacccgacgaaacgaaaaaaacgcgaaaaaaacaacgaaaacacaacgacccaaaaaaaaaaaacaaaaacgaaccgcccgaaaaaacaaaaaaacaacacgaaaaaaaacccgaccgacgacgacacgacaaacgaaacaaacgaaacccaaaaaaaaaaacccgaaacgaaaaaaacgaaaaaaaaaaacgaaaaaaaaacgaaaaaaaaaaacgaaaaaaaaacgaaaaaacgaacccgaaaaacgaaaaaacgacgaaaacaacacgaaaccgacaaaaaaaaaaaaaacaaaaaaaaaaaaaacgaaaaaacgaaccgaacaaaaaaaacgaacgaaaccccacaaaaaaaccgaaaaccaacgaaaaaaccaaaaaacaaaaacgcaaaaaaaaaaaaaaaaaaaaaaaaaaaacaaaaaaaaaaacgccaaaaaaaaaaaaaaaaaaacaa

SEQ ID NO: 4737 - DNA, 800 bp, Artificial Sequence
  chemically treated genomic DNA (Homo sapiens) CpG-island No: 4737
atatgcgtattgggttttttatcgtttttcgtttttagtaaagtttttcgttcggagtatgcgcgggtcgtttggcgttaattgttgatcgttatagttatagttagggttagtttcgtcggttttcgggtggcgcgcgttcgttgtttttttagttttaggatgatcggttagaagacgttttattttttttttttttttagtttcgttaggaagcgatacgtttttagtttcgagtcggtcgtttaggggatcggcgtggttggggtgtttgaggaaagcggagatgcggcggtgaggcgcggtttgggtcggggttagggggtgaagggggaggaaggcggtgggtttcgtttgacggagggcgtgtaggatcgcgtttttgattcggtaaattcgggtttcgttttttaaatagtttttacgtgtttaaaatagtcgtcgttgttttttatgggtcgttatgttaaagggttagttaatgggaacgcgtttcggggtttatggcgttaattcgcgcgtcgtaggtttttttggttcggtgcgttgtttaattagaggggagagggggcgggatttagagggaggttttttgtcgcgaaaagattacgtggggacgcggtggggcgggtttggcgggggcggggtatttttgtgtagggtttttagttatcgcgacgtttttcgggaagttatagggcgttttttagttcgttttttcgttttagtttagaatttaatttttaattttcggatcgggtttagttttgggtttttattgttcgtttttgttgggattt

SEQ ID NO: 4738 - DNA, 800 bp, Artificial Sequence
  chemically treated genomic DNA (Homo sapiens) CpG-island No: 4738
aaatcccaacaaaaacgaacaataaaaacccaaaactaaacccgatccgaaaattaaaaattaaattctaaactaaaacgaaaaaacgaactaaaaaacgccctataacttcccgaaaaacgtcgcgataactaaaaaccctacacaaaaataccccgcccccgccaaacccgccccaccgcgtccccacgtaatcttttcgcgacaaaaaacctccctctaaatcccgccccctctcccctctaattaaacaacgcaccgaaccaaaaaaacctacgacgcgcgaattaacgccataaaccccgaaacgcgttcccattaactaaccctttaacataacgacccataaaaaacaacgacgactattttaaacacgtaaaaactatttaaaaaacgaaacccgaatttaccgaatcaaaaacgcgatcctacacgccctccgtcaaacgaaacccaccgccttcctcccccttcaccccctaaccccgacccaaaccgcgcctcaccgccgcatctccgctttcctcaaacaccccaaccacgccgatcccctaaacgaccgactcgaaactaaaaacgtatcgcttcctaacgaaactaaaaaaaaaaaaaaaataaaacgtcttctaaccgatcatcctaaaactaaaaaaacaacgaacgcgcgccacccgaaaaccgacgaaactaaccctaactataactataacgatcaacaattaacgccaaacgacccgcgcatactccgaacgaaaaactttactaaaaacgaaaaacgataaaaaacccaatacgcatat

SEQ ID NO: 4739 - DNA, 800 bp, Artificial Sequence
  chemically treated genomic DNA (Homo sapiens) CpG-island No: 4739
aggttttagtaaaagcggatagtaagagtttagggttgggttcggttcgggaattgggaattaggttttaaattggagcggggagacgggttgggaggcgttttatggtttttcgaggagcgtcgcggtgattgggaattttgtatagaggtgtttcgttttcgttagattcgttttatcgcgtttttacgtggttttttcgcggtaaaaaatttttttttgggtttcgtttttttttttttttgattggatagcgtatcgagttaggagggtttgcggcgcgcggattggcgttatgggtttcgagacgcgtttttattggttggttttttagtatggcggtttatgggggatagcggcggttattttgaatacgtggaggttatttggaaagcggagttcgggtttatcgagttagaggcgcgattttgtacgtttttcgttaggcggggtttatcgtttttttttttttttattttttagtttcggtttaagtcgcgttttatcgtcgtattttcgttttttttaggtattttagttacgtcggttttttggacggtcggttcggggttgggggcgtgtcgttttttggcggggttgggggagaaaaaggagtagagcgttttttggtcgattattttggagttgaggaggtagcgaacgcgcgttattcgggaatcggcgaggttagttttggttgtggttgtggcggttagtaattggcgttaagcggttcgcgtatgtttcgagcggggggttttgttgggggcggggggcggtggaaggtttagtgcgtatgt

SEQ ID NO: 4740 - DNA, 800 bp, Artificial Sequence
  chemically treated genomic DNA (Homo sapiens) CpG-island No: 4740
acatacgcactaaaccttccaccgccccccgcccccaacaaaaccccccgctcgaaacatacgcgaaccgcttaacgccaattactaaccgccacaaccacaaccaaaactaacctcgccgattcccgaataacgcgcgttcgctacctcctcaactccaaaataatcgaccaaaaaacgctctactcctttttctcccccaaccccgccaaaaaacgacacgcccccaaccccgaaccgaccgtccaaaaaaccgacgtaactaaaatacctaaaaaaaacgaaaatacgacgataaaacgcgacttaaaccgaaactaaaaaataaaaaaaaaaaaaaacgataaaccccgcctaacgaaaaacgtacaaaatcgcgcctctaactcgataaacccgaactccgctttccaaataacctccacgtattcaaaataaccgccgctatcccccataaaccgccatactaaaaaaccaaccaataaaaacgcgtctcgaaacccataacgccaatccgcgcgccgcaaaccctcctaactcgatacgctatccaatcaaaaaaaaaaaaaaacgaaacccaaaaaaaaattttttaccgcgaaaaaaccacgtaaaaacgcgataaaacgaatctaacgaaaacgaaacacctctatacaaaattcccaatcaccgcgacgctcctcgaaaaaccataaaacgcctcccaacccgtctccccgctccaatttaaaacctaattcccaattcccgaaccgaacccaaccctaaactcttactatccgcttttactaaaacct

SEQ ID NO: 4741 - DNA, 582 bp, Artificial Sequence
  chemically treated genomic DNA (Homo sapiens) CpG-island No: 4741
ggacgtagttcggtgttaggtgttagcgatttgagttcgttttcgggttttatttatttttagttcggtttttagatatttttcgaggcgtttttttttgttcgttcgatttttgagcggagcgtttcggggtgtgaggagaatcggtaaattttcgcgggcgttgggcgtcgtagagtcgtcgcgcgtttagtttcgttacgttggttgtcgagcgtatttcggttgcgttcggcggggaggcgtcgagggtagttaaggggagtaggttacgtgagaggaggagtttgatttattttttaggcggtaggcgtatgcgtattttttatttgcgtttcggtcgggaggtttacgtggaatcgtacgtgtttggttttgtagttaggggtttttggttcggggcgcgtaggggcgggttcgtagtgggattcgcggagaggggcgcggcggggcggagcgtttggagatttagtttgcgggtttcgtaattattattcgtgataattatagtttttggagagttgtttaggttttttgcggggttttttacgaatttattatatttaatattcgtgaatttag

SEQ ID NO: 4742 - DNA, 582 bp, Artificial Sequence
  chemically treated genomic DNA (Homo sapiens) CpG-island No: 4742
ctaaattcacgaatattaaatataataaattcgtaaaaaaccccgcaaaaaacctaaacaactctccaaaaactataattatcacgaataataattacgaaacccgcaaactaaatctccaaacgctccgccccgccgcgcccctctccgcgaatcccactacgaacccgcccctacgcgccccgaaccaaaaacccctaactacaaaaccaaacacgtacgattccacgtaaacctcccgaccgaaacgcaaataaaaaatacgcatacgcctaccgcctaaaaaataaatcaaactcctcctctcacgtaacctactccccttaactaccctcgacgcctccccgccgaacgcaaccgaaatacgctcgacaaccaacgtaacgaaactaaacgcgcgacgactctacgacgcccaacgcccgcgaaaatttaccgattctcctcacaccccgaaacgctccgctcaaaaatcgaacgaacaaaaaaaaacgcctcgaaaaatatctaaaaaccgaactaaaaataaataaaacccgaaaacgaactcaaatcgctaacacctaacaccgaactacgtcc

SEQ ID NO: 4743 - DNA, 582 bp, Artificial Sequence
  chemically treated genomic DNA (Homo sapiens) CpG-island No: 4743
ttgaatttacgaatgttgaatgtgatgaattcgtgggaagtttcgtagggagtttaagtagttttttagaggttgtggttgttacggatgatgattgcgggattcgtagattgagtttttaagcgtttcgtttcgtcgcgttttttttcgcgggttttattgcggattcgtttttgcgcgtttcgggttaggagtttttagttgtaggattaggtacgtgcgattttacgtgagtttttcggtcggagcgtagatgggaagtgcgtatgcgtttatcgtttggaaagtaggttagatttttttttttacgtgatttgttttttttagttattttcggcgttttttcgtcgggcgtagtcgggatgcgttcggtagttaacgtgacggggttgggcgcgcggcggttttgcgacgtttagcgttcgcgaggatttgtcggttttttttatatttcgaagcgtttcgtttagaagtcgggcgggtaaaagggagcgtttcgggaagtatttgggagtcgggttggaaatgaatggggttcggaagcgagtttaaatcgttgatatttggtatcgggttgcgttt

SEQ ID NO: 4744 - DNA, 582 bp, Artificial Sequence
  chemically treated genomic DNA (Homo sapiens) CpG-island No: 4744
aaacgcaacccgataccaaatatcaacgatttaaactcgcttccgaaccccattcatttccaacccgactcccaaatacttcccgaaacgctcccttttacccgcccgacttctaaacgaaacgcttcgaaatataaaaaaaaccgacaaatcctcgcgaacgctaaacgtcgcaaaaccgccgcgcgcccaaccccgtcacgttaactaccgaacgcatcccgactacgcccgacgaaaaaacgccgaaaataactaaaaaaaacaaatcacgtaaaaaaaaaaatctaacctactttccaaacgataaacgcatacgcacttcccatctacgctccgaccgaaaaactcacgtaaaatcgcacgtacctaatcctacaactaaaaactcctaacccgaaacgcgcaaaaacgaatccgcaataaaacccgcgaaaaaaaacgcgacgaaacgaaacgcttaaaaactcaatctacgaatcccgcaatcatcatccgtaacaaccacaacctctaaaaaactacttaaactccctacgaaacttcccacgaattcatcacattcaacattcgtaaattcaa

SEQ ID NO: 4745 - DNA, 509 bp, Artificial Sequence
  chemically treated genomic DNA (Homo sapiens) CpG-island No: 4745
  unsure (49, 56, 62, 70, 72, 82, 93, 95, 104, 280)
gtttcgttcgtagttttagttgttggtcgcgcgaaggcggtattttttnttggttngtagtnaggtttantntaacgcgttncggggggttgntngttgcgttnatattgcggtcgagtttttttttttggtcgtttttttttttttttcggcggtcgcggttttatgcggttttttgttatttgcggagaatgtttgtgcgaggtttgtgttgttatacggtcgattgtgagcgtgttaaggcgggtgaatggggaggttttagagcgtcgcgttattngtggggtcgggtttcgttgaaaggcggtttcgggtcgggaaggtgcggaaagaatggttttttattggagtttcgaataaaaggtgtggtaggaaggcgaggttttttgcgcgaataaaaattttagcgcgtcggattgacgtttttaaagagttttatattgttttttagagcgggggttttgtgtagtagtttgtttaatagagggacggagaaatgtgcgggggtt

SEQ ID NO: 4746 - DNA, 509 bp, Artificial Sequence
  chemically treated genomic DNA (Homo sapiens) CpG-island No: 4746
  unsure (230, 406, 415, 417, 428, 438, 440, 448, 454, 461)
aacccccgcacatttctccgtccctctattaaacaaactactacacaaaacccccgctctaaaaaacaatataaaactctttaaaaacgtcaatccgacgcgctaaaatttttattcgcgcaaaaaacctcgccttcctaccacaccttttattcgaaactccaataaaaaaccattctttccgcaccttcccgacccgaaaccgcctttcaacgaaacccgaccccacnaataacgcgacgctctaaaacctccccattcacccgccttaacacgctcacaatcgaccgtataacaacacaaacctcgcacaaacattctccgcaaataacaaaaaaccgcataaaaccgcgaccgccgaaaaaaaaaaaaaaacgaccaaaaaaaaaaactcgaccgcaatatnaacgcaacnancaaccccccgnaacgcgttanantaaacctnactacnaaccaanaaaaaataccgccttcgcgcgaccaacaactaaaactacgaacgaaac

SEQ ID NO: 4747 - DNA, 509 bp, Artificial Sequence
  chemically treated genomic DNA (Homo sapiens) CpG-island No: 4747
  unsure (230, 406, 415, 417, 428, 438, 440, 448, 454, 461)
aattttcgtatattttttcgtttttttgttgagtagattgttgtataaagttttcgttttgagaagtaatgtggagttttttggggacgttaattcgacgcgttggggtttttgttcgcgtaggggatttcgtttttttattatattttttgttcgggattttaataaaaagttatttttttcgtattttttcggttcggagtcgttttttagcgaggttcggttttatnaatggcgcggcgttttgaggtttttttatttattcgttttggtacgtttataatcggtcgtgtggtagtataggtttcgtataggtatttttcgtaagtgataaggagtcgtataaagtcgcggtcgtcgggggagaagggagggcggttaagggggagagttcggtcgtagtgtnggcgtagtngntagtttttcgnggcgcgttgngntaggtttngttgtnagttagnggaaggtgtcgttttcgcgcggttaatagttgggattgcgagcgaggt

SEQ ID NO: 4748 - DNA, 509 bp, Artificial Sequence
  chemically treated genomic DNA (Homo sapiens) CpG-island No: 4748
  unsure (49, 56, 62, 70, 72, 82, 93, 95, 104, 280)
acctcgctcgcaatcccaactattaaccgcgcgaaaacgacaccttccnctaactnacaacnaaacctancncaacgcgccncgaaaaactancnactacgccnacactacgaccgaactctcccccttaaccgccctcccttctcccccgacgaccgcgactttatacgactccttatcacttacgaaaaatacctatacgaaacctatactaccacacgaccgattataaacgtaccaaaacgaataaataaaaaaacctcaaaacgccgcgccattnataaaaccgaacctcgctaaaaaacgactccgaaccgaaaaaatacgaaaaaaataactttttattaaaatcccgaacaaaaaatataataaaaaaacgaaatcccctacgcgaacaaaaaccccaacgcgtcgaattaacgtccccaaaaaactccacattacttctcaaaacgaaaactttatacaacaatctactcaacaaaaaaacgaaaaaatatacgaaaatt

SEQ ID NO: 4749 - DNA, 607 bp, Artificial Sequence
  chemically treated genomic DNA (Homo sapiens) CpG-island No: 4749
  unsure (314)
aatttaattatcggagttattttgttttaggagcggtcgtggagaaagtaattagtcgagagttcgcgttttagagaaggtaagcggtaatagggtcgtatagcgttatttatttgatgagttttttcgcgggttttgatagcggagtttaggtacgacgattttttaattgggcgcgatttaaagtatcggggcgggtattagagttcgagcgttttaggggattggttatattggcggacgtacgtgttgttgattaagttggttcgttttcgggttcggttcgtggagagtcggttttttcgtgagttttnttgttagttattggtattttgcggtttttttggggacgaggcggtttcgtcgatcggatttttttttcggttgggtaaggggtcgcggggagtagttcgggattgaatcgagaggtgtcgaaggaatcggcgggtcgtttgatttcgtgagtgtgggcgcgagagggttgtgggattcggagggacggggagaggaagcgggatttatatttcgttatttggggacgatcggtttttagaggatagagttggtttacgagaacgtttcgtttttaggatgttcgggtagggtt

SEQ ID NO: 4750 - DNA, 607 bp, Artificial Sequence
  chemically treated genomic DNA (Homo sapiens) CpG-island No: 4750
  unsure (294)
aaccctacccgaacatcctaaaaacgaaacgttctcgtaaaccaactctatcctctaaaaaccgatcgtccccaaataacgaaatataaatcccgcttcctctccccgtccctccgaatcccacaaccctctcgcgcccacactcacgaaatcaaacgacccgccgattccttcgacacctctcgattcaatcccgaactactccccgcgaccccttacccaaccgaaaaaaaaatccgatcgacgaaaccgcctcgtccccaaaaaaaccgcaaaataccaataactaacaanaaaactcacgaaaaaaccgactctccacgaaccgaacccgaaaacgaaccaacttaatcaacaacacgtacgtccgccaatataaccaatcccctaaaacgctcgaactctaatacccgccccgatactttaaatcgcgcccaattaaaaaatcgtcgtacctaaactccgctatcaaaacccgcgaaaaaactcatcaaataaataacgctatacgaccctattaccgcttaccttctctaaaacgcgaactctcgactaattactttctccacgaccgctcctaaaacaaaataactccgataattaaatt

SEQ ID NO: 4751 - DNA, 607 bp, Artificial Sequence
  chemically treated genomic DNA (Homo sapiens) CpG-island No: 4751
  unsure (294)
gattttattcgggtattttgggagcggggcgttttcgtgggttagttttgttttttaggaatcggtcgtttttaggtggcggggtgtgggtttcgtttttttttttcgttttttcgggttttatagttttttcgcgtttatatttacgggattaagcggttcgtcggttttttcggtatttttcggtttagtttcgagttgtttttcgcggttttttgtttagtcggaaagagggttcggtcggcggggtcgtttcgtttttaaggaaatcgtaggatgttaatgattgatagnaagatttacggaggggtcggttttttacgagtcgaattcgggggcgaattagtttggttagtagtacgtgcgttcgttagtgtggttaattttttagagcgttcgggttttgatgttcgtttcggtattttgagtcgcgtttaattggaaagtcgtcgtatttaggtttcgttgttagggttcgcggaagagtttattaggtgagtggcgttgtgcggttttgttgtcgtttattttttttggggcgcgaattttcggttggttgttttttttacggtcgtttttgggatagagtagtttcggtagttgggtt

SEQ ID NO: 4752 - DNA, 607 bp, Artificial Sequence
  chemically treated genomic DNA (Homo sapiens) CpG-island No: 4752
  unsure (314)
aacccaactaccgaaactactctatcccaaaaacgaccgtaaaaaaaacaaccaaccgaaaattcgcgccccaaaaaaaataaacgacaacaaaaccgcacaacgccactcacctaataaactcttccgcgaaccctaacaacgaaacctaaatacgacgactttccaattaaacgcgactcaaaataccgaaacgaacatcaaaacccgaacgctctaaaaaattaaccacactaacgaacgcacgtactactaaccaaactaattcgcccccgaattcgactcgtaaaaaaccgacccctccgtaaatcttnctatcaatcattaacatcctacgatttccttaaaaacgaaacgaccccgccgaccgaaccctctttccgactaaacaaaaaaccgcgaaaaacaactcgaaactaaaccgaaaaataccgaaaaaaccgacgaaccgcttaatcccgtaaatataaacgcgaaaaaactataaaacccgaaaaaacgaaaaaaaaaaacgaaacccacaccccgccacctaaaaacgaccgattcctaaaaaacaaaactaacccacgaaaacgccccgctcccaaaatacccgaataaaatc

SEQ ID NO: 4753 - DNA, 584 bp, Artificial Sequence
  chemically treated genomic DNA (Homo sapiens) CpG-island No: 4753
  unsure (22, 50, 63, 77, 93, 176, 183, 362, 380, 430, 556)
agtgtcgggcgttggggtttgnaggagtatcgagttcggttagagggttnaatattttagatntcgattagagtttnagcgggtcgtcgcggnttttttttggaggtgaggcggtttttagttcgtatgtcgtaacggtttttcggataggttgcgggtcgcgttagttagggatngatcggntttagggcggtttcgttttacgttcgcgacgagatttcgcgggaatacggtttttcggggttagggtcgttcgttttttagttacgcgttttagaatttgaggagcgtacgggagcgcgggtcgtaacggcgttcgttagtagtttgacgttgaaggtttgtcgtcgtttcgttttcgnacgcgatttcgcgtatangggatcgtagttttgtaggcgttagtgaggggttcgaagtcggtttttangagtttttgggcgcgtcgttttttttgtagttaatcggggatcgacgtggtgcgggttaatggtcgcggttaaagtattaagagtggttgagtttattaaagtttagttttaagtttttttcgttntttttaaaagttagaggcgggttgatcg

SEQ ID NO: 4754 - DNA, 584 bp, Artificial Sequence
  chemically treated genomic DNA (Homo sapiens) CpG-island No: 4754
  unsure (29, 155, 205, 223, 402, 409, 492, 508, 522, 535, 563)
cgatcaacccgcctctaacttttaaaaanaacgaaaaaaacttaaaactaaactttaataaactcaaccactcttaatactttaaccgcgaccattaacccgcaccacgtcgatccccgattaactacaaaaaaaacgacgcgcccaaaaactcntaaaaaccgacttcgaacccctcactaacgcctacaaaactacgatcccntatacgcgaaatcgcgtncgaaaacgaaacgacgacaaaccttcaacgtcaaactactaacgaacgccgttacgacccgcgctcccgtacgctcctcaaattctaaaacgcgtaactaaaaaacgaacgaccctaaccccgaaaaaccgtattcccgcgaaatctcgtcgcgaacgtaaaacgaaaccgccctaaanccgatcnatccctaactaacgcgacccgcaacctatccgaaaaaccgttacgacatacgaactaaaaaccgcctcacctccaaaaaaaanccgcgacgacccgctnaaactctaatcganatctaaaatattnaaccctctaaccgaactcgatactcctncaaaccccaacgcccgacact

SEQ ID NO: 4755 - DNA, 584 bp, Artificial Sequence
  chemically treated genomic DNA (Homo sapiens) CpG-island No: 4755
  unsure (29, 155, 205, 223, 402, 409, 492, 508, 522, 535, 563)
cgattaattcgtttttgatttttagaagnggcgggagaaatttaaggttgaattttgataggtttaattatttttgatattttgatcgcggttattggttcgtattacgtcggttttcgattggttatagaaagagcgacgcgtttagggatttntaggggtcgatttcgggttttttattagcgtttgtagagttgcggttttntgtgcgcgggatcgcgtncgggggcggggcggcgataggtttttaacgttaaattgttgacgggcgtcgttacgattcgcgttttcgtgcgttttttaaattttgagacgcgtggttggagagcgggcggttttggtttcggagagtcgtgttttcgcgggatttcgtcgcgggcgtgaggcggggtcgttttgggntcggttnatttttggttggcgcgattcgtagtttgttcgggaagtcgttgcgatatgcgggttgggaatcgttttatttttaggggggantcgcggcggttcgttnagattttggtcggngtttggagtattnggttttttggtcggattcggtgtttttntaggttttagcgttcggtatt

SEQ ID NO: 4756 - DNA, 584 bp, Artificial Sequence
  chemically treated genomic DNA (Homo sapiens) CpG-island No: 4756
  unsure (22, 50, 63, 77, 93, 176, 183, 362, 380, 430, 556)
aataccgaacgctaaaacctanaaaaacaccgaatccgaccaaaaaaccnaatactccaaacnccgaccaaaatctnaacgaaccgccgcgantcccccctaaaaataaaacgattcccaacccgcatatcgcaacgacttcccgaacaaactacgaatcgcgccaaccaaaaatnaaccgancccaaaacgaccccgcctcacgcccgcgacgaaatcccgcgaaaacacgactctccgaaaccaaaaccgcccgctctccaaccacgcgtctcaaaatttaaaaaacgcacgaaaacgcgaatcgtaacgacgcccgtcaacaatttaacgttaaaaacctatcgccgccccgcccccgnacgcgatcccgcgcacanaaaaccgcaactctacaaacgctaataaaaaacccgaaatcgacccctanaaatccctaaacgcgtcgctctttctataaccaatcgaaaaccgacgtaatacgaaccaataaccgcgatcaaaatatcaaaaataattaaacctatcaaaattcaaccttaaatttctcccgccncttctaaaaatcaaaaacgaattaatcg

SEQ ID NO: 4757 - DNA, 623 bp, Artificial Sequence
  chemically treated genomic DNA (Homo sapiens) CpG-island No: 4757
  unsure (2, 9, 25, 69, 99, 109..110, 119, 131, 273, 358, 472, 493)
tnatcggtntgatttttcgaacgtnaaggaaaggggtgggtttaatttggcgtttttattaatggtttntttggggggtttgttcgcggggttaagtanggattcggannatttcgaantttcgggttcgnttcggaggcgaatattacggggtcggggggcggcggcggtagtggtggtaggggtagcgagggtgggcgataaagttggttcgggtggatggagatagaaggatagggggttggcggtagggcgggggcgttagtcgaaganattagttaagttttaacgagatcgcgttattagacgcgtgattgaagcgcggagtggatcgaagggtcggcgatagaatagaagncgttgtaggttttcggtacgataagattcggatttcggttcggattacgagcgttgtcgttggagttattgttattacgtatatggtggtaggcgtcgtggtagggattttggnagtattgcgtgatgtattttnatcgattgcgttaaggtgagatttgtattcggtttcgaattcgatttggggttgattcgatttttgggttttgttcggagttaggaatttcgttgagagtcggagtcgatatgggtttttttttggtttt

SEQ ID NO: 4758 - DNA, 623 bp, Artificial Sequence
  chemically treated genomic DNA (Homo sapiens) CpG-island No: 4758
  unsure (131, 152, 266, 351, 493, 505, 514..515, 525, 555, 599, 615)
  unsure (622)
aaaaccaaaaaaaaacccatatcgactccgactctcaacgaaattcctaactccgaacaaaacccaaaaatcgaatcaaccccaaatcgaattcgaaaccgaatacaaatctcaccttaacgcaatcgatnaaaatacatcacgcaatactnccaaaatccctaccacgacgcctaccaccatatacgtaataacaataactccaacgacaacgctcgtaatccgaaccgaaatccgaatcttatcgtaccgaaaacctacaacgncttctattctatcgccgacccttcgatccactccgcgcttcaatcacgcgtctaataacgcgatctcgttaaaacttaactaatntcttcgactaacgcccccgccctaccgccaaccccctatccttctatctccatccacccgaaccaactttatcgcccaccctcgctacccctaccaccactaccgccgccgccccccgaccccgtaatattcgcctccgaancgaacccgaaanttcgaaatnntccgaatccntacttaaccccgcgaacaaaccccccaaanaaaccattaataaaaacgccaaattaaacccacccctttccttnacgttcgaaaaatcanaccgatna

SEQ ID NO: 4759 - DNA, 623 bp, Artificial Sequence
  chemically treated genomic DNA (Homo sapiens) CpG-island No: 4759
  unsure (131, 152, 266, 351, 493, 505, 514..515, 525, 555, 599, 615)
  unsure (622)
ggagttaggaaggaatttatgtcggtttcggtttttagcgggatttttggtttcggataagatttaggggtcgggttagttttaggtcgggttcgaagtcgggtgtaggttttattttgacgtagtcgatnggggtatattacgtagtgttnttaggatttttgttacggcgtttgttattatgtgcgtggtgatagtggttttagcggtagcgttcgtagttcgggtcggagttcggattttgtcgtatcgggggtttgtagcgntttttattttgtcgtcggtttttcggtttatttcgcgttttagttacgcgtttagtagcgcggtttcgttggggtttagttgatnttttcggttggcgttttcgttttatcgttagttttttgtttttttatttttatttattcgggttagttttgtcgtttattttcgttgtttttgttattattgtcgtcgtcgtttttcggtttcgtagtgttcgttttcgggncgggttcgaganttcggggtnnttcggatttntgtttggtttcgcggataggttttttaagnggattattggtggagacgttaagttagatttatttttttttttnacgttcgaaaaattangtcggtna

SEQ ID NO: 4760 - DNA, 623 bp, Artificial Sequence
  chemically treated genomic DNA (Homo sapiens) CpG-island No: 4760
  unsure (2, 9, 25, 69, 99, 109..110, 119, 131, 273, 358, 472, 493)
tnaccgacntaatttttcgaacgtnaaaaaaaaaaataaatctaacttaacgtctccaccaataatccncttaaaaaacctatccgcgaaaccaaacanaaatccgaannaccccgaantctcgaacccgncccgaaaacgaacactacgaaaccgaaaaacgacgacgacaataataacaaaaacaacgaaaataaacgacaaaactaacccgaataaataaaaataaaaaaacaaaaaactaacgataaaacgaaaacgccaaccgaaaanatcaactaaaccccaacgaaaccgcgctactaaacgcgtaactaaaacgcgaaataaaccgaaaaaccgacgacaaaataaaaancgctacaaacccccgatacgacaaaatccgaactccgacccgaactacgaacgctaccgctaaaaccactatcaccacgcacataataacaaacgccgtaacaaaaatcctaanaacactacgtaatataccccnatcgactacgtcaaaataaaacctacacccgacttcgaacccgacctaaaactaacccgacccctaaatcttatccgaaaccaaaaatcccgctaaaaaccgaaaccgacataaattccttcctaactcc

SEQ ID NO: 4761 - DNA, 568 bp, Artificial Sequence
  chemically treated genomic DNA (Homo sapiens) CpG-island No: 4761
  unsure (337, 444)
aacgcgtcggggttggataacgcgttgtcggggtttggcggtatagcgaaagggttggtgaaagtacgcggtacggtggaagcgttataattattggtagatattatcgcgcgcggtttgcgttggtaggaatttttcgtggcgtaggttcgcgtggaaggcgatattaaatttatcgattagatcgtcgggaaattcgacgtacgcgttgagtaaatttcgtagtcggatgtaaatattaatttcgttattttgaatgttaaaggtagcgaaaagtagtacgagttatagttgcggatttagggggagtttgttttcgggtagtttaatttggtangaagttttgatcgtaaagaagaaacgttggagggaatttttagtatattcgtttttagaacgtcgttggtcgggtcgttgatcgcgatatgcgttgattatcgatangagtaaaatagatcgttaattgtgttatcgatgcgattgttgcgaatatatcgggcgaagcggcgggattacgtgatttatgtacgttcgatatagtagattacgaaggtttgaattagagtcg

SEQ ID NO: 4762 - DNA, 568 bp, Artificial Sequence
  chemically treated genomic DNA (Homo sapiens) CpG-island No: 4762
  unsure (125, 232)
cgactctaattcaaaccttcgtaatctactatatcgaacgtacataaatcacgtaatcccgccgcttcgcccgatatattcgcaacaatcgcatcgataacacaattaacgatctattttactcntatcgataatcaacgcatatcgcgatcaacgacccgaccaacgacgttctaaaaacgaatatactaaaaattccctccaacgtttcttctttacgatcaaaacttcntaccaaattaaactacccgaaaacaaactccccctaaatccgcaactataactcgtactacttttcgctacctttaacattcaaaataacgaaattaatatttacatccgactacgaaatttactcaacgcgtacgtcgaatttcccgacgatctaatcgataaatttaatatcgccttccacgcgaacctacgccacgaaaaattcctaccaacgcaaaccgcgcgcgataatatctaccaataattataacgcttccaccgtaccgcgtactttcaccaaccctttcgctataccgccaaaccccgacaacgcgttatccaaccccgacgcgtt

SEQ ID NO: 4763 - DNA, 568 bp, Artificial Sequence
  chemically treated genomic DNA (Homo sapiens) CpG-island No: 4763
  unsure (125, 232)
cgattttggtttagattttcgtaatttgttatgtcgaacgtatatgagttacgtaatttcgtcgtttcgttcgatatgttcgtagtagtcgtatcggtagtatagttggcgatttattttgtttntatcggtaattagcgtatatcgcggttagcgattcggttaacggcgttttggaagcgggtatgttaagagttttttttagcgttttttttttgcgattaaaattttntgttagattaagttgttcggagataggttttttttgaattcgtaattgtagttcgtgttgtttttcgttgtttttggtatttagggtgacgaggttgatatttatattcggttgcgaaatttgtttaacgcgtacgtcgagtttttcggcgatttgatcggtggatttgatatcgttttttacgcgaatttgcgttacggaaagtttttgttagcgtaggtcgcgcgcggtgatatttgttagtagttgtggcgtttttatcgtgtcgcgtatttttattagttttttcgttgtatcgttaagtttcggtagcgcgttatttagtttcggcgcgtt

SEQ ID NO: 4764 - DNA, 568 bp, Artificial Sequence
  chemically treated genomic DNA (Homo sapiens) CpG-island No: 4764
  unsure (337, 444)
aacgcgccgaaactaaataacgcgctaccgaaacttaacgatacaacgaaaaaactaataaaaatacgcgacacgataaaaacgccacaactactaacaaatatcaccgcgcgcgacctacgctaacaaaaactttccgtaacgcaaattcgcgtaaaaaacgatatcaaatccaccgatcaaatcgccgaaaaactcgacgtacgcgttaaacaaatttcgcaaccgaatataaatatcaacctcgtcaccctaaataccaaaaacaacgaaaaacaacacgaactacaattacgaattcaaaaaaaacctatctccgaacaacttaatctaacanaaaattttaatcgcaaaaaaaaaacgctaaaaaaaactcttaacatacccgcttccaaaacgccgttaaccgaatcgctaaccgcgatatacgctaattaccgatanaaacaaaataaatcgccaactatactaccgatacgactactacgaacatatcgaacgaaacgacgaaattacgtaactcatatacgttcgacataacaaattacgaaaatctaaaccaaaatcg

SEQ ID NO: 4765 - DNA, 661 bp, Artificial Sequence
  chemically treated genomic DNA (Homo sapiens) CpG-island No: 4765
cgggtagaagtttcgcgtttcggttgtatttcgcgtatttgttcgtggcgcgttagtagcgcgggttaggcgtagaagcgtagtattagtaggttgcgcgttagtttttaggttcgttagttgtagtacgttttttacgcgttgtcgaagtttacggcgggtattagcggtcgtattgttttggtcgatttacgttttggtacggtttttgggttcgcggcgggttgttcgttggcggtcggcgtcgtggatagcggcgcgaagcggggaatgtaggggcgtagcgcgggtaagacgcgtcgtaaagttatggcgggacgtcggtattcgttcgggtcgtttaagtatgcgttattggtttcgtttcgttttttttcgtttcgtatgttttttagtcgcgttttttttttagaagttttacgtttcgagtcgcgtttatttttcgggagatatcgttttattttaggggtttcgtttttttttagtatttgtattcgttttttttgaggtttcgtttcgttcgtcgtagggtttacgttttttttacgtgagtttttcgtttcgcgttttaagtagttttttttttttagtagacgtcggtttattttacgattttagtttttatttttggagaatttatttcgaagttttaattttattt

SEQ ID NO: 4766 - DNA, 661 bp, Artificial Sequence
  chemically treated genomic DNA (Homo sapiens) CpG-island No: 4766
aaataaaattaaaacttcgaaataaattctccaaaaataaaaactaaaatcgtaaaataaaccgacgtctactaaaaaaaaaaaactacttaaaacgcgaaacgaaaaactcacgtaaaaaaaacgtaaaccctacgacgaacgaaacgaaacctcaaaaaaaacgaatacaaatactaaaaaaaaacgaaacccctaaaataaaacgatatctcccgaaaaataaacgcgactcgaaacgtaaaacttctaaaaaaaaaacgcgactaaaaaacatacgaaacgaaaaaaaacgaaacgaaaccaataacgcatacttaaacgacccgaacgaataccgacgtcccgccataactttacgacgcgtcttacccgcgctacgcccctacattccccgcttcgcgccgctatccacgacgccgaccgccaacgaacaacccgccgcgaacccaaaaaccgtaccaaaacgtaaatcgaccaaaacaatacgaccgctaatacccgccgtaaacttcgacaacgcgtaaaaaacgtactacaactaacgaacctaaaaactaacgcgcaacctactaatactacgcttctacgcctaacccgcgctactaacgcgccacgaacaaatacgcgaaatacaaccgaaacgcgaaacttctacccg

SEQ ID NO: 4767 - DNA, 661 bp, Artificial Sequence
  chemically treated genomic DNA (Homo sapiens) CpG-island No: 4767
gggtggggttgggatttcgggatgggttttttagaggtgagagttggggtcgtagggtggatcggcgtttgttgaggaaagggagttgtttggagcgcggggcgagggatttacgtggagaaggcgtgggttttacggcgggcggggcggggttttaagaagagcgggtgtagatgttagggaggggcggggtttttgggatggggcggtgtttttcgaggagtgggcgcggttcggagcgtgggatttttaaggagagagcgcggttagggggtatgcggggcggggaggggcggggcgggattaatagcgtatatttaagcggttcgggcgggtatcggcgtttcgttatggttttgcggcgcgttttgttcgcgttgcgtttttatatttttcgtttcgcgtcgttgtttacggcgtcggtcgttagcgagtagttcgtcgcgggtttaggggtcgtgttaggacgtgggtcggttagggtagtgcggtcgttggtgttcgtcgtggatttcggtaacgcgtaggaggcgtattgtagttggcgaatttgggagttggcgcgtagtttgttggtgttgcgtttttgcgtttggttcgcgttgttggcgcgttacgagtaggtgcgcggggtgtagtcggggcgcggggtttttgttcg

SEQ ID NO: 4768 - DNA, 661 bp, Artificial Sequence
  chemically treated genomic DNA (Homo sapiens) CpG-island No: 4768
cgaacaaaaaccccgcgccccgactacaccccgcgcacctactcgtaacgcgccaacaacgcgaaccaaacgcaaaaacgcaacaccaacaaactacgcgccaactcccaaattcgccaactacaatacgcctcctacgcgttaccgaaatccacgacgaacaccaacgaccgcactaccctaaccgacccacgtcctaacacgacccctaaacccgcgacgaactactcgctaacgaccgacgccgtaaacaacgacgcgaaacgaaaaatataaaaacgcaacgcgaacaaaacgcgccgcaaaaccataacgaaacgccgatacccgcccgaaccgcttaaatatacgctattaatcccgccccgcccctccccgccccgcataccccctaaccgcgctctctccttaaaaatcccacgctccgaaccgcgcccactcctcgaaaaacaccgccccatcccaaaaaccccgcccctccctaacatctacacccgctcttcttaaaaccccgccccgcccgccgtaaaacccacgccttctccacgtaaatccctcgccccgcgctccaaacaactccctttcctcaacaaacgccgatccaccctacgaccccaactctcacctctaaaaaacccatcccgaaatcccaaccccaccc

SEQ ID NO: 4769 - DNA, 751 bp, Artificial Sequence
  chemically treated genomic DNA (Homo sapiens) CpG-island No: 4769
cgtttttgtaaaaattcgttcgttaattttttggtggtcggggcgtttcgaggtcgggtttcgtttttttagtttacggttttcgttttcgatttggtttagtatcggggattttcggatcgttattttcggttttgtcgaagtcgttaattttttcgggaagcggtaattttttttgtcgttttcggtttcgttttttcggggtcggggcgttagcggttttagtttggcgcggtattgcggtggttttttttgtcgttcggttacgtttttttcgtttcggtagttcgggacgggttttgcggtttcggggagggggcgagtcgttttttttcgcgtttcgtcgcggtcgggttcgggtgtagcgcggatatttatttttagcggacgttttttttatcgtaggggttgggcggggcgcgtcggagattgaaagtcgtttcggggcgggcgttcgttttttcgcggtcgggttcgtatataggcgttcgcgttataggtcggtttcggttcggtcgtaggattaggattcgcgcgttacgtttttttcggtttcggttagttttcggttcgtcgatgtttaggtttattagggataatattgaaggtagtatagggttaacgtgcgcggtattattttttcggttattttcgcggttcgcggtttaatagatatagttcgttacggcgtataagcgagggtttttttttcgcggtttcgtcgattacggtcgtttttgggggtaatttt

SEQ ID NO: 4770 - DNA, 751 bp, Artificial Sequence
  chemically treated genomic DNA (Homo sapiens) CpG-island No: 4770
aaaattacccccaaaaacgaccgtaatcgacgaaaccgcgaaaaaaaaaccctcgcttatacgccgtaacgaactatatctattaaaccgcgaaccgcgaaaataaccgaaaaaataataccgcgcacgttaaccctatactaccttcaatattatccctaataaacctaaacatcgacgaaccgaaaactaaccgaaaccgaaaaaaacgtaacgcgcgaatcctaatcctacgaccgaaccgaaaccgacctataacgcgaacgcctatatacgaacccgaccgcgaaaaaacgaacgcccgccccgaaacgactttcaatctccgacgcgccccgcccaacccctacgataaaaaaaacgtccgctaaaaataaatatccgcgctacacccgaacccgaccgcgacgaaacgcgaaaaaaaacgactcgccccctccccgaaaccgcaaaacccgtcccgaactaccgaaacgaaaaaaacgtaaccgaacgacaaaaaaaaccaccgcaataccgcgccaaactaaaaccgctaacgccccgaccccgaaaaaacgaaaccgaaaacgacaaaaaaaattaccgcttcccgaaaaaattaacgacttcgacaaaaccgaaaataacgatccgaaaatccccgatactaaaccaaatcgaaaacgaaaaccgtaaactaaaaaaacgaaacccgacctcgaaacgccccgaccaccaaaaaattaacgaacgaatttttacaaaaacg

SEQ ID NO: 4771 - DNA, 751 bp, Artificial Sequence
  chemically treated genomic DNA (Homo sapiens) CpG-island No: 4771
ggggttgtttttaaaagcggtcgtaatcgacggggtcgcggggggggggttttcgtttgtacgtcgtggcggattgtgtttattgggtcgcgggtcgcgggggtggtcgggaggatagtgtcgcgtacgttggttttgtgttgtttttaatattatttttgatgggtttgggtatcggcgaatcgagggttggtcggagtcgggggaagcgtagcgcgcggattttagttttgcgatcgggtcggggtcggtttgtaacgcgggcgtttgtatgcggattcggtcgcggggagacgggcgttcgtttcgaaacgatttttagttttcggcgcgtttcgtttaatttttacgatgaagagggcgttcgttggaggtgagtgttcgcgttgtattcgagttcggtcgcggcggggcgcggaggggggcggttcgtttttttttcggagtcgtagggttcgtttcgggttgtcgaggcgagggaagcgtagtcgggcggtagggaaagttatcgtagtgtcgcgttaggttggggtcgttggcgtttcggtttcgggagggcggagtcggaggcggtaggaaaagttgtcgtttttcgggaaagttgacggtttcggtagggtcgagggtggcggttcgagggttttcgatgttgggttaagtcgagggcgggggtcgtgggttggaagggcggggttcggtttcggagcgtttcggttattaaggggttaacgagcgggtttttgtagaaacg

SEQ ID NO: 4772 - DNA, 751 bp, Artificial Sequence
  chemically treated genomic DNA (Homo sapiens) CpG-island No: 4772
cgtttctacaaaaacccgctcgttaaccccttaataaccgaaacgctccgaaaccgaaccccgcccttccaacccacgacccccgccctcgacttaacccaacatcgaaaaccctcgaaccgccaccctcgaccctaccgaaaccgtcaactttcccgaaaaacgacaacttttcctaccgcctccgactccgccctcccgaaaccgaaacgccaacgaccccaacctaacgcgacactacgataactttccctaccgcccgactacgcttccctcgcctcgacaacccgaaacgaaccctacgactccgaaaaaaaaacgaaccgcccccctccgcgccccgccgcgaccgaactcgaatacaacgcgaacactcacctccaacgaacgccctcttcatcgtaaaaattaaacgaaacgcgccgaaaactaaaaatcgtttcgaaacgaacgcccgtctccccgcgaccgaatccgcatacaaacgcccgcgttacaaaccgaccccgacccgatcgcaaaactaaaatccgcgcgctacgcttcccccgactccgaccaaccctcgattcgccgatacccaaacccatcaaaaataatattaaaaacaacacaaaaccaacgtacgcgacactatcctcccgaccacccccgcgacccgcgacccaataaacacaatccgccacgacgtacaaacgaaaaccccccccccgcgaccccgtcgattacgaccgcttttaaaaacaacccc

SEQ ID NO: 4773 - DNA, 874 bp, Artificial Sequence
  chemically treated genomic DNA (Homo sapiens) CpG-island No: 4773
ggcgcgtcggcgcggagttcggatttcggttcgtaatgatttagtaagggtcggtgggatttttcgtggttttgcgatatttagacggcggagtttcgtttttaatgtcgcgcggggagtaggtaggtgcgagtttgggttgagtaaaattttttttggagttttcgtagaggagcggggcgcgttttttgaataagtaggcggcggggcgcggggtagggcggggtaggcggttaggttttttcgggattgtcgtaaaagggggcggagcgcgtcgcgcgtgggataatcgtaaaaggggcgggacgcgtcgcgttcgggatgtcgtgaagttgggggagttcgtcgtcgtcgtcggcggttagcgggcgttcgcgttatggagcgttacgcggtcgttttggaggaggtggcggacggtgttcggtagtaggagcgatattattagttgttgtcggcgttatagagtttggtgaaggagttgtttaggtacgtaggcggggcgggcggaggtttgcggaggcggtttcgtttttcgtcggggtttatcgcgtttttttattcgtagttttttttagtagcgtttgttttatattacgtttagcgatttggttttggcgtttttcgacggtatcgtgttcgaaatcgtgtaggggttattggagatttagtattttatcgaaaagagtttgtataattagcgtttgcgtttatagaacgagtatcgaggtgcgcgggggtagcgggatgaggtgtcgtttttttcgggtcggcgttttcgggtagtttttggtatttgtgtagattagttttttttttggaagtgttcggaagaggtttttaagattgataaaattaacgggcgtagagattg

SEQ ID NO: 4774 - DNA, 874 bp, Artificial Sequence
  chemically treated genomic DNA (Homo sapiens) CpG-island No: 4774
caatctctacgcccgttaattttatcaatcttaaaaacctcttccgaacacttccaaaaaaaaaactaatctacacaaataccaaaaactacccgaaaacgccgacccgaaaaaaacgacacctcatcccgctacccccgcgcacctcgatactcgttctataaacgcaaacgctaattatacaaactcttttcgataaaatactaaatctccaataacccctacacgatttcgaacacgataccgtcgaaaaacgccaaaaccaaatcgctaaacgtaatataaaacaaacgctactaaaaaaaactacgaataaaaaaacgcgataaaccccgacgaaaaacgaaaccgcctccgcaaacctccgcccgccccgcctacgtacctaaacaactccttcaccaaactctataacgccgacaacaactaataatatcgctcctactaccgaacaccgtccgccacctcctccaaaacgaccgcgtaacgctccataacgcgaacgcccgctaaccgccgacgacgacgacgaactcccccaacttcacgacatcccgaacgcgacgcgtcccgccccttttacgattatcccacgcgcgacgcgctccgcccccttttacgacaatcccgaaaaaacctaaccgcctaccccgccctaccccgcgccccgccgcctacttattcaaaaaacgcgccccgctcctctacgaaaactccaaaaaaaattttactcaacccaaactcgcacctacctactccccgcgcgacattaaaaacgaaactccgccgtctaaatatcgcaaaaccacgaaaaatcccaccgacccttactaaatcattacgaaccgaaatccgaactccgcgccgacgcgcc

SEQ ID NO: 4775 - DNA, 874 bp, Artificial Sequence
  chemically treated genomic DNA (Homo sapiens) CpG-island No: 4775
tagtttttgcgttcgttgattttgttaattttagagatttttttcgaatatttttaaggaaggagttgatttgtatagatattaagagttgttcggaggcgtcgattcggaggaggcggtattttatttcgttgttttcgcgtatttcggtgttcgttttgtaggcgtaggcgttggttgtataggtttttttcggtgaggtgttggatttttagtagtttttgtacgatttcgaatacggtgtcgtcgagaagcgttagggttaggtcgttgagcgtggtgtaggataggcgttgttggaaagagttgcgggtaggggggcgcggtgagtttcggcgggaaacgaagtcgttttcgtaggttttcgttcgtttcgtttgcgtatttgggtaatttttttattaggttttgtagcgtcgatagtaattggtagtgtcgtttttgttgtcgggtatcgttcgttattttttttaaggcggtcgcgtagcgttttatggcgcggacgttcgttagtcgtcggcggcggcgacgagtttttttagttttacgatatttcgagcgcggcgcgtttcgttttttttacgattgttttacgcgcggcgcgtttcgtttttttttacgatagtttcgagagggtttggtcgtttgtttcgttttgtttcgcgtttcgtcgtttgtttatttaggaggcgcgtttcgtttttttgcggagattttaaggagggttttgtttagtttaggttcgtatttgtttgtttttcgcgcgatattaaaggcgagatttcgtcgtttggatatcgtaggattacggagaattttatcggtttttgttgagttattgcgggtcgaggttcgggtttcgcgtcggcgcgtt

SEQ ID NO: 4776 - DNA, 874 bp, Artificial Sequence
  chemically treated genomic DNA (Homo sapiens) CpG-island No: 4776
aacgcgccgacgcgaaacccgaacctcgacccgcaataactcaacaaaaaccgataaaattctccgtaatcctacgatatccaaacgacgaaatctcgcctttaatatcgcgcgaaaaacaaacaaatacgaacctaaactaaacaaaaccctccttaaaatctccgcaaaaaaacgaaacgcgcctcctaaataaacaaacgacgaaacgcgaaacaaaacgaaacaaacgaccaaaccctctcgaaactatcgtaaaaaaaaacgaaacgcgccgcgcgtaaaacaatcgtaaaaaaaacgaaacgcgccgcgctcgaaatatcgtaaaactaaaaaaactcgtcgccgccgccgacgactaacgaacgtccgcgccataaaacgctacgcgaccgccttaaaaaaaataacgaacgatacccgacaacaaaaacgacactaccaattactatcgacgctacaaaacctaataaaaaaattacccaaatacgcaaacgaaacgaacgaaaacctacgaaaacgacttcgtttcccgccgaaactcaccgcgcccccctacccgcaactctttccaacaacgcctatcctacaccacgctcaacgacctaaccctaacgcttctcgacgacaccgtattcgaaatcgtacaaaaactactaaaaatccaacacctcaccgaaaaaaacctatacaaccaacgcctacgcctacaaaacgaacaccgaaatacgcgaaaacaacgaaataaaataccgcctcctccgaatcgacgcctccgaacaactcttaatatctatacaaatcaactccttccttaaaaatattcgaaaaaaatctctaaaattaacaaaatcaacgaacgcaaaaacta

SEQ ID NO: 4777 - DNA, 524 bp, Artificial Sequence
  chemically treated genomic DNA (Homo sapiens) CpG-island No: 4777
  unsure (136, 157, 396)
tatattataattagattttttatgcggtttttatatattttgttatattcgtagttagaattttttcggatggatttttgtaaatttttagttttatttcgggattcgtgcgttttttatagttattatttgggtntagcgtttaggacgtttaagncgtaatttttttattttaaatcgttaggaattagtggttggatttatcgcgttataaaagtataaattgtgattcgatgagttcgcgtattcggaaaataagagaacgtttttacgttttcgggcgtagtttgtgttagcgattattaggttagggggcgtagttgagagaatttaagtaattttttcgtaatcggtttcgtcgcgtttgtgggttggtagttcggaatatattttttnagaggttttcgcggtcgacgtgtttcgcgtaggaacgtagtcgtttttcgattggaggacgcggtagaggagttgtttaaagcgaggtgtttagttttgggaggtttagggttgttcgaggggtttag

SEQ ID NO: 4778 - DNA, 524 bp, Artificial Sequence
  chemically treated genomic DNA (Homo sapiens) CpG-island No: 4778
  unsure (129, 368, 389)
ctaaacccctcgaacaaccctaaacctcccaaaactaaacacctcgctttaaacaactcctctaccgcgtcctccaatcgaaaaacgactacgttcctacgcgaaacacgtcgaccgcgaaaacctctnaaaaaatatattccgaactaccaacccacaaacgcgacgaaaccgattacgaaaaaattacttaaattctctcaactacgccccctaacctaataatcgctaacacaaactacgcccgaaaacgtaaaaacgttctcttattttccgaatacgcgaactcatcgaatcacaatttatacttttataacgcgataaatccaaccactaattcctaacgatttaaaataaaaaaattacgncttaaacgtcctaaacgctanacccaaataataactataaaaaacgcacgaatcccgaaataaaactaaaaatttacaaaaatccatccgaaaaaattctaactacgaatataacaaaatatataaaaaccgcataaaaaatctaattataatata

SEQ ID NO: 4779 - DNA, 524 bp, Artificial Sequence
  chemically treated genomic DNA (Homo sapiens) CpG-island No: 4779
  unsure (129, 368, 389)
ttaagtttttcgggtagttttgagttttttagggttgagtatttcgttttgagtagtttttttatcgcgttttttagtcgggaggcggttgcgtttttgcgcgaagtacgtcggtcgcgaaggtttttngggaaatgtatttcgggttattagtttataaacgcggcggaatcggttgcggggaggttgtttgaatttttttagttgcgttttttgatttagtagtcgttggtataagttgcgttcggagacgtgggagcgtttttttgtttttcgagtgcgcggatttatcgggttatagtttatgtttttatgacgcggtgagtttagttattgatttttaacggtttagagtggggaggttacgntttgggcgttttggacgttgngtttaagtggtggttgtagaagacgtacggatttcgggatggggttggaggtttgtaagagtttattcgaggggattttggttgcgagtgtgatagagtatatgaaagtcgtatggaggatttgattgtagtgtg

SEQ ID NO: 4780 - DNA, 524 bp, Artificial Sequence
  chemically treated genomic DNA (Homo sapiens) CpG-island No: 4780
  unsure (136, 157, 396)
cacactacaatcaaatcctccatacgactttcatatactctatcacactcgcaaccaaaatcccctcgaataaactcttacaaacctccaaccccatcccgaaatccgtacgtcttctacaaccaccacttaaacncaacgtccaaaacgcccaaancgtaacctccccactctaaaccgttaaaaatcaataactaaactcaccgcgtcataaaaacataaactataacccgataaatccgcgcactcgaaaaacaaaaaaacgctcccacgtctccgaacgcaacttataccaacgactactaaatcaaaaaacgcaactaaaaaaattcaaacaacctccccgcaaccgattccgccgcgtttataaactaataacccgaaatacatttcccnaaaaaccttcgcgaccgacgtacttcgcgcaaaaacgcaaccgcctcccgactaaaaaacgcgataaaaaaactactcaaaacgaaatactcaaccctaaaaaactcaaaactacccgaaaaacttaa

SEQ ID NO: 4781 - DNA, 828 bp, Artificial Sequence
  chemically treated genomic DNA (Homo sapiens) CpG-island No: 4781
cgagtttcgtttaggtttcggttttcgtgggtcgggcgtcgggttttattttggttgtagtttttgtcgcggaagtcggttcgcgagtagtcgtatacggtttggtcgtttattacggagtatatattttcgttgaggtatatttcgttttcgtttttttcgttcgtttcgtacgggtttttttcgtcgttgttgggcggtttatcgtttagttttatttcgtcgttgtttacgggtaggatttgcgaggagttgatttttacgttacgaatttattttttgaagggttttcgtttttttatcgaggttagggtgagtttgagcgtcgcggcgcgtagtttcgggggtagtttttcgacgaaaaggtcgttgaatatcgttatgtttttgcgtttggatttgatttttatttatttggtttttatttggtcgatgaagagcgtggtgttgcggaattggcggcggatgcgtacgttgtgttaggcgtcgtcgttaatcggcgtgtcggttaggagcgtcgtaggtttagcgtagaagatggagaagttgagttgtaggcggtcgtcgcgcgttagaattagttttaggaagtcgtagaagttttcgtcgtcgaagtagagtacgaggtcgcgggcgttgcgagttttgagttggaagtttatttcgttttcgtagtaggcgttttatttggggaagcgcgtttattggttttcggcgttcggaaattttagttcgttgtttagtttcgtttagtagtttaggagtagtagcgagaggtatagaagaaaatagttttcgcgttggagtagcgtcgtttttatgttcggg

SEQ ID NO: 4782 - DNA, 828 bp, Artificial Sequence
  chemically treated genomic DNA (Homo sapiens) CpG-island No: 4782
cccgaacataaaaacgacgctactccaacgcgaaaactattttcttctatacctctcgctactactcctaaactactaaacgaaactaaacaacgaactaaaatttccgaacgccgaaaaccaataaacgcgcttccccaaataaaacgcctactacgaaaacgaaataaacttccaactcaaaactcgcaacgcccgcgacctcgtactctacttcgacgacgaaaacttctacgacttcctaaaactaattctaacgcgcgacgaccgcctacaactcaacttctccatcttctacgctaaacctacgacgctcctaaccgacacgccgattaacgacgacgcctaacacaacgtacgcatccgccgccaattccgcaacaccacgctcttcatcgaccaaataaaaaccaaataaataaaaatcaaatccaaacgcaaaaacataacgatattcaacgaccttttcgtcgaaaaactacccccgaaactacgcgccgcgacgctcaaactcaccctaacctcgataaaaaaacgaaaacccttcaaaaaataaattcgtaacgtaaaaatcaactcctcgcaaatcctacccgtaaacaacgacgaaataaaactaaacgataaaccgcccaacaacgacgaaaaaaacccgtacgaaacgaacgaaaaaaacgaaaacgaaatatacctcaacgaaaatatatactccgtaataaacgaccaaaccgtatacgactactcgcgaaccgacttccgcgacaaaaactacaaccaaaataaaacccgacgcccgacccacgaaaaccgaaacctaaacgaaactcg

SEQ ID NO: 4783 - DNA, 828 bp, Artificial Sequence
  chemically treated genomic DNA (Homo sapiens) CpG-island No: 4783
ttcgagtatggggacggcgttgttttagcgcgggggttgtttttttttgtgtttttcgttgttgtttttgggttgttgggcggagttgggtagcgggttggagttttcgggcgtcgagggttaatggacgcgtttttttaagtggaacgtttgttgcgagagcgagatgagtttttagtttaagattcgtagcgttcgcggtttcgtgttttatttcgacgacgagggtttttgcgattttttggagttgattttgacgcgcggcggtcgtttgtagtttagtttttttattttttgcgttgagtttgcgacgtttttggtcgatacgtcggttaacgacggcgtttggtatagcgtgcgtattcgtcgttagtttcgtaatattacgttttttatcgattaggtggaggttaagtgggtggaggttaagtttaagcgtagggatatgacggtgtttagcggttttttcgtcggggggttgttttcggaattgcgcgtcgcggcgtttaagtttattttggtttcggtgagggagcgggagttttttaaggggtggattcgtgacgtgagggttaatttttcgtaggttttgttcgtggatagcggcgaggtgaagttggacgatgagtcgtttaatagcggcgggggaagttcgtgcgaggcgggcgaggagggcgagggcggggtgtgttttaacggaggtgtgtgtttcgtggtggacgattaggtcgtgtgcgattgttcgcgaatcggttttcgcggtaaggattgtagttaaggtaaggttcgacgttcgatttacgggggtcggggtttgggcggggttcg

SEQ ID NO: 4784 - DNA, 828 bp, Artificial Sequence
  chemically treated genomic DNA (Homo sapiens) CpG-island No: 4784
cgaaccccgcccaaaccccgacccccgtaaatcgaacgtcgaaccttaccttaactacaatccttaccgcgaaaaccgattcgcgaacaatcgcacacgacctaatcgtccaccacgaaacacacacctccgttaaaacacaccccgccctcgccctcctcgcccgcctcgcacgaacttcccccgccgctattaaacgactcatcgtccaacttcacctcgccgctatccacgaacaaaacctacgaaaaattaaccctcacgtcacgaatccaccccttaaaaaactcccgctccctcaccgaaaccaaaataaacttaaacgccgcgacgcgcaattccgaaaacaaccccccgacgaaaaaaccgctaaacaccgtcatatccctacgcttaaacttaacctccacccacttaacctccacctaatcgataaaaaacgtaatattacgaaactaacgacgaatacgcacgctataccaaacgccgtcgttaaccgacgtatcgaccaaaaacgtcgcaaactcaacgcaaaaaataaaaaaactaaactacaaacgaccgccgcgcgtcaaaatcaactccaaaaaatcgcaaaaaccctcgtcgtcgaaataaaacacgaaaccgcgaacgctacgaatcttaaactaaaaactcatctcgctctcgcaacaaacgttccacttaaaaaaacgcgtccattaaccctcgacgcccgaaaactccaacccgctacccaactccgcccaacaacccaaaaacaacaacgaaaaacacaaaaaaaaacaacccccgcgctaaaacaacgccgtccccatactcgaa

SEQ ID NO: 4785 - DNA, 870 bp, Artificial Sequence
  chemically treated genomic DNA (Homo sapiens) CpG-island No: 4785
gtcggggcgggggcggagcgcgcgcgaagcgacgtttttagttcgcggtcgggttagggcggggagaggcgcggttacgtttaggcggttttcgttcgttttaatagcgcgtacgcggttatcgagttggaggaggcggcgggcgcgagattcggaatgcgtaggttttcgtttcgttttttttagttcgggtcgcggtttcgtttttttcgtagtcgtttcgtattcggtgttcgtttttcgaggtcggcggttgtttttattcggggtcgttgttgtttgtgtcgtgagcgtcgtttagttattgttttcgtcgtttcgttagtcgcgtcggatcgcgtattaggaggcgagagcgcgtatggggagtttttgttgatgtcgtcgtcgcgtcgtttttcgaggttgcgtttcgggaagttcggtttttcgagcgtttcggtttggttcggtgtttcggatttgagtgcgtttttatggaggcgttcgggttggtttaggcggtcgcggcggagagcgattttcgtaaggtggcggaggagattttcgacggggcgttcgcgttttgttttagttttgaggcgttgtcgtcggagtcgtttgtgtatagtttgtaggattttgatacgttggttatcgtgggtgagtgagtgcgggcggggattcggtttataggggcgcgcggcgtggtcgggacgttgtagtaggataaagggttttgggtgtcgattttttggggagggttttgattcgttatttcggttcggagttttcgtgcggggttgtatttgcgtttcgggttttttcgggtggagcgtattttttagttttttagtttaggtaagtattttcgatcggtcgggtgtttaa

SEQ ID NO: 4786 - DNA, 870 bp, Artificial Sequence
  chemically treated genomic DNA (Homo sapiens) CpG-island No: 4786
ttaaacacccgaccgatcgaaaatacttacctaaactaaaaaactaaaaaatacgctccacccgaaaaaacccgaaacgcaaatacaaccccgcacgaaaactccgaaccgaaataacgaatcaaaaccctccccaaaaaatcgacacccaaaaccctttatcctactacaacgtcccgaccacgccgcgcgcccctataaaccgaatccccgcccgcactcactcacccacgataaccaacgtatcaaaatcctacaaactatacacaaacgactccgacgacaacgcctcaaaactaaaacaaaacgcgaacgccccgtcgaaaatctcctccgccaccttacgaaaatcgctctccgccgcgaccgcctaaaccaacccgaacgcctccataaaaacgcactcaaatccgaaacaccgaaccaaaccgaaacgctcgaaaaaccgaacttcccgaaacgcaacctcgaaaaacgacgcgacgacgacatcaacaaaaactccccatacgcgctctcgcctcctaatacgcgatccgacgcgactaacgaaacgacgaaaacaataactaaacgacgctcacgacacaaacaacaacgaccccgaataaaaacaaccgccgacctcgaaaaacgaacaccgaatacgaaacgactacgaaaaaaacgaaaccgcgacccgaactaaaaaaaacgaaacgaaaacctacgcattccgaatctcgcgcccgccgcctcctccaactcgataaccgcgtacgcgctattaaaacgaacgaaaaccgcctaaacgtaaccgcgcctctccccgccctaacccgaccgcgaactaaaaacgtcgcttcgcgcgcgctccgcccccgccccgac

SEQ ID NO: 4787 - DNA, 870 bp, Artificial Sequence
  chemically treated genomic DNA (Homo sapiens) CpG-island No: 4787
ttaggtattcggtcggtcgggggtatttgtttgggttggggggttggggagtgcgttttattcgggaagattcggggcgtaggtgtagtttcgtacggggatttcgagtcgaagtagcgggttagggttttttttaggaggtcggtatttagggttttttgttttattataacgtttcggttacgtcgcgcgtttttgtgggtcgagttttcgttcgtatttatttatttacggtggttagcgtgttaaagttttgtaggttgtatataggcggtttcggcgatagcgttttagggttggggtagagcgcgggcgtttcgtcgggggtttttttcgttattttgcgggagtcgtttttcgtcgcggtcgtttgggttagttcgggcgtttttatggggacgtatttaggttcggggtatcgggttaggtcggagcgttcggggagtcgggtttttcgggacgtagtttcggagggcggcgcggcggcggtattaatagaggttttttatgcgcgttttcgttttttggtgcgcggttcggcgcggttgacggagcgacggggataatggttgggcggcgtttacggtataagtagtaacggtttcgagtgggagtagtcgtcggtttcggggggcgggtatcgagtgcgggacgattgcggggaaggcggggtcgcggttcgggttggggggggcgaggcgggggtttgcgtatttcgggtttcgcgttcgtcgttttttttagttcggtagtcgcgtgcgcgttgttggggcgggcggaagtcgtttgggcgtgatcgcgttttttttcgttttaattcggtcgcgggttgggggcgtcgtttcgcgcgcgtttcgttttcgtttcgat

SEQ ID NO: 4788 - DNA, 870 bp, Artificial Sequence
  chemically treated genomic DNA (Homo sapiens) CpG-island No: 4788
atcgaaacgaaaacgaaacgcgcgcgaaacgacgcccccaacccgcgaccgaattaaaacgaaaaaaaacgcgatcacgcccaaacgacttccgcccgccccaacaacgcgcacgcgactaccgaactaaaaaaaacgacgaacgcgaaacccgaaatacgcaaacccccgcctcgccccccccaacccgaaccgcgaccccgccttccccgcaatcgtcccgcactcgatacccgccccccgaaaccgacgactactcccactcgaaaccgttactacttataccgtaaacgccgcccaaccattatccccgtcgctccgtcaaccgcgccgaaccgcgcaccaaaaaacgaaaacgcgcataaaaaacctctattaataccgccgccgcgccgccctccgaaactacgtcccgaaaaacccgactccccgaacgctccgacctaacccgataccccgaacctaaatacgtccccataaaaacgcccgaactaacccaaacgaccgcgacgaaaaacgactcccgcaaaataacgaaaaaaacccccgacgaaacgcccgcgctctaccccaaccctaaaacgctatcgccgaaaccgcctatatacaacctacaaaactttaacacgctaaccaccgtaaataaataaatacgaacgaaaactcgacccacaaaaacgcgcgacgtaaccgaaacgttataataaaacaaaaaaccctaaataccgacctcctaaaaaaaaccctaacccgctacttcgactcgaaatccccgtacgaaactacacctacgccccgaatcttcccgaataaaacgcactccccaaccccccaacccaaacaaatacccccgaccgaccgaatacctaa

SEQ ID NO: 4789 - DNA, 619 bp, Artificial Sequence
  chemically treated genomic DNA (Homo sapiens) CpG-island No: 4789
gggacggtttgaggttcgcggtcgggttttttttttagatattcgcggaaagttcgaaaggaggcggaatacggtttagcggttcgttacggcgggtttattttttgtttagtcgtttcgtattttcgttttatcgtattgttgtattgttgtattgttgttttgttgttcgtttttcgtattattgattcgtttttttttcgttttttcgtttcgtcgtttcgtttttttttttcgtttttttatttcgtcgtttcgtttttttgttttatcgtcgggttgaattgtcgtttcgttttttagttacgttttttggtttttgtttttagtttcgtttttcgtttcgtcgtttcgtcgtttcgtcgttttgtcgttttgttattttgtcgttttgtcgttttgtcgttttgtcgttttgtcgtcggtggtcgttgttcgtggtgtttcgtcgttttcgttattttacgttttttcgtgcgtcgggagcgtttcggttataatatgttgggtatgattaagaattcgttgttcggaagcgtagagacgtggttttggtaggttttaagtaaaggggataaggtaggttcgtagggttgtcgaggatttgaaggattgttgt

SEQ ID NO: 4790 - DNA, 619 bp, Artificial Sequence
  chemically treated genomic DNA (Homo sapiens) CpG-island No: 4790
acaacaatccttcaaatcctcgacaaccctacgaacctaccttatcccctttacttaaaacctaccaaaaccacgtctctacgcttccgaacaacgaattcttaatcatacccaacatattataaccgaaacgctcccgacgcacgaaaaaacgtaaaataacgaaaacgacgaaacaccacgaacaacgaccaccgacgacaaaacgacaaaacgacaaaacgacaaaacgacaaaataacaaaacgacaaaacgacgaaacgacgaaacgacgaaacgaaaaacgaaactaaaaacaaaaaccaaaaaacgtaactaaaaaacgaaacgacaattcaacccgacgataaaacaaaaaaacgaaacgacgaaataaaaaaacgaaaaaaaaaaacgaaacgacgaaacgaaaaaacgaaaaaaaaacgaatcaataatacgaaaaacgaacaacaaaacaacaatacaacaatacaacaatacgataaaacgaaaatacgaaacgactaaacaaaaaataaacccgccgtaacgaaccgctaaaccgtattccgcctcctttcgaactttccgcgaatatctaaaaaaaaaacccgaccgcgaacctcaaaccgtccc

SEQ ID NO: 4791 - DNA, 619 bp, Artificial Sequence
  chemically treated genomic DNA (Homo sapiens) CpG-island No: 4791
gtagtaattttttaggttttcggtagttttgcgggtttattttgttttttttgtttaggatttgttaaggttacgtttttacgttttcgaatagcgagtttttgattatgtttaatatgttgtagtcgagacgttttcgacgtacgggaggacgtgaggtggcgggggcgacggagtattacgggtagcgattatcggcggtagggcggtagggcggtagggcggtagggcggtagggtggtagggcggtaaggcggcgggacggcgaggcggcgaggcgagaggcggggttagaggtaggggttagagggcgtggttagagggcggggcggtaatttagttcggcggtgaggtaagggggcgggacggcgaggtgaaggggcggagagagagggcggggcggcgaggcgagggggcggagagagggcgggttagtgatgcgaagggcgggtagtagggtagtagtgtagtagtgtagtagtgcggtgaggcgagggtgcgaggcggttaagtaagggatgggttcgtcgtggcgagtcgttgggtcgtgtttcgttttttttcgggtttttcgcgggtgtttggggagggaattcggtcgcgggttttaggtcgtttt

SEQ ID NO: 4792 - DNA, 619 bp, Artificial Sequence
  chemically treated genomic DNA (Homo sapiens) CpG-island No: 4792
aaaacgacctaaaacccgcgaccgaattccctccccaaacacccgcgaaaaacccgaaaaaaaacgaaacacgacccaacgactcgccacgacgaacccatcccttacttaaccgcctcgcaccctcgcctcaccgcactactacactactacactactaccctactacccgcccttcgcatcactaacccgccctctctccgccccctcgcctcgccgccccgccctctctctccgccccttcacctcgccgtcccgcccccttacctcaccgccgaactaaattaccgccccgccctctaaccacgccctctaacccctacctctaaccccgcctctcgcctcgccgcctcgccgtcccgccgccttaccgccctaccaccctaccgccctaccgccctaccgccctaccgccctaccgccgataatcgctacccgtaatactccgtcgcccccgccacctcacgtcctcccgtacgtcgaaaacgtctcgactacaacatattaaacataatcaaaaactcgctattcgaaaacgtaaaaacgtaaccttaacaaatcctaaacaaaaaaaacaaaataaacccgcaaaactaccgaaaacctaaaaaattactac

SEQ ID NO: 4793 - DNA, 501 bp, Artificial Sequence
  chemically treated genomic DNA (Homo sapiens) CpG-island No: 4793
gggacgatcgttttatttttattttttttggcgtaggtggtagcgttttgtcgtttcggttgttttttacgcgcgtttgagcggggtttttatagttaagttgcgtcgtttacgtgtttttcgtcgcgtggtttcggaatttttttgggagcggattttcgcgggtagttttttcgaggtttttaagggttttaggggtttttttgtttttattaaggcgtatttatcggttgttttgttcgtttgatagttttcgggttcgtcggtcgttaggttgttggagtttcgcgcgttcgggtgcgtatttgggtcgggcgggagggtgtgggttttttggagcgttttttagcgtaacgttacgtaaagtgtaggtggtcgtggattgggatcggggtgcgagaaatcggagttggttgtgggtagtagttttttgtgtgcgttttagtcgttttttaaagttagtgtaacgcgtaggttagttttatttgaagttgatttagg

SEQ ID NO: 4794 - DNA, 501 bp, Artificial Sequence
  chemically treated genomic DNA (Homo sapiens) CpG-island No: 4794
cctaaatcaacttcaaataaaactaacctacgcgttacactaactttaaaaaacgactaaaacgcacacaaaaaactactacccacaaccaactccgatttctcgcaccccgatcccaatccacgaccacctacactttacgtaacgttacgctaaaaaacgctccaaaaaacccacaccctcccgcccgacccaaatacgcacccgaacgcgcgaaactccaacaacctaacgaccgacgaacccgaaaactatcaaacgaacaaaacaaccgataaatacgccttaataaaaacaaaaaaacccctaaaacccttaaaaacctcgaaaaaactacccgcgaaaatccgctcccaaaaaaattccgaaaccacgcgacgaaaaacacgtaaacgacgcaacttaactataaaaaccccgctcaaacgcgcgtaaaaaacaaccgaaacgacaaaacgctaccacctacgccaaaaaaaataaaaataaaacgatcgtccc

SEQ ID NO: 4795 - DNA, 501 bp, Artificial Sequence
  chemically treated genomic DNA (Homo sapiens) CpG-island No: 4795
tttggattaattttaggtggagttgatttacgcgttgtattgattttgaagagcggttgaagcgtatataagaagttgttgtttatagttagtttcgatttttcgtatttcggttttaatttacggttatttgtattttgcgtaacgttgcgttggggggcgttttagagaatttatattttttcgttcggtttaggtgcgtattcgaacgcgcggggttttagtaatttggcggtcgacgggttcgggagttgttaggcgagtagaatagtcggtgagtgcgttttgatgggagtagaaaggtttttaggatttttggaggtttcggaggaattattcgcggagattcgtttttagaaaggtttcgggattacgcggcgaggagtacgtgaacggcgtagtttggttataaaaatttcgtttaagcgcgcgtggggagtaatcggagcggtaggacgttgttatttgcgttaggagagatagggatgaagcgatcgtttt

SEQ ID NO: 4796 - DNA, 501 bp, Artificial Sequence
  chemically treated genomic DNA (Homo sapiens) CpG-island No: 4796
aaaacgatcgcttcatccctatctctcctaacgcaaataacaacgtcctaccgctccgattactccccacgcgcgcttaaacgaaatttttataaccaaactacgccgttcacgtactcctcgccgcgtaatcccgaaacctttctaaaaacgaatctccgcgaataattcctccgaaacctccaaaaatcctaaaaacctttctactcccatcaaaacgcactcaccgactattctactcgcctaacaactcccgaacccgtcgaccgccaaattactaaaaccccgcgcgttcgaatacgcacctaaaccgaacgaaaaaatataaattctctaaaacgccccccaacgcaacgttacgcaaaatacaaataaccgtaaattaaaaccgaaatacgaaaaatcgaaactaactataaacaacaacttcttatatacgcttcaaccgctcttcaaaatcaatacaacgcgtaaatcaactccacctaaaattaatccaaa

SEQ ID NO: 4797 - DNA, 557 bp, Artificial Sequence
  chemically treated genomic DNA (Homo sapiens) CpG-island No: 4797
ttagttgacgttttttttgttaaagtaagaaaattataagtcgttataggagagcggattcggttatataaagcgaggcgttcgattagagggatttttagaggacgtttttcgttttcgggttcgttttcgtttagtttttgttcggcgtttcgcgtttattagtttttttttttttttttttagtttgataggcgttttagttcgtcgggtcgtagcggttttatttcgtttagtaagtcgttttcgttcgtcgttagtaaggaggtggcgtttcgtagtttttcgttattcgttcgtttcgggttcgattcgggttcgtcgttcgatttggcgttgaggtttaaggggaagtttcgaggagacgtcgcgtcggaggagggaatggacgcgtcggttcgaatcgggttgtcgggtttaagggagtcggcgttttgtacggttttcgagcggttttttagttgttcgttttgtttttttagtttttttattagtttttgtagttttcgtattttttggttcgcgtttacgttggagttatttttttttatttcggt

SEQ ID NO: 4798 - DNA, 557 bp, Artificial Sequence
  chemically treated genomic DNA (Homo sapiens) CpG-island No: 4798
accgaaataaaaaaaaataactccaacgtaaacgcgaaccaaaaaatacgaaaactacaaaaactaataaaaaaactaaaaaaacaaaacgaacaactaaaaaaccgctcgaaaaccgtacaaaacgccgactcccttaaacccgacaacccgattcgaaccgacgcgtccattccctcctccgacgcgacgtctcctcgaaacttccccttaaacctcaacgccaaatcgaacgacgaacccgaatcgaacccgaaacgaacgaataacgaaaaactacgaaacgccacctccttactaacgacgaacgaaaacgacttactaaacgaaataaaaccgctacgacccgacgaactaaaacgcctatcaaactaaaaaaaaaaaaaaaaaaactaataaacgcgaaacgccgaacaaaaactaaacgaaaacgaacccgaaaacgaaaaacgtcctctaaaaatccctctaatcgaacgcctcgctttatataaccgaatccgctctcctataacgacttataattttcttactttaacaaaaaaaacgtcaactaa

SEQ ID NO: 4799 - DNA, 557 bp, Artificial Sequence
  chemically treated genomic DNA (Homo sapiens) CpG-island No: 4799
gtcgggatggagaagagtgattttaacgtgaacgcggattagaaggtgcggaagttgtaggagttggtgaagaagttggagaagtagaacgaatagttgaggagtcgttcgggggtcgtgtagggcgtcggtttttttgggttcggtagttcggttcgggtcggcgcgtttattttttttttcggcgcggcgttttttcggggtttttttttgggttttagcgttaagtcgggcggcgggttcgggtcgggttcgaggcggacgagtagcgaagagttgcgggacgttatttttttgttagcggcgggcgagggcggtttgttggacgaggtggagtcgttgcggttcgacgagttggagcgtttgttaggttgggaggaggaggaggagagttggtgagcgcgaggcgtcgggtaggagttgggcggggacgggttcgggggcggagagcgttttttgagggtttttttggtcgggcgtttcgttttgtgtagtcgggttcgtttttttgtggcgatttgtggtttttttgttttggtagagggaacgttagttgg

SEQ ID NO: 4800 - DNA, 557 bp, Artificial Sequence
  chemically treated genomic DNA (Homo sapiens) CpG-island No: 4800
ccaactaacgttccctctaccaaaacaaaaaaaccacaaatcgccacaaaaaaacgaacccgactacacaaaacgaaacgcccgaccaaaaaaaccctcaaaaaacgctctccgcccccgaacccgtccccgcccaactcctacccgacgcctcgcgctcaccaactctcctcctcctcctcccaacctaacaaacgctccaactcgtcgaaccgcaacgactccacctcgtccaacaaaccgccctcgcccgccgctaacaaaaaaataacgtcccgcaactcttcgctactcgtccgcctcgaacccgacccgaacccgccgcccgacttaacgctaaaacccaaaaaaaaaccccgaaaaaacgccgcgccgaaaaaaaaaataaacgcgccgacccgaaccgaactaccgaacccaaaaaaaccgacgccctacacgacccccgaacgactcctcaactattcgttctacttctccaacttcttcaccaactcctacaacttccgcaccttctaatccgcgttcacgttaaaatcactcttctccatcccgac

SEQ ID NO: 4801 - DNA, 758 bp, Artificial Sequence
  chemically treated genomic DNA (Homo sapiens) CpG-island No: 4801
ggcgatgtcgtgggcggcgttttttttggcgatgttttgggcggcgttttcgttggcgatgttttgggcggcgttttcgttggcgatgttttgggcggcgttttttttggcgatgtcgtgggcggcgttttcgttggcgatgttttgggcggcgttttcgttggcgatgttttgggcggtattttcgttggcgatgtttttgtcggcggtttcgttagcgatgttttgggcggcgttttttttggcgatgttttgggcggcgttttttttggcgatgttttgggcggcgttttcgttggcgatgttttgggcggcgttttttttggcgatgttttgggcggcgttttcgttggcgatgttttgggcggcgttttcgttggcgatgtcgtggacggcgtattttttggcgatgttttggatggcgttttcgttggcgatgttttgggcggcgttttcgttggcgatgtcgtgggcggcgttttttttggcgatgtcgtgggcggcgtttttattggcgatgtcgtgggcggcgttttcgttggcgatgtcgtgggcggcgttttcgttggcgatgtcgtgggcggcgttttcgttggcgatgtttttgtcggcggtttcgttagcgatgtcgtgtatagtattttcgttagcgatgtcgtgtgtggcgttttcgttagtgatgtcgtgtacggtgtttttatggggagttagaaaaatatagagttaaggttagtgttttggtggtggagattgtgaat

SEQ ID NO: 4802 - DNA, 758 bp, Artificial Sequence
  chemically treated genomic DNA (Homo sapiens) CpG-island No: 4802
attcacaatctccaccaccaaaacactaaccttaactctatatttttctaactccccataaaaacaccgtacacgacatcactaacgaaaacgccacacacgacatcgctaacgaaaatactatacacgacatcgctaacgaaaccgccgacaaaaacatcgccaacgaaaacgccgcccacgacatcgccaacgaaaacgccgcccacgacatcgccaacgaaaacgccgcccacgacatcgccaataaaaacgccgcccacgacatcgccaaaaaaaacgccgcccacgacatcgccaacgaaaacgccgcccaaaacatcgccaacgaaaacgccatccaaaacatcgccaaaaaatacgccgtccacgacatcgccaacgaaaacgccgcccaaaacatcgccaacgaaaacgccgcccaaaacatcgccaaaaaaaacgccgcccaaaacatcgccaacgaaaacgccgcccaaaacatcgccaaaaaaaacgccgcccaaaacatcgccaaaaaaaacgccgcccaaaacatcgctaacgaaaccgccgacaaaaacatcgccaacgaaaataccgcccaaaacatcgccaacgaaaacgccgcccaaaacatcgccaacgaaaacgccgcccacgacatcgccaaaaaaaacgccgcccaaaacatcgccaacgaaaacgccgcccaaaacatcgccaacgaaaacgccgcccaaaacatcgccaaaaaaaacgccgcccacgacatcgcc

SEQ ID NO: 4803 - DNA, 758 bp, Artificial Sequence
  chemically treated genomic DNA (Homo sapiens) CpG-island No: 4803
atttatagtttttattattagggtattgattttaattttgtgtttttttagttttttatgaggatatcgtatacgatattattaacgaggacgttatatacgatatcgttaacgaggatattgtatacgatatcgttaacgaggtcgtcgataagggtatcgttaacgaggacgtcgtttacggtatcgttaacgaggacgtcgtttacggtatcgttagcgaggacgtcgtttacggtatcgttagtgaggacgtcgtttacggtatcgttagagaggacgtcgtttacggtatcgttagcgaggacgtcgtttagggtatcgttaacgaggacgttatttagggtatcgttaaggagtacgtcgtttacggtatcgttaacgaggacgtcgtttagggtatcgttaacgaggacgtcgtttagggtatcgttaaggaggacgtcgtttagggtatcgttaacgaggacgtcgtttagggtatcgttaaagaggacgtcgtttagggtatcgttaaggaggacgtcgtttagggtatcgttaacgaggtcgtcgataagggtatcgttaacgaggatgtcgtttagggtatcgttagcgaggacgtcgtttagggtatcgttagcgaggacgtcgtttacggtatcgttaaagaggacgtcgtttagggtatcgttaacgaggacgtcgtttagggtatcgttaacgaggacgtcgtttagggtatcgttaaagaggacgtcgtttacggtatcgtt

SEQ ID NO: 4804 - DNA, 758 bp, Artificial Sequence
  chemically treated genomic DNA (Homo sapiens) CpG-island No: 4804
aacgataccgtaaacgacgtcctctttaacgataccctaaacgacgtcctcgttaacgataccctaaacgacgtcctcgttaacgataccctaaacgacgtcctctttaacgataccgtaaacgacgtcctcgctaacgataccctaaacgacgtcctcgctaacgataccctaaacgacatcctcgttaacgatacccttatcgacgacctcgttaacgataccctaaacgacgtcctccttaacgataccctaaacgacgtcctctttaacgataccctaaacgacgtcctcgttaacgataccctaaacgacgtcctccttaacgataccctaaacgacgtcctcgttaacgataccctaaacgacgtcctcgttaacgataccgtaaacgacgtactccttaacgataccctaaataacgtcctcgttaacgataccctaaacgacgtcctcgctaacgataccgtaaacgacgtcctctctaacgataccgtaaacgacgtcctcactaacgataccgtaaacgacgtcctcgctaacgataccgtaaacgacgtcctcgttaacgataccgtaaacgacgtcctcgttaacgatacccttatcgacgacctcgttaacgatatcgtatacaatatcctcgttaacgatatcgtatataacgtcctcgttaataatatcgtatacgatatcctcataaaaaactaaaaaaacacaaaattaaaatcaataccctaataataaaaactataaat

SEQ ID NO: 4805 - DNA, 685 bp, Artificial Sequence
  chemically treated genomic DNA (Homo sapiens) CpG-island No: 4805
  unsure (577)
gtttattttaaagcgggaaaatcggtttttgcggttgttttagttcggagttcgtagtttcgtttcgatttgttcggaaaggttttttttttttttttcgtttcgggagttcggattttgttcggttcgttttagtttaatttatttgcgttttcgggatttatttgcgttttcgggatttatttgttcggtttttggggacgttttcgttttgtagtagtcgggattatttgatcggttgcgggtgagcgtgattaggtagttggagaaaaatttttcgtaggcggcgtcgtcgaagtttttaggtcgttcgaattcgtacgggtcgattttgtaaaatcgagagaaggaggtcggcgttttcgaagttttttttggggggatcgcgggttcgtcggggatcgtagtcgtcggggacgttcgtatttcgcgttatatatttggggatacgcgagcgttcggcgggttgtatgcggggagggaggcgcgtatcgagcgaggttagcgggttttaaagttacgtttcggtttcggggcgtttaagtttcgcgggtagaatcgggggcgtttttcgtangaattttcgcggtttggattcgggtgagaggagttttttttgcgatttttttaaattttagtgtttggtcgattcgattttgatatttgatttttatttttattttat

SEQ ID NO: 4806 - DNA, 685 bp, Artificial Sequence
  chemically treated genomic DNA (Homo sapiens) CpG-island No: 4806
  unsure (109)
ataaaataaaaataaaaatcaaatatcaaaatcgaatcgaccaaacactaaaatttaaaaaaatcgcaaaaaaaactcctctcacccgaatccaaaccgcgaaaattcntacgaaaaacgcccccgattctacccgcgaaacttaaacgccccgaaaccgaaacgtaactttaaaacccgctaacctcgctcgatacgcgcctccctccccgcatacaacccgccgaacgctcgcgtatccccaaatatataacgcgaaatacgaacgtccccgacgactacgatccccgacgaacccgcgatccccccaaaaaaaacttcgaaaacgccgacctccttctctcgattttacaaaatcgacccgtacgaattcgaacgacctaaaaacttcgacgacgccgcctacgaaaaatttttctccaactacctaatcacgctcacccgcaaccgatcaaataatcccgactactacaaaacgaaaacgtccccaaaaaccgaacaaataaatcccgaaaacgcaaataaatcccgaaaacgcaaataaattaaactaaaacgaaccgaacaaaatccgaactcccgaaacgaaaaaaaaaaaaaaaacctttccgaacaaatcgaaacgaaactacgaactccgaactaaaacaaccgcaaaaaccgattttcccgctttaaaataaac

SEQ ID NO: 4807 - DNA, 685 bp, Artificial Sequence
  chemically treated genomic DNA (Homo sapiens) CpG-island No: 4807
  unsure (109)
ataaaataaaaataggagttaggtgttagagtcgggtcggttaggtattgaggtttgaaggaatcgtagaagaagttttttttattcgggtttaggtcgcgggggtttntgcgggaggcgttttcgattttgttcgcgggatttaagcgtttcggagtcgggacgtaattttgggattcgttggtttcgttcggtgcgcgttttttttttcgtatgtagttcgtcgagcgttcgcgtgtttttaggtgtgtggcgcggggtgcgggcgttttcggcggttgcggttttcggcgggttcgcgatttttttagaggaaatttcggggacgtcggtttttttttttcggttttgtaggatcgattcgtacggattcgagcggtttgaggatttcgacgacgtcgtttacgagaagtttttttttagttatttggttacgtttattcgtagtcgattaaatggtttcggttgttgtagggcgggggcgtttttaggagtcggataggtgggtttcgggggcgtaggtgggtttcgagggcgtaggtgggttgggttgggacgggtcgggtaaagttcgggttttcggagcggagggagggggaggaattttttcgggtaggtcgggacgaagttgcgggtttcgagttagggtagtcgtagggatcggttttttcgttttgagatgggt

SEQ ID NO: 4808 - DNA, 685 bp, Artificial Sequence
  chemically treated genomic DNA (Homo sapiens) CpG-island No: 4808
  unsure (577)
acccatctcaaaacgaaaaaaccgatccctacgactaccctaactcgaaacccgcaacttcgtcccgacctacccgaaaaaattcctccccctccctccgctccgaaaacccgaactttacccgacccgtcccaacccaacccacctacgccctcgaaacccacctacgcccccgaaacccacctatccgactcctaaaaacgcccccgccctacaacaaccgaaaccatttaatcgactacgaataaacgtaaccaaataactaaaaaaaaacttctcgtaaacgacgtcgtcgaaatcctcaaaccgctcgaatccgtacgaatcgatcctacaaaaccgaaaaaaaaaaaccgacgtccccgaaatttcctctaaaaaaatcgcgaacccgccgaaaaccgcaaccgccgaaaacgcccgcaccccgcgccacacacctaaaaacacgcgaacgctcgacgaactacatacgaaaaaaaaaacgcgcaccgaacgaaaccaacgaatcccaaaattacgtcccgactccgaaacgcttaaatcccgcgaacaaaatcgaaaacgcctcccgcanaaacccccgcgacctaaacccgaataaaaaaaacttcttctacgattccttcaaacctcaatacctaaccgacccgactctaacacctaactcctatttttattttat

SEQ ID NO: 4809 - DNA, 732 bp, Artificial Sequence
  chemically treated genomic DNA (Homo sapiens) CpG-island No: 4809
taaaatcgatcggtacgtacgtttcgcggcgcggtcggtaggaatttaacgggtcggcgtcgagggttcgatggtcgtcgcggcggtttcggacgttttgaggttaggcggttgcgtcgaggggattcggtcgttcgtcggtcgttagtcgttcgtttatttattaatttcgggcggcggggcgtcgtttttcgtttcggttttttagttcgcgtttcgggtcggtttcgggtttttatatttatcgttttagtatttattttcgacgcgcggttttcgcgtagttaaatttgttatttgggttcgtttttatttgtttcgttttcgaatcgtatagggaagagggagggagcgggggcggagggggtagtcgtcgcgttagttaatcgtaggtcgagttgcgtttttgagcgggtcgtgattgggtttttttgtgatagatttttttttaatggttgttagttcggcgtcggtcgaagggatttttcgttttgttaagttcggtggaattaaagggaaagcgaaggggcggggtagagaagagcggcggatggaggcgggaagtttaagttgattgggcgaaaggttgtgggtgtcgcgttattattggttgatgttggagtcggggcggggcgttgcgttgttattagtttcgtttttcgtgttttcgttttagttgttaaaattgtagacgtttaggtttgggttgggttaagagtttagatgaaggtt

SEQ ID NO: 4810 - DNA, 732 bp, Artificial Sequence
  chemically treated genomic DNA (Homo sapiens) CpG-island No: 4810
aaccttcatctaaactcttaacccaacccaaacctaaacgtctacaattttaacaactaaaacgaaaacacgaaaaacgaaactaataacaacgcaacgccccgccccgactccaacatcaaccaataataacgcgacacccacaacctttcgcccaatcaacttaaacttcccgcctccatccgccgctcttctctaccccgccccttcgctttccctttaattccaccgaacttaacaaaacgaaaaatcccttcgaccgacgccgaactaacaaccattaaaaaaaaatctatcacaaaaaaacccaatcacgacccgctcaaaaacgcaactcgacctacgattaactaacgcgacgactaccccctccgcccccgctccctccctcttccctatacgattcgaaaacgaaacaaataaaaacgaacccaaataacaaatttaactacgcgaaaaccgcgcgtcgaaaataaatactaaaacgataaatataaaaacccgaaaccgacccgaaacgcgaactaaaaaaccgaaacgaaaaacgacgccccgccgcccgaaattaataaataaacgaacgactaacgaccgacgaacgaccgaatcccctcgacgcaaccgcctaacctcaaaacgtccgaaaccgccgcgacgaccatcgaaccctcgacgccgacccgttaaattcctaccgaccgcgccgcgaaacgtacgtaccgatcgatttta

SEQ ID NO: 4811 - DNA, 732 bp, Artificial Sequence
  chemically treated genomic DNA (Homo sapiens) CpG-island No: 4811
aatttttatttggatttttaatttagtttaaatttaagcgtttatagttttgatagttgaggcgggagtacgggaggcggagttggtggtagcgtagcgtttcgtttcggttttagtattagttaatggtgacgcggtatttatagtttttcgtttaattagtttgagtttttcgtttttattcgtcgtttttttttgtttcgttttttcgttttttttttggttttatcgagtttgatagagcggaaagttttttcggtcggcgtcgggttggtagttattggaggaaggtttgttatagggaggtttaattacggttcgtttaggagcgtagttcggtttacgattggttagcgcggcggttgtttttttcgttttcgtttttttttttttttttgtgcggttcggaggcggggtaggtgggggcgggtttaggtagtaggtttggttgcgcgggggtcgcgcgtcggaggtaaatattagggcggtgggtgtggggattcggggtcggttcgggacgcgggttggggagtcggggcgaggggcgacgtttcgtcgttcgaggttagtgaatgagcgggcggttggcggtcggcgggcggtcggattttttcggcgtagtcgtttggttttagggcgttcggagtcgtcgcggcgattatcgggttttcggcgtcggttcgttagatttttatcgatcgcgtcgcggggcgtacgtatcgatcgattttg

SEQ ID NO: 4812 - DNA, 732 bp, Artificial Sequence
  chemically treated genomic DNA (Homo sapiens) CpG-island No: 4812
caaaatcgatcgatacgtacgccccgcgacgcgatcgataaaaatctaacgaaccgacgccgaaaacccgataatcgccgcgacgactccgaacgccctaaaaccaaacgactacgccgaaaaaatccgaccgcccgccgaccgccaaccgcccgctcattcactaacctcgaacgacgaaacgtcgcccctcgccccgactccccaacccgcgtcccgaaccgaccccgaatccccacacccaccgccctaatatttacctccgacgcgcgacccccgcgcaaccaaacctactacctaaacccgcccccacctaccccgcctccgaaccgcacaaaaaaaaaaaaaaaaacgaaaacgaaaaaaacaaccgccgcgctaaccaatcgtaaaccgaactacgctcctaaacgaaccgtaattaaacctccctataacaaaccttcctccaataactaccaacccgacgccgaccgaaaaaactttccgctctatcaaactcgataaaaccaaaaaaaaaacgaaaaaacgaaacaaaaaaaaacgacgaataaaaacgaaaaactcaaactaattaaacgaaaaactataaataccgcgtcaccattaactaatactaaaaccgaaacgaaacgctacgctaccaccaactccgcctcccgtactcccgcctcaactatcaaaactataaacgcttaaatttaaactaaattaaaaatccaaataaaaatt

SEQ ID NO: 4813 - DNA, 1200 bp, Artificial Sequence
  chemically treated genomic DNA (Homo sapiens) CpG-island No: 4813
atgagcggggagggagatagtgaggaagggtaggaggaagtgagtcgaggaatgagggtaggatcgaggtaaggaaagagttaatggatttagacggggcgattttcggtaaattcgtttattcgttggttcggtttcgttaagtgttaggtgtcgcgttagtgcggggatttattgagttttggcgatcgttgttgtttttcgtagagcgtcggagtggagtcgttttttgttttttcgttttagggtcgttttcgcgttgttattcggttaggtcgggaattttcgggtttacgtttggttcgttcggcgtttgcgcggcgtatttacgtgacggtttaggttttcgtttcgtcggtttttttcgtttagtttttcgtttcgcgtttttcgtttttcgtttttcgtttttttttagttgcgagtgcggtttcggttggcggcggtattaggttagttgcgaggcgtgagtcgaacgggtcgggcggtagcgaacgcgggggtcgggcggtaagtaggtatcgttgggtcggggataagttagcggcgcggagttcgaggggcgcgggggcgggcgcgggtcggaggttcgggggcggcgatttgaggagagttcgcggtttgacgtggcggggacgcggtcggcgggattttcgggcgcgggcgcgtaggggtcgggatttggcgttcggttaggggttagggtgcgaggtttttttagcgcggttgttggcgcgtcggttttttggtattcgggcgggttttgttgtttgcggtaggttcgaatgcggtttttttggtcgcgatttttcgcgttggagcgggcggttttgtaataggcgggcgatttggggtcggtttgacgagttttagttttttcgatcgggttcggggattgtagtcgtaggagtttagttttgttagttttttcggttttttgagaggagtcggagatcgcgttgttagtgtaaaattattagagcgcgaagcgtcggttgttagttttgattattttagattcggtgcgggtcgagtcgagtggatttggggcgggtagcggggtatcgttatttttcgtttgggttttttattgggcgttttcgtttcggtttttcgcggggtcgagtgtttttaagacggttttttgggagatttttttagagcgtattttttggaaggttgtttcgttgggaattagta

SEQ ID NO: 4814 - DNA, 1200 bp, Artificial Sequence
  chemically treated genomic DNA (Homo sapiens) CpG-island No: 4814
tactaattcccaacgaaacaaccttccaaaaaatacgctctaaaaaaatctcccaaaaaaccgtcttaaaaacactcgaccccgcgaaaaaccgaaacgaaaacgcccaataaaaaacccaaacgaaaaataacgataccccgctacccgccccaaatccactcgactcgacccgcaccgaatctaaaataatcaaaactaacaaccgacgcttcgcgctctaataattttacactaacaacgcgatctccgactcctctcaaaaaaccgaaaaaactaacaaaactaaactcctacgactacaatccccgaacccgatcgaaaaaactaaaactcgtcaaaccgaccccaaatcgcccgcctattacaaaaccgcccgctccaacgcgaaaaatcgcgaccaaaaaaaccgcattcgaacctaccgcaaacaacaaaacccgcccgaataccaaaaaaccgacgcgccaacaaccgcgctaaaaaaacctcgcaccctaacccctaaccgaacgccaaatcccgacccctacgcgcccgcgcccgaaaatcccgccgaccgcgtccccgccacgtcaaaccgcgaactctcctcaaatcgccgcccccgaacctccgacccgcgcccgcccccgcgcccctcgaactccgcgccgctaacttatccccgacccaacgatacctacttaccgcccgacccccgcgttcgctaccgcccgacccgttcgactcacgcctcgcaactaacctaataccgccgccaaccgaaaccgcactcgcaactaaaaaaaaacgaaaaacgaaaaacgaaaaacgcgaaacgaaaaactaaacgaaaaaaaccgacgaaacgaaaacctaaaccgtcacgtaaatacgccgcgcaaacgccgaacgaaccaaacgtaaacccgaaaattcccgacctaaccgaataacaacgcgaaaacgaccctaaaacgaaaaaacaaaaaacgactccactccgacgctctacgaaaaacaacaacgatcgccaaaactcaataaatccccgcactaacgcgacacctaacacttaacgaaaccgaaccaacgaataaacgaatttaccgaaaatcgccccgtctaaatccattaactctttccttacctcgatcctaccctcattcctcgactcacttcctcctacccttcctcactatctccctccccgctcat

SEQ ID NO: 4815 - DNA, 1200 bp, Artificial Sequence
  chemically treated genomic DNA (Homo sapiens) CpG-island No: 4815
tgttgatttttagcggggtagttttttaaagggtgcgttttggaagaattttttagggagtcgttttggaggtattcggtttcgcggagggtcggagcgagggcgtttagtgaggagtttaggcggaaggtggcggtgtttcgttgttcgttttagatttattcggttcggttcgtatcggatttaaaatggttagaattggtagtcgacgtttcgcgttttggtgattttgtattgatagcgcgattttcggttttttttaggaaatcgggagagttggtaaggttgggtttttacggttgtagttttcgggttcgatcgagggaattgaggttcgttaggtcggttttaaatcgttcgtttgttgtaaggtcgttcgttttagcgcggagggtcgcggttaggaaggtcgtattcggatttgtcgtaggtaatagggttcgttcgggtgttaggaggtcggcgcgttagtagtcgcgttgaggaggtttcgtattttggtttttggtcgagcgttagatttcggtttttacgcgttcgcgttcggggatttcgtcggtcgcgttttcgttacgttaggtcgcgggttttttttaggtcgtcgttttcgagttttcggttcgcgttcgttttcgcgtttttcggatttcgcgtcgttagtttgttttcggtttagcgatgtttgtttgtcgttcgattttcgcgttcgttgtcgttcggttcgttcggtttacgtttcgtagttgatttggtgtcgtcgttagtcgaggtcgtattcgtagttggagggaggcgggaggcgggaggcgggaggcgcgaggcgggaggttgggcgagaggagtcggcggggcgggggtttgggtcgttacgtgggtgcgtcgcgtaggcgtcgggcgggttagacgtaggttcgggggttttcggtttggtcgggtagtagcgcgggggcggttttggggcggggagatagggggcggttttatttcggcgttttgcggaggatagtagcgatcgttaaggtttagtgagttttcgtattagcgcggtatttggtatttggcggggtcgaattaacgaatgagcgaatttgtcgagagtcgtttcgtttgaatttattgattttttttttgtttcggttttatttttatttttcgatttatttttttttgtttttttttattattttttttttcgtttat

SEQ ID NO: 4816 - DNA, 1200 bp, Artificial Sequence
  chemically treated genomic DNA (Homo sapiens) CpG-island No: 4816
ataaacgaaaaaaaaaataataaaaaaaaacaaaaaaaaataaatcgaaaaataaaaataaaaccgaaacaaaaaaaaaatcaataaattcaaacgaaacgactctcgacaaattcgctcattcgttaattcgaccccgccaaataccaaataccgcgctaatacgaaaactcactaaaccttaacgatcgctactatcctccgcaaaacgccgaaataaaaccgccccctatctccccgccccaaaaccgcccccgcgctactacccgaccaaaccgaaaacccccgaacctacgtctaacccgcccgacgcctacgcgacgcacccacgtaacgacccaaacccccgccccgccgactcctctcgcccaacctcccgcctcgcgcctcccgcctcccgcctcccgcctccctccaactacgaatacgacctcgactaacgacgacaccaaatcaactacgaaacgtaaaccgaacgaaccgaacgacaacgaacgcgaaaatcgaacgacaaacaaacatcgctaaaccgaaaacaaactaacgacgcgaaatccgaaaaacgcgaaaacgaacgcgaaccgaaaactcgaaaacgacgacctaaaaaaaacccgcgacctaacgtaacgaaaacgcgaccgacgaaatccccgaacgcgaacgcgtaaaaaccgaaatctaacgctcgaccaaaaaccaaaatacgaaacctcctcaacgcgactactaacgcgccgacctcctaacacccgaacgaaccctattacctacgacaaatccgaatacgaccttcctaaccgcgaccctccgcgctaaaacgaacgaccttacaacaaacgaacgatttaaaaccgacctaacgaacctcaattccctcgatcgaacccgaaaactacaaccgtaaaaacccaaccttaccaactctcccgatttcctaaaaaaaaccgaaaatcgcgctatcaatacaaaatcaccaaaacgcgaaacgtcgactaccaattctaaccattttaaatccgatacgaaccgaaccgaataaatctaaaacgaacaacgaaacaccgccaccttccgcctaaactcctcactaaacgccctcgctccgaccctccgcgaaaccgaatacctccaaaacgactccctaaaaaattcttccaaaacgcaccctttaaaaaactaccccgctaaaaatcaaca

SEQ ID NO: 4817 - DNA, 814 bp, Artificial Sequence
  chemically treated genomic DNA (Homo sapiens) CpG-island No: 4817
cggtttcgaggcgttgggagcgggggtgggtttgcggagtcgcgttcgtgttttcgattcgttttttcgtttcgggtttggtttacgtagtgggcgcgtaggggcggttgtttcggtagatgtttagggagcggagggaaaggcgcgggaatcggggatttttcgggcggattttttttttattagcgttcggcgggttttttttaagttcgtttttaagtttgcgagcggttaaatgggggcgggggttgcgcggaggggcggtggttaggtcggagggtggggtttggagcgcggggcgggcgttgtcgtttggtcggtcgcggttggttcgggattagggagtcgatgtggaattttttgttcggttcggcgttttttttgtcgtttttcgttcggtttcgtatttcgttttcggtcgttttcgttgcggtcgtattcgcgttcgtgttcgtttcgcgtttgtttcgcgttttatggagggcgtagggtttcggggggtcgggtcggcgcggcgtcggggagtcggggggtcgtcgttatcgttgttgtcgtcgttgttgttgttgttgttgttttggatgttgtcggatatcgtggcgttttaggaattgaattttcgcggtcgtaacgtgtgtcgtgttttcgggtaggagtcggtttggttgggggagggggcgagagggacgttttgggtagtggtgtggcggcgtcgggtattgggagggggttatcggaatttttttacgttaagtgtgggttttttcggttttttagttagcgcggtttcgttttaggtttagtttcggttatg

SEQ ID NO: 4818 - DNA, 814 bp, Artificial Sequence
  chemically treated genomic DNA (Homo sapiens) CpG-island No: 4818
cataaccgaaactaaacctaaaacgaaaccgcgctaactaaaaaaccgaaaaaacccacacttaacgtaaaaaaattccgataaccccctcccaatacccgacgccgccacaccactacccaaaacgtccctctcgccccctcccccaaccaaaccgactcctacccgaaaacacgacacacgttacgaccgcgaaaattcaattcctaaaacgccacgatatccgacaacatccaaaacaacaacaacaacaacaacgacgacaacaacgataacgacgaccccccgactccccgacgccgcgccgacccgaccccccgaaaccctacgccctccataaaacgcgaaacaaacgcgaaacgaacacgaacgcgaatacgaccgcaacgaaaacgaccgaaaacgaaatacgaaaccgaacgaaaaacgacaaaaaaaacgccgaaccgaacaaaaaattccacatcgactccctaatcccgaaccaaccgcgaccgaccaaacgacaacgcccgccccgcgctccaaaccccaccctccgacctaaccaccgcccctccgcgcaacccccgcccccatttaaccgctcgcaaacttaaaaacgaacttaaaaaaaacccgccgaacgctaataaaaaaaaaatccgcccgaaaaatccccgattcccgcgcctttccctccgctccctaaacatctaccgaaacaaccgcccctacgcgcccactacgtaaaccaaacccgaaacgaaaaaacgaatcgaaaacacgaacgcgactccgcaaacccacccccgctcccaacgcctcgaaaccg

SEQ ID NO: 4819 - DNA, 814 bp, Artificial Sequence
  chemically treated genomic DNA (Homo sapiens) CpG-island No: 4819
tatggtcgaggttgggtttggaacggagtcgcgttggttagggagtcgaaggggtttatatttggcgtaggaaggtttcggtagtttttttttaatgttcggcgtcgttatattattgtttagagcgtttttttcgtttttttttttagttaggtcggtttttattcgggagtacggtatacgttgcggtcgcgagggtttagtttttgaggcgttacggtgttcggtagtatttagagtagtagtagtagtagtagcgacggtagtagcggtgacggcggtttttcggtttttcggcgtcgcgtcggttcggtttttcggggttttgcgttttttatgaggcgcggggtaggcgcggggcgggtacgggcgcgggtgcggtcgtagcgagagcggtcggaagcggagtgcgaggtcgggcggggggcggtaggaggggcgtcgagtcgggtaggaaattttatatcggttttttgatttcgggttagtcgcggtcggttaggcggtagcgttcgtttcgcgttttagattttatttttcggtttagttatcgttttttcgcgtagttttcgtttttatttggtcgttcgtaaatttgggggcgaatttggaggaggttcgtcgagcgttggtggagggagggttcgttcgaggaattttcggttttcgcgttttttttttcgttttttagatatttatcgaagtagtcgtttttgcgcgtttattgcgtaggttaggttcgggacgggaaggcggatcggggatacggacgcgatttcgtaagtttattttcgtttttagcgtttcggaatcg

SEQ ID NO: 4820 - DNA, 814 bp, Artificial Sequence
  chemically treated genomic DNA (Homo sapiens) CpG-island No: 4820
cgattccgaaacgctaaaaacgaaaataaacttacgaaatcgcgtccgtatccccgatccgccttcccgtcccgaacctaacctacgcaataaacgcgcaaaaacgactacttcgataaatatctaaaaaacgaaaaaaaaaacgcgaaaaccgaaaattcctcgaacgaaccctccctccaccaacgctcgacgaacctcctccaaattcgcccccaaatttacgaacgaccaaataaaaacgaaaactacgcgaaaaaacgataactaaaccgaaaaataaaatctaaaacgcgaaacgaacgctaccgcctaaccgaccgcgactaacccgaaatcaaaaaaccgatataaaatttcctacccgactcgacgcccctcctaccgccccccgcccgacctcgcactccgcttccgaccgctctcgctacgaccgcacccgcgcccgtacccgccccgcgcctaccccgcgcctcataaaaaacgcaaaaccccgaaaaaccgaaccgacgcgacgccgaaaaaccgaaaaaccgccgtcaccgctactaccgtcgctactactactactactactctaaatactaccgaacaccgtaacgcctcaaaaactaaaccctcgcgaccgcaacgtataccgtactcccgaataaaaaccgacctaactaaaaaaaaaaacgaaaaaaacgctctaaacaataatataacgacgccgaacattaaaaaaaaactaccgaaaccttcctacgccaaatataaaccccttcgactccctaaccaacgcgactccgttccaaacccaacctcgaccata

SEQ ID NO: 4821 - DNA, 526 bp, Artificial Sequence
  chemically treated genomic DNA (Homo sapiens) CpG-island No: 4821
tgttacgcgcggcgttggggcgcgcgttgcgagtatgcgtgttagtgttagtacggtacgtgttattcgcggagcggcgcgtgtcgttgtgagttcggttggtggggcgcgtagtgcgttagcgcgtgttattgtagcgttacgtcgcgttgcgatttatagatcggcgtttgtttgtgttacgtaggttggtggggtcgtagttgtaataattagtgcgtttgtaattcgtttttttgcgagtagtagagcggtcgttgttagtgtcgcgagcgtacgttcggcgcgcgttgcgatcgttattgttagtgttttcgcggtcgttgttattttgtggacggtacgtgtgtttgcgagtcgggttatcgcggtaagtattgtcgcgagtcgtgtttcgtcggtttttacggtttgggttgtcgtcgtcggtaagcgcggtttttcggttagggagggaggaggtggaagggcgggtcgtcgatggggataggggtgaggcgggttttagttttttttagttttcgat

SEQ ID NO: 4822 - DNA, 526 bp, Artificial Sequence
  chemically treated genomic DNA (Homo sapiens) CpG-island No: 4822
atcgaaaactaaaaaaaactaaaacccgcctcacccctatccccatcgacgacccgcccttccacctcctccctccctaaccgaaaaaccgcgcttaccgacgacgacaacccaaaccgtaaaaaccgacgaaacacgactcgcgacaatacttaccgcgataacccgactcgcaaacacacgtaccgtccacaaaataacaacgaccgcgaaaacactaacaataacgatcgcaacgcgcgccgaacgtacgctcgcgacactaacaacgaccgctctactactcgcaaaaaaacgaattacaaacgcactaattattacaactacgaccccaccaacctacgtaacacaaacaaacgccgatctataaatcgcaacgcgacgtaacgctacaataacacgcgctaacgcactacgcgccccaccaaccgaactcacaacgacacgcgccgctccgcgaataacacgtaccgtactaacactaacacgcatactcgcaacgcgcgccccaacgccgcgcgtaaca

SEQ ID NO: 4823 - DNA, 526 bp, Artificial Sequence
  chemically treated genomic DNA (Homo sapiens) CpG-island No: 4823
gtcggaggttagggaaggttgggattcgttttatttttgtttttatcggcggttcgtttttttattttttttttttttggtcgagagatcgcgtttatcggcggcgatagtttaagtcgtagaagtcggcggggtacggttcgcgatagtatttgtcgcggtagttcggttcgtaggtatacgtgtcgtttatagggtggtagcggtcgcggaagtattggtagtagcgatcgtagcgcgcgtcgaacgtacgttcgcggtattgatagcggtcgttttgttgttcgtagggagacgagttgtaggcgtattggttgttgtagttgcggttttattagtttgcgtggtataggtaggcgtcggtttgtgggtcgtagcgcgacgtggcgttgtagtagtacgcgttggcgtattgcgcgttttattagtcgggtttatagcggtacgcgtcgtttcgcgggtggtacgtgtcgtgttggtattggtacgtatgttcgtagcgcgcgttttagcgtcgcgcgtgata

SEQ ID NO: 4824 - DNA, 526 bp, Artificial Sequence
  chemically treated genomic DNA (Homo sapiens) CpG-island No: 4824
tatcacgcgcgacgctaaaacgcgcgctacgaacatacgtaccaataccaacacgacacgtaccacccgcgaaacgacgcgtaccgctataaacccgactaataaaacgcgcaatacgccaacgcgtactactacaacgccacgtcgcgctacgacccacaaaccgacgcctacctataccacgcaaactaataaaaccgcaactacaacaaccaatacgcctacaactcgtctccctacgaacaacaaaacgaccgctatcaataccgcgaacgtacgttcgacgcgcgctacgatcgctactaccaatacttccgcgaccgctaccaccctataaacgacacgtatacctacgaaccgaactaccgcgacaaatactatcgcgaaccgtaccccgccgacttctacgacttaaactatcgccgccgataaacgcgatctctcgaccaaaaaaaaaaaaaataaaaaaacgaaccgccgataaaaacaaaaataaaacgaatcccaaccttccctaacctccgac

SEQ ID NO: 4825 - DNA, 510 bp, Artificial Sequence
  chemically treated genomic DNA (Homo sapiens) CpG-island No: 4825
aagggcgtgatgggcgcgggcgcgttgttcgttttgttcgtttgtttgttgttttcgttgttcggttgttgttgcgtttgtcgcggtaaggattttacgcgtcggtgagtttagatattgtttcgttttcgtttgggtttaggtcgtattttttgggtgttatcggatttagatttaattttttcgcgtttttgtttcggacgtggtttcgttttttttgtgtttggtttcggtcgagatttaatcgtttttgggtttcgtttcggtttcgttttttcgtttagatttcgttttcgtagggagttttcgtttgggaggaagaaggcgtcgtatcgattatgcgggcgttttagtcgtattagtatgaagttgtttcggatttcgtttcggaggtagaaattatttaaagtcgtaggtaaggatgatagcgcggggtatttgggagaaatatttttcgacgtaggaagttgttgggaaatgggtgtgagggggtttagattttagtgagga

SEQ ID NO: 4826 - DNA, 510 bp, Artificial Sequence
  chemically treated genomic DNA (Homo sapiens) CpG-island No: 4826
tcctcactaaaatctaaaccccctcacacccatttcccaacaacttcctacgtcgaaaaatatttctcccaaataccccgcgctatcatccttacctacgactttaaataatttctacctccgaaacgaaatccgaaacaacttcatactaatacgactaaaacgcccgcataatcgatacgacgccttcttcctcccaaacgaaaactccctacgaaaacgaaatctaaacgaaaaaacgaaaccgaaacgaaacccaaaaacgattaaatctcgaccgaaaccaaacacaaaaaaaacgaaaccacgtccgaaacaaaaacgcgaaaaaattaaatctaaatccgataacacccaaaaaatacgacctaaacccaaacgaaaacgaaacaatatctaaactcaccgacgcgtaaaatccttaccgcgacaaacgcaacaacaaccgaacaacgaaaacaacaaacaaacgaacaaaacgaacaacgcgcccgcgcccatcacgccctt

SEQ ID NO: 4827 - DNA, 510 bp, Artificial Sequence
  chemically treated genomic DNA (Homo sapiens) CpG-island No: 4827
tttttattgagatttggatttttttatatttattttttagtagttttttgcgtcgagaggtgttttttttagatatttcgcgttgttatttttatttacgattttgggtagtttttgttttcggagcgggattcggggtagttttatgttgatgcgattgaagcgttcgtatagtcggtgcggcgtttttttttttttaagcgaaagttttttgcgggggcggggtttgagcggaggggcggggtcggggcggggtttaggggcgattagatttcggtcggagttaagtatagaaggggcggggttacgttcggggtaggggcgcggaagggttggatttgggttcggtggtatttagagggtgcggtttgaatttaggcgaaagcggggtagtatttgggtttatcggcgcgtagggtttttgtcgcggtaagcgtagtagtagtcgagtagcgagagtagtaggtagacgagtaggacgagtagcgcgttcgcgtttattacgttttt

SEQ ID NO: 4828 - DNA, 510 bp, Artificial Sequence
  chemically treated genomic DNA (Homo sapiens) CpG-island No: 4828
aaaaacgtaataaacgcgaacgcgctactcgtcctactcgtctacctactactctcgctactcgactactactacgcttaccgcgacaaaaaccctacgcgccgataaacccaaatactaccccgctttcgcctaaattcaaaccgcaccctctaaataccaccgaacccaaatccaacccttccgcgcccctaccccgaacgtaaccccgccccttctatacttaactccgaccgaaatctaatcgcccctaaaccccgccccgaccccgcccctccgctcaaaccccgcccccgcaaaaaactttcgcttaaaaaaaaaaaaacgccgcaccgactatacgaacgcttcaatcgcatcaacataaaactaccccgaatcccgctccgaaaacaaaaactacccaaaatcgtaaataaaaataacaacgcgaaatatctaaaaaaaacacctctcgacgcaaaaaactactaaaaaataaatataaaaaaatccaaatctcaataaaaa

SEQ ID NO: 4829 - DNA, 1063 bp, Artificial Sequence
  chemically treated genomic DNA (Homo sapiens) CpG-island No: 4829
cgtcggcgtcgttttttgtgtttttgattacgttagttttcgtcgaggaggcgatattttttttcgcgtttttcgatagcgagcggtcggcgtttagcgtggaggggttcggaggggttttgtacgcgcgcgtggttcgacgcgaggttcggtcggttcgggttcggggcgagattgggggtttgtcgttgtcgttatcgttcgagcgtaggaaatcgtcgttatttgatttcgttattaagtttaaggtgttttggatttacggtaagtatagcgtcgttgtagttggtcgtgcgtttttattatcgtcgttaggtttcgaggtcgcgtttagttttagtaagaggaaacggacgtttagcgataaatcggcgtatacggtcgaatacggtagttttcggattcgcgatttaacgtcgcgtttttcggggttgttcgaggaggcgatagttttcgttgcgttttcgtcgtttagggttcgagcgcgcgtcgcgtttcggttttttggagtttacggacgtcggcggtttttcgcgaagcgcgtcgaggttgtttttatgttggtcgttgacgtgcgcggtaagattcgtagtttgggtcgcgtcgaggtggttttgggcgcgtagggttttagggaaaagtcggcgtttttatagaaagttaagcgtttcgtgtcgttagtttcgttcgttcgcgcgtttttagcgatcgaaatttcggggtttgagaaggcggcgatcgatttgttcgcgtttgagatttttcggaagaagatttttatttagaagtcgtcgcgtaagaagagtcgggaggcggcgggcgagttgggtagggcgggcgtatttattttgtagtaggttgtggttcgttcgcgcgtagtttttttagtttcgtagcgtcgttcgttattttatattttttacgttatcgggtacgggcggttttttattggtcgggtatcgcgcggttagcggaggttgcgttttattggtttaggttttgtagtcgtttttggattggagtagtgtgttttggcgggaagggtttatttcgttggtcgagg

SEQ ID NO: 4830 - DNA, 1063 bp, Artificial Sequence
  chemically treated genomic DNA (Homo sapiens) CpG-island No: 4830
cctcgaccaacgaaataaacccttcccgccaaaacacactactccaatccaaaaacgactacaaaacctaaaccaataaaacgcaacctccgctaaccgcgcgatacccgaccaataaaaaaccgcccgtacccgataacgtaaaaaatataaaataacgaacgacgctacgaaactaaaaaaactacgcgcgaacgaaccacaacctactacaaaataaatacgcccgccctacccaactcgcccgccgcctcccgactcttcttacgcgacgacttctaaataaaaatcttcttccgaaaaatctcaaacgcgaacaaatcgatcgccgccttctcaaaccccgaaatttcgatcgctaaaaacgcgcgaacgaacgaaactaacgacacgaaacgcttaactttctataaaaacgccgacttttccctaaaaccctacgcgcccaaaaccacctcgacgcgacccaaactacgaatcttaccgcgcacgtcaacgaccaacataaaaacaacctcgacgcgcttcgcgaaaaaccgccgacgtccgtaaactccaaaaaaccgaaacgcgacgcgcgctcgaaccctaaacgacgaaaacgcaacgaaaactatcgcctcctcgaacaaccccgaaaaacgcgacgttaaatcgcgaatccgaaaactaccgtattcgaccgtatacgccgatttatcgctaaacgtccgtttcctcttactaaaactaaacgcgacctcgaaacctaacgacgataataaaaacgcacgaccaactacaacgacgctatacttaccgtaaatccaaaacaccttaaacttaataacgaaatcaaataacgacgatttcctacgctcgaacgataacgacaacgacaaacccccaatctcgccccgaacccgaaccgaccgaacctcgcgtcgaaccacgcgcgcgtacaaaacccctccgaacccctccacgctaaacgccgaccgctcgctatcgaaaaacgcgaaaaaaaatatcgcctcctcgacgaaaactaacgtaatcaaaaacacaaaaaacgacgccgacg

SEQ ID NO: 4831 - DNA, 1063 bp, Artificial Sequence
  chemically treated genomic DNA (Homo sapiens) CpG-island No: 4831
tttcgattaacgggatgggtttttttcgttagagtatattgttttaatttaggagcggttgtaggatttgagttaatgagacgtaattttcgttagtcgcgcggtgttcggttaataggaggtcgttcgtgttcggtagcgtgggaggtgtggggtggcgggcggcgttgcgaagttgagggagttgcgcgcggacgagttatagtttgttatagggtgggtgcgttcgttttgtttagttcgttcgtcgtttttcggttttttttgcgcggcggtttttggatgggggttttttttcggggggttttaggcgcgggtaagtcggtcgtcgtttttttaggtttcggggtttcggtcgttgggggcgcgcgggcgggcgaggttggcggtacggagcgtttggttttttgtgggggcgtcggtttttttttggggttttgcgcgtttagggttatttcggcgcggtttaggttgcgagttttgtcgcgtacgttagcggttaatatggaggtagtttcggcgcgtttcgcgggggatcgtcggcgttcgtgggttttaagaggtcggggcgcggcgcgcgttcgggttttgggcggcgagggcgtagcgagggttgtcgttttttcgggtagtttcggggggcgcggcgttgggtcgcgggttcgggggttgtcgtgttcgatcgtatgcgtcgatttgtcgttgggcgttcgtttttttttgttggggttgggcgcggtttcggagtttggcggcggtggtgagggcgtacggttagttgtagcggcgttgtgtttgtcgtggatttaggatattttaggtttggtggcggggttaggtggcggcggttttttgcgttcgggcgatggcgatagcgataggtttttaatttcgtttcgggttcgggtcggtcgggtttcgcgtcgggttacgcgcgcgtatagagttttttcgggtttttttacgttggacgtcgatcgttcgttgtcggaggacgcggggaggggtatcgttttttcggcggaggttggcgtggttaagggtataggggacggcgtcggcg

SEQ ID NO: 4832 - DNA, 1063 bp, Artificial Sequence
  chemically treated genomic DNA (Homo sapiens) CpG-island No: 4832
cgccgacgccgtcccctatacccttaaccacgccaacctccgccgaaaaaacgatacccctccccgcgtcctccgacaacgaacgatcgacgtccaacgtaaaaaaacccgaaaaaactctatacgcgcgcgtaacccgacgcgaaacccgaccgacccgaacccgaaacgaaattaaaaacctatcgctatcgccatcgcccgaacgcaaaaaaccgccgccacctaaccccgccaccaaacctaaaatatcctaaatccacgacaaacacaacgccgctacaactaaccgtacgccctcaccaccgccgccaaactccgaaaccgcgcccaaccccaacaaaaaaaaacgaacgcccaacgacaaatcgacgcatacgatcgaacacgacaacccccgaacccgcgacccaacgccgcgccccccgaaactacccgaaaaaacgacaaccctcgctacgccctcgccgcccaaaacccgaacgcgcgccgcgccccgacctcttaaaacccacgaacgccgacgatcccccgcgaaacgcgccgaaactacctccatattaaccgctaacgtacgcgacaaaactcgcaacctaaaccgcgccgaaataaccctaaacgcgcaaaaccccaaaaaaaaaccgacgcccccacaaaaaaccaaacgctccgtaccgccaacctcgcccgcccgcgcgcccccaacgaccgaaaccccgaaacctaaaaaaacgacgaccgacttacccgcgcctaaaaccccccgaaaaaaaacccccatccaaaaaccgccgcgcaaaaaaaaccgaaaaacgacgaacgaactaaacaaaacgaacgcacccaccctataacaaactataactcgtccgcgcgcaactccctcaacttcgcaacgccgcccgccaccccacacctcccacgctaccgaacacgaacgacctcctattaaccgaacaccgcgcgactaacgaaaattacgtctcattaactcaaatcctacaaccgctcctaaattaaaacaatatactctaacgaaaaaaacccatcccgttaatcgaaa

SEQ ID NO: 4833 - DNA, 538 bp, Artificial Sequence
  chemically treated genomic DNA (Homo sapiens) CpG-island No: 4833
tttcgttcgtgtggatgcggtggtggcgtgtgaggtgtgtacgttggttgaaggttttgtcgtattcgtcgtatcggtagggtttttcgtcggtgtgtattcgtaggtgtatgttgagtagcgagttgtagttgaaggttttttcgtaggcgttgtatttgtagggtcgttcgttcgtgtggatgcgttggtgtacgttgagggacgagtggtagttgaaggttttttcgtattcgtcgtagaagaagggtttttcgtcggtgtggatgcgtcggtgttttagaaggttggtgttttaggtgaaggttttgtcgtatttatcgtatttgtaagttttttttcggttgtgttagcgtcggtgtagcgtgagggaggagttttggcggaacgttttttcgtattcgtcgtatacgaattcgtttttttcggcgttcgtttcgcgttgtcggcgtatttgggggaatttttttggtttatttggcgtggaggcgtttttttttgtatatagtttcgcgggggttttggttttgtttttagt

SEQ ID NO: 4834 - DNA, 538 bp, Artificial Sequence
  chemically treated genomic DNA (Homo sapiens) CpG-island No: 4834
actaaaaacaaaaccaaaacccccgcgaaactatatacaaaaaaaaacgcctccacgccaaataaaccaaaaaaattcccccaaatacgccgacaacgcgaaacgaacgccgaaaaaaacgaattcgtatacgacgaatacgaaaaaacgttccgccaaaactcctccctcacgctacaccgacgctaacacaaccgaaaaaaaacttacaaatacgataaatacgacaaaaccttcacctaaaacaccaaccttctaaaacaccgacgcatccacaccgacgaaaaacccttcttctacgacgaatacgaaaaaaccttcaactaccactcgtccctcaacgtacaccaacgcatccacacgaacgaacgaccctacaaatacaacgcctacgaaaaaaccttcaactacaactcgctactcaacatacacctacgaatacacaccgacgaaaaaccctaccgatacgacgaatacgacaaaaccttcaaccaacgtacacacctcacacgccaccaccgcatccacacgaacgaaa

SEQ ID NO: 4835 - DNA, 538 bp, Artificial Sequence
  chemically treated genomic DNA (Homo sapiens) CpG-island No: 4835
attgagggtagaattaaggttttcgcgagattgtgtgtaggggaaaacgtttttacgttaagtgagttagaaaagtttttttaggtgcgtcggtagcgcggggcgggcgtcggggagggcgagttcgtgtgcggcgagtgcgggaaggcgtttcgttagagttttttttttacgttgtatcggcgttggtatagtcgggagaaggtttataagtgcgatgaatgcggtaaggtttttatttggagtattaattttttggagtatcggcgtatttatatcggcgagaagttttttttttgcggcgagtgcgggaaggtttttagttgttattcgttttttaacgtgtattagcgtatttatacgggcgagcggttttataagtgtagcgtttgcgagaaggtttttagttgtagttcgttgtttagtatgtatttgcgggtgtatatcggcgagaagttttatcggtgcggcgagtgcggtaaggtttttaattagcgtatatattttatacgttattatcgtatttatacgggcgaga

SEQ ID NO: 4836 - DNA, 538 bp, Artificial Sequence
  chemically treated genomic DNA (Homo sapiens) CpG-island No: 4836
tctcgcccgtataaatacgataataacgtataaaatatatacgctaattaaaaaccttaccgcactcgccgcaccgataaaacttctcgccgatatacacccgcaaatacatactaaacaacgaactacaactaaaaaccttctcgcaaacgctacacttataaaaccgctcgcccgtataaatacgctaatacacgttaaaaaacgaataacaactaaaaaccttcccgcactcgccgcaaaaaaaaaacttctcgccgatataaatacgccgatactccaaaaaattaatactccaaataaaaaccttaccgcattcatcgcacttataaaccttctcccgactataccaacgccgatacaacgtaaaaaaaaaactctaacgaaacgccttcccgcactcgccgcacacgaactcgccctccccgacgcccgccccgcgctaccgacgcacctaaaaaaacttttctaactcacttaacgtaaaaacgttttcccctacacacaatctcgcgaaaaccttaattctaccctcaat

SEQ ID NO: 4837 - DNA, 703 bp, Artificial Sequence
  chemically treated genomic DNA (Homo sapiens) CpG-island No: 4837
tacgattatacgtacggagtttttttttcgcgttcggttgaggtggggtttaggtcggtttcgtagatatttattttttatattaggtttagttttatgttcggcgtatttacgtttcggtatattttcgttatacgtttttttcggcgaattcgcgttcggagattagggttaggtttaaggtttcgcggttaggagttatcggacgcggagcgattagcggataggtttcgaagcggatagagatcgtcgacggtttgagggatcggtaagtggatagatcggatttttataaaaggattgcgattgttataaagagtagtaggcggtcgttgcgggaaagcgcgtttgcgcgaaataggcgtaaattatatttttcgggagcgtttgcgtcgcgtaggcgttagattttattttttagagcgagttcgggtcggtgtttgcgtttcgacgcgaacgagtatttagtatatttttttaggaaatgtagtttttgggtttatagtcgggagtttcggtatttattatgtttttgcgggcggatgtcgttgtgtattttcgtgtgcggattagtgtagtgtcgttgtatgggtgtttaattgcgaggatattgggagggcggtgtttaggaattagaatttgttttgttagttcgtttacgtttttacgtagttgggagtcgggtgggtttttgtttatattt

SEQ ID NO: 4838 - DNA, 703 bp, Artificial Sequence
  chemically treated genomic DNA (Homo sapiens) CpG-island No: 4838
aaatataaacaaaaacccacccgactcccaactacgtaaaaacgtaaacgaactaacaaaacaaattctaattcctaaacaccgccctcccaatatcctcgcaattaaacacccatacaacgacactacactaatccgcacacgaaaatacacaacgacatccgcccgcaaaaacataataaataccgaaactcccgactataaacccaaaaactacatttcctaaaaaaatatactaaatactcgttcgcgtcgaaacgcaaacaccgacccgaactcgctctaaaaaataaaatctaacgcctacgcgacgcaaacgctcccgaaaaatataatttacgcctatttcgcgcaaacgcgctttcccgcaacgaccgcctactactctttataacaatcgcaatccttttataaaaatccgatctatccacttaccgatccctcaaaccgtcgacgatctctatccgcttcgaaacctatccgctaatcgctccgcgtccgataactcctaaccgcgaaaccttaaacctaaccctaatctccgaacgcgaattcgccgaaaaaaacgtataacgaaaatataccgaaacgtaaatacgccgaacataaaactaaacctaatataaaaaataaatatctacgaaaccgacctaaaccccacctcaaccgaacgcgaaaaaaaaactccgtacgtataatcgta

SEQ ID NO: 4839 - DNA, 703 bp, Artificial Sequence
  chemically treated genomic DNA (Homo sapiens) CpG-island No: 4839
agatgtgggtaggaatttattcgatttttagttacgtggggacgtggacgaattaataggataaattttagtttttggatatcgtttttttagtattttcgtaattagatatttatgtagcggtattatattgattcgtatacggagatatatagcgatattcgttcgtaagagtatggtgggtgtcggagttttcggttgtgggtttaggaattatattttttagaaggatgtgttagatattcgttcgcgtcgggacgtaagtatcggttcgaattcgttttaggaaatggagtttgacgtttgcgcggcgtaaacgttttcgggaggtgtagtttgcgtttatttcgcgtaggcgcgttttttcgtagcggtcgtttgttgttttttgtggtagtcgtagtttttttgtgggagttcggtttgtttatttgtcggttttttagatcgtcggcggtttttgttcgtttcgggatttgttcgttggtcgtttcgcgttcgatggtttttggtcgcggaattttaggtttggttttggttttcgagcgcgggttcgtcgggaggagcgtgtggcgggggtgtgtcggggcgtgagtgcgtcgagtatggggttgagtttggtgtggggagtgggtatttgcggagtcggtttgaattttattttagtcgggcgcggggagggggtttcgtgcgtgtgatcgtg

SEQ ID NO: 4840 - DNA, 703 bp, Artificial Sequence
  chemically treated genomic DNA (Homo sapiens) CpG-island No: 4840
cacgatcacacgcacgaaaccccctccccgcgcccgactaaaataaaattcaaaccgactccgcaaatacccactccccacaccaaactcaaccccatactcgacgcactcacgccccgacacacccccgccacacgctcctcccgacgaacccgcgctcgaaaaccaaaaccaaacctaaaattccgcgaccaaaaaccatcgaacgcgaaacgaccaacgaacaaatcccgaaacgaacaaaaaccgccgacgatctaaaaaaccgacaaataaacaaaccgaactcccacaaaaaaactacgactaccacaaaaaacaacaaacgaccgctacgaaaaaacgcgcctacgcgaaataaacgcaaactacacctcccgaaaacgtttacgccgcgcaaacgtcaaactccatttcctaaaacgaattcgaaccgatacttacgtcccgacgcgaacgaatatctaacacatccttctaaaaaatataattcctaaacccacaaccgaaaactccgacacccaccatactcttacgaacgaatatcgctatatatctccgtatacgaatcaatataataccgctacataaatatctaattacgaaaatactaaaaaaacgatatccaaaaactaaaatttatcctattaattcgtccacgtccccacgtaactaaaaatcgaataaattcctacccacatct

SEQ ID NO: 4841 - DNA, 7593 bp, Artificial Sequence
  chemically treated genomic DNA (Homo sapiens) CpG-island No: 4841
ggagttttcgttagcgatgtcgtgtacggcgttttcgttagcgatgtcgtgggcggcgttttcgttagcgatgttttgggcggcgttttttttagttatgtgtcgggcggcgttttcgttagcgacgtcgtggacggcgatttcgttagcgacgttttgggcggcgttttcgttagcgacgttttgggcggcgatttcgttagcgacgtcgtgggcggtattttcgttagcgacgtcgtgggcggcgatttcgttagcgacgttttgggcggcgttttcgttagcgacgttttgggcggcgttttcgttagcgatgttttggatggcgtttttgtgtgcgatgttttggatttcgatttcgttagcgacgttttggacggcgttttcgttagcgacgtcgtggacggcgttttcgttagcgacgttttgggcggcgatttcgttagcgacgttttgggcggcgttttcgttagcgacgtcgtgggcggcgatttcgttagcgacgtcgtgggcggcgttttcgttagcgacgttttgggcggcgatttcgttagtgacgttttgggcggcgttttcgttagtgatgtcgtgggcggcgttttgtttagcgatggtttgggcggttttttcgttagtgatgttttggacggcgtttttagcgatgtcgtcggcgatattttcggtagtaatgttttgggtagcgatttcgttagttacgttttggacggtgtggtgttttcgatagcgatgttgtggacggcgatttcgttagcgatgttttgggcggcgattttattagcgatgttatgggcggcgttcggtttagcgatcgtttgggcggtattttcgttagcgacgtcgtgggcggcgttttcgttagcgatgtcgtcggcgatattttcggtagcgatgttttgggcggcgatttcgttagcgatgtcgcgggcggcgttcggtttagcgatcgcgtgggcggtattttcgttagcgacgtcgtgggcggcgatttttttagcgacgtcgtggacggcgttttcgttagcgatgttttggacggcgttttcgtgtgtaatgttttgggcggcgttttcgttcgcgatgttttgggcggcgttttcgttcgcgatgtcgtgggcggcgatttcgttagcgatgtcgtgggcggcgttttcgttagcgatgttttggacggcgttttcgtgtgcgacgttttggattttaatttcgttagcgacgttttggacggcgttttcgttagcgacgttttggacggggttttcgttagcgacgttttggacggggttttttttagcgatgttttgggcggcgttttcgtttgcgatgttttgggcggcgttttcgttcgcgatgttttgggtagcgttttcgttggcgatgtcgtgggcggcgttttcgttagcgatgttttggacggcgttttcgtgtgcgacgttttggattttaatttcgttagcgacgttttggatggggttttttttagcgatgttttgggcggcgttttcgttcgcgatgttttggacggcgttttttttagagatgtcgtgggcggcgatttcgttagcgacgtcgtgggcggcgttttcgttagcgatgtcgtcggcgatattttcggtagcgatgttttgggcggtaatttcgttagcgatgtcgcgggcggcgttcggtttagcgatcgcgtgggcggtattttcgttagcgacgttatgggcggcgatttttttagcgacgttgtggacggcgttttcgttagcgatgttttggacggcgttttcgtgtgcgatgttttgggcggcgttttcgttcgcgatgttttgggcggcgttttcgttcgcgatgtcgtgggcggcgatttcgttagtgatgtcgtgggcggcgttttcgttagcgatgttttggacggcgttttcgtgtgcgacgttttggattttaatttcgttagcgacgttttggacggcgttttcgttagcgacgttttggacggggttttcgttagcgacgtcgtgggcggcgatttttttagcgacgtcgtggacggcgttttcgttagtaatgttttggacggcgttttcgtgtgcgatgttttgggcggcgttttcgttcgcgatgttttgggcggcgttttcgttcgcgatgttttggacggcgttttttttagagatgtcgtgggcggcgatttcgttagcgatgttttgggcggcgttttcgttcgcgatgttttgggtagcgttttcgttcgcgatgttgtgggcggcgatttcgttagcgatgttatgggcggcgttcggtttagcgattgtttgggcggtattttcgttagcgacgacgttgtggagggcgtattcgttaacgacgttttggacggcgttttcgttagcgacgtcgtgggcggtgatttttttagcgacgttttgggcggcgttttcgatagcgacgtagtggacggcgatttcgttagcgatgtcgtgggcggcgatttcgttagcgacgtcgtgggcggcgttttcgttagcgatgtcgtcggcgatattttcggtagcgatgttttgggcggcgatttcgttagcgatgtcgcgggcggcgttcggtttagcgatcgcgtgggcggtattttcgttagcgacgtcgtgggcggcgatttttttagcgatgtcgtggacggcgttttcgttagcgatgttttggacggcgttttcgtgtgcgatgttttgggcggcgttttcgttcgcgatgttttgggcggtattttcgttcgcgatgttatgggtagcgatttcgttagcgatgtcgtgggcggcgttttcgttagcgatgttttggacggcgttttcgtgtgcgatattttggattttaatttcgttagcgacgttttggacggcgttttcgttagcgacgttttggacggggttttcgttagcgacgtcgtgggcggtaatttttttagcgacgtcgtggacggcgttttcgttagtaatgttttggacggcgttttcgtgtgcgatgttttgggcggcgttttcgttcgcgatgttttgggcggcgttttcgttcgcgatgttttggacggcgttttttttagagatgttatgggtggcgatttcgttagcgatgttttgggcggcgttttcgttagcgacgtcgtgggcggcgttttcgttagcgacgttttggacggtattttcgttagtgatgttgtgggcggtattttgtttagcgatggtttgggcggttttttcgttagtgatgttatgggcggcgtttttagcgatgtcgtcggcgatattttcggtagcgatgttttgggtagcgatttcgttagttacgttttggacggtgtggtgttttcgatagcgatgttgtggacggcgatttcgttagcgatgttttgggcggcgatttcgttagcgatgttatgggcgttgttcggtttagcgatcgtttgggcggtattttcgttagcgacgacgttatggagggttttttggttaacgacgttttggacggcgttttcgttagtgacgtcgtgggcggtgatttttttagcgacgttttgggcggcgttttcgttagcgacgtcgtggacggcgttttcgttagcgacgttttgggcggcgttttcgttagcgacgttttgggcggcgttttcgttcgcgacgtcgtgggcggcgatttcgttagcgatgtcgtgggcggcgttttcgttagcgatgttttggacggcgttttcgtgtgcgatgttttggattttaatttcgttagcgacgttttggacgacgttttcgttagcgacgttttggatagggttttcgttagcgacgtcgtgggcggcgatttttttagcgacgtcgtggacggcgttttcgttagtaatgttttggacggcgttttcgtgtgcgatgttttgggcggcgttttcgttcgcgatgttttgggcggcgttttcgttcgcgatgttttggacggcgttttttttagagatgtcgtgggcggcgatttcgttagcgatgttttgggcggcgttttcgttcgcgatgttttgggtagcgttttcgttttcgatgtcgtgggcggcgatttcgttagcgatgttatgggcggcgttcggtttagcgatcgtttgggcggtattttcgttagcgaagacgttgtggagggcgtttttattaacgacgttttggacggcgttttcgttagcgacgtcgtgggcggtgatttttttagcgacgttttgggcggcgttttcgttagcgacgtcgtggacggcgttttcgttagcgacgttttggacggcgttttcgatagcgacgtcgtgggcggcgatttcgttagcgacgtcgtgggcggcgttttcgttagcgatgtcgtcggcgatattttcggtagcgatgttttgggtggcgatttcgttagcgatgtcgtgggcggtattcggtttagcgatcgcgtgggcggtattttcgttagcgacgtcgtgggcggcgatttcgttagcgacgtcgtggacggcgtttttgttagcgatgtcgtcggcgatattttcggtagcgatgttttgggcggtaatttcgttagcgatgtcgcgggcggcgttcggtttagcgatcgcgtgggcggtatttttgttagcgacgtcgtgggcggcgatttttttagcgacgtcgtggacggcgttttcgttagcgatgttttggacggcgttttcgtgtgcgatgttttgggcggcgttttcgttcgcgatgttttgggcggcgttttcgttcgcgatgttttggatagcgttttttttagagatgtcgtgggcggcgatttcgttagcgatgttttgggcggcgttttcgttcgcgatgtcgtgggcggcgatttcgttagcgatgttatgggcggcgttcggtttagcgatcgtttgggcggtattttcgttagcgacgacgtcgtggagggcgttttcgttaacgacgttttggacggcgttttcgttagcgacgtcgtgggcggtgatttttttagcgacgtcgtgggcggcgtttttattagcgatgtcgtcggcgatattttcggtagcgatgttttgggtggcgatttcgttagcgatgtcgtgggcggtattcggtttagcgatcgcgtgggcggtattttcgttagcgacgtcgtgggcggcgatttttttagcgacgtcgtggacggcgttttcgttagcgatgttttggacggtatttttatgtgttatgttttgggcggcgttttcgttcgcgatgtcgtgggcggcgatttcgttagtgatgtcgtgggcggcgttttcgttagcgatgttttggacggcgttttcgtgtgcgacgttttggattttaatttcgttagcgacgttttggacggcgttttcgttagcgacgttttggacggggttttttttagcgatgttttgggcggcgttttcgttcgcgatgttttggacggcgttttttttagagatgttttgggcggcgttttcgtttgcgatgttttgggcggtatttttttttgcgatgttttgggcggcgttttcgttcgcgatgttttgggtagcgatttcgttcgcgatgtcgtgggcggcgttttcgttagcgatgttttggacggcgttttcgtgtgcgacgttttggattttaatttcgttagcgacgttttggatagggttttcgttagcgacgttttggacggggttttttttagcgatgttttgggcggcgttttcgttcgcgatgttttggacggtgttttttttagagatgtcgtgggcggcgatttcgttagcgatgttttgggcggcgttttcgttcgcgatgttttgggtagcgttttcgtttgcgatgtcgtgggcggcgatttcgttagcgatgtcgtgggcggtattttcgttagcgatgttttggatggcgtttttgtgtgcgatgttttggatttcgatttcgttagcgacgttttggacggcgttttcgttagcgacgttttgggcggcgttttcgttagcgacgttttgggcggcgatttcgttagcgacgttttgggcggcgttttcgttagcgacgtcgtgggcggcgatttcgttagcgacgtcgtgggcggcgttttcgttagcgacgttttgggcggcgatttcgttagcgacgttttggacggcgttttcgttagtgatgtcgtgggcggtattttgtttagcgatggtttgggcggtttttttgttagtgatgttatgggcggcgtttttagcgatgtcgtcggcgatattttcggtagcgatgttttgggtagcgatttcgttagttacgttttggacggtgtggtgttttcgatagcgatgttgtggatggcgatttcgttagcgatgttttgcgcggtgatttcgttagcgatgttatgggcggcgttcggtttagcgatcgtttgggcggtattttcgttagcgacgacgtcgtggagggcgttttcgttaacgatattttggacggcgttttcgttagcgacgtcgtgggcggtgatttttttagcgacgttttgggcggcgttttcgttagcgacgttttcgacggcgttttcgttagcgacgttttgggcggcgatttcgttagcgacgtcgtgggcggcgttttcgttagcgatgtcgtcggcgacgttttcggtagcgatgttttgggcggtaatttcgttagcgatgtcgcgggcggcgttcggtttagcgatcgcgtgggcggtattttcgttagcgacgtcgtgggcggcgatttttttagcgacgtcgtggacggcgttttcgttagcgatgttttggacggcgttttcgttagcgacgttttggacggggttttcgttagcgacgttttggacggggttttttttagcgatgttttggacggcgttttcgttattgacgttttggacggggttttcgttagcgacgttttggacggggttttttttagcgatgttttgggcggtattttcgttcgcgatgttttggacggcgttttttttagagatgttttgggcggcgttttcgtttgcgatgttttgggcggcgttttcgtttgcgatgttttgggttgcgttttcgtttgcgatgtcgtgggcggcgttttcgttagcgatgttttgggcggcgttttcgtttgcgatgttttgggcggcgttttttttaaggacgttttgggcggcgatttcgttagcgatgtagtggacggcgttttcgttagcgacgttttgggcggcgatttcgttagcgacgtcgtgggcggcgtttttattagcgatattgtgggcggcgtttttattaacgatgttttgggtggtattttcgttagcgatgtcgtggatcgcgttttcgttagcgatgttttgggcggcgttttcgttagcgattacgtgggcggtattttcgttagcgatgtcgtggacggttttttcgttagcgatgttttgggcggcgtttttttttgcgatgttttggacggcgttttcgttagcgatgttatatatggcgtttttagtagtaatgttatatatagcgtttttattagcgatgtcgtgtatagtgtttttata

SEQ ID NO: 4842 - DNA, 7593 bp, Artificial Sequence
  chemically treated genomic DNA (Homo sapiens) CpG-island No: 4842
tataaaaacactatacacgacatcgctaataaaaacgctatatataacattactactaaaaacgccatatataacatcgctaacgaaaacgccgtccaaaacatcgcaaaaaaaaacgccgcccaaaacatcgctaacgaaaaaaccgtccacgacatcgctaacgaaaataccgcccacgtaatcgctaacgaaaacgccgcccaaaacatcgctaacgaaaacgcgatccacgacatcgctaacgaaaataccacccaaaacatcgttaataaaaacgccgcccacaatatcgctaataaaaacgccgcccacgacgtcgctaacgaaatcgccgcccaaaacgtcgctaacgaaaacgccgtccactacatcgctaacgaaatcgccgcccaaaacgtccttaaaaaaaacgccgcccaaaacatcgcaaacgaaaacgccgcccaaaacatcgctaacgaaaacgccgcccacgacatcgcaaacgaaaacgcaacccaaaacatcgcaaacgaaaacgccgcccaaaacatcgcaaacgaaaacgccgcccaaaacatctctaaaaaaaacgccgtccaaaacatcgcgaacgaaaataccgcccaaaacatcgctaaaaaaaaccccgtccaaaacgtcgctaacgaaaaccccgtccaaaacgtcaataacgaaaacgccgtccaaaacatcgctaaaaaaaaccccgtccaaaacgtcgctaacgaaaaccccgtccaaaacgtcgctaacgaaaacgccgtccaaaacatcgctaacgaaaacgccgtccacgacgtcgctaaaaaaatcgccgcccacgacgtcgctaacgaaaataccgcccacgcgatcgctaaaccgaacgccgcccgcgacatcgctaacgaaattaccgcccaaaacatcgctaccgaaaacgtcgccgacgacatcgctaacgaaaacgccgcccacgacgtcgctaacgaaatcgccgcccaaaacgtcgctaacgaaaacgccgtcgaaaacgtcgctaacgaaaacgccgcccaaaacgtcgctaaaaaaatcaccgcccacgacgtcgctaacgaaaacgccgtccaaaatatcgttaacgaaaacgccctccacgacgtcgtcgctaacgaaaataccgcccaaacgatcgctaaaccgaacgccgcccataacatcgctaacgaaatcaccgcgcaaaacatcgctaacgaaatcgccatccacaacatcgctatcgaaaacaccacaccgtccaaaacgtaactaacgaaatcgctacccaaaacatcgctaccgaaaatatcgccgacgacatcgctaaaaacgccgcccataacatcactaacaaaaaaaccgcccaaaccatcgctaaacaaaataccgcccacgacatcactaacgaaaacgccgtccaaaacgtcgctaacgaaatcgccgcccaaaacgtcgctaacgaaaacgccgcccacgacgtcgctaacgaaatcgccgcccacgacgtcgctaacgaaaacgccgcccaaaacgtcgctaacgaaatcgccgcccaaaacgtcgctaacgaaaacgccgcccaaaacgtcgctaacgaaaacgccgtccaaaacgtcgctaacgaaatcgaaatccaaaacatcgcacacaaaaacgccatccaaaacatcgctaacgaaaataccgcccacgacatcgctaacgaaatcgccgcccacgacatcgcaaacgaaaacgctacccaaaacatcgcgaacgaaaacgccgcccaaaacatcgctaacgaaatcgccgcccacgacatctctaaaaaaaacaccgtccaaaacatcgcgaacgaaaacgccgcccaaaacatcgctaaaaaaaaccccgtccaaaacgtcgctaacgaaaaccctatccaaaacgtcgctaacgaaattaaaatccaaaacgtcgcacacgaaaacgccgtccaaaacatcgctaacgaaaacgccgcccacgacatcgcgaacgaaatcgctacccaaaacatcgcgaacgaaaacgccgcccaaaacatcgcaaaaaaaaataccgcccaaaacatcgcaaacgaaaacgccgcccaaaacatctctaaaaaaaacgccgtccaaaacatcgcgaacgaaaacgccgcccaaaacatcgctaaaaaaaaccccgtccaaaacgtcgctaacgaaaacgccgtccaaaacgtcgctaacgaaattaaaatccaaaacgtcgcacacgaaaacgccgtccaaaacatcgctaacgaaaacgccgcccacgacatcactaacgaaatcgccgcccacgacatcgcgaacgaaaacgccgcccaaaacataacacataaaaataccgtccaaaacatcgctaacgaaaacgccgtccacgacgtcgctaaaaaaatcgccgcccacgacgtcgctaacgaaaataccgcccacgcgatcgctaaaccgaataccgcccacgacatcgctaacgaaatcgccacccaaaacatcgctaccgaaaatatcgccgacgacatcgctaataaaaacgccgcccacgacgtcgctaaaaaaatcaccgcccacgacgtcgctaacgaaaacgccgtccaaaacgtcgttaacgaaaacgccctccacgacgtcgtcgctaacgaaaataccgcccaaacgatcgctaaaccgaacgccgcccataacatcgctaacgaaatcgccgcccacgacatcgcgaacgaaaacgccgcccaaaacatcgctaacgaaatcgccgcccacgacatctctaaaaaaaacgctatccaaaacatcgcgaacgaaaacgccgcccaaaacatcgcgaacgaaaacgccgcccaaaacatcgcacacgaaaacgccgtccaaaacatcgctaacgaaaacgccgtccacgacgtcgctaaaaaaatcgccgcccacgacgtcgctaacaaaaataccgcccacgcgatcgctaaaccgaacgccgcccgcgacatcgctaacgaaattaccgcccaaaacatcgctaccgaaaatatcgccgacgacatcgctaacaaaaacgccgtccacgacgtcgctaacgaaatcgccgcccacgacgtcgctaacgaaaataccgcccacgcgatcgctaaaccgaataccgcccacgacatcgctaacgaaatcgccacccaaaacatcgctaccgaaaatatcgccgacgacatcgctaacgaaaacgccgcccacgacgtcgctaacgaaatcgccgcccacgacgtcgctatcgaaaacgccgtccaaaacgtcgctaacgaaaacgccgtccacgacgtcgctaacgaaaacgccgcccaaaacgtcgctaaaaaaatcaccgcccacgacgtcgctaacgaaaacgccgtccaaaacgtcgttaataaaaacgccctccacaacgtcttcgctaacgaaaataccgcccaaacgatcgctaaaccgaacgccgcccataacatcgctaacgaaatcgccgcccacgacatcgaaaacgaaaacgctacccaaaacatcgcgaacgaaaacgccgcccaaaacatcgctaacgaaatcgccgcccacgacatctctaaaaaaaacgccgtccaaaacatcgcgaacgaaaacgccgcccaaaacatcgcgaacgaaaacgccgcccaaaacatcgcacacgaaaacgccgtccaaaacattactaacgaaaacgccgtccacgacgtcgctaaaaaaatcgccgcccacgacgtcgctaacgaaaaccctatccaaaacgtcgctaacgaaaacgtcgtccaaaacgtcgctaacgaaattaaaatccaaaacatcgcacacgaaaacgccgtccaaaacatcgctaacgaaaacgccgcccacgacatcgctaacgaaatcgccgcccacgacgtcgcgaacgaaaacgccgcccaaaacgtcgctaacgaaaacgccgcccaaaacgtcgctaacgaaaacgccgtccacgacgtcgctaacgaaaacgccgcccaaaacgtcgctaaaaaaatcaccgcccacgacgtcactaacgaaaacgccgtccaaaacgtcgttaaccaaaaaaccctccataacgtcgtcgctaacgaaaataccgcccaaacgatcgctaaaccgaacaacgcccataacatcgctaacgaaatcgccgcccaaaacatcgctaacgaaatcgccgtccacaacatcgctatcgaaaacaccacaccgtccaaaacgtaactaacgaaatcgctacccaaaacatcgctaccgaaaatatcgccgacgacatcgctaaaaacgccgcccataacatcactaacgaaaaaaccgcccaaaccatcgctaaacaaaataccgcccacaacatcactaacgaaaataccgtccaaaacgtcgctaacgaaaacgccgcccacgacgtcgctaacgaaaacgccgcccaaaacatcgctaacgaaatcgccacccataacatctctaaaaaaaacgccgtccaaaacatcgcgaacgaaaacgccgcccaaaacatcgcgaacgaaaacgccgcccaaaacatcgcacacgaaaacgccgtccaaaacattactaacgaaaacgccgtccacgacgtcgctaaaaaaattaccgcccacgacgtcgctaacgaaaaccccgtccaaaacgtcgctaacgaaaacgccgtccaaaacgtcgctaacgaaattaaaatccaaaatatcgcacacgaaaacgccgtccaaaacatcgctaacgaaaacgccgcccacgacatcgctaacgaaatcgctacccataacatcgcgaacgaaaataccgcccaaaacatcgcgaacgaaaacgccgcccaaaacatcgcacacgaaaacgccgtccaaaacatcgctaacgaaaacgccgtccacgacatcgctaaaaaaatcgccgcccacgacgtcgctaacgaaaataccgcccacgcgatcgctaaaccgaacgccgcccgcgacatcgctaacgaaatcgccgcccaaaacatcgctaccgaaaatatcgccgacgacatcgctaacgaaaacgccgcccacgacgtcgctaacgaaatcgccgcccacgacatcgctaacgaaatcgccgtccactacgtcgctatcgaaaacgccgcccaaaacgtcgctaaaaaaatcaccgcccacgacgtcgctaacgaaaacgccgtccaaaacgtcgttaacgaatacgccctccacaacgtcgtcgctaacgaaaataccgcccaaacaatcgctaaaccgaacgccgcccataacatcgctaacgaaatcgccgcccacaacatcgcgaacgaaaacgctacccaaaacatcgcgaacgaaaacgccgcccaaaacatcgctaacgaaatcgccgcccacgacatctctaaaaaaaacgccgtccaaaacatcgcgaacgaaaacgccgcccaaaacatcgcgaacgaaaacgccgcccaaaacatcgcacacgaaaacgccgtccaaaacattactaacgaaaacgccgtccacgacgtcgctaaaaaaatcgccgcccacgacgtcgctaacgaaaaccccgtccaaaacgtcgctaacgaaaacgccgtccaaaacgtcgctaacgaaattaaaatccaaaacgtcgcacacgaaaacgccgtccaaaacatcgctaacgaaaacgccgcccacgacatcactaacgaaatcgccgcccacgacatcgcgaacgaaaacgccgcccaaaacatcgcgaacgaaaacgccgcccaaaacatcgcacacgaaaacgccgtccaaaacatcgctaacgaaaacgccgtccacaacgtcgctaaaaaaatcgccgcccataacgtcgctaacgaaaataccgcccacgcgatcgctaaaccgaacgccgcccgcgacatcgctaacgaaattaccgcccaaaacatcgctaccgaaaatatcgccgacgacatcgctaacgaaaacgccgcccacgacgtcgctaacgaaatcgccgcccacgacatctctaaaaaaaacgccgtccaaaacatcgcgaacgaaaacgccgcccaaaacatcgctaaaaaaaaccccatccaaaacgtcgctaacgaaattaaaatccaaaacgtcgcacacgaaaacgccgtccaaaacatcgctaacgaaaacgccgcccacgacatcgccaacgaaaacgctacccaaaacatcgcgaacgaaaacgccgcccaaaacatcgcaaacgaaaacgccgcccaaaacatcgctaaaaaaaaccccgtccaaaacgtcgctaacgaaaaccccgtccaaaacgtcgctaacgaaaacgccgtccaaaacgtcgctaacgaaattaaaatccaaaacgtcgcacacgaaaacgccgtccaaaacatcgctaacgaaaacgccgcccacgacatcgctaacgaaatcgccgcccacgacatcgcgaacgaaaacgccgcccaaaacatcgcgaacgaaaacgccgcccaaaacattacacacgaaaacgccgtccaaaacatcgctaacgaaaacgccgtccacgacgtcgctaaaaaaatcgccgcccacgacgtcgctaacgaaaataccgcccacgcgatcgctaaaccgaacgccgcccgcgacatcgctaacgaaatcgccgcccaaaacatcgctaccgaaaatatcgccgacgacatcgctaacgaaaacgccgcccacgacgtcgctaacgaaaataccgcccaaacgatcgctaaaccgaacgccgcccataacatcgctaataaaatcgccgcccaaaacatcgctaacgaaatcgccgtccacaacatcgctatcgaaaacaccacaccgtccaaaacgtaactaacgaaatcgctacccaaaacattactaccgaaaatatcgccgacgacatcgctaaaaacgccgtccaaaacatcactaacgaaaaaaccgcccaaaccatcgctaaacaaaacgccgcccacgacatcactaacgaaaacgccgcccaaaacgtcactaacgaaatcgccgcccaaaacgtcgctaacgaaaacgccgcccacgacgtcgctaacgaaatcgccgcccacgacgtcgctaacgaaaacgccgcccaaaacgtcgctaacgaaatcgccgcccaaaacgtcgctaacgaaaacgccgtccacgacgtcgctaacgaaaacgccgtccaaaacgtcgctaacgaaatcgaaatccaaaacatcgcacacaaaaacgccatccaaaacatcgctaacgaaaacgccgcccaaaacgtcgctaacgaaaacgccgcccaaaacgtcgctaacgaaatcgccgcccacgacgtcgctaacgaaaataccgcccacgacgtcgctaacgaaatcgccgcccaaaacgtcgctaacgaaaacgccgcccaaaacgtcgctaacgaaatcgccgtccacgacgtcgctaacgaaaacgccgcccgacacataactaaaaaaaacgccgcccaaaacatcgctaacgaaaacgccgcccacgacatcgctaacgaaaacgccgtacacgacatcgctaacgaaaactcc

SEQ ID NO: 4843 - DNA, 7593 bp, Artificial Sequence
  chemically treated genomic DNA (Homo sapiens) CpG-island No: 4843
tatgaggatattgtatacgatatcgttaatgaggacgttgtatatgatattgttattgaggacgttatatatgatatcgttaacgaggacgtcgtttagggtatcgtaaaggaggacgtcgtttagggtatcgttaacgaggaagtcgtttacgatatcgttaacgaggatgtcgtttacgtaatcgttaacgaggacgtcgtttagagtatcgttaacgaggacgcggtttacgatatcgttaacgaggatgttatttagggtatcgttaatgaggacgtcgtttataatatcgttaatgaggacgtcgtttacggcgtcgttaacgaggtcgtcgtttagggcgtcgttaacgaggacgtcgtttattgtatcgttaacgaggtcgtcgtttagggcgtttttaaagaggacgtcgtttaggatatcgtaaacgaggacgtcgtttagggtatcgttaacgaggacgtcgtttacggtatcgtaaacgaggacgtagtttaggatatcgtaaacgaggacgtcgtttaggatatcgtaaacgaggacgtcgtttagggtatttttaaggaggacgtcgtttagggtatcgcgaacgaggatgtcgtttagggtatcgttaaggaggatttcgtttagggcgtcgttaacgaggatttcgtttagggcgttaataacgaggacgtcgtttagggtatcgttaaggaggatttcgtttagggcgtcgttaacgaggatttcgtttagggcgtcgttaacgaggacgtcgtttagggtatcgttaacgaggacgtcgtttacggcgtcgttaaagaggtcgtcgtttacggcgtcgttaacgaggatgtcgtttacgcgatcgttaagtcggacgtcgttcgcggtatcgttaacgaggttgtcgtttagggtatcgttatcgaggacgtcgtcgacggtatcgttaacgaggacgtcgtttacggcgtcgttaacgaggtcgtcgtttagggcgtcgttaacgaggacgtcgtcgagggcgtcgttaacgaggacgtcgtttagggcgtcgttaaagaggttatcgtttacggcgtcgttaacgaggacgtcgtttagggtgtcgttaacgaggacgttttttacggcgtcgtcgttaacgaggatgtcgtttaagcgatcgttaagtcggacgtcgtttatggtatcgttaacgaggttatcgcgtagggtatcgttaacgaggtcgttatttatagtatcgttatcgaggatattatatcgtttagggcgtggttaacgaggtcgttgtttagggtatcgttatcgaggatgtcgtcgacggtatcgttgaggacgtcgtttatggtattattaataaggaggtcgtttaggttatcgttaagtaggatgtcgtttacggtattattaacgaggacgtcgtttagggcgtcgttaacgaggtcgtcgtttagggcgtcgttaacgaggacgtcgtttacggcgtcgttaacgaggtcgtcgtttacggcgtcgttaacgaggacgtcgtttagggcgtcgttaacgaggtcgtcgtttagggcgtcgttaacgaggacgtcgtttagggcgtcgttaacgaggacgtcgtttagggcgtcgttaacgaggtcgaagtttagggtatcgtatataaggacgttatttagggtatcgttaacgaggatgtcgtttacggtatcgttaacgaggtcgtcgtttacggtatcgtaaacgaggacgttgtttagggtatcgcgaacgaggacgtcgtttagggtatcgttaacgaggtcgtcgtttacggtatttttaaggaggatatcgtttagggtatcgcgaacgaggacgtcgtttagggtatcgttaaagagaatttcgtttagggcgtcgttaacgaggattttgtttagggcgtcgttaacgaggttgaagtttagggcgtcgtatacgaggacgtcgtttagggtatcgttaacgaggacgtcgtttacggtatcgcgaacgaggtcgttgtttagggtatcgcgaacgaggacgtcgtttaggatatcgtaaaggaggatgtcgtttaggatatcgtaaacgaggacgtcgtttagggtatttttaaggaggacgtcgtttagggtatcgcgaacgaggacgtcgtttagggtatcgttaaggaggatttcgtttagggcgtcgttaacgaggacgtcgtttagggcgtcgttaacgaggttgaagtttagggcgtcgtatacgaggacgtcgtttagggtatcgttaacgaggacgtcgtttacggtattattaacgaggtcgtcgtttacggtatcgcgaacgaggacgtcgtttagggtatagtatatgaggatgtcgtttagggtatcgttaacgaggacgtcgtttacggcgtcgttaaagaggtcgtcgtttacggcgtcgttaacgaggatgtcgtttacgcgatcgttaagtcggatgtcgtttacggtatcgttaacgaggtcgttatttagggtatcgttatcgaggatgtcgtcgacggtatcgttaatgaggacgtcgtttacggcgtcgttaaagaggttatcgtttacggcgtcgttaacgaggacgtcgtttagggcgtcgttaacgaggacgttttttacggcgtcgtcgttaacgaggatgtcgtttaagcgatcgttaagtcggacgtcgtttatggtatcgttaacgaggtcgtcgtttacggtatcgcgaacgaggacgtcgtttagggtatcgttaacgaggtcgtcgtttacggtatttttaaggaggacgttgtttagggtatcgcgaacgaggacgtcgtttagggtatcgcgaacgaggacgtcgtttagggtatcgtatacgaggacgtcgtttagggtatcgttaacgaggacgtcgtttacggcgtcgttaaagaggtcgtcgtttacggcgtcgttaataaggatgtcgtttacgcgatcgttaagtcggacgtcgttcgcggtatcgttaacgaggttgtcgtttagggtatcgttatcgaggatgtcgtcgacggtatcgttaataaggacgtcgtttacggcgtcgttaacgaggtcgtcgtttacggcgtcgttaacgaggatgtcgtttacgcgatcgttaagtcggatgtcgtttacggtatcgttaacgaggtcgttatttagggtatcgttatcgaggatgtcgtcgacggtatcgttaacgaggacgtcgtttacggcgtcgttaacgaggtcgtcgtttacggcgtcgttatcgaggacgtcgtttagggcgtcgttaacgaggacgtcgtttacggcgtcgttaacgaggacgtcgtttagggcgtcgttaaagaggttatcgtttacggcgtcgttaacgaggacgtcgtttagggcgtcgttaatgaggacgttttttatagcgttttcgttaacgaggatgtcgtttaagcgatcgttaagtcggacgtcgtttatggtatcgttaacgaggtcgtcgtttacggtatcgggaacgaggacgttgtttagggtatcgcgaacgaggacgtcgtttagggtatcgttaacgaggtcgtcgtttacggtatttttaaggaggacgtcgtttagggtatcgcgaacgaggacgtcgtttagggtatcgcgaacgaggacgtcgtttagggtatcgtatacgaggacgtcgtttagggtattgttaacgaggacgtcgtttacggcgtcgttaaagaggtcgtcgtttacggcgtcgttaacgaggattttgtttagggcgtcgttaacgaggacgtcgtttagggcgtcgttaacgaggttgaagtttagggtatcgtatacgaggacgtcgtttagggtatcgttaacgaggacgtcgtttacggtatcgttaacgaggtcgtcgtttacggcgtcgcgaacgaggacgtcgtttagggcgtcgttaacgaggacgtcgtttagggcgtcgttaacgaggacgtcgtttacggcgtcgttaacgaggacgtcgtttagggcgtcgttaaagaggttatcgtttacggcgttattaacgaggacgtcgtttagggcgtcgttaattaggaggttttttatggcgtcgtcgttaacgaggatgtcgtttaagcgatcgttaagtcggatagcgtttatggtatcgttaacgaggtcgtcgtttagggtatcgttaacgaggtcgtcgtttatagtatcgttatcgaggatattatatcgtttagggcgtggttaacgaggtcgttgtttagggtatcgttatcgaggatgtcgtcgacggtatcgttgaggacgtcgtttatggtattattaacgaggaggtcgtttaggttatcgttaagtaggatgtcgtttatagtattattaacgaggatgtcgtttagggcgtcgttaacgaggacgtcgtttacggcgtcgttaacgaggacgtcgtttagggtatcgttaacgaggtcgttatttatggtatttttaaggaggacgtcgtttagggtatcgcgaacgaggacgtcgtttagggtatcgcgaacgaggacgtcgtttagggtatcgtatacgaggacgtcgtttagggtattgttaacgaggacgtcgtttacggcgtcgttaaagaggttgtcgtttacggcgtcgttaacgaggatttcgtttagggcgtcgttaacgaggacgtcgtttagggcgtcgttaacgaggttgaagtttagggtgtcgtatacgaggacgtcgtttagggtatcgttaacgaggacgtcgtttacggtatcgttaacgaggtcgttgtttatggtatcgcgaacgaggatgtcgtttagggtatcgcgaacgaggacgtcgtttagggtatcgtatacgaggacgtcgtttagggtatcgttaacgaggacgtcgtttacggtatcgttaaagaggtcgtcgtttacggcgtcgttaacgaggatgtcgtttacgcgatcgttaagtcggacgtcgttcgcggtatcgttaacgaggtcgtcgtttagggtatcgttatcgaggatgtcgtcgacggtatcgttaacgaggacgtcgtttacggcgtcgttaacgaggtcgtcgtttacggtatcgttaacgaggtcgtcgtttattgcgtcgttatcgaggacgtcgtttagggcgtcgttaaagaggttatcgtttacggcgtcgttaacgaggacgtcgtttagggcgtcgttaacgagtacgttttttatagcgtcgtcgttaacgaggatgtcgtttaagtaatcgttaagtcggacgtcgtttatggtatcgttaacgaggtcgtcgtttatagtatcgcgaacgaggacgttgtttagggtatcgcgaacgaggacgtcgtttagggtatcgttaacgaggtcgtcgtttacggtatttttaaggaggacgtcgtttagggtatcgcgaacgaggacgtcgtttagggtatcgcgaacgaggacgtcgtttagggtatcgtatacgaggacgtcgtttagggtattgttaacgaggacgtcgtttacggcgtcgttaaagaggtcgtcgtttacggcgtcgttaacgaggatttcgtttagggcgtcgttaacgaggacgtcgtttagggcgtcgttaacgaggttgaagtttagggcgtcgtatacgaggacgtcgtttagggtatcgttaacgaggacgtcgtttacggtattattaacgaggtcgtcgtttacggtatcgcgaacgaggacgtcgtttagggtatcgcgaacgaggacgtcgtttagggtatcgtatacgaggacgtcgtttagggtatcgttaacgaggacgtcgtttatagcgtcgttaaagaggtcgtcgtttatggcgtcgttaacgaggatgtcgtttacgcgatcgttaagtcggacgtcgttcgcggtatcgttaacgaggttgtcgtttagggtatcgttatcgaggatgtcgtcgacggtatcgttaacgaggacgtcgtttacggcgtcgttaacgaggtcgtcgtttacggtatttttaaggaggacgtcgtttagggtatcgcgaacgaggacgtcgtttagggtatcgttaaggaggattttatttagggcgtcgttaacgaggttgaagtttagggcgtcgtatacgaggacgtcgtttagggtatcgttaacgaggacgtcgtttacggtatcgttaacgaggacgttgtttagggtatcgcgaacgaggacgtcgtttaggatatcgtaaacgaggacgtcgtttagggtatcgttaaggaggatttcgtttagggcgtcgttaacgaggatttcgtttagggcgtcgttaacgaggacgtcgtttagggcgtcgttaacgaggttgaagtttagggcgtcgtatacgaggacgtcgtttagggtatcgttaacgaggacgtcgtttacggtatcgttaacgaggtcgtcgtttacggtatcgcgaacgaggacgtcgtttagggtatcgcgaacgaggacgtcgtttagggtattgtatacgaggacgtcgtttagggtatcgttaacgaggacgtcgtttacggcgtcgttaaagaggtcgtcgtttacggcgtcgttaacgaggatgtcgtttacgcgatcgttaagtcggacgtcgttcgcggtatcgttaacgaggtcgtcgtttagggtatcgttatcgaggatgtcgtcgacggtatcgttaacgaggacgtcgtttacggcgtcgttaacgaggatgtcgtttaagcgatcgttaagtcggacgtcgtttatggtatcgttaatgaggtcgtcgtttagggtatcgttaacgaggtcgtcgtttatagtatcgttatcgaggatattatatcgtttagggcgtggttaacgaagtcgttgtttagggtattgttatcgaggatgtcgtcgacggtatcgttgaggacgtcgtttagggtattattaacgaggaggtcgtttaggttatcgttaagtaggacgtcgtttacggtattattaacgaggacgtcgtttagggcgttattaacgaggtcgtcgtttagggcgtcgttaacgaggacgtcgtttacggcgtcgttaacgaggtcgtcgtttacggcgtcgttaacgaggacgtcgtttagggcgtcgttaacgaggtcgtcgtttagggcgtcgttaacgaggacgtcgtttacggcgtcgttaacgaggacgtcgtttagggcgtcgttaacgaggtcgaagtttagggtatcgtatataaggacgttatttagggtatcgttaacgaggacgtcgtttagggcgtcgttaacgaggacgtcgtttagggcgtcgttaacgaggtcgtcgtttacggcgtcgttaacgaggatgtcgtttacggcgtcgttaacgaggtcgtcgtttagggcgtcgttaacgaggacgtcgtttagggcgtcgttaacgaggtcgtcgtttacggcgtcgttaacgaggacgtcgttcggtatatggttaaggaggacgtcgtttaggatatcgttaacgaggacgtcgtttacggtatcgttaacgaggacgtcgtatacggtatcgttaacgaggatttt

SEQ ID NO: 4844 - DNA, 7593 bp, Artificial Sequence
  chemically treated genomic DNA (Homo sapiens) CpG-island No: 4844
aaaatcctcgttaacgataccgtatacgacgtcctcgttaacgataccgtaaacgacgtcctcgttaacgatatcctaaacgacgtcctccttaaccatataccgaacgacgtcctcgttaacgacgccgtaaacgacgacctcgttaacgacgccctaaacgacgtcctcgttaacgacgccctaaacgacgacctcgttaacgacgccgtaaacgacatcctcgttaacgacgccgtaaacgacgacctcgttaacgacgccctaaacgacgtcctcgttaacgacgccctaaacgacgtcctcgttaacgataccctaaataacgtccttatatacgataccctaaacttcgacctcgttaacgacgccctaaacgacgtcctcgttaacgacgccgtaaacgacgtcctcgttaacgacgccctaaacgacgacctcgttaacgacgccctaaacgacgtcctcgttaacgacgccgtaaacgacgacctcgttaacgacgccgtaaacgacgtcctcgttaacgacgccctaaacgacgacctcgttaataacgccctaaacgacgtcctcgttaataataccgtaaacgacgtcctacttaacgataacctaaacgacctcctcgttaataataccctaaacgacgtcctcaacgataccgtcgacgacatcctcgataacaataccctaaacaacgacttcgttaaccacgccctaaacgatataatatcctcgataacgatactataaacgacgacctcgttaacgataccctaaacgacgacctcattaacgataccataaacgacgtccgacttaacgatcgcttaaacgacatcctcgttaacgacgccgtaaacgacgtcctcgttaacgataccgtcgacgacatcctcgataacgataccctaaacgacgacctcgttaacgataccgcgaacgacgtccgacttaacgatcgcgtaaacgacatcctcgttaacgacgccgtaaacgacgacctctttaacgacgccgtaaacgacgtcctcgttaacgataccctaaacgacgtcctcgtatacaataccctaaacgacgtcctcgttcgcgataccctaaacgacgtcctcgttcgcgataccgtaaacgacgacctcgttaacgataccgtaaacgacgtcctcgttaacgataccctaaacgacgtcctcgtatacgacgccctaaacttcaacctcgttaacgacgccctaaacgacgtcctcgttaacgacgccctaaacgaaatcctcgttaacgacgccctaaacgaaatcctccttaacgataccctaaacgacgtcctcgtttacgatatcctaaacgacgtcctcgttcgcgataccctaaacaacgtcctcgttaacgataccgtaaacgacgtcctcgttaacgataccctaaacgacgtcctcgtatacgacgccctaaacttcaacctcgttaacgacgccctaaataaaatcctccttaacgataccctaaacgacgtcctcgttcgcgataccctaaacgacgtcctccttaaaaataccgtaaacgacgacctcgttaacgacgccgtaaacgacgtcctcgttaacgataccgtcgacgacatcctcgataacgataccctaaacgacaacctcgttaacgataccgcgaacgacgtccgacttaacgatcgcgtaaacgacatcctcgttaacgacgccataaacgacgacctctttaacgacgctataaacgacgtcctcgttaacgataccctaaacgacgtcctcgtatacgataccctaaacgacgtcctcgttcgcgataccctaaacgacgtcctcgttcgcgataccgtaaacgacgacctcgttaataataccgtaaacgacgtcctcgttaacgataccctaaacgacgtcctcgtatacgacgccctaaacttcaacctcgttaacgacgccctaaacgacgtcctcgttaacgacgccctaaacgaaatcctcgttaacgacgccgtaaacgacgacctctttaacgacgccgtaaacgacgtcctcgttaacaataccctaaacgacgtcctcgtatacgataccctaaacgacgtcctcgttcgcgataccctaaacgacgtcctcgttcgcgataccctaaacgacgtcctccttaaaaataccgtaaacgacgacctcgttaacgataccctaaacgacgtcctcgttcgcgataccctaaacaacgtcctcgttcgcgatactataaacgacgacctcgttaacgataccataaacgacgtccgacttaacgattacttaaacgacatcctcgttaacgacgacgctataaaaaacgtactcgttaacgacgccctaaacgacgtcctcgttaacgacgccgtaaacgataacctctttaacgacgccctaaacgacgtcctcgataacgacgcaataaacgacgacctcgttaacgataccgtaaacgacgacctcgttaacgacgccgtaaacgacgtcctcgttaacgataccgtcgacgacatcctcgataacgataccctaaacgacgacctcgttaacgataccgcgaacgacgtccgacttaacgatcgcgtaaacgacatcctcgttaacgacgccgtaaacgacgacctctttaacgataccgtaaacgacgtcctcgttaacgataccctaaacgacgtcctcgtatacgataccctaaacgacgtcctcgttcgcgataccctaaacgacatcctcgttcgcgataccataaacaacgacctcgttaacgataccgtaaacgacgtcctcgttaacgataccctaaacgacgtcctcgtatacgacaccctaaacttcaacctcgttaacgacgccctaaacgacgtcctcgttaacgacgccctaaacgaaatcctcgttaacgacgccgtaaacgacaacctctttaacgacgccgtaaacgacgtcctcgttaacaataccctaaacgacgtcctcgtatacgataccctaaacgacgtcctcgttcgcgataccctaaacgacgtcctcgttcgcgataccctaaacgacgtcctccttaaaaataccataaataacgacctcgttaacgataccctaaacgacgtcctcgttaacgacgccgtaaacgacgtcctcgttaacgacgccctaaacgacatcctcgttaataatactataaacgacatcctacttaacgataacctaaacgacctcctcgttaataataccataaacgacgtcctcaacgataccgtcgacgacatcctcgataacgataccctaaacaacgacctcgttaaccacgccctaaacgatataatatcctcgataacgatactataaacgacgacctcgttaacgataccctaaacgacgacctcgttaacgataccataaacgctatccgacttaacgatcgcttaaacgacatcctcgttaacgacgacgccataaaaaacctcctaattaacgacgccctaaacgacgtcctcgttaataacgccgtaaacgataacctctttaacgacgccctaaacgacgtcctcgttaacgacgccgtaaacgacgtcctcgttaacgacgccctaaacgacgtcctcgttaacgacgccctaaacgacgtcctcgttcgcgacgccgtaaacgacgacctcgttaacgataccgtaaacgacgtcctcgttaacgataccctaaacgacgtcctcgtatacgataccctaaacttcaacctcgttaacgacgccctaaacgacgtcctcgttaacgacgccctaaacaaaatcctcgttaacgacgccgtaaacgacgacctctttaacgacgccgtaaacgacgtcctcgttaacaataccctaaacgacgtcctcgtatacgataccctaaacgacgtcctcgttcgcgataccctaaacgacgtcctcgttcgcgataccctaaacgacgtcctccttaaaaataccgtaaacgacgacctcgttaacgataccctaaacgacgtcctcgttcgcgataccctaaacaacgtcctcgttcccgataccgtaaacgacgacctcgttaacgataccataaacgacgtccgacttaacgatcgcttaaacgacatcctcgttaacgaaaacgctataaaaaacgtcctcattaacgacgccctaaacgacgtcctcgttaacgacgccgtaaacgataacctctttaacgacgccctaaacgacgtcctcgttaacgacgccgtaaacgacgtcctcgttaacgacgccctaaacgacgtcctcgataacgacgccgtaaacgacgacctcgttaacgacgccgtaaacgacgtcctcgttaacgataccgtcgacgacatcctcgataacgataccctaaataacgacctcgttaacgataccgtaaacgacatccgacttaacgatcgcgtaaacgacatcctcgttaacgacgccgtaaacgacgacctcgttaacgacgccgtaaacgacgtccttattaacgataccgtcgacgacatcctcgataacgataccctaaacgacaacctcgttaacgataccgcgaacgacgtccgacttaacgatcgcgtaaacgacatccttattaacgacgccgtaaacgacgacctctttaacgacgccgtaaacgacgtcctcgttaacgataccctaaacgacgtcctcgtatacgataccctaaacgacgtcctcgttcgcgataccctaaacgacgtcctcgttcgcgataccctaaacaacgtcctccttaaaaataccgtaaacgacgacctcgttaacgataccctaaacgacgtcctcgttcgcgataccgtaaacgacgacctcgttaacgataccataaacgacgtccgacttaacgatcgcttaaacgacatcctcgttaacgacgacgccgtaaaaaacgtcctcgttaacgacgccctaaacgacgtcctcgttaacgacgccgtaaacgataacctctttaacgacgccgtaaacgacgtcctcattaacgataccgtcgacgacatcctcgataacgataccctaaataacgacctcgttaacgataccgtaaacgacatccgacttaacgatcgcgtaaacgacatcctcgttaacgacgccgtaaacgacgacctctttaacgacgccgtaaacgacgtcctcgttaacgataccctaaacgacatcctcatatactataccctaaacgacgtcctcgttcgcgataccgtaaacgacgacctcgttaataataccgtaaacgacgtcctcgttaacgataccctaaacgacgtcctcgtatacgacgccctaaacttcaacctcgttaacgacgccctaaacgacgtcctcgttaacgacgccctaaacgaaatcctccttaacgataccctaaacgacgtcctcgttcgcgataccctaaacgacgtcctccttaaaaataccctaaacgacgtcctcgtttacgatatcctaaacgacatcctcctttacgatatcctaaacgacgtcctcgttcgcgataccctaaacaacgacctcgttcgcgataccgtaaacgacgtcctcgttaacgataccctaaacgacgtcctcgtatacgacgccctaaacttcaacctcgttaacgacgccctaaacaaaatcctcgttaacgacgccctaaacgaaattctctttaacgataccctaaacgacgtcctcgttcgcgataccctaaacgatatcctccttaaaaataccgtaaacgacgacctcgttaacgataccctaaacgacgtcctcgttcgcgataccctaaacaacgtcctcgtttacgataccgtaaacgacgacctcgttaacgataccgtaaacgacatcctcgttaacgataccctaaataacgtccttatatacgataccctaaacttcgacctcgttaacgacgccctaaacgacgtcctcgttaacgacgccctaaacgacgtcctcgttaacgacgccctaaacgacgacctcgttaacgacgccctaaacgacgtcctcgttaacgacgccgtaaacgacgacctcgttaacgacgccgtaaacgacgtcctcgttaacgacgccctaaacgacgacctcgttaacgacgccctaaacgacgtcctcgttaataataccgtaaacgacatcctacttaacgataacctaaacgacctccttattaataataccataaacgacgtcctcaacgataccgtcgacgacatcctcgataacgataccctaaacaacgacctcgttaaccacgccctaaacgatataatatcctcgataacgatactataaataacgacctcgttaacgataccctacgcgataacctcgttaacgataccataaacgacgtccgacttaacgatcgcttaaacgacatcctcgttaacgacgacgccgtaaaaaacgtcctcgttaacgacaccctaaacgacgtcctcgttaacgacgccgtaaacgataacctctttaacgacgccctaaacgacgtcctcgttaacgacgccctcgacgacgtcctcgttaacgacgccctaaacgacgacctcgttaacgacgccgtaaacgacgtcctcgttaacgataccgtcgacgacgtcctcgataacgataccctaaacgacaacctcgttaacgataccgcgaacgacgtccgacttaacgatcgcgtaaacgacatcctcgttaacgacgccgtaaacgacgacctctttaacgacgccgtaaacgacgtcctcgttaacgataccctaaacgacgtcctcgttaacgacgccctaaacgaaatcctcgttaacgacgccctaaacgaaatcctccttaacgataccctaaacgacgtcctcgttattaacgccctaaacgaaatcctcgttaacgacgccctaaacgaaatcctccttaacgataccctaaacgacatcctcgttcgcgataccctaaacgacgtcctccttaaaaataccctaaacgacgtcctcgtttacgatatcctaaacgacgtcctcgtttacgatatcctaaactacgtcctcgtttacgataccgtaaacgacgtcctcgttaacgataccctaaacgacgtcctcgtttacgatatcctaaacgacgtcctctttaaaaacgccctaaacgacgacctcgttaacgatacaataaacgacgtcctcgttaacgacgccctaaacgacgacctcgttaacgacgccgtaaacgacgtcctcattaacgatattataaacgacgtcctcattaacgataccctaaataacatcctcgttaacgatatcgtaaaccgcgtcctcgttaacgatactctaaacgacgtcctcgttaacgattacgtaaacgacatcctcgttaacgatatcgtaaacgacttcctcgttaacgataccctaaacgacgtcctcctttacgataccctaaacgacgtcctcgttaacgatatcatatataacgtcctcaataacaatatcatatacaacgtcctcattaacgatatcgtatacaatatcctcata

SEQ ID NO: 4845 - DNA, 933 bp, Artificial Sequence
  chemically treated genomic DNA (Homo sapiens) CpG-island No: 4845
  unsure (71, 244, 351, 383, 394, 410..411, 415, 442, 479, 513, 528)
  unsure (563, 591, 613, 621, 677, 694, 696, 708, 724, 726, 733, 739)
  unsure (746, 755, 767, 774..775, 790..791, 797, 807, 818, 829, 834)
  unsure (848, 852..)
gttttttacgttcgttaaatcgttttttttgcgggttattttggttttttttatcgcggtacggagggttngggtcgggttttcgcggagtcgggttaatttttcgagtagcgtagcggagtcgtttttcgtacggagttgtcggtcgtttagaaaatagtgaggtaacgtttcggtttcgagtattcggtcgagttcgtttagtagttcgaggtagtaggcgttcgtattttttggtcgcgtnaggtagagcgtaggtagtcgttcgtacgtttagtatagtagcgttcgtaggaggtagggcgtcgtcgttcgggtttcggttattagcgggcgtagtagcgtttgggntcgtcgcgtgcgtttgtagtagcggcgttggntatgcgcgtantttgagcgttagtttnnttgngcgggtaaaatagagttgttaggcggnaggcgtacggtcgttcggtgtcgttatcgggtattanggtagaaggaagtcgatttagaggttagcggatncggtttacgagtggntttcgagttttttcgggttagttcgttacggatanttattgggattaggtcgaagagtagganggcggcgagggggtttaggggntagttagngaggacggtggtgaaattcgcgtggcgagttgcgtgtattagacgcggagtatttngggatagggattagagnanttcggcgatcgntcgttagcgtagtaanangaattanggtagnttatttngggcggaantataatgtgggnttacgtnnttttcgagttttcgnnacggtntttgggattngggttttcgancggttgttttnggtgnacgttattatttanttgnntttttaaaggtgcggtagagttaaggtcgacgacgttatgttgaggcgattcggacgttgaaacgttattaggcgatttt

SEQ ID NO: 4846 - DNA, 933 bp, Artificial Sequence
  chemically treated genomic DNA (Homo sapiens) CpG-island No: 4846
  unsure (81..82, 86, 100, 105, 116, 127, 137, 143..144, 159..160, 167)
  unsure (179, 188, 195, 201, 208, 210, 226, 238, 240, 257, 313, 321)
  unsure (343, 371, 406, 421, 455, 492, 519, 523..524, 540, 551, 583)
  unsure (690, 863)
aaaatcgcctaataacgtttcaacgtccgaatcgcctcaacataacgtcgtcgaccttaactctaccgcacctttaaaaanncaantaaataataacgtncaccnaaaacaaccgntcgaaaacccnaatcccaaanaccgtnncgaaaactcgaaaannacgtaancccacattatanttccgcccnaaataanctaccntaattcntnttactacgctaacgancgatcgccgaantnctctaatccctatcccnaaatactccgcgtctaatacacgcaactcgccacgcgaatttcaccaccgtcctcnctaactancccctaaaccccctcgccgccntcctactcttcgacctaatcccaataantatccgtaacgaactaacccgaaaaaactcgaaanccactcgtaaaccgnatccgctaacctctaaatcgacttccttctaccntaatacccgataacgacaccgaacgaccgtacgcctnccgcctaacaactctattttacccgcncaannaaactaacgctcaaantacgcgcatanccaacgccgctactacaaacgcacgcgacgancccaaacgctactacgcccgctaataaccgaaacccgaacgacgacgccctacctcctacgaacgctactatactaaacgtacgaacgactacctacgctctacctnacgcgaccaaaaaatacgaacgcctactacctcgaactactaaacgaactcgaccgaatactcgaaaccgaaacgttacctcactattttctaaacgaccgacaactccgtacgaaaaacgactccgctacgctactcgaaaaattaacccgactccgcgaaaacccgacccnaaccctccgtaccgcgataaaaaaaaccaaaataacccgcaaaaaaaacgatttaacgaacgtaaaaaac

SEQ ID NO: 4847 - DNA, 933 bp, Artificial Sequence
  chemically treated genomic DNA (Homo sapiens) CpG-island No: 4847
  unsure (81..82, 86, 100, 105, 116, 127, 137, 143..144, 159..160, 167)
  unsure (179, 188, 195, 201, 208, 210, 226, 238, 240, 257, 313, 321)
  unsure (343, 371, 406, 421, 455, 492, 519, 523..524, 540, 551, 583)
  unsure (690, 863)
aaaatcgtttagtgacgttttagcgttcgagtcgttttagtatgacgtcgtcgattttggttttatcgtatttttgaaaanntaantgagtagtgacgtntattnaaggtagtcgntcgaaagtttnagttttaaangtcgtnncggaggttcgggaanngcgtggntttatattatgntttcgtttnaggtggnttgttntggtttntnttgttacgttggcggncggtcgtcgagntnttttgatttttgttttngggtgtttcgcgtttggtgtacgtagttcgttacgcgggttttattatcgtttttnttggttantttttgagttttttcgtcgttnttttgtttttcgatttgattttagtggntgttcgtggcgggttggttcgagggggttcggagnttattcgtgggtcgngttcgttggtttttgagtcggtttttttttattntggtgttcggtggcggtatcgagcggtcgtgcgtttntcgtttggtagttttgttttgttcgtntagnngagttggcgtttaaantgcgcgtatanttagcgtcgttgttgtaggcgtacgcggcggntttaggcgttattgcgttcgttggtggtcgggattcgggcggcggcgttttattttttgcggacgttgttgtattgggcgtgcgagcggttgtttgcgttttatttngcgcggttagaaaatgcgggcgtttgttgtttcgggttgttagacgagttcggtcgagtgttcgaggtcgggacgttgttttattattttttgaacggtcgatagtttcgtacgggggacgatttcgttgcgttgttcggagaattggttcggtttcgcggggattcggtttnggtttttcgtgtcgcggtggaggaggttaaagtggttcgtaaggggggcggtttggcgggcgtggggggt

SEQ ID NO: 4848 - DNA, 933 bp, Artificial Sequence
  chemically treated genomic DNA (Homo sapiens) CpG-island No: 4848
  unsure (71, 244, 351, 383, 394, 410..411, 415, 442, 479, 513, 528)
  unsure (563, 591, 613, 621, 677, 694, 696, 708, 724, 726, 733, 739)
  unsure (746, 755, 767, 774..775, 790..791, 797, 807, 818, 829, 834)
  unsure (848, 852..)
accccccacgcccgccaaaccgccccccttacgaaccactttaacctcctccaccgcgacacgaaaaaccnaaaccgaatccccgcgaaaccgaaccaattctccgaacaacgcaacgaaatcgtcccccgtacgaaactatcgaccgttcaaaaaataataaaacaacgtcccgacctcgaacactcgaccgaactcgtctaacaacccgaaacaacaaacgcccgcattttctaaccgcgcnaaataaaacgcaaacaaccgctcgcacgcccaatacaacaacgtccgcaaaaaataaaacgccgccgcccgaatcccgaccaccaacgaacgcaataacgcctaaanccgccgcgtacgcctacaacaacgacgctaantatacgcgcantttaaacgccaactcnnctanacgaacaaaacaaaactaccaaacganaaacgcacgaccgctcgataccgccaccgaacaccanaataaaaaaaaaccgactcaaaaaccaacgaacncgacccacgaataanctccgaaccccctcgaaccaacccgccacgaacanccactaaaatcaaatcgaaaaacaaaanaacgacgaaaaaactcaaaaantaaccaanaaaaacgataataaaacccgcgtaacgaactacgtacaccaaacgcgaaacacccnaaaacaaaaatcaaaananctcgacgaccgnccgccaacgtaacaananaaaccanaacaanccacctnaaacgaaancataatataaanccacgcnnttcccgaacctccgnnacgacntttaaaactnaaactttcgancgactaccttnaatanacgtcactactcanttannttttcaaaaatacgataaaaccaaaatcgacgacgtcatactaaaacgactcgaacgctaaaacgtcactaaacgatttt

SEQ ID NO: 4849 - DNA, 798 bp, Artificial Sequence
  chemically treated genomic DNA (Homo sapiens) CpG-island No: 4849
  unsure (185, 197, 206, 361, 369, 380, 412, 415, 417, 419, 422, 491)
  unsure (532, 574, 638, 645)
gtcggcgttttttcgtcgttttttttcgttttagatgttttatattgcgcggttttagtcgggttagggagcgttaggagcgattggagtataaagcgtcgtagtcgttcgtttagcgtatttttcgggggacgtaacgtcgcgttaggtcgggggttgatttggaaatgaggtttcggcggcgncggcgttaattngtttttaanatagtggcggataaatagggtttggggttggttcgtacgttgtttgatcgttttcgttcgtcgttttattttttcgcgggtttcgtatttcgagattttagcgtattttatcgttttgtttgttagggttttcgaaagcgttgttggtttttttntcgcggtntattcggcggnttttttttcgttttttgaatcggtagttagtntgngntnagnttttaagggttcggcgtttagggatttaaaggattttttcgcgtttcgcgaggtttcggggtttcgggntttcgtttttttgttgttttcgtttttgttagggtcgcggnttagtttttgttggttattttattgcgattatgttcgttttntgcggggagtcggttttcgattttgtcggttttatttttttaatggtgagtttttatttgcgtntcggggntgtcgtttttcgaggtttttgcggtgtcgttatttcgacgcggggtgtttggcggtgttttgggagaaatagggtattagtttttattttatgttttcggtcggaaaaaatagggaggttgtagtcggaggtagtcgtttaaatagaattttt

SEQ ID NO: 4850 - DNA, 798 bp, Artificial Sequence
  chemically treated genomic DNA (Homo sapiens) CpG-island No: 4850
  unsure (154, 161, 225, 267, 308, 377, 380, 382, 384, 387, 419, 430)
  unsure (438, 593, 602, 614)
aaaaattctatttaaacgactacctccgactacaacctccctattttttccgaccgaaaacataaaataaaaactaataccctatttctcccaaaacaccgccaaacaccccgcgtcgaaataacgacaccgcaaaaacctcgaaaaacgacanccccganacgcaaataaaaactcaccattaaaaaaataaaaccgacaaaatcgaaaaccgactccccgcanaaaacgaacataatcgcaataaaataaccaacaaaaactaanccgcgaccctaacaaaaacgaaaacaacaaaaaaacgaaancccgaaaccccgaaacctcgcgaaacgcgaaaaaatcctttaaatccctaaacgccgaacccttaaaanctnancncanactaactaccgattcaaaaaacgaaaaaaaanccgccgaatanaccgcganaaaaaaaccaacaacgctttcgaaaaccctaacaaacaaaacgataaaatacgctaaaatctcgaaatacgaaacccgcgaaaaaataaaacgacgaacgaaaacgatcaaacaacgtacgaaccaaccccaaaccctatttatccgccactatnttaaaaacnaattaacgccgncgccgccgaaacctcatttccaaatcaacccccgacctaacgcgacgttacgtcccccgaaaaatacgctaaacgaacgactacgacgctttatactccaatcgctcctaacgctccctaacccgactaaaaccgcgcaatataaaacatctaaaacgaaaaaaaacgacgaaaaaacgccgac

SEQ ID NO: 4851 - DNA, 798 bp, Artificial Sequence
  chemically treated genomic DNA (Homo sapiens) CpG-island No: 4851
  unsure (154, 161, 225, 267, 308, 377, 380, 382, 384, 387, 419, 430)
  unsure (438, 593, 602, 614)
aaaggttttgtttggacggttgttttcggttataatttttttgtttttttcggtcgaaaatatgaaatagaaattagtgttttattttttttaaggtatcgttaaatatttcgcgtcggggtggcgatatcgtaggggtttcgggaggcggtantttcgangcgtaaatggagatttattattaggagggtgaagtcggtaaggtcgggggtcgatttttcgtanggaacgaatatggtcgtagtggggtggttagtagggattaantcgcggttttggtaagaacgagggtagtaagaaggcggaanttcgagatttcggagtttcgcggggcgcgggagggttttttgagtttttgggcgtcgggtttttgaggnttngntntangttaattgtcggtttagagggcggaaagaggntcgtcgggtgngtcgcganagaggggttagtagcgttttcggagattttggtaagtaaggcgatggggtgcgttgaggtttcggggtgcggggttcgcggggaggtggagcggcgggcggaaacgattaggtagcgtgcgggttagttttaagttttgtttgttcgttattgtnttgaaaatnagttggcgtcgncgtcgtcggggttttatttttaggttagttttcggtttgacgcggcgttgcgtttttcgggaggtgcgttaggcgaacggttgcggcgttttgtgttttagtcgtttttaacgttttttggttcggttggggtcgcgtagtgtagggtatttgaggcggggagaagcggcggggagacgtcggt

SEQ ID NO: 4852 - DNA, 798 bp, Artificial Sequence
  chemically treated genomic DNA (Homo sapiens) CpG-island No: 4852
  unsure (185, 197, 206, 361, 369, 380, 412, 415, 417, 419, 422, 491)
  unsure (532, 574, 638, 645)
accgacgtctccccgccgcttctccccgcctcaaataccctacactacgcgaccccaaccgaaccaaaaaacgttaaaaacgactaaaacacaaaacgccgcaaccgttcgcctaacgcacctcccgaaaaacgcaacgccgcgtcaaaccgaaaactaacctaaaaataaaaccccgacgacgncgacgccaactnattttcaanacaataacgaacaaacaaaacttaaaactaacccgcacgctacctaatcgtttccgcccgccgctccacctccccgcgaaccccgcaccccgaaacctcaacgcaccccatcgccttacttaccaaaatctccgaaaacgctactaacccctctntcgcgacncacccgacgancctctttccgccctctaaaccgacaattaacntanancnaancctcaaaaacccgacgcccaaaaactcaaaaaaccctcccgcgccccgcgaaactccgaaatctcgaanttccgccttcttactaccctcgttcttaccaaaaccgcganttaatccctactaaccaccccactacgaccatattcgttccntacgaaaaatcgacccccgaccttaccgacttcaccctcctaataataaatctccatttacgcntcgaaantaccgcctcccgaaacccctacgatatcgccaccccgacgcgaaatatttaacgataccttaaaaaaaataaaacactaatttctatttcatattttcgaccgaaaaaaacaaaaaaattataaccgaaaacaaccgtccaaacaaaaccttt

SEQ ID NO: 4853 - DNA, 1747 bp, Artificial Sequence
  chemically treated genomic DNA (Homo sapiens) CpG-island No: 4853
  unsure (15, 36, 333, 436, 471, 589, 594, 617, 686, 718..719, 725)
  unsure (733, 737, 748, 764, 771, 773, 787, 789, 794, 803, 817, 824)
  unsure (831, 834, 836, 841, 843, 858, 862, 868, 870, 874, 880, 924)
  unsure (936, 938, 953, 955, 989, 1013, 1040, 1054, 1069, 1106, 1153)
  unsure (1158, 1182, 1302, 1320, 1322, 1336, 1340, 1427, 1464, 1498)
  unsure (1516, 1523, 1541, 1640)
aattgtcggacgttntttagggtttagggcgcggtnggggaggttttagcgggtttgtatttttttaggtattcgttttaggcgggtttaagtttttaattagattttcggcgatttagcgtttagggaacgttaatgcgggtgatttttttcgttgtgtagggcggtgattcgggttggcgcgtttagtttttcgttagagtcggtcggggatttttttgataaatgcgatatttttttgtttttgcgtttttcgatcgcgcgttcggtttcgcgtgttttttacgttttataattttgtacgttttattcggtcgcgtatttttttcggantcgtgcgtcgtcgtttttattattgcgtttttagttgtgtgttttttgcgatcgggtttttcgatcgggcgttatcgtttgcgattttgagagttttgcgttngagagatcgtgcggttatttcgtttcgaggcgagntttttttgtttggtttttatttttagagcgtgtatttttcggttcgtgcggtttttaaggtggggcgttgggcggcgtcgaacggtcgaggtcgggcggggcggcgcggatcgaggancgtantcgcgtcgttatcggtcggcggntgttcgatcgggacggtagtcgtgttttcgtttttttttttttttttatttttttcgggtattttattnggtttcggcgtcggcgcgttcggtcgtttggnnggtcgngcggtatntcgngggatggtaanggcgtcggcgttcgancgacgantngtttcggagttgangngagancgtcggtantacgggcgcgattngtcgagncgtagtnatntnatttngncggaatggtttaggncggnttggtntngatngggcgncggggagtcgcggattgaggtagtgggcggcgaggggacgtcgnggagttcggggntnagtcggcgcgcggtngnggggttttcgggacgcgttgagtttggaggaganttttgcggttgtataattagtttnattaacgaggagtaggcgtgggtcgtngtgttattagtgtntgcggttttttgcgncgtcgtcgttcgtcgtcgttagtttcgttatcgtgtncgttcggtcgcgtagattcgcgtttggagggacggcgtcgttatttntggtngttcgcggtcgacgacgcgggagnagtcgtttttagttgcgggtgaggtcgtcgggtttttttttttcgtagtttttggaatattcgtcgttgggtcgttttatttttagcgttttcggttttttcgttttcgtcgtttttttnttattttgttacgggagnanttttcgggaggatntcgngcggggattcgtaggggaggacggcgttaggtcgtggttgtcggggtttttcggaggttagagtttcgtggcgggcgacggcgtaanattcgttgtgcggaggacgtttgggtgggtttggttntgcgggcgcggggcgttcgttattgtgttgtttncgggatagttgtttcggncgcgttntgggagcggtgggttggnttttgtttcgggttagcggtttgtgcgttttacgtcgtggttgttgatatacggtcgggtttacggggtggggagggtatcgtaggttttacgcggggntttcgtacggatttttagtgtcgttgtcggaaatatcgtattttttacgggaaattagtagtattttatattagatagttttttttcggttcggaaatgtaaagatg

SEQ ID NO: 4854 - DNA, 1747 bp, Artificial Sequence
  chemically treated genomic DNA (Homo sapiens) CpG-island No: 4854
  unsure (108, 207, 225, 232, 250, 284, 321, 408, 412, 426, 428, 446)
  unsure (566, 590, 595, 642, 679, 694, 708, 735, 759, 793, 795, 810)
  unsure (812, 824, 868, 874, 878, 880, 886, 890, 905, 907, 912, 914)
  unsure (917, 924, 931, 945, 954, 959, 961, 975, 977, 984, 1000, 1011)
  unsure (1015, 1023, 1029..1030, 1062, 1131, 1154, 1159, 1277, 1312)
  unsure (1415, 1712, 1733)
catctttacatttccgaaccgaaaaaaaactatctaatataaaatactactaatttcccgtaaaaaatacgatatttccgacaacgacactaaaaatccgtacgaaanccccgcgtaaaacctacgataccctccccaccccgtaaacccgaccgtatatcaacaaccacgacgtaaaacgcacaaaccgctaacccgaaacaaaanccaacccaccgctcccanaacgcgnccgaaacaactatcccgnaaacaacacaataacgaacgccccgcgcccgcanaaccaaacccacccaaacgtcctccgcacaacgaatnttacgccgtcgcccgccacgaaactctaacctccgaaaaaccccgacaaccacgacctaacgccgtcctcccctacgaatccccgcncganatcctcccgaaaantnctcccgtaacaaaataanaaaaaaacgacgaaaacgaaaaaaccgaaaacgctaaaaataaaacgacccaacgacgaatattccaaaaactacgaaaaaaaaaaacccgacgacctcacccgcaactaaaaacgactnctcccgcgtcgtcgaccgcgaacnaccanaaataacgacgccgtccctccaaacgcgaatctacgcgaccgaacgnacacgataacgaaactaacgacgacgaacgacgacgncgcaaaaaaccgcanacactaataacacnacgacccacgcctactcctcgttaatnaaactaattatacaaccgcaaaantctcctccaaactcaacgcgtcccgaaaaccccncnaccgcgcgccgactnanccccgaactccncgacgtcccctcgccgcccactacctcaatccgcgactccccgncgcccnatcnanaccaanccgncctaaaccattccgncnaaatnanatnactacgnctcgacnaatcgcgcccgtantaccgacgntctcncntcaactccgaaacnantcgtcgntcgaacgccgacgccnttaccatcccncganataccgcncgaccnnccaaacgaccgaacgcgccgacgccgaaaccnaataaaatacccgaaaaaaataaaaaaaaaaaaaaaaacgaaaacacgactaccgtcccgatcgaacanccgccgaccgataacgacgcgantacgntcctcgatccgcgccgccccgcccgacctcgaccgttcgacgccgcccaacgccccaccttaaaaaccgcacgaaccgaaaaatacacgctctaaaaataaaaaccaaacaaaaaaanctcgcctcgaaacgaaataaccgcacgatctctcnaacgcaaaactctcaaaatcgcaaacgataacgcccgatcgaaaaacccgatcgcaaaaaacacacaactaaaaacgcaataataaaaacgacgacgcacgantccgaaaaaaatacgcgaccgaataaaacgtacaaaattataaaacgtaaaaaacacgcgaaaccgaacgcgcgatcgaaaaacgcaaaaacaaaaaaatatcgcatttatcaaaaaaatccccgaccgactctaacgaaaaactaaacgcgccaacccgaatcaccgccctacacaacgaaaaaaatcacccgcattaacgttccctaaacgctaaatcgccgaaaatctaattaaaaacttaaacccgcctaaaacgaatacctaaaaaaatacaaacccgctaaaacctccccnaccgcgccctaaaccctaaanaacgtccgacaatt

SEQ ID NO: 4855 - DNA, 1747 bp, Artificial Sequence
  chemically treated genomic DNA (Homo sapiens) CpG-island No: 4855
  unsure (108, 207, 225, 232, 250, 284, 321, 408, 412, 426, 428, 446)
  unsure (566, 590, 595, 642, 679, 694, 708, 735, 759, 793, 795, 810)
  unsure (812, 824, 868, 874, 878, 880, 886, 890, 905, 907, 912, 914)
  unsure (917, 924, 931, 945, 954, 959, 961, 975, 977, 984, 1000, 1011)
  unsure (1015, 1023, 1029..1030, 1062, 1131, 1154, 1159, 1277, 1312)
  unsure (1415, 1712, 1733)
tatttttatattttcgaatcgaggaaaggttgtttaatgtggaatattgttagtttttcgtgaggagtgcggtgttttcgatagcggtattgaggattcgtgcggagntttcgcgtgaagtttgcgatgttttttttatttcgtgaattcggtcgtgtgttagtagttacggcgtgaggcgtataggtcgttggttcggagtagggnttagtttatcgtttttanaacgcgntcggggtagttgtttcgngggtagtataatgacgagcgtttcgcgttcgtanggttaggtttatttaaacgtttttcgtatagcggatnttgcgtcgtcgttcgttacgaggttttgattttcgaggggtttcggtagttacggtttgacgtcgtttttttttgcgggttttcgtncggnattttttcgggggntnttttcgtggtaaaatggnggggggacggcgggggcggaagggtcggggacgttgagggtaaggcggtttagcggcgggtgttttaagaattacgagggaaaggggttcggcggttttattcgtaattgggggcggttnttttcgcgtcgtcggtcgcgggtngttangggtgacggcgtcgtttttttagacgcggatttgcgcggtcgagcgnatacggtggcggggttggcggcggcgggcggcggcgncgtagggaatcgtangtattggtagtatnacggtttacgtttgtttttcgttgatngggttggttgtatagtcgtagganttttttttaggtttagcgcgtttcgggagttttntngtcgcgcgtcggttngntttcgggttttncggcgttttttcgtcgtttattgttttagttcgcggtttttcgncgtttngttngngttagntcgntttgagttatttcgntngggtngngtngttgcgnttcggtnagtcgcgttcgtgntgtcggcgnttttntnttagtttcggagtnantcgtcgntcgggcgtcggcgttnttattattttncggnatatcgtncggttnnttaaacgatcgggcgcgtcggcgtcgggattnagtggagtgttcgggaggggtgggggagaggaggggggcggggatacggttgtcgtttcggtcggatantcgtcggtcggtagcgacgcgantgcgnttttcggttcgcgtcgtttcgttcggtttcggtcgttcggcgtcgtttagcgttttattttaggggtcgtacgggtcgggggatgtacgttttggaggtgaggattaggtaggagggnttcgtttcgaggcgagatggtcgtacggttttttnagcgtagggtttttagagtcgtaggcggtgacgttcggtcggggggttcggtcgtaagggatatatagttgggggcgtaatggtgagggcggcgacgtacggnttcggaggggatgcgcggtcgggtagggcgtgtagggttgtggggcgtgggggatacgcggggtcgggcgcgcggtcggggggcgtaggggtaagagggtgtcgtatttattagggaagttttcggtcgattttggcggggaattgggcgcgttaattcgggttatcgttttgtatagcgggagaagttattcgtattgacgttttttaggcgttggatcgtcgaaggtttggttgaaaatttgaattcgtttggagcggatgtttaagaaaatgtaggttcgttgaagtttttttngtcgcgttttgggttttgaanagcgttcggtagtt

SEQ ID NO: 4856 - DNA, 1747 bp, Artificial Sequence
  chemically treated genomic DNA (Homo sapiens) CpG-island No: 4856
  unsure (15, 36, 333, 436, 471, 589, 594, 617, 686, 718..719, 725)
  unsure (733, 737, 748, 764, 771, 773, 787, 789, 794, 803, 817, 824)
  unsure (831, 834, 836, 841, 843, 858, 862, 868, 870, 874, 880, 924)
  unsure (936, 938, 953, 955, 989, 1013, 1040, 1054, 1069, 1106, 1153)
  unsure (1158, 1182, 1302, 1320, 1322, 1336, 1340, 1427, 1464, 1498)
  unsure (1516, 1523, 1541, 1640)
aactaccgaacgctnttcaaaacccaaaacgcgacnaaaaaaacttcaacgaacctacattttcttaaacatccgctccaaacgaattcaaattttcaaccaaaccttcgacgatccaacgcctaaaaaacgtcaatacgaataacttctcccgctatacaaaacgataacccgaattaacgcgcccaattccccgccaaaatcgaccgaaaacttccctaataaatacgacaccctcttacccctacgccccccgaccgcgcgcccgaccccgcgtatcccccacgccccacaaccctacacgccctacccgaccgcgcatcccctccgaanccgtacgtcgccgccctcaccattacgcccccaactatatatcccttacgaccgaaccccccgaccgaacgtcaccgcctacgactctaaaaaccctacgctnaaaaaaccgtacgaccatctcgcctcgaaacgaanccctcctacctaatcctcacctccaaaacgtacatcccccgacccgtacgacccctaaaataaaacgctaaacgacgccgaacgaccgaaaccgaacgaaacgacgcgaaccgaaaancgcantcgcgtcgctaccgaccgacgantatccgaccgaaacgacaaccgtatccccgcccccctcctctcccccacccctcccgaacactccactnaatcccgacgccgacgcgcccgatcgtttaannaaccgnacgatatnccgnaaaataataanaacgccgacgcccgancgacgantnactccgaaactaananaaaancgccgacancacgaacgcgactnaccgaancgcaacnacncnacccnancgaaataactcaaancganctaacncnaacnaaacgncgaaaaaccgcgaactaaaacaataaacgacgaaaaaacgccgnaaaacccgaaancnaaccgacgcgcgacnanaaaactcccgaaacgcgctaaacctaaaaaaaantcctacgactatacaaccaacccnatcaacgaaaaacaaacgtaaaccgtnatactaccaatacntacgattccctacgncgccgccgcccgccgccgccaaccccgccaccgtatncgctcgaccgcgcaaatccgcgtctaaaaaaacgacgccgtcacccntaacnacccgcgaccgacgacgcgaaaanaaccgcccccaattacgaataaaaccgccgaacccctttccctcgtaattcttaaaacacccgccgctaaaccgccttaccctcaacgtccccgacccttccgcccccgccgtccccccnccattttaccacgaaaanancccccgaaaaaatnccgnacgaaaacccgcaaaaaaaaacgacgtcaaaccgtaactaccgaaacccctcgaaaatcaaaacctcgtaacgaacgacgacgcaanatccgctatacgaaaaacgtttaaataaacctaaccntacgaacgcgaaacgctcgtcattatactacccncgaaacaactaccccgancgcgttntaaaaacgataaactaanccctactccgaaccaacgacctatacgcctcacgccgtaactactaacacacgaccgaattcacgaaataaaaaaaacatcgcaaacttcacgcgaaanctccgcacgaatcctcaataccgctatcgaaaacaccgcactcctcacgaaaaactaacaatattccacattaaacaacctttcctcgattcgaaaatataaaaata

SEQ ID NO: 4857 - DNA, 529 bp, Artificial Sequence
  chemically treated genomic DNA (Homo sapiens) CpG-island No: 4857
gcgtatgatttttttttagttttgttattttttttttacgtcggcgtttttatttatagatacgttttattatgatttttttttgattttattcgttattttttattatacgtttgtcgttatgtacgtttacgattagataagttttatgttcgtgatttttttatacgtttttttcgtttcgtttagttttgagacgaattgtgtttacgatacgcgtcgttttattcgtacgttcgcgtatcgtacgcgtcgattgtcgttttgttatcgatgagattatttttcgttttagtattttacggcgagtatagtttatttttattcgtcgcgcgtttatagtgttttcgtcgacgttaggttcgttatgatattatttgattagattggtatgacgcgtcgtttttttatgttagtatacgatatttcgtttttatgtttatatgtcgtgttgaacgcgatattacgattattcgtagttgtcgattattttaacgtgtattttcgatttattatattttttcgtata

SEQ ID NO: 4858 - DNA, 529 bp, Artificial Sequence
  chemically treated genomic DNA (Homo sapiens) CpG-island No: 4858
tatacgaaaaaatataataaatcgaaaatacacgttaaaataatcgacaactacgaataatcgtaatatcgcgttcaacacgacatataaacataaaaacgaaatatcgtatactaacataaaaaaacgacgcgtcataccaatctaatcaaataatatcataacgaacctaacgtcgacgaaaacactataaacgcgcgacgaataaaaataaactatactcgccgtaaaatactaaaacgaaaaataatctcatcgataacaaaacgacaatcgacgcgtacgatacgcgaacgtacgaataaaacgacgcgtatcgtaaacacaattcgtctcaaaactaaacgaaacgaaaaaaacgtataaaaaaatcacgaacataaaacttatctaatcgtaaacgtacataacgacaaacgtataataaaaaataacgaataaaatcaaaaaaaaatcataataaaacgtatctataaataaaaacgccgacgtaaaaaaaaaataacaaaactaaaaaaaaatcatacgc

SEQ ID NO: 4859 - DNA, 529 bp, Artificial Sequence
  chemically treated genomic DNA (Homo sapiens) CpG-island No: 4859
tgtacggaaagatgtagtaggtcgagggtatacgttgaggtagtcggtagttacgaatggtcgtaatgtcgcgtttagtacgatatgtaggtatggaggcgaggtgtcgtatattgatatagaggagcgacgcgttatgttagtttagttaagtagtgttatagcggatttagcgtcgacgggggtattgtaagcgcgcggcgagtgaagatggattatattcgtcgtagagtattaggacgaggagtggttttatcgatagtaagacgatagtcgacgcgtgcgatgcgcgggcgtgcgaatgagacggcgcgtatcgtagatatagttcgttttaggattggacggagcgagaggagcgtgtaaaagagttacgggtataagatttgtttagtcgtaggcgtatatgacggtaggcgtgtggtagaggatgacggatgaggttaggaaggagttataatggggcgtgtttgtaagtaggagcgtcgacgtggaaggagagtgataaggttgagaagaagttatgcgt

SEQ ID NO: 4860 - DNA, 529 bp, Artificial Sequence
  chemically treated genomic DNA (Homo sapiens) CpG-island No: 4860
acgcataacttcttctcaaccttatcactctccttccacgtcgacgctcctacttacaaacacgccccattataactccttcctaacctcatccgtcatcctctaccacacgcctaccgtcatatacgcctacgactaaacaaatcttatacccgtaactcttttacacgctcctctcgctccgtccaatcctaaaacgaactatatctacgatacgcgccgtctcattcgcacgcccgcgcatcgcacgcgtcgactatcgtcttactatcgataaaaccactcctcgtcctaatactctacgacgaatataatccatcttcactcgccgcgcgcttacaatacccccgtcgacgctaaatccgctataacactacttaactaaactaacataacgcgtcgctcctctatatcaatatacgacacctcgcctccatacctacatatcgtactaaacgcgacattacgaccattcgtaactaccgactacctcaacgtataccctcgacctactacatctttccgtaca

SEQ ID NO: 4861 - DNA, 566 bp, Artificial Sequence
  chemically treated genomic DNA (Homo sapiens) CpG-island No: 4861
cgcggattgtgtatacggtttttggggtttcgggggcgcggtagtggggtacgggattcgggggatttcgtattcggcgatatcgttacgagcggatagtgcgtatagcgagatcggcgttcgcggtgatcgcgtcgttcggtgttatgcgtaatttcggatttgtcgtagtatcggcgttggcggtatttcgcgtaatcggcgaacgcggggattatgcgttttcgtgcgcgtattagcggatgcgcgtcgtattcgggtgattcgtcgttttcgggggtatttcggcgaaatttgcgtgaaattttgtattgattcgttaatatgtgggataagcggcggcgtatcgcgtagattcgcggataatgcgcgtagagttgggcgattattgcggcgattcgggggattattatcgtagttacgcggttgtattgggcggatatttcgtgagtagacggcgcgtgagaacgcgtgggaatgcgtttgaaatttttcgcgatattttagcgttttattttcgggcgatattatcgtagagatgcgcgttgaattatcggcggcggtat

SEQ ID NO: 4862 - DNA, 566 bp, Artificial Sequence
  chemically treated genomic DNA (Homo sapiens) CpG-island No: 4862
ataccgccgccgataattcaacgcgcatctctacgataatatcgcccgaaaataaaacgctaaaatatcgcgaaaaatttcaaacgcattcccacgcgttctcacgcgccgtctactcacgaaatatccgcccaatacaaccgcgtaactacgataataatcccccgaatcgccgcaataatcgcccaactctacgcgcattatccgcgaatctacgcgatacgccgccgcttatcccacatattaacgaatcaatacaaaatttcacgcaaatttcgccgaaatacccccgaaaacgacgaatcacccgaatacgacgcgcatccgctaatacgcgcacgaaaacgcataatccccgcgttcgccgattacgcgaaataccgccaacgccgatactacgacaaatccgaaattacgcataacaccgaacgacgcgatcaccgcgaacgccgatctcgctatacgcactatccgctcgtaacgatatcgccgaatacgaaatcccccgaatcccgtaccccactaccgcgcccccgaaaccccaaaaaccgtatacacaatccgcg

SEQ ID NO: 4863 - DNA, 566 bp, Artificial Sequence
  chemically treated genomic DNA (Homo sapiens) CpG-island No: 4863
gtgtcgtcgtcggtggtttagcgcgtatttttgcgatgatatcgttcggaagtagggcgttggagtatcgcgagagattttaggcgtatttttacgcgtttttacgcgtcgtttgtttacgaaatgttcgtttagtataatcgcgtagttgcggtaatagtttttcgaatcgtcgtaatagtcgtttagttttgcgcgtattattcgcggatttacgcgatacgtcgtcgtttattttatatgttgacggattagtgtagagttttacgtagatttcgtcgagatgttttcgaggacggcgaattattcggatgcggcgcgtattcgttaatacgcgtacgagaacgtatgattttcgcgttcgtcggttacgcgagatgtcgttagcgtcgatgttgcggtaaattcgaggttgcgtatagtatcggacggcgcgattatcgcggacgtcggtttcgttatgcgtattattcgttcgtgacggtgtcgtcggatgcgaggtttttcgaatttcgtgttttattatcgcgttttcgagattttaagggtcgtgtgtataattcgcg

SEQ ID NO: 4864 - DNA, 566 bp, Artificial Sequence
  chemically treated genomic DNA (Homo sapiens) CpG-island No: 4864
cgcgaattatacacacgacccttaaaatctcgaaaacgcgataataaaacacgaaattcgaaaaacctcgcatccgacgacaccgtcacgaacgaataatacgcataacgaaaccgacgtccgcgataatcgcgccgtccgatactatacgcaacctcgaatttaccgcaacatcgacgctaacgacatctcgcgtaaccgacgaacgcgaaaatcatacgttctcgtacgcgtattaacgaatacgcgccgcatccgaataattcgccgtcctcgaaaacatctcgacgaaatctacgtaaaactctacactaatccgtcaacatataaaataaacgacgacgtatcgcgtaaatccgcgaataatacgcgcaaaactaaacgactattacgacgattcgaaaaactattaccgcaactacgcgattatactaaacgaacatttcgtaaacaaacgacgcgtaaaaacgcgtaaaaatacgcctaaaatctctcgcgatactccaacgccctacttccgaacgatatcatcgcaaaaatacgcgctaaaccaccgacgacgacac

SEQ ID NO: 4865 - DNA, 674 bp, Artificial Sequence
  chemically treated genomic DNA (Homo sapiens) CpG-island No: 4865
ttacgttcgtattttgggcgtttttatcgtattttcgaggttggtaattcgcgtttttcgggagttgagggagttttgttttttttagttcgtcgtttttgttcgttttcgagttcgcgttattttatattttagacgtcgaatttttttttttttttcgtcgtttttcgttggttagatttttttcgttttttttaatttttttagggaacggttgtttcgaggttagttttaaagcgtcgtcgtcgttcgcgacgttcgttttattttaggattcgagtcgtagagttgttaggtttggacgcgtttagtttgttgatttagtgcgggtgatttagttgggatttgtgcgagtggcgttgcggcgtattcgtcggtttttgtgcgtaggtagagttggcgacgtcgaagtcgcgtttcgttttttgtagagtttatttgagggcggggttttttagaaaagcggtttcgtagtacgggcgcgttttagacgatcggtttcgcgcgtttcgacgtacgtaggtaagtagcgcgttcgtaagaggagagcggttgagggtgcggcgagcggtggcgcgtcgttgtttagggtttttgagttattagagtcgggtttcgtggtttttttttaggttttttaacgtttgggttttgcggggatttcgttacgtttt

SEQ ID NO: 4866 - DNA, 674 bp, Artificial Sequence
  chemically treated genomic DNA (Homo sapiens) CpG-island No: 4866
aaaacgtaacgaaatccccgcaaaacccaaacgttaaaaaacctaaaaaaaaaccacgaaacccgactctaataactcaaaaaccctaaacaacgacgcgccaccgctcgccgcaccctcaaccgctctcctcttacgaacgcgctacttacctacgtacgtcgaaacgcgcgaaaccgatcgtctaaaacgcgcccgtactacgaaaccgcttttctaaaaaaccccgccctcaaataaactctacaaaaaacgaaacgcgacttcgacgtcgccaactctacctacgcacaaaaaccgacgaatacgccgcaacgccactcgcacaaatcccaactaaatcacccgcactaaatcaacaaactaaacgcgtccaaacctaacaactctacgactcgaatcctaaaataaaacgaacgtcgcgaacgacgacgacgctttaaaactaacctcgaaacaaccgttccctaaaaaaattaaaaaaaacgaaaaaaatctaaccaacgaaaaacgacgaaaaaaaaaaaaaaattcgacgtctaaaatataaaataacgcgaactcgaaaacgaacaaaaacgacgaactaaaaaaaacaaaactccctcaactcccgaaaaacgcgaattaccaacctcgaaaatacgataaaaacgcccaaaatacgaacgtaa

SEQ ID NO: 4867 - DNA, 674 bp, Artificial Sequence
  chemically treated genomic DNA (Homo sapiens) CpG-island No: 4867
agagcgtggcgagattttcgtagaatttaggcgttggagggtttggggaagagttacgaggttcgattttagtggtttaggggttttgggtagcggcgcgttatcgttcgtcgtatttttagtcgttttttttttgcgggcgcgttgtttgtttgcgtgcgtcgggacgcgcggggtcgatcgtttgaagcgcgttcgtattgcggagtcgtttttttagggagtttcgtttttaggtgggttttgtaggaggcggggcgcgatttcggcgtcgttagttttgtttgcgtataggagtcggcgggtgcgtcgtagcgttattcgtatagattttagttgggttattcgtattgagttaatagattgagcgcgtttaggtttgatagttttgcggttcgggttttgaggtgaggcgggcgtcgcgggcggcggcggcgttttgaggttagtttcgggatagtcgttttttgggggagttagaggggacgaggagggtttggttagcgagggacggcggggagagaaggggagttcggcgtttgaggtgtggggtgacgcgggttcggaagcgggtagaggcggcgagttgagggaaatagagtttttttagttttcgggaagcgcgggttgttagtttcggggatgcggtgggagcgtttaggatgcggacgtga

SEQ ID NO: 4868 - DNA, 674 bp, Artificial Sequence
  chemically treated genomic DNA (Homo sapiens) CpG-island No: 4868
tcacgtccgcatcctaaacgctcccaccgcatccccgaaactaacaacccgcgcttcccgaaaactaaaaaaactctatttccctcaactcgccgcctctacccgcttccgaacccgcgtcaccccacacctcaaacgccgaactccccttctctccccgccgtccctcgctaaccaaaccctcctcgtcccctctaactcccccaaaaaacgactatcccgaaactaacctcaaaacgccgccgccgcccgcgacgcccgcctcacctcaaaacccgaaccgcaaaactatcaaacctaaacgcgctcaatctattaactcaatacgaataacccaactaaaatctatacgaataacgctacgacgcacccgccgactcctatacgcaaacaaaactaacgacgccgaaatcgcgccccgcctcctacaaaacccacctaaaaacgaaactccctaaaaaaacgactccgcaatacgaacgcgcttcaaacgatcgaccccgcgcgtcccgacgcacgcaaacaaacaacgcgcccgcaaaaaaaaaacgactaaaaatacgacgaacgataacgcgccgctacccaaaacccctaaaccactaaaatcgaacctcgtaactcttccccaaaccctccaacgcctaaattctacgaaaatctcgccacgctct

SEQ ID NO: 4869 - DNA, 980 bp, Artificial Sequence
  chemically treated genomic DNA (Homo sapiens) CpG-island No: 4869
gtcgtgcggttcgaggcgaatttgttttagagtcgtcgggtttttttatttcgagtcgtatttttagtttcggtttgaggtggtcggcgattgcgtgcgtaaatataagattcgtattttatttttcgttattgtagtttcgcggtcgcgtttagagttttcggaatagatcggatttaatgcggattaggtaagcggaagtgtgtcgttttttttcggttagcgtagtacgagacgaggcggggaatcgcgggaggaggcggggtttagtgttgacgaatagttttcggggtttatgggcgcgggggtagtcgttcggttttttcggcgcgtttttttttcggggttgttgacgttttttagttttttatttttataaagtttcgcggcggttttgttttttttgtattcgcggcgcgttgcggttcgtggcgcggtttcgttttcgtttagtttcgtcggttttttttttttttcggagtcgcgcgtgaggacggttgaggtcgtaggtttgtggcggcgcgtcgggacgcgcgggcgagggtttatcgagagggcgggcgggcgtcggcggaattttcggttatagtttcgagtttttggggtcgttttttttcgtcgcgtggcgtagtcggggggcgcggtcgcggcgtcggggcgtcgggaggggcggagcgcgggagtgtttgtcgggacgcgggtcgggttgggtttcggaaggattaagtttgcggagcggtttttgttcgtcggtcgtgcggcgaggtagggtttgggttgcgatttcggcggtcgttcgcggttttgggagagttggggcgcgtgtttgaatttttcggttgtttttgtttttggagatttatttgatggggacgttaggtgtgtaggggcgtggcgcgtaggtaagcggattcggtgtttgtttcgtttaggggatgtttattagagcgttaggtttttttatttttattttttagaga

SEQ ID NO: 4870 - DNA, 980 bp, Artificial Sequence
  chemically treated genomic DNA (Homo sapiens) CpG-island No: 4870
tctctaaaaaataaaaataaaaaaacctaacgctctaataaacatcccctaaacgaaacaaacaccgaatccgcttacctacgcgccacgcccctacacacctaacgtccccatcaaataaatctccaaaaacaaaaacaaccgaaaaattcaaacacgcgccccaactctcccaaaaccgcgaacgaccgccgaaatcgcaacccaaaccctacctcgccgcacgaccgacgaacaaaaaccgctccgcaaacttaatccttccgaaacccaacccgacccgcgtcccgacaaacactcccgcgctccgcccctcccgacgccccgacgccgcgaccgcgccccccgactacgccacgcgacgaaaaaaaacgaccccaaaaactcgaaactataaccgaaaattccgccgacgcccgcccgccctctcgataaaccctcgcccgcgcgtcccgacgcgccgccacaaacctacgacctcaaccgtcctcacgcgcgactccgaaaaaaaaaaaaaaccgacgaaactaaacgaaaacgaaaccgcgccacgaaccgcaacgcgccgcgaatacaaaaaaaacaaaaccgccgcgaaactttataaaaataaaaaactaaaaaacgtcaacaaccccgaaaaaaaaacgcgccgaaaaaaccgaacgactacccccgcgcccataaaccccgaaaactattcgtcaacactaaaccccgcctcctcccgcgattccccgcctcgtctcgtactacgctaaccgaaaaaaaacgacacacttccgcttacctaatccgcattaaatccgatctattccgaaaactctaaacgcgaccgcgaaactacaataacgaaaaataaaatacgaatcttatatttacgcacgcaatcgccgaccacctcaaaccgaaactaaaaatacgactcgaaataaaaaaacccgacgactctaaaacaaattcgcctcgaaccgcacgac

SEQ ID NO: 4871 - DNA, 980 bp, Artificial Sequence
  chemically treated genomic DNA (Homo sapiens) CpG-island No: 4871
tttttaaaaaataaaaataaaaaagtttagcgttttagtgagtattttttggacgaggtaggtatcgggttcgtttatttacgcgttacgtttttgtatatttggcgtttttattaggtaggtttttaaggataggggtagtcgggaagtttaggtacgcgttttagtttttttaagatcgcgagcggtcgtcggggtcgtagtttaggttttgtttcgtcgtacggtcgacgagtagaagtcgtttcgtaaatttggttttttcggagtttagttcggttcgcgtttcggtagatattttcgcgtttcgtttttttcgacgtttcgacgtcgcggtcgcgtttttcgattgcgttacgcggcggggaggggcggttttaggggttcggggttgtagtcgagggtttcgtcggcgttcgttcgttttttcggtagattttcgttcgcgcgtttcggcgcgtcgttatagatttgcggttttagtcgtttttacgcgcggtttcgggaggggaaggaggtcgacggggttaggcgggaacggggtcgcgttacgggtcgtagcgcgtcgcgggtataaggagggtagaatcgtcgcggagttttgtggaaatgaggggttggggggcgttaatagtttcggggagggggcgcgtcggagaggtcgggcggttgttttcgcgtttataggtttcgggagttgttcgttaatattaggtttcgttttttttcgcggtttttcgtttcgtttcgtgttgcgttggtcggaaggaagcggtatattttcgtttgtttggttcgtattgagttcggtttgtttcggagattttgagcgcggtcgcggagttgtagtggcggggagtggggtgcggattttgtgtttgcgtacgtagtcgtcggttattttaggtcggagttagagatacggttcgggataggagggttcggcggttttgaggtaggttcgtttcgagtcgtacggt

SEQ ID NO: 4872 - DNA, 980 bp, Artificial Sequence
  chemically treated genomic DNA (Homo sapiens) CpG-island No: 4872
accgtacgactcgaaacgaacctacctcaaaaccgccgaaccctcctatcccgaaccgtatctctaactccgacctaaaataaccgacgactacgtacgcaaacacaaaatccgcaccccactccccgccactacaactccgcgaccgcgctcaaaatctccgaaacaaaccgaactcaatacgaaccaaacaaacgaaaatataccgcttccttccgaccaacgcaacacgaaacgaaacgaaaaaccgcgaaaaaaaacgaaacctaatattaacgaacaactcccgaaacctataaacgcgaaaacaaccgcccgacctctccgacgcgccccctccccgaaactattaacgccccccaacccctcatttccacaaaactccgcgacgattctaccctccttatacccgcgacgcgctacgacccgtaacgcgaccccgttcccgcctaaccccgtcgacctccttcccctcccgaaaccgcgcgtaaaaacgactaaaaccgcaaatctataacgacgcgccgaaacgcgcgaacgaaaatctaccgaaaaaacgaacgaacgccgacgaaaccctcgactacaaccccgaacccctaaaaccgcccctccccgccgcgtaacgcaatcgaaaaacgcgaccgcgacgtcgaaacgtcgaaaaaaacgaaacgcgaaaatatctaccgaaacgcgaaccgaactaaactccgaaaaaaccaaatttacgaaacgacttctactcgtcgaccgtacgacgaaacaaaacctaaactacgaccccgacgaccgctcgcgatcttaaaaaaactaaaacgcgtacctaaacttcccgactacccctatccttaaaaacctacctaataaaaacgccaaatatacaaaaacgtaacgcgtaaataaacgaacccgatacctacctcgtccaaaaaatactcactaaaacgctaaacttttttatttttattttttaaaaa

SEQ ID NO: 4873 - DNA, 656 bp, Artificial Sequence
  chemically treated genomic DNA (Homo sapiens) CpG-island No: 4873
  unsure (80, 106, 109, 274, 351, 375, 393, 412, 427, 465, 518, 556)
  unsure (561, 651)
ttcgaaagaaagttttacgaatttataaaggttttttttcgtttttttttcgaagttttttttttattttgtatttcggnttgtggatttattttttttttgttgnatntcggtcgtcggtttgtcgggtttggcgttttttagaaggtttagcgtcgggaaggggtttgtagttgtttcgttatcgtgcggttcgacgttatttcgcgttcgtgtgtaggttcggttcggtttttggttttcggtgcgagggttaacgttaggtttcggtttncggttttcggattaggtcgtgatttcgggtgttatgaagtaggagggttcggcgcggcgtcgcggcgcgaataaggncgaaaaacgtcgttcgtcgaaganagaataagaattttaatncgtcgtcggttttttaggnatgtggagatgaaangagaaggtagcgacgggtgtcgggttaacgggggaggntagacgttaagacggcggcgttagcggttgagtatttttagcgagagttggantatagttattttggagggtacggtagtttaggtcgggnaacgntgtcgcgatcgcgggtgatagcgatttttgtgatttggttttttgttgggaagttatagtagtttttattatttttagttttttgggatntattt

SEQ ID NO: 4874 - DNA, 656 bp, Artificial Sequence
  chemically treated genomic DNA (Homo sapiens) CpG-island No: 4874
  unsure (6, 96, 101, 139, 192, 230, 245, 264, 282, 306, 383, 548, 551)
  unsure (577)
aaatanatcccaaaaaactaaaaataataaaaactactataacttcccaacaaaaaaccaaatcacaaaaatcgctatcacccgcgatcgcgacancgttncccgacctaaactaccgtaccctccaaaataactatantccaactctcgctaaaaatactcaaccgctaacgccgccgtcttaacgtctancctcccccgttaacccgacacccgtcgctaccttctcntttcatctccacatncctaaaaaaccgacgacgnattaaaattcttattctntcttcgacgaacgacgtttttcgnccttattcgcgccgcgacgccgcgccgaaccctcctacttcataacacccgaaatcacgacctaatccgaaaaccgnaaaccgaaacctaacgttaaccctcgcaccgaaaaccaaaaaccgaaccgaacctacacacgaacgcgaaataacgtcgaaccgcacgataacgaaacaactacaaaccccttcccgacgctaaaccttctaaaaaacgccaaacccgacaaaccgacgaccganatncaacaaaaaaaaaataaatccacaanccgaaatacaaaataaaaaaaaaacttcgaaaaaaaaacgaaaaaaaacctttataaattcgtaaaactttctttcgaa

SEQ ID NO: 4875 - DNA, 656 bp, Artificial Sequence
  chemically treated genomic DNA (Homo sapiens) CpG-island No: 4875
  unsure (6, 96, 101, 139, 192, 230, 245, 264, 282, 306, 383, 548, 551)
  unsure (577)
gggtgnattttaaagaattgagggtggtggaggttgttgtggttttttagtaagaagttaaattataggggtcgttgttattcgcgatcgcggtancgttnttcggtttgggttgtcgtattttttaaggtgattgtgntttagttttcgttgggagtgtttagtcgttggcgtcgtcgttttggcgtttgntttttttcgttgattcggtattcgtcgttgtttttttnttttatttttatatntttggggggtcggcggcgngttggggtttttgttttnttttcggcgggcggcgtttttcgnttttgttcgcgtcgcggcgtcgcgtcgagtttttttgttttatggtattcggggttacggtttagttcggggatcgnaggtcggggtttggcgttaattttcgtatcggggattaggagtcgagtcgggtttgtatacgagcgcgagatagcgtcgggtcgtacgatgacggagtagttgtaaattttttttcggcgttgggttttttgggaaacgttaggttcggtaggtcgacggtcgangtntaataaaggggaaataaatttatagntcgaggtgtaggatgaaggaggagtttcgaggaaggagcggggaggagtttttatgggttcgtggggttttttttcgag

SEQ ID NO: 4876 - DNA, 656 bp, Artificial Sequence
  chemically treated genomic DNA (Homo sapiens) CpG-island No: 4876
  unsure (80, 106, 109, 274, 351, 375, 393, 412, 427, 465, 518, 556)
  unsure (561, 651)
ctcgaaaaaaaaccccacgaacccataaaaactcctccccgctccttcctcgaaactcctccttcatcctacacctcganctataaatttatttcccctttattanacntcgaccgtcgacctaccgaacctaacgtttcccaaaaaacccaacgccgaaaaaaaatttacaactactccgtcatcgtacgacccgacgctatctcgcgctcgtatacaaacccgactcgactcctaatccccgatacgaaaattaacgccaaaccccgacctncgatccccgaactaaaccgtaaccccgaataccataaaacaaaaaaactcgacgcgacgccgcgacgcgaacaaaancgaaaaacgccgcccgccgaaaanaaaacaaaaaccccaacncgccgccgaccccccaaanatataaaaataaaanaaaaaaacaacgacgaataccgaatcaacgaaaaaaancaaacgccaaaacgacgacgccaacgactaaacactcccaacgaaaactaaancacaatcaccttaaaaaatacgacaacccaaaccgaanaacgntaccgcgatcgcgaataacaacgacccctataatttaacttcttactaaaaaaccacaacaacctccaccaccctcaattctttaaaatncaccc

SEQ ID NO: 4877 - DNA, 660 bp, Artificial Sequence
  chemically treated genomic DNA (Homo sapiens) CpG-island No: 4877
  unsure (68, 84, 93, 202, 218, 226, 636, 638)
cgttttttcggattttttgtaagttttttttttatattcgcgttcgcgttttcgttttttcgttcggnttttgttttttttttnttggtcgtngatttcgttttcgttttcgtttcggtttcgcgtagttttcggtttttggtagagtttagttcgcgtttattcggagtcggggagggagagaaaaatgagtttttttgtngttcggtggcggtgtntaattgantcgcgcgcgggcgggttgcgcgtcgggttgggggttttattcgaagttatcggcgcgtaattatcgggaaaaaattgggacggtatcgcggtgaaattagttaacgattattacggtgggttcgcggaagatcgtttggcgttgagggttgtagatttcgttataatacgttggacgggtcggggatttggagtacggcggaggcggattttatttttgtttcgattttttttttattttttttatttttaatttttttttcgttcgcgttttttttttttatttattttgtcgtcgtatcgattcgcggtcgattttcgtagcggttagcgttttcgttcgttgttttttttttttttagttcggtttttttcgcgggggttgttatcgagcgtttggtataggacggntntatgtttcggggaaggagggat

SEQ ID NO: 4878 - DNA, 660 bp, Artificial Sequence
  chemically treated genomic DNA (Homo sapiens) CpG-island No: 4878
  unsure (23, 25, 435, 443, 459, 568, 577, 593)
atccctccttccccgaaacatananccgtcctataccaaacgctcgataacaacccccgcgaaaaaaaccgaactaaaaaaaaaaaaaacaacgaacgaaaacgctaaccgctacgaaaatcgaccgcgaatcgatacgacgacaaaataaataaaaaaaaaaaacgcgaacgaaaaaaaaattaaaaataaaaaaaataaaaaaaaaatcgaaacaaaaataaaatccgcctccgccgtactccaaatccccgacccgtccaacgtattataacgaaatctacaaccctcaacgccaaacgatcttccgcgaacccaccgtaataatcgttaactaatttcaccgcgataccgtcccaattttttcccgataattacgcgccgataacttcgaataaaacccccaacccgacgcgcaacccgcccgcgcgcgantcaattanacaccgccaccgaacnacaaaaaaactcatttttctctccctccccgactccgaataaacgcgaactaaactctaccaaaaaccgaaaactacgcgaaaccgaaacgaaaacgaaaacgaaatcnacgaccaanaaaaaaaaaacaaaanccgaacgaaaaaacgaaaacgcgaacgcgaatataaaaaaaaaacttacaaaaaatccgaaaaaacg

SEQ ID NO: 4879 - DNA, 660 bp, Artificial Sequence
  chemically treated genomic DNA (Homo sapiens) CpG-island No: 4879
  unsure (23, 25, 435, 443, 459, 568, 577, 593)
gttttttttttttcggggtatgngntcgttttgtgttaggcgttcggtgatagttttcgcgggggaggtcgggttgggaaaggagagggtagcgggcgggggcgttggtcgttgcgagggtcggtcgcgggtcgatacggcggtaggatgaatgggagaggggagcgcgggcgggaggaggattgaggatgagggggatgagggagaggtcggagtaggggtggggttcgttttcgtcgtgttttaggttttcggttcgtttagcgtgttgtgacgggatttgtagtttttagcgttaagcggtttttcgcggatttatcgtagtgatcgttaattaattttatcgcggtatcgttttagttttttttcgataattgcgcgtcggtagtttcgagtaaggtttttagttcggcgcgtagttcgttcgcgcgcganttaattgnatatcgttatcgggtngtaggaaaatttattttttttttttttttcggtttcgggtgggcgcgggttgagttttgttaagggtcgggggttacgcggggtcggggcgggggcgggggcggggttnacggttagnggagggagggtagggntcgagcgagggggcgggggcgcgggcgcgggtgtgggaaggaggtttgtaaggaattcgaggaggcg

SEQ ID NO: 4880 - DNA, 660 bp, Artificial Sequence
  chemically treated genomic DNA (Homo sapiens) CpG-island No: 4880
  unsure (68, 84, 93, 202, 218, 226, 636, 638)
cgcctcctcgaattccttacaaacctccttcccacacccgcgcccgcgcccccgccccctcgctcganccctaccctccctccnctaaccgtnaaccccgcccccgcccccgccccgaccccgcgtaacccccgacccttaacaaaactcaacccgcgcccacccgaaaccgaaaaaaaaaaaaaaaataaattttcctacnacccgataacgatatncaattaantcgcgcgcgaacgaactacgcgccgaactaaaaaccttactcgaaactaccgacgcgcaattatcgaaaaaaaactaaaacgataccgcgataaaattaattaacgatcactacgataaatccgcgaaaaaccgcttaacgctaaaaactacaaatcccgtcacaacacgctaaacgaaccgaaaacctaaaacacgacgaaaacgaaccccacccctactccgacctctccctcatccccctcatcctcaatcctcctcccgcccgcgctcccctctcccattcatcctaccgccgtatcgacccgcgaccgaccctcgcaacgaccaacgcccccgcccgctaccctctcctttcccaacccgacctcccccgcgaaaactatcaccgaacgcctaacacaaaacgancncataccccgaaaaaaaaaaaac

SEQ ID NO: 4881 - DNA, 887 bp, Artificial Sequence
  chemically treated genomic DNA (Homo sapiens) CpG-island No: 4881
  unsure (38, 40, 67, 69, 280, 316, 390, 413, 436, 730, 737)
tattttttcgtggggacgtattttaagattcgaagagngnttattttttattagtttagagtgttgngnttaatcgtcgtttatcgttatttatacgcgtttttagaaattttgttatcgaaaacgcgttttaaatttatagatcgatacgtaacggatttacggatttcgagttttcgattacgattttcgttttagttaagttatatttcgtttttggtcggtcgtatttattatatttgcgcgtcgttatttgtcgttgttgttttcggacggtttntcgtgtggttttttcgcgtttcggttttggtttcgnggcgcgtcgttagtcgttcgtcgtcgttattttttttaggtttaggaggtggtttatcgagaagtttattgatntatttgggcgtagtcgtcgggtntttagcgcgggtggaggcggcgngcggtttcgggtttagcgtcggtttgtttagggagaaaggcggcggtcgcgattgtttaatgattcgacgaaagtcgggggggtcggagggggtttcgggttcgggttttaggaagggtcgcgggcgcgggtcggagcgagagtttcggtcgtttcgcgttttgttttagttttcgtcgttattattacgttcgcggttcgttcggcgttgacgtcggggaaataaatttttcgtttttttttttttagttacggtcgttcgtttcggagtcgttggtgatacgtcgtgcgttnggttatnacgttttatttttgaagtaaatttcgtttttcgttttttttttcgttttttttttttcgcgcgtttcgttcgtttttatttcggattttggcgttgggggcggggaaggggtgttttttttttattttttttatttattttttagggagt

SEQ ID NO: 4882 - DNA, 887 bp, Artificial Sequence
  chemically treated genomic DNA (Homo sapiens) CpG-island No: 4882
  unsure (151, 158, 452, 475, 498, 572, 608, 819, 821, 848, 850)
actccctaaaaaataaataaaaaaaataaaaaaaaaacaccccttccccgcccccaacgccaaaatccgaaataaaaacgaacgaaacgcgcgaaaaaaaaaaaacgaaaaaaaaaacgaaaaacgaaatttacttcaaaaataaaacgtnataaccnaacgcacgacgtatcaccaacgactccgaaacgaacgaccgtaactaaaaaaaaaaaaacgaaaaatttatttccccgacgtcaacgccgaacgaaccgcgaacgtaataataacgacgaaaactaaaacaaaacgcgaaacgaccgaaactctcgctccgacccgcgcccgcgacccttcctaaaacccgaacccgaaaccccctccgacccccccgactttcgtcgaatcattaaacaatcgcgaccgccgcctttctccctaaacaaaccgacgctaaacccgaaaccgcncgccgcctccacccgcgctaaanacccgacgactacgcccaaatanatcaataaacttctcgataaaccacctcctaaacctaaaaaaaataacgacgacgaacgactaacgacgcgccncgaaaccaaaaccgaaacgcgaaaaaaccacacganaaaccgtccgaaaacaacaacgacaaataacgacgcgcaaatataataaatacgaccgaccaaaaacgaaatataacttaactaaaacgaaaatcgtaatcgaaaactcgaaatccgtaaatccgttacgtatcgatctataaatttaaaacgcgttttcgataacaaaatttctaaaaacgcgtataaataacgataaacgacgattaancncaacactctaaactaataaaaaataancnctcttcgaatcttaaaatacgtccccacgaaaaaata

SEQ ID NO: 4883 - DNA, 887 bp, Artificial Sequence
  chemically treated genomic DNA (Homo sapiens) CpG-island No: 4883
  unsure (151, 158, 452, 475, 498, 572, 608, 819, 821, 848, 850)
attttttaaaaagtgggtggggagggtgaagggaggatatttttttttcgtttttagcgttagagttcggggtgggggcgggcgaggcgcgcggggaggagagggcggaggagaggacggggggcgaggtttgttttaagaatggggcgtngtggttnggcgtacggcgtgttattagcggtttcggagcgagcggtcgtggttgagaaggggagggcggaaagtttgttttttcgacgttagcgtcgggcgggtcgcgagcgtagtgatggcggcgggagttagggtagagcgcggggcggtcggggttttcgtttcgattcgcgttcgcgattttttttgggattcgagttcgagatttttttcggttttttcggttttcgtcgggttattggatagtcgcggtcgtcgtttttttttttggataagtcggcgttgggttcggggtcgtncgtcgtttttattcgcgttgggngttcggcgattgcgtttaggtgnattaatgaatttttcggtgagttattttttggatttggaagaggtggcggcggcgggcggttggcggcgcgttncggggttagggtcgaggcgcgggagggttatacggngagtcgttcgggggtagtagcggtagatggcggcgcgtaggtatggtgagtacggtcggttagggacggggtgtggtttggttggggcgagggtcgtggtcggaggttcggggttcgtggattcgttgcgtgtcggtttatagatttagggcgcgttttcggtggtaggatttttgggggcgcgtgtaagtgacggtggacggcggttgantntagtattttgggttggtggagggtgantntttttcgggttttggggtgcgtttttacgggaaagtg

SEQ ID NO: 4884 - DNA, 887 bp, Artificial Sequence
  chemically treated genomic DNA (Homo sapiens) CpG-island No: 4884
  unsure (38, 40, 67, 69, 280, 316, 390, 413, 436, 730, 737)
cactttcccgtaaaaacgcaccccaaaacccgaaaaanantcaccctccaccaacccaaaatactanantcaaccgccgtccaccgtcacttacacgcgcccccaaaaatcctaccaccgaaaacgcgccctaaatctataaaccgacacgcaacgaatccacgaaccccgaacctccgaccacgaccctcgccccaaccaaaccacaccccgtccctaaccgaccgtactcaccatacctacgcgccgccatctaccgctactacccccgaacgactcnccgtataaccctcccgcgcctcgaccctaaccccgnaacgcgccgccaaccgcccgccgccgccacctcttccaaatccaaaaaataactcaccgaaaaattcattaatncacctaaacgcaatcgccgaacncccaacgcgaataaaaacgacgnacgaccccgaacccaacgccgacttatccaaaaaaaaaaacgacgaccgcgactatccaataacccgacgaaaaccgaaaaaaccgaaaaaaatctcgaactcgaatcccaaaaaaaatcgcgaacgcgaatcgaaacgaaaaccccgaccgccccgcgctctaccctaactcccgccgccatcactacgctcgcgacccgcccgacgctaacgtcgaaaaaacaaactttccgccctccccttctcaaccacgaccgctcgctccgaaaccgctaataacacgccgtacgccnaaccacnacgccccattcttaaaacaaacctcgccccccgtcctctcctccgccctctcctccccgcgcgcctcgcccgcccccaccccgaactctaacgctaaaaacgaaaaaaaaatatcctcccttcaccctccccacccactttttaaaaaat

SEQ ID NO: 4885 - DNA, 1084 bp, Artificial Sequence
  chemically treated genomic DNA (Homo sapiens) CpG-island No: 4885
gtcgcgcggttttgtttttttatttagtcgatgattcgggtttcgagcgtttggtgggcgttttggcgtcggttttgtgttagttgtcgttgcgcgtggtcgtagatttgtggagtcgtcgtgaattgagcgcgtaggggttcgtggtttggttttacgcgtagcggcgttagattttgtaggagggcggcgtggtggttttgtttttttttttcggtgcggtggcgttgtgtagcgagtggttataggatggggtgttcgggttcggggcgtacggttcgtacgacgtttttcgcgtttcgtttagttgcgtgttgttcgattttttgtagggtcgggcgttcggtagttacgtgggggtttgtttcgataggttgttttattcggacgtcgtattcgttttttttcgtatcgtgttcgtttttatattgtttttttaattgttagattttttgggggttttgtagtagtttcgcgtttcgcgtttcgggcggttttaagagagagcggagtaagtgtttcgggttttttagttagttttggatagttatttttatttttcggggattttcgcgtcgggacgcggggtgggattaggggcgggatttggggcgggggacgggatttaaataaaggtagacgttgtttttttatttatgtggtttatacgcgttttcgttttagtggcggggttggtaaacgtcgttttttagtttcgcggttttttaaagttcggataggtgtagttcggtgtcgtttttggttggttggcgtggggtgacgtaatggtatatggttcgtcgttattggttgggcggtaagtttcgttttttggattgcggcgcgggtgggggttgtgcgttttacgtaggttgtggtagcgacgcggtgaggagacggtttacggcgttcgcgggttggggcggtcgtttttttttttttcgtggtttacgagggtttggatttttttttgtcggttcgtgggtcgtgtttttgtttttttgcgaggttttgaatttgattttttttttttatattcggattcgggtttttttttttaagttcggggtttcggatatttttt

SEQ ID NO: 4886 - DNA, 1084 bp, Artificial Sequence
  chemically treated genomic DNA (Homo sapiens) CpG-island No: 4886
aaaaaatatccgaaaccccgaacttaaaaaaaaaaacccgaatccgaatataaaaaaaaaaaatcaaattcaaaacctcgcaaaaaaacaaaaacacgacccacgaaccgacaaaaaaaaatccaaaccctcgtaaaccacgaaaaaaaaaaaaacgaccgccccaacccgcgaacgccgtaaaccgtctcctcaccgcgtcgctaccacaacctacgtaaaacgcacaacccccacccgcgccgcaatccaaaaaacgaaacttaccgcccaaccaataacgacgaaccatataccattacgtcaccccacgccaaccaaccaaaaacgacaccgaactacacctatccgaactttaaaaaaccgcgaaactaaaaaacgacgtttaccaaccccgccactaaaacgaaaacgcgtataaaccacataaataaaaaaacaacgtctacctttatttaaatcccgtcccccgccccaaatcccgcccctaatcccaccccgcgtcccgacgcgaaaatccccgaaaaataaaaataactatccaaaactaactaaaaaacccgaaacacttactccgctctctcttaaaaccgcccgaaacgcgaaacgcgaaactactacaaaacccccaaaaaatctaacaattaaaaaaacaatataaaaacgaacacgatacgaaaaaaaacgaatacgacgtccgaataaaacaacctatcgaaacaaacccccacgtaactaccgaacgcccgaccctacaaaaaatcgaacaacacgcaactaaacgaaacgcgaaaaacgtcgtacgaaccgtacgccccgaacccgaacaccccatcctataaccactcgctacacaacgccaccgcaccgaaaaaaaaaaacaaaaccaccacgccgccctcctacaaaatctaacgccgctacgcgtaaaaccaaaccacgaacccctacgcgctcaattcacgacgactccacaaatctacgaccacgcgcaacgacaactaacacaaaaccgacgccaaaacgcccaccaaacgctcgaaacccgaatcatcgactaaataaaaaaacaaaaccgcgcgac

SEQ ID NO: 4887 - DNA, 1084 bp, Artificial Sequence
  chemically treated genomic DNA (Homo sapiens) CpG-island No: 4887
gggaggtgttcggaatttcgggtttggagggaggagttcggattcggatatgaagggaagggattagatttagggtttcgtagaagggtaaaggtacggtttacgagtcggtagagaaggatttagattttcgtaggttacggagaaggaagaagcgatcgttttagttcgcgggcgtcgtgggtcgtttttttatcgcgtcgttgttatagtttgcgtaaaacgtataatttttattcgcgtcgtagtttagggggcggagtttgtcgtttagttaatggcgacgggttatgtgttattacgttattttacgttagttaattagaggcggtatcgagttgtatttgttcgggttttaaagggtcgcggggttagggaacgacgtttgttagtttcgttattgaaacggagacgcgtgtgggttatatgggtagaaaaatagcgtttgtttttatttaagtttcgtttttcgttttaggtttcgtttttggttttatttcgcgtttcggcgcgggagttttcgggggatggaagtagttatttagggttggttgaagggttcgggatatttgtttcgtttttttttggagtcgttcggaacgcggggcgcgaggttgttgtagggtttttaggaagtttggtagttgggagggtagtgtgaagacgggtacggtgcggaaaagggcgggtacggcgttcgggtggagtagtttgtcgaagtaggtttttacgtagttgtcgggcgttcggttttgtaagaagtcgggtagtacgtagttgagcgaggcgcggaaggcgtcgtgcgggtcgtgcgtttcgggttcggatattttattttgtagttattcgttgtatagcgttatcgtatcgggagagaagagtaagattattacgtcgtttttttgtagggtttggcgtcgttgcgcgtgaaattaagttacgggtttttgcgcgtttagtttacgacggttttataggtttacggttacgcgtagcggtagttggtatagggtcgacgttagggcgtttattaggcgttcgaaattcgagttatcggttgagtagaggagtagagtcgcgcggt

SEQ ID NO: 4888 - DNA, 1084 bp, Artificial Sequence
  chemically treated genomic DNA (Homo sapiens) CpG-island No: 4888
accgcgcgactctactcctctactcaaccgataactcgaatttcgaacgcctaataaacgccctaacgtcgaccctataccaactaccgctacgcgtaaccgtaaacctataaaaccgtcgtaaactaaacgcgcaaaaacccgtaacttaatttcacgcgcaacgacgccaaaccctacaaaaaaacgacgtaataatcttactcttctctcccgatacgataacgctatacaacgaataactacaaaataaaatatccgaacccgaaacgcacgacccgcacgacgccttccgcgcctcgctcaactacgtactacccgacttcttacaaaaccgaacgcccgacaactacgtaaaaacctacttcgacaaactactccacccgaacgccgtacccgcccttttccgcaccgtacccgtcttcacactaccctcccaactaccaaacttcctaaaaaccctacaacaacctcgcgccccgcgttccgaacgactccaaaaaaaaacgaaacaaatatcccgaacccttcaaccaaccctaaataactacttccatcccccgaaaactcccgcgccgaaacgcgaaataaaaccaaaaacgaaacctaaaacgaaaaacgaaacttaaataaaaacaaacgctatttttctacccatataacccacacgcgtctccgtttcaataacgaaactaacaaacgtcgttccctaaccccgcgaccctttaaaacccgaacaaatacaactcgataccgcctctaattaactaacgtaaaataacgtaataacacataacccgtcgccattaactaaacgacaaactccgccccctaaactacgacgcgaataaaaattatacgttttacgcaaactataacaacgacgcgataaaaaaacgacccacgacgcccgcgaactaaaacgatcgcttcttccttctccgtaacctacgaaaatctaaatccttctctaccgactcgtaaaccgtacctttacccttctacgaaaccctaaatctaatcccttcccttcatatccgaatccgaactcctccctccaaacccgaaattccgaacacctccc

SEQ ID NO: 4889 - DNA, 751 bp, Artificial Sequence
  chemically treated genomic DNA (Homo sapiens) CpG-island No: 4889
gcggcggattcggaggcgtagcggcgtttggtgggagcgttggttgaattgttacgggtagcgttgggcggcgggcgcgacgtgatcgtggatttgtgggaggggaggtacgtggcgcgcgtgggttcgttgtcgtggttttgggcggcgcggacgcgcgtagcgcgggagtagggtattgtgttgttgttgtggagcggcgtcgattttcgttcggttagcggtttcgattttcgcgtcgcgtttttgttcgttttgttttacgttgtttcgcgttcgttgttgttgttcgtttattttagtcgtttttgcgttaagggcgatattttttcgtcgttgcgcgttttgtcgcgttatcgtttgttgcgcgatttgtcgcgtttgttgcgggcgttggacgcgcggtttttcgtagaggttattagttggggtcgttttggggcgcggtagcgtaggtagagtcgtttagagttgtgtagtcggtttgaacgagaggtcgttcgatttgtagatttaggttgagtagagttttatcgtagtttcgggtgtttgcggtcgtaacgtaacggatattggttggaatttcggaatgagttttcgattttgaaatttttggggtgtttcgaggacgattggtcgaaaagtcgtattttttgttttataggtcggaagttttagtttagttttcgcgcgcgtttttttttttttttatatttttttttgattgagagtttttttaatttttgttttg

SEQ ID NO: 4890 - DNA, 751 bp, Artificial Sequence
  chemically treated genomic DNA (Homo sapiens) CpG-island No: 4890
caaaacaaaaattaaaaaaactctcaatcaaaaaaaaatataaaaaaaaaaaaaaacgcgcgcgaaaactaaactaaaacttccgacctataaaacaaaaaatacgacttttcgaccaatcgtcctcgaaacaccccaaaaatttcaaaatcgaaaactcattccgaaattccaaccaatatccgttacgttacgaccgcaaacacccgaaactacgataaaactctactcaacctaaatctacaaatcgaacgacctctcgttcaaaccgactacacaactctaaacgactctacctacgctaccgcgccccaaaacgaccccaactaataacctctacgaaaaaccgcgcgtccaacgcccgcaacaaacgcgacaaatcgcgcaacaaacgataacgcgacaaaacgcgcaacgacgaaaaaatatcgcccttaacgcaaaaacgactaaaataaacgaacaacaacaacgaacgcgaaacaacgtaaaacaaaacgaacaaaaacgcgacgcgaaaatcgaaaccgctaaccgaacgaaaatcgacgccgctccacaacaacaacacaataccctactcccgcgctacgcgcgtccgcgccgcccaaaaccacgacaacgaacccacgcgcgccacgtacctcccctcccacaaatccacgatcacgtcgcgcccgccgcccaacgctacccgtaacaattcaaccaacgctcccaccaaacgccgctacgcctccgaatccgccgc

SEQ ID NO: 4891 - DNA, 751 bp, Artificial Sequence
  chemically treated genomic DNA (Homo sapiens) CpG-island No: 4891
tagaataggggttagaggagtttttagttaagggaaagtatgaggaggaagagggacgcgcgcggggattgggttgggattttcggtttgtgaggtagggaatgcggtttttcggttagtcgttttcgaggtattttaaggattttagggtcgaaggtttatttcggggttttagttagtgttcgttgcgttgcggtcgtagatattcgggattgcggtggagttttgtttaatttaggtttgtaagtcgggcggtttttcgtttaagtcggttgtatagttttaggcggttttgtttgcgttgtcgcgttttaaggcggttttagttggtggtttttgcgaaaggtcgcgcgtttagcgttcgtagtagacgcggtaggtcgcgtagtaggcggtagcgcggtagggcgcgtagcggcggggggatgtcgtttttggcgtagaggcgattgaagtaagcgagtagtagtagcgggcgcggggtagcgtggagtagggcgagtaggggcgcggcgcgggggtcggggtcgttgatcgggcgaaggtcggcgtcgttttatagtagtagtatagtgttttgttttcgcgttacgcgcgttcgcgtcgtttagagttacggtagcgggtttacgcgcgttacgtgtttttttttttataggtttacgattacgtcgcgttcgtcgtttagcgttgttcgtagtagtttagttagcgtttttattaggcgtcgttgcgttttcgagttcgtcgt

SEQ ID NO: 4892 - DNA, 751 bp, Artificial Sequence
  chemically treated genomic DNA (Homo sapiens) CpG-island No: 4892
acgacgaactcgaaaacgcaacgacgcctaataaaaacgctaactaaactactacgaacaacgctaaacgacgaacgcgacgtaatcgtaaacctataaaaaaaaaaacacgtaacgcgcgtaaacccgctaccgtaactctaaacgacgcgaacgcgcgtaacgcgaaaacaaaacactatactactactataaaacgacgccgaccttcgcccgatcaacgaccccgacccccgcgccgcgcccctactcgccctactccacgctaccccgcgcccgctactactactcgcttacttcaatcgcctctacgccaaaaacgacatccccccgccgctacgcgccctaccgcgctaccgcctactacgcgacctaccgcgtctactacgaacgctaaacgcgcgacctttcgcaaaaaccaccaactaaaaccgccttaaaacgcgacaacgcaaacaaaaccgcctaaaactatacaaccgacttaaacgaaaaaccgcccgacttacaaacctaaattaaacaaaactccaccgcaatcccgaatatctacgaccgcaacgcaacgaacactaactaaaaccccgaaataaaccttcgaccctaaaatccttaaaatacctcgaaaacgactaaccgaaaaaccgcattccctacctcacaaaccgaaaatcccaacccaatccccgcgcgcgtccctcttcctcctcatactttcccttaactaaaaactcctctaacccctattcta

SEQ ID NO: 4893 - DNA, 677 bp, Artificial Sequence
  chemically treated genomic DNA (Homo sapiens) CpG-island No: 4893
cggacgcgagtttaggtcggttattagaaagacgtttcgagttcgggggttaggtttagagttgcggaggtcgtttagttcgatttgatttaggtttcgttcgcgcgttcgcggtcgttttttgttgggggtcggaggagcgggtatcgagagatttttagttttgttcgcggttttcgtttcggtttattattgaggtttacggaggcgattaaaggtcggcgtacggtttggtcgtttagcgattttcggttgaggaagggtcgttttaggtttaatataggttgtttcggggtggcgggtatcgtggtttgtattaagggtcgtagcgcgttcgttatttcgcgggacgtggtcgataggacgggcgcgaacgggtttgagcgggatgttatcgataatatggcgatagtcgttttaatcgttaagtcggttatagggacgattttttaattacggcgtaggcgcgaggaggcgcgggacgcgtgacgatagcgcgtcgtcggaaaggaaattttgtagttttgtagggcggggtaaatttggagaggcgttgcgtcgggggacggggttataagtcgtcgttgggggcggggtttgcggtttatttgtaggtttcggtgttatttcgttagtgtttcgagagatttttagaagaacgagagggttgaataggg

SEQ ID NO: 4894 - DNA, 677 bp, Artificial Sequence
  chemically treated genomic DNA (Homo sapiens) CpG-island No: 4894
ccctattcaaccctctcgttcttctaaaaatctctcgaaacactaacgaaataacaccgaaacctacaaataaaccgcaaaccccgcccccaacgacgacttataaccccgtcccccgacgcaacgcctctccaaatttaccccgccctacaaaactacaaaatttcctttccgacgacgcgctatcgtcacgcgtcccgcgcctcctcgcgcctacgccgtaattaaaaaatcgtccctataaccgacttaacgattaaaacgactatcgccatattatcgataacatcccgctcaaacccgttcgcgcccgtcctatcgaccacgtcccgcgaaataacgaacgcgctacgacccttaatacaaaccacgatacccgccaccccgaaacaacctatattaaacctaaaacgacccttcctcaaccgaaaatcgctaaacgaccaaaccgtacgccgacctttaatcgcctccgtaaacctcaataataaaccgaaacgaaaaccgcgaacaaaactaaaaatctctcgatacccgctcctccgacccccaacaaaaaacgaccgcgaacgcgcgaacgaaacctaaatcaaatcgaactaaacgacctccgcaactctaaacctaacccccgaactcgaaacgtctttctaataaccgacctaaactcgcgtccg

SEQ ID NO: 4895 - DNA, 677 bp, Artificial Sequence
  chemically treated genomic DNA (Homo sapiens) CpG-island No: 4895
ttttgtttagttttttcgtttttttggggatttttcgggatattgacgaggtggtatcgggatttataggtgggtcgtaagtttcgtttttagcgacggtttgtagtttcgtttttcgacgtagcgtttttttaagtttgtttcgttttgtaggattgtagaatttttttttcggcggcgcgttgtcgttacgcgtttcgcgttttttcgcgtttgcgtcgtggttggaaggtcgtttttgtgatcggtttggcggttggagcggttgtcgttatgttgtcggtagtatttcgtttaggttcgttcgcgttcgttttgtcggttacgtttcgcggggtggcgggcgcgttgcggtttttggtgtaggttacggtgttcgttatttcggagtagtttgtgttggatttgaagcggtttttttttagtcgggagtcgttgagcggttaggtcgtgcgtcggtttttggtcgttttcgtgggttttaatggtgagtcggggcgagggtcgcgagtagggttgggggtttttcggtgttcgttttttcggtttttagtagggagcggtcgcgggcgcgcgagcggagtttgaattaggtcgggttgggcggttttcgtaattttgggtttggttttcgggttcggggcgtttttttggtggtcggtttggattcgcgttcg

SEQ ID NO: 4896 - DNA, 677 bp, Artificial Sequence
  chemically treated genomic DNA (Homo sapiens) CpG-island No: 4896
cgaacgcgaatccaaaccgaccaccaaaaaaacgccccgaacccgaaaaccaaacccaaaattacgaaaaccgcccaacccgacctaattcaaactccgctcgcgcgcccgcgaccgctccctactaaaaaccgaaaaaacgaacaccgaaaaacccccaaccctactcgcgaccctcgccccgactcaccattaaaacccacgaaaacgaccaaaaaccgacgcacgacctaaccgctcaacgactcccgactaaaaaaaaaccgcttcaaatccaacacaaactactccgaaataacgaacaccgtaacctacaccaaaaaccgcaacgcgcccgccaccccgcgaaacgtaaccgacaaaacgaacgcgaacgaacctaaacgaaatactaccgacaacataacgacaaccgctccaaccgccaaaccgatcacaaaaacgaccttccaaccacgacgcaaacgcgaaaaaacgcgaaacgcgtaacgacaacgcgccgccgaaaaaaaaattctacaatcctacaaaacgaaacaaacttaaaaaaacgctacgtcgaaaaacgaaactacaaaccgtcgctaaaaacgaaacttacgacccacctataaatcccgataccacctcgtcaatatcccgaaaaatccccaaaaaaacgaaaaaactaaacaaaa

SEQ ID NO: 4897 - DNA, 558 bp, Artificial Sequence
  chemically treated genomic DNA (Homo sapiens) CpG-island No: 4897
ataagtacgttttattcgcgtcggaagagaaacgttgcggtttttttacggttttttcggtttgttttagggtggatttagtagattcgttcgtggagtttttaggagtggagtttcgggcgtttttatatttttcgatacgtcggattcggtttagtcgcgttaagtcgtaaagggttcgaaggtcggggcgtatcgttgtcgttagggttatggagggcgcgttcgtagttaattggagcgtcgaggtagttaacgttagcgtcgcgtcgtcgggggtcgagggtaatcgtatcgtcggattttcgcggcgtaacgaggttttggcgcgcgtggaggtggcggtgttgtgttttattttgtttttggcgttgagcgggaatgcgtgtgtgttgttggcgttgcgtattatacgttagaagtattcgcgtttttttttttttatgaagtatttaagtatcgtcgatttggtggtggtagtgttttaggtgttgtcgtagttgttgtgggatattatttttcgtttttacgggttcgatttgttgtgtcgtttggtta

SEQ ID NO: 4898 - DNA, 558 bp, Artificial Sequence
  chemically treated genomic DNA (Homo sapiens) CpG-island No: 4898
taaccaaacgacacaacaaatcgaacccgtaaaaacgaaaaataatatcccacaacaactacgacaacacctaaaacactaccaccaccaaatcgacgatacttaaatacttcataaaaaaaaaaaaacgcgaatacttctaacgtataatacgcaacgccaacaacacacacgcattcccgctcaacgccaaaaacaaaataaaacacaacaccgccacctccacgcgcgccaaaacctcgttacgccgcgaaaatccgacgatacgattaccctcgacccccgacgacgcgacgctaacgttaactacctcgacgctccaattaactacgaacgcgccctccataaccctaacgacaacgatacgccccgaccttcgaaccctttacgacttaacgcgactaaaccgaatccgacgtatcgaaaaatataaaaacgcccgaaactccactcctaaaaactccacgaacgaatctactaaatccaccctaaaacaaaccgaaaaaaccgtaaaaaaaccgcaacgtttctcttccgacgcgaataaaacgtacttat

SEQ ID NO: 4899 - DNA, 558 bp, Artificial Sequence
  chemically treated genomic DNA (Homo sapiens) CpG-island No: 4899
tgattaggcggtatagtaggtcgggttcgtagaagcggaaggtgatgttttatagtaattgcggtagtatttgaaatattgttattattaggtcggcgatgtttaggtgttttatgaagaagaagaggcgcgagtgtttttggcgtgtggtgcgtagcgttagtagtatatacgtattttcgtttagcgttaggagtaggatgagatatagtatcgttatttttacgcgcgttagggtttcgttgcgtcgcgggggttcggcggtgcggttgttttcggttttcggcggcgcggcgttggcgttggttgtttcggcgttttagttggttgcgagcgcgttttttatgattttggcggtagcggtgcgtttcggttttcgagttttttacggtttggcgcggttgggtcggattcggcgtgtcggagggtgtaggggcgttcggggttttatttttggagattttacggacggatttgttgagtttattttgaaataaatcgggagggtcgtgaggagatcgtagcgtttttttttcgacgcgggtagggcgtgtttgt

SEQ ID NO: 4900 - DNA, 558 bp, Artificial Sequence
  chemically treated genomic DNA (Homo sapiens) CpG-island No: 4900
acaaacacgccctacccgcgtcgaaaaaaaaacgctacgatctcctcacgaccctcccgatttatttcaaaataaactcaacaaatccgtccgtaaaatctccaaaaataaaaccccgaacgcccctacaccctccgacacgccgaatccgacccaaccgcgccaaaccgtaaaaaactcgaaaaccgaaacgcaccgctaccgccaaaatcataaaaaacgcgctcgcaaccaactaaaacgccgaaacaaccaacgccaacgccgcgccgccgaaaaccgaaaacaaccgcaccgccgaacccccgcgacgcaacgaaaccctaacgcgcgtaaaaataacgatactatatctcatcctactcctaacgctaaacgaaaatacgtatatactactaacgctacgcaccacacgccaaaaacactcgcgcctcttcttcttcataaaacacctaaacatcgccgacctaataataacaatatttcaaatactaccgcaattactataaaacatcaccttccgcttctacgaacccgacctactataccgcctaatca

SEQ ID NO: 4901 - DNA, 506 bp, Artificial Sequence
  chemically treated genomic DNA (Homo sapiens) CpG-island No: 4901
cgtcgtcgtatcgatcgtttggtagtgttcgttacgtggttcggttgtttggtggttagcgcgtcgtaggtgtatattttttttttgcgcgaggtggttgacggcgttttcgattgttgggtcgtttttatttagttttggggatttaaggtttatattatatggattacgttagttgtttatatcgtgtcggttatcgtgttcgttgtttgttacggttttattagttttaagatttggtagaatttgcggtttaagatcgttgtagcggcggcggtcgaggcgttagagggcgcggcggttggcgatggggggcgcgtggttttggcgcgtgttagtagcgttaagtttatttttaaggttaagattcgtacggttaagatgatttttattatcgtgttggtttttatcgtgtgttggacgtttttttttttcgtgtagatgtggagcgtttgggatgttaacgcgtttaaggaaggtagttagggttgggagatttaggagga

SEQ ID NO: 4902 - DNA, 506 bp, Artificial Sequence
  chemically treated genomic DNA (Homo sapiens) CpG-island No: 4902
tcctcctaaatctcccaaccctaactaccttccttaaacgcgttaacatcccaaacgctccacatctacacgaaaaaaaaaaacgtccaacacacgataaaaaccaacacgataataaaaatcatcttaaccgtacgaatcttaaccttaaaaataaacttaacgctactaacacgcgccaaaaccacgcgccccccatcgccaaccgccgcgccctctaacgcctcgaccgccgccgctacaacgatcttaaaccgcaaattctaccaaatcttaaaactaataaaaccgtaacaaacaacgaacacgataaccgacacgatataaacaactaacgtaatccatataatataaaccttaaatccccaaaactaaataaaaacgacccaacaatcgaaaacgccgtcaaccacctcgcgcaaaaaaaaaatatacacctacgacgcgctaaccaccaaacaaccgaaccacgtaacgaacactaccaaacgatcgatacgacgacg

SEQ ID NO: 4903 - DNA, 506 bp, Artificial Sequence
  chemically treated genomic DNA (Homo sapiens) CpG-island No: 4903
tttttttgggttttttagttttggttattttttttgggcgcgttggtattttagacgttttatatttgtacgaagaagaaaggcgtttagtatacgatgaaggttagtacgatgatgaaagttattttgatcgtgcggattttggttttggagatgagtttgacgttgttgatacgcgttagggttacgcgttttttatcgttagtcgtcgcgttttttggcgtttcggtcgtcgtcgttgtagcggttttgagtcgtaaattttgttagattttgaagttgataaggtcgtagtaggtagcgagtacgatgatcggtacgatgtagatagttagcgtgatttatgtgatgtaggttttgggtttttagggttggatgaagacggtttagtagtcgaagacgtcgttagttatttcgcgtagagagaagatgtgtatttgcggcgcgttggttattaggtagtcgagttacgtggcgagtattgttaggcggtcggtgcggcggcg

SEQ ID NO: 4904 - DNA, 506 bp, Artificial Sequence
  chemically treated genomic DNA (Homo sapiens) CpG-island No: 4904
cgccgccgcaccgaccgcctaacaatactcgccacgtaactcgactacctaataaccaacgcgccgcaaatacacatcttctctctacgcgaaataactaacgacgtcttcgactactaaaccgtcttcatccaaccctaaaaacccaaaacctacatcacataaatcacgctaactatctacatcgtaccgatcatcgtactcgctacctactacgaccttatcaacttcaaaatctaacaaaatttacgactcaaaaccgctacaacgacgacgaccgaaacgccaaaaaacgcgacgactaacgataaaaaacgcgtaaccctaacgcgtatcaacaacgtcaaactcatctccaaaaccaaaatccgcacgatcaaaataactttcatcatcgtactaaccttcatcgtatactaaacgcctttcttcttcgtacaaatataaaacgtctaaaataccaacgcgcccaaaaaaaataaccaaaactaaaaaacccaaaaaaa

SEQ ID NO: 4905 - DNA, 1179 bp, Artificial Sequence
  chemically treated genomic DNA (Homo sapiens) CpG-island No: 4905
ggcgttagtatcgacgtttgtttttcgcggttataattcgttgcgcgagttcggggattcgtcgtcggaggttacgaagtcgtcgggtagggtcgtagcgttagcgaggatttaggatcgtttcgagttcggacgtagttagataaatgttcgtcggaggcgtagggtagaagtttttgggatttagtcgtttttatttcggcgttacgtattagtttcgttcgggtttagaagtcggcgttaaggagatttttaagtttcgatattaaaggtttcgtaaagataacggtagtagggggtcgaggggagttcggttaaggcgttttgcgtagggggtggaattgttttcgggatgggggaggggaacgttatttcgttatataacgaaggtagagttttcgtataaagggagtttcggtttttttcgttttttttcgttagaagatgcgttcgtacgttcgcgttttttggagtagtttagcgttcgatttattcgttttttttttatatttattagttagtttttcgaggttttttcggtcggtttacgtagaggcggcggcggtcgagagcgtaggcggaggggtcgcgcggtttttttcgcggacgtacggcggcgggtagcgttgtttcggttttagcgttttcggacgttgtgttgggtcgattttttttttttttcgcgcgttttacgttttgagcgttaggtttttggtttaggtttcgcggtcgtattgttttggtcgttacgtttcgcgtttgcgtcgcgtattttaggggttcgtcgagagggcggggaggtgacgaggtgaggtgggggtagggagcgggttgcgcgaacgtatcgtatacgcggtttgggagggattatcggttcgtagtttcgggggaggtttagcggttcgcgttttttgtcggaggttttgcgtcgtcgtagtttttttttgggcggggaagagtttttttcgagtttcgagggcgattttattttttaggattattttacgttaggcggttagcgaatttatttcgttcgtttttatcgtttttttaagttttggggaattgggagaaacgtggcgcgtagcggtattttttttacgttgttttttaagggaaaggacgcgagtggttttgtttaggttaggtaaggtagatggtattttagatttcgaagtg

SEQ ID NO: 4906 - DNA, 1179 bp, Artificial Sequence
  chemically treated genomic DNA (Homo sapiens) CpG-island No: 4906
cacttcgaaatctaaaataccatctaccttacctaacctaaacaaaaccactcgcgtcctttcccttaaaaaacaacgtaaaaaaaataccgctacgcgccacgtttctcccaattccccaaaacttaaaaaaacgataaaaacgaacgaaataaattcgctaaccgcctaacgtaaaataatcctaaaaaataaaatcgccctcgaaactcgaaaaaaactcttccccgcccaaaaaaaaactacgacgacgcaaaacctccgacaaaaaacgcgaaccgctaaacctcccccgaaactacgaaccgataatccctcccaaaccgcgtatacgatacgttcgcgcaacccgctccctacccccacctcacctcgtcacctccccgccctctcgacgaacccctaaaatacgcgacgcaaacgcgaaacgtaacgaccaaaacaatacgaccgcgaaacctaaaccaaaaacctaacgctcaaaacgtaaaacgcgcgaaaaaaaaaaaaaatcgacccaacacaacgtccgaaaacgctaaaaccgaaacaacgctacccgccgccgtacgtccgcgaaaaaaaccgcgcgacccctccgcctacgctctcgaccgccgccgcctctacgtaaaccgaccgaaaaaacctcgaaaaactaactaataaatataaaaaaaaaacgaataaatcgaacgctaaactactccaaaaaacgcgaacgtacgaacgcatcttctaacgaaaaaaaacgaaaaaaaccgaaactccctttatacgaaaactctaccttcgttatataacgaaataacgttcccctcccccatcccgaaaacaattccaccccctacgcaaaacgccttaaccgaactcccctcgaccccctactaccgttatctttacgaaacctttaatatcgaaacttaaaaatctccttaacgccgacttctaaacccgaacgaaactaatacgtaacgccgaaataaaaacgactaaatcccaaaaacttctaccctacgcctccgacgaacatttatctaactacgtccgaactcgaaacgatcctaaatcctcgctaacgctacgaccctacccgacgacttcgtaacctccgacgacgaatccccgaactcgcgcaacgaattataaccgcgaaaaacaaacgtcgatactaacgcc

SEQ ID NO: 4907 - DNA, 1179 bp, Artificial Sequence
  chemically treated genomic DNA (Homo sapiens) CpG-island No: 4907
tatttcggggtttgagatgttatttgttttgtttaatttgggtaagattattcgcgtttttttttttgaggagtagcgtgggaaaggtgtcgttgcgcgttacgttttttttagttttttagggtttgaaggggcggtggaggcgggcgggataaattcgttggtcgtttggcgtggagtaattttagagggtgggatcgttttcggggttcgggaggggttttttttcgtttagaaggagattgcggcggcgtaaggttttcggtagggggcgcgggtcgttgggtttttttcggggttgcgggtcggtggttttttttaggtcgcgtgtgcggtgcgttcgcgtagttcgttttttgtttttattttatttcgttattttttcgttttttcggcgggtttttgaggtgcgcggcgtaggcgcggagcgtggcggttagggtagtgcggtcgcggagtttaggttaggggtttggcgtttagggcgtggggcgcgcggggagggagaggggtcggtttagtatagcgttcgggagcgttagggtcggagtagcgttgttcgtcgtcgtgcgttcgcgggaaggatcgcgcggttttttcgtttgcgttttcggtcgtcgtcgtttttgcgtgggtcggtcgggagggtttcgggggattgattggtgagtgtgagggaggagcgggtgggtcgggcgttggattgttttaggggacgcgggcgtgcgggcgtattttttaacgggagagggcgggagagatcggagttttttttatacggaaattttgttttcgttatatggcgggatggcgttttttttttttatttcgaaggtagttttattttttgcgtaggacgttttggtcgggtttttttcggttttttgttgtcgttgtttttacggaatttttggtgtcggggtttggaagtttttttggcgtcggtttttgggttcgggcgaagttggtgcgtggcgtcggggtggaggcggttaagttttagggatttttgttttgcgttttcgacgggtatttgtttggttgcgttcgggttcgggacgattttgggttttcgttggcgttgcggttttgttcggcggtttcgtgattttcggcggcgaattttcgggttcgcgtaacgagttgtagtcgcggagagtaggcgtcgatgttggcgtt

SEQ ID NO: 4908 - DNA, 1179 bp, Artificial Sequence
  chemically treated genomic DNA (Homo sapiens) CpG-island No: 4908
aacgccaacatcgacgcctactctccgcgactacaactcgttacgcgaacccgaaaattcgccgccgaaaatcacgaaaccgccgaacaaaaccgcaacgccaacgaaaacccaaaatcgtcccgaacccgaacgcaaccaaacaaatacccgtcgaaaacgcaaaacaaaaatccctaaaacttaaccgcctccaccccgacgccacgcaccaacttcgcccgaacccaaaaaccgacgccaaaaaaacttccaaaccccgacaccaaaaattccgtaaaaacaacgacaacaaaaaaccgaaaaaaacccgaccaaaacgtcctacgcaaaaaataaaactaccttcgaaataaaaaaaaaaaacgccatcccgccatataacgaaaacaaaatttccgtataaaaaaaactccgatctctcccgccctctcccgttaaaaaatacgcccgcacgcccgcgtcccctaaaacaatccaacgcccgacccacccgctcctccctcacactcaccaatcaatcccccgaaaccctcccgaccgacccacgcaaaaacgacgacgaccgaaaacgcaaacgaaaaaaccgcgcgatccttcccgcgaacgcacgacgacgaacaacgctactccgaccctaacgctcccgaacgctatactaaaccgacccctctccctccccgcgcgccccacgccctaaacgccaaacccctaacctaaactccgcgaccgcactaccctaaccgccacgctccgcgcctacgccgcgcacctcaaaaacccgccgaaaaaacgaaaaaataacgaaataaaataaaaacaaaaaacgaactacgcgaacgcaccgcacacgcgacctaaaaaaaaccaccgacccgcaaccccgaaaaaaacccaacgacccgcgccccctaccgaaaaccttacgccgccgcaatctccttctaaacgaaaaaaaacccctcccgaaccccgaaaacgatcccaccctctaaaattactccacgccaaacgaccaacgaatttatcccgcccgcctccaccgccccttcaaaccctaaaaaactaaaaaaaacgtaacgcgcaacgacacctttcccacgctactcctcaaaaaaaaaaacgcgaataatcttacccaaattaaacaaaacaaataacatctcaaaccccgaaata

SEQ ID NO: 4909 - DNA, 770 bp, Artificial Sequence
  chemically treated genomic DNA (Homo sapiens) CpG-island No: 4909
ttcggcgtcggcgcgtagtatgtcgggagttgtagttttcgcgaggtaagtttcgtttcgtttttgtttgggggaggaggttggagagtcgttttgtcggtttttgaattttgtcgcgaaaagcgcgcgtggcggttttcggtttcgtttttcgtaggacgcggtgtcgcgttattttggtaatcgttttttagtcgtcgttgattgggttgggtcgcggggggcgggcgggggacgagacgcgggggttgttgtcggcgttcgcgtttgttagtcgggttagagcggagtagcgggtaggattgtttggtcggttgtttcgcggagaggttgcgcgcgtcggtcgggggaggcggatagtcgggttcggcgtttgtggggcgcggcgcgcggtattcgggtttgagattaggcgaggcgtcggcgcgcgttagacggcgcgaggttgcggtttcgggagttttcgcgcgtcgttcggggttatgggcgcgtgagagtttagcgcgcgcggtttttgttgcggtttgcgagttcgtatattcggtgtatagtttttcgggtcgttttcgtgttcgttttgcgttattgggatcggttgttttttagcgtcgaggttttcgaggttgtattcgagtttgcgtcgttcgttgtcgtcgtcgtcgtcgttgtcgtcgtcgttgttcgtcggttttttttttttttatattcggggtttagagtaggaggaggaggggtcggtgtattttcgtcgttgttttttgtaatttgta

SEQ ID NO: 4910 - DNA, 770 bp, Artificial Sequence
  chemically treated genomic DNA (Homo sapiens) CpG-island No: 4910
tacaaattacaaaaaacaacgacgaaaatacaccgacccctcctcctcctactctaaaccccgaatataaaaaaaaaaaaaaccgacgaacaacgacgacgacaacgacgacgacgacgacaacgaacgacgcaaactcgaatacaacctcgaaaacctcgacgctaaaaaacaaccgatcccaataacgcaaaacgaacacgaaaacgacccgaaaaactatacaccgaatatacgaactcgcaaaccgcaacaaaaaccgcgcgcgctaaactctcacgcgcccataaccccgaacgacgcgcgaaaactcccgaaaccgcaacctcgcgccgtctaacgcgcgccgacgcctcgcctaatctcaaacccgaataccgcgcgccgcgccccacaaacgccgaacccgactatccgcctcccccgaccgacgcgcgcaacctctccgcgaaacaaccgaccaaacaatcctacccgctactccgctctaacccgactaacaaacgcgaacgccgacaacaacccccgcgtctcgtcccccgcccgccccccgcgacccaacccaatcaacgacgactaaaaaacgattaccaaaataacgcgacaccgcgtcctacgaaaaacgaaaccgaaaaccgccacgcgcgcttttcgcgacaaaattcaaaaaccgacaaaacgactctccaacctcctcccccaaacaaaaacgaaacgaaacttacctcgcgaaaactacaactcccgacatactacgcgccgacgccgaa

SEQ ID NO: 4911 - DNA, 770 bp, Artificial Sequence
  chemically treated genomic DNA (Homo sapiens) CpG-island No: 4911
tgtaggttgtaaagaatagcggcgagaatgtatcggttttttttttttttgttttgagtttcgggtgtggggggaggggaagtcggcgaatagcggcggcggtagcggcggcggcggcggtagcgggcgacgtaagttcggatgtagtttcgggggtttcggcgttgagaaatagtcgattttagtggcgtaggacggatacgaggacggttcgggggattgtgtatcgggtgtgcgagttcgtaagtcgtagtaggggtcgcgcgcgttgggtttttacgcgtttatggtttcgggcggcgcgcgggggttttcggggtcgtagtttcgcgtcgtttggcgcgcgtcggcgtttcgtttggttttaggttcgggtgtcgcgcgtcgcgttttataggcgtcgggttcggttgttcgtttttttcggtcggcgcgcgtagttttttcgcggagtagtcggttaggtagttttgttcgttgtttcgttttggttcgattgataggcgcgagcgtcggtagtagttttcgcgtttcgtttttcgttcgtttttcgcggtttagtttaattagcggcggttgagaggcggttattagggtgacgcggtatcgcgttttgcgaggggcggagtcgggggtcgttacgcgcgtttttcgcggtaaaatttaaaggtcggtagggcggttttttaatttttttttttaagtagggacgaggcggaatttgtttcgcgaggattgtaattttcggtatgttgcgcgtcggcgtcggg

SEQ ID NO: 4912 - DNA, 770 bp, Artificial Sequence
  chemically treated genomic DNA (Homo sapiens) CpG-island No: 4912
cccgacgccgacgcgcaacataccgaaaattacaatcctcgcgaaacaaattccgcctcgtccctacttaaaaaaaaaaattaaaaaaccgccctaccgacctttaaattttaccgcgaaaaacgcgcgtaacgacccccgactccgcccctcgcaaaacgcgataccgcgtcaccctaataaccgcctctcaaccgccgctaattaaactaaaccgcgaaaaacgaacgaaaaacgaaacgcgaaaactactaccgacgctcgcgcctatcaatcgaaccaaaacgaaacaacgaacaaaactacctaaccgactactccgcgaaaaaactacgcgcgccgaccgaaaaaaacgaacaaccgaacccgacgcctataaaacgcgacgcgcgacacccgaacctaaaaccaaacgaaacgccgacgcgcgccaaacgacgcgaaactacgaccccgaaaacccccgcgcgccgcccgaaaccataaacgcgtaaaaacccaacgcgcgcgacccctactacgacttacgaactcgcacacccgatacacaatcccccgaaccgtcctcgtatccgtcctacgccactaaaatcgactatttctcaacgccgaaacccccgaaactacatccgaacttacgtcgcccgctaccgccgccgccgccgctaccgccgccgctattcgccgacttcccctccccccacacccgaaactcaaaacaaaaaaaaaaaaaaccgatacattctcgccgctattctttacaacctaca

SEQ ID NO: 4913 - DNA, 540 bp, Artificial Sequence
  chemically treated genomic DNA (Homo sapiens) CpG-island No: 4913
gcgcgtggggttgcgggtcgttttttttttttatttcggtttatcgaagaagggcggtaggtgggatatcgtttcgaggaagggttcggtttcgatttgtttgttcgcgggtagcggttttagtaagtgttcggttagtagcgttatttcggggtcgaggttcgcggtgatgttttagtcggcgtcgcgggcgtcgatatcgttttttcggtcgtcgtcgttagcgtcggggtcgttatagtcgttcgtcgtagcgtttaggggacgttagcgtcgttattttcgttcgtacggcgttttcgtagtcgagcgtttagcgtcgttcgtcggtcgagcgtttaaattgtcgggcgcgtcgtttcgttttcgtttatcggtttttaattcgcgttcgtcgtcgaggttttcgcgtttttattggtcggggggtcggtcgggggcgggacgtagaggaggtgcgtcggtttatgggtttcggagggtttaagtgagtcgtttttaggtgagttttttttaggtgtgtttttcgtcgttttcggt

SEQ ID NO: 4914 - DNA, 540 bp, Artificial Sequence
  chemically treated genomic DNA (Homo sapiens) CpG-island No: 4914
accgaaaacgacgaaaaacacacctaaaaaaaactcacctaaaaacgactcacttaaaccctccgaaacccataaaccgacgcacctcctctacgtcccgcccccgaccgaccccccgaccaataaaaacgcgaaaacctcgacgacgaacgcgaattaaaaaccgataaacgaaaacgaaacgacgcgcccgacaatttaaacgctcgaccgacgaacgacgctaaacgctcgactacgaaaacgccgtacgaacgaaaataacgacgctaacgtcccctaaacgctacgacgaacgactataacgaccccgacgctaacgacgacgaccgaaaaaacgatatcgacgcccgcgacgccgactaaaacatcaccgcgaacctcgaccccgaaataacgctactaaccgaacacttactaaaaccgctacccgcgaacaaacaaatcgaaaccgaacccttcctcgaaacgatatcccacctaccgcccttcttcgataaaccgaaataaaaaaaaaaaacgacccgcaaccccacgcgc

SEQ ID NO: 4915 - DNA, 540 bp, Artificial Sequence
  chemically treated genomic DNA (Homo sapiens) CpG-island No: 4915
atcgggggcggcgggaggtatatttggggaagatttatttgggagcggtttatttgggtttttcgggatttatgaatcggcgtattttttttgcgtttcgttttcggtcggtttttcggttaatgggggcgcggagatttcggcggcgggcgcggattgggagtcggtgagcgggggcggggcggcgcgttcggtagtttaggcgttcggtcggcgggcggcgttgagcgttcggttacgagggcgtcgtgcgggcggaagtggcgacgttggcgttttttggacgttgcggcgggcggttgtgacggtttcggcgttgacggcggcggtcgggggggcggtgtcgacgttcgcggcgtcggttggggtattatcgcgggtttcgatttcgaaatggcgttgttggtcgaatatttgttgaagtcgttgttcgcggataagtagatcgagatcgggttttttttcgaggcggtgttttatttgtcgttttttttcggtgagtcggaatggaggggggaggcggttcgtagttttacgcgt

SEQ ID NO: 4916 - DNA, 540 bp, Artificial Sequence
  chemically treated genomic DNA (Homo sapiens) CpG-island No: 4916
acgcgtaaaactacgaaccgcctcccccctccattccgactcaccgaaaaaaaacgacaaataaaacaccgcctcgaaaaaaaacccgatctcgatctacttatccgcgaacaacgacttcaacaaatattcgaccaacaacgccatttcgaaatcgaaacccgcgataataccccaaccgacgccgcgaacgtcgacaccgcccccccgaccgccgccgtcaacgccgaaaccgtcacaaccgcccgccgcaacgtccaaaaaacgccaacgtcgccacttccgcccgcacgacgccctcgtaaccgaacgctcaacgccgcccgccgaccgaacgcctaaactaccgaacgcgccgccccgcccccgctcaccgactcccaatccgcgcccgccgccgaaatctccgcgcccccattaaccgaaaaaccgaccgaaaacgaaacgcaaaaaaaatacgccgattcataaatcccgaaaaacccaaataaaccgctcccaaataaatcttccccaaatatacctcccgccgcccccgat

SEQ ID NO: 4917 - DNA, 524 bp, Artificial Sequence
  chemically treated genomic DNA (Homo sapiens) CpG-island No: 4917
gggaattttaacggttgcgacgaatcggtgttatcggtgcgaggtagttttagtagcgagacgttttttttaggtagcgatttttttagcgttagtagttttagttttacgagtgaggtttttcgcgagaacgtttgtttttcggtttttttcggggtgggtgggaggggcgcgttcggtcgtgtttgatttagttttcgcgtttttagttttttgtcgcggttgcgagatttttttagcgttgttcgaggtttcgcgcggttatagtatgatgggcggttagcgggaggcggcgattcgggacgacgacgacgatttgttgtaattcgttatttagtagagtttgtttgaggcgggtagtgagtatgattaggtgcgttttcgcgggcgcgcggggttacgggatttcgcgtcgttattgtaacgtttacgttttttcgtaggttattatttgggaggcgttaattaatagtaagttaggtatttattttatgttttacgaggtcgtcgataggataggttag

SEQ ID NO: 4918 - DNA, 524 bp, Artificial Sequence
  chemically treated genomic DNA (Homo sapiens) CpG-island No: 4918
ctaacctatcctatcgacgacctcgtaaaacataaaataaatacctaacttactattaattaacgcctcccaaataataacctacgaaaaaacgtaaacgttacaataacgacgcgaaatcccgtaaccccgcgcgcccgcgaaaacgcacctaatcatactcactacccgcctcaaacaaactctactaaataacgaattacaacaaatcgtcgtcgtcgtcccgaatcgccgcctcccgctaaccgcccatcatactataaccgcgcgaaacctcgaacaacgctaaaaaaatctcgcaaccgcgacaaaaaactaaaaacgcgaaaactaaatcaaacacgaccgaacgcgcccctcccacccaccccgaaaaaaaccgaaaaacaaacgttctcgcgaaaaacctcactcgtaaaactaaaactactaacgctaaaaaaatcgctacctaaaaaaaacgtctcgctactaaaactacctcgcaccgataacaccgattcgtcgcaaccgttaaaattccc

SEQ ID NO: 4919 - DNA, 524 bp, Artificial Sequence
  chemically treated genomic DNA (Homo sapiens) CpG-island No: 4919
ttgatttgttttgtcggcgatttcgtaggatatggggtgggtgtttggtttgttgttggttagcgttttttagatggtgatttgcggggaggcgtgggcgttatagtggcggcgcggagtttcgtggtttcgcgcgttcgcggagacgtatttggttatatttattgttcgttttaagtaggttttgttggatggcgaattgtagtaggtcgtcgtcgtcgtttcgggtcgtcgtttttcgttggtcgtttattatgttgtagtcgcgcggggtttcgaataacgttggggagatttcgtagtcgcggtaggaggttgggggcgcgggggttgggttaggtacggtcgggcgcgttttttttatttatttcggggagagtcgaggggtaggcgttttcgcggggggttttattcgtggagttggagttgttgacgttggaggagtcgttgtttggggaaggcgtttcgttgttggggttgtttcgtatcgatggtatcggttcgtcgtagtcgttgaggttttt

SEQ ID NO: 4920 - DNA, 524 bp, Artificial Sequence
  chemically treated genomic DNA (Homo sapiens) CpG-island No: 4920
aaaaacctcaacgactacgacgaaccgataccatcgatacgaaacaaccccaacaacgaaacgccttccccaaacaacgactcctccaacgtcaacaactccaactccacgaataaaaccccccgcgaaaacgcctacccctcgactctccccgaaataaataaaaaaaacgcgcccgaccgtacctaacccaacccccgcgcccccaacctcctaccgcgactacgaaatctccccaacgttattcgaaaccccgcgcgactacaacataataaacgaccaacgaaaaacgacgacccgaaacgacgacgacgacctactacaattcgccatccaacaaaacctacttaaaacgaacaataaatataaccaaatacgtctccgcgaacgcgcgaaaccacgaaactccgcgccgccactataacgcccacgcctccccgcaaatcaccatctaaaaaacgctaaccaacaacaaaccaaacacccaccccatatcctacgaaatcgccgacaaaacaaatcaa

SEQ ID NO: 4921 - DNA, 571 bp, Artificial Sequence
  chemically treated genomic DNA (Homo sapiens) CpG-island No: 4921
acgtcgcgggattgatcgtttttattagagggtggtgtcgcgggtcgttttggagtttttacgtcgtgtttcggtttcggtcggtgggtgggtgcgtcgcgggagttcgcgatattttttttttatttttaggagcgtttcgtttacgtcgtagcgttagtttgcgttttcggcgttagtgtttagttttcggtttagtttagggttaggtttcggcggttacgtgtttcggagttacgacgagtagttgcggttggcgatggaattgtcggcgtaggagtaggaggagaggcggcggcgcgcgcgttaggaggaggaggagttggagcgtattttgaggtttttattgatcgagtagtagcgttttttgtcgggattttcgttagcgttacgcgcgttacgtttagggttaggagttagataaatttcggtttgcgcgtttgtagagcggcggttggagattggagttatcgtttcgcgggtgtagtagtatagtaggtacggttcggggagggattcggtatggtcgcggggtatttttttaggttagggttttggaggtaattggtat

SEQ ID NO: 4922 - DNA, 571 bp, Artificial Sequence
  chemically treated genomic DNA (Homo sapiens) CpG-island No: 4922
ataccaattacctccaaaaccctaacctaaaaaaataccccgcgaccataccgaatccctccccgaaccgtacctactatactactacacccgcgaaacgataactccaatctccaaccgccgctctacaaacgcgcaaaccgaaatttatctaactcctaaccctaaacgtaacgcgcgtaacgctaacgaaaatcccgacaaaaaacgctactactcgatcaataaaaacctcaaaatacgctccaactcctcctcctcctaacgcgcgcgccgccgcctctcctcctactcctacgccgacaattccatcgccaaccgcaactactcgtcgtaactccgaaacacgtaaccgccgaaacctaaccctaaactaaaccgaaaactaaacactaacgccgaaaacgcaaactaacgctacgacgtaaacgaaacgctcctaaaaataaaaaaaaaatatcgcgaactcccgcgacgcacccacccaccgaccgaaaccgaaacacgacgtaaaaactccaaaacgacccgcgacaccaccctctaataaaaacgatcaatcccgcgacgt

SEQ ID NO: 4923 - DNA, 571 bp, Artificial Sequence
  chemically treated genomic DNA (Homo sapiens) CpG-island No: 4923
gtgttagttgtttttagggttttggtttgggaaggtatttcgcggttatgtcgaattttttttcgaatcgtgtttgttgtgttgttgtattcgcgaggcggtggttttagtttttagtcgtcgttttgtaggcgcgtaggtcggggtttgtttggtttttggttttgggcgtggcgcgcgtggcgttggcgagggtttcggtagggggcgttattgttcggttagtgagagttttaggatgcgttttagttttttttttttttggcgcgcgcgtcgtcgtttttttttttgtttttgcgtcgatagttttatcgttagtcgtagttgttcgtcgtagtttcggaatacgtggtcgtcggaatttggttttgagttgggtcgagggttgggtattgacgtcgggggcgtaggttggcgttgcggcgtgggcggggcgtttttgggggtggggaaggaatgtcgcgggttttcgcggcgtatttatttatcggtcggggtcgggatacggcgtggaggttttagggcggttcgcggtattattttttagtggaggcggttagtttcgcggcgt

SEQ ID NO: 4924 - DNA, 571 bp, Artificial Sequence
  chemically treated genomic DNA (Homo sapiens) CpG-island No: 4924
acgccgcgaaactaaccgcctccactaaaaaataataccgcgaaccgccctaaaacctccacgccgtatcccgaccccgaccgataaataaatacgccgcgaaaacccgcgacattccttccccacccccaaaaacgccccgcccacgccgcaacgccaacctacgcccccgacgtcaatacccaaccctcgacccaactcaaaaccaaattccgacgaccacgtattccgaaactacgacgaacaactacgactaacgataaaactatcgacgcaaaaacaaaaaaaaaaacgacgacgcgcgcgccaaaaaaaaaaaaaactaaaacgcatcctaaaactctcactaaccgaacaataacgccccctaccgaaaccctcgccaacgccacgcgcgccacgcccaaaaccaaaaaccaaacaaaccccgacctacgcgcctacaaaacgacgactaaaaactaaaaccaccgcctcgcgaatacaacaacacaacaaacacgattcgaaaaaaaattcgacataaccgcgaaataccttcccaaaccaaaaccctaaaaacaactaacac

SEQ ID NO: 4925 - DNA, 584 bp, Artificial Sequence
  chemically treated genomic DNA (Homo sapiens) CpG-island No: 4925
gttggacgcggcgaggttttgttttttttttttttaggtttagttcgttagcggaagaatttcgcgtttttttcggcgcgttattttttttaggacgaatttttggtaaagcgttttgagttcgcgggtcgaggtttttttaggagcgggttattttatttcgttgggatttaggagtttcgcgagggttgttaggagaagtagttgtgggcgaaggcggaggaggcgttattttaagcggtttcgggttcggttcgtcgtttagtcgtttcgttagcgagggagcgcgcgtatttcgtttttttagttttagcgttttcgcgtattcgcgttttcgcgtcgttcgcgcgttcgttggttttgggttcgcgcgcgtttttttttagatagtgggttttcggtatcgtttcgttttaatgttcgtttatagtagcggagtgtgcgcgtacgcgttttaaattcgaagtcggaaaagttaagtgtaggagtcgggttagcgcgtaaggtttagtagggtaggcggggggtttttttttcgttcggggattcgttttagtaggtttttgtagtttgtagagtagttg

SEQ ID NO: 4926 - DNA, 584 bp, Artificial Sequence
  chemically treated genomic DNA (Homo sapiens) CpG-island No: 4926
caactactctacaaactacaaaaacctactaaaacgaatccccgaacgaaaaaaaaaccccccgcctaccctactaaaccttacgcgctaacccgactcctacacttaacttttccgacttcgaatttaaaacgcgtacgcgcacactccgctactataaacgaacattaaaacgaaacgataccgaaaacccactatctaaaaaaaaacgcgcgcgaacccaaaaccaacgaacgcgcgaacgacgcgaaaacgcgaatacgcgaaaacgctaaaactaaaaaaacgaaatacgcgcgctccctcgctaacgaaacgactaaacgacgaaccgaacccgaaaccgcttaaaataacgcctcctccgccttcgcccacaactacttctcctaacaaccctcgcgaaactcctaaatcccaacgaaataaaataacccgctcctaaaaaaacctcgacccgcgaactcaaaacgctttaccaaaaattcgtcctaaaaaaaataacgcgccgaaaaaaacgcgaaattcttccgctaacgaactaaacctaaaaaaaaaaaaaacaaaacctcgccgcgtccaac

SEQ ID NO: 4927 - DNA, 584 bp, Artificial Sequence
  chemically treated genomic DNA (Homo sapiens) CpG-island No: 4927
tagttgttttatagattgtagggatttgttgagacgaattttcggacgaggaaagggtttttcgtttgttttattgagttttgcgcgttgattcggtttttatatttaattttttcggtttcgggtttaagacgcgtgcgcgtatatttcgttgttgtgggcgggtattggggcggggcgatatcgggggtttattgtttggggaggggcgcgcgcgagtttagggttaacggacgcgcgggcggcgcgggggcgcgggtgcgcgggggcgttggggttggaggggcggggtgcgcgcgttttttcgttggcggagcggttgggcggcgggtcgggttcggggtcgtttggaatggcgtttttttcgttttcgtttataattgttttttttggtagttttcgcgaggtttttgggttttagcgaggtaaggtgattcgtttttgggaaggtttcggttcgcgagtttaaagcgttttgttaaaagttcgttttggaaggagtggcgcgtcgagggggacgcggagttttttcgttggcgggttgggtttggggagagagagggtagggtttcgtcgcgtttagt

SEQ ID NO: 4928 - DNA, 584 bp, Artificial Sequence
  chemically treated genomic DNA (Homo sapiens) CpG-island No: 4928
actaaacgcgacgaaaccctaccctctctctccccaaacccaacccgccaacgaaaaaactccgcgtccccctcgacgcgccactccttccaaaacgaacttttaacaaaacgctttaaactcgcgaaccgaaaccttcccaaaaacgaatcaccttacctcgctaaaacccaaaaacctcgcgaaaactaccaaaaaaaacaattataaacgaaaacgaaaaaaacgccattccaaacgaccccgaacccgacccgccgcccaaccgctccgccaacgaaaaaacgcgcgcaccccgcccctccaaccccaacgcccccgcgcacccgcgcccccgcgccgcccgcgcgtccgttaaccctaaactcgcgcgcgcccctccccaaacaataaacccccgatatcgccccgccccaatacccgcccacaacaacgaaatatacgcgcacgcgtcttaaacccgaaaccgaaaaaattaaatataaaaaccgaatcaacgcgcaaaactcaataaaacaaacgaaaaaccctttcctcgtccgaaaattcgtctcaacaaatccctacaatctataaaacaacta

SEQ ID NO: 4929 - DNA, 518 bp, Artificial Sequence
  chemically treated genomic DNA (Homo sapiens) CpG-island No: 4929
  unsure (44)
ggttaatttagagcgcgtacgcgcgggagggttttgggtagttngcgtttggcgggcggattcgcgggtaaaagcgcggagttcgtcgagtagacggtttcgtagtacgttgtacgtcggggttttttagtttcgttatgtcgtcgtggggcgtcgttttcgcgtttattttggtcgtgttcgtttttttcggtttgttcggttcgcggtttcgggattttggggcgcgtcgtcggagagaggattttgtcggggtttaagatcgtagacgacggggaggaggcggacggcggaggttcggcggattagtttagcgacgggcgcgagttattgtcgggagggtgtagttttgtttgtaagtcgtcggttttggtttagtgtttgttgcgcgttttgcggcgtttagaggcgttggaggtcggttcgcgtttttggtttttcgggttttatttgtagattttttgttattcgttttgttcgtagcgtttgggtttgagttggttcgggagtatttgtag

SEQ ID NO: 4930 - DNA, 518 bp, Artificial Sequence
  chemically treated genomic DNA (Homo sapiens) CpG-island No: 4930
  unsure (475)
ctacaaatactcccgaaccaactcaaacccaaacgctacgaacaaaacgaataacaaaaaatctacaaataaaacccgaaaaaccaaaaacgcgaaccgacctccaacgcctctaaacgccgcaaaacgcgcaacaaacactaaaccaaaaccgacgacttacaaacaaaactacaccctcccgacaataactcgcgcccgtcgctaaactaatccgccgaacctccgccgtccgcctcctccccgtcgtctacgatcttaaaccccgacaaaatcctctctccgacgacgcgccccaaaatcccgaaaccgcgaaccgaacaaaccgaaaaaaacgaacacgaccaaaataaacgcgaaaacgacgccccacgacgacataacgaaactaaaaaaccccgacgtacaacgtactacgaaaccgtctactcgacgaactccgcgcttttacccgcgaatccgcccgccaaacgcnaactacccaaaaccctcccgcgcgtacgcgctctaaattaacc

SEQ ID NO: 4931 - DNA, 518 bp, Artificial Sequence
  chemically treated genomic DNA (Homo sapiens) CpG-island No: 4931
  unsure (475)
ttgtaggtattttcgggttagtttaggtttaggcgttacgggtaggacgaatggtagagggtttgtaggtggggttcggagaattaggagcgcgggtcggtttttagcgtttttgagcgtcgtagggcgcgtagtaggtattgggttagggtcgacggtttgtaaataaggttgtattttttcggtagtggttcgcgttcgtcgttgaattggttcgtcgggttttcgtcgttcgtttttttttcgtcgtttacggttttgggtttcggtagggtttttttttcgacggcgcgttttagggtttcggagtcgcgggtcgagtaggtcgagaagggcgagtacggttaagatgagcgcgagggcggcgttttacggcggtatggcgaagttggagagtttcggcgtgtagcgtgttgcggggtcgtttattcggcgagtttcgcgtttttgttcgcgggttcgttcgttaggcgtnggttgtttagggttttttcgcgcgtgcgcgttttggattggtt

SEQ ID NO: 4932 - DNA, 518 bp, Artificial Sequence
  chemically treated genomic DNA (Homo sapiens) CpG-island No: 4932
  unsure (44)
aaccaatccaaaacgcgcacgcgcgaaaaaaccctaaacaaccnacgcctaacgaacgaacccgcgaacaaaaacgcgaaactcgccgaataaacgaccccgcaacacgctacacgccgaaactctccaacttcgccataccgccgtaaaacgccgccctcgcgctcatcttaaccgtactcgcccttctcgacctactcgacccgcgactccgaaaccctaaaacgcgccgtcgaaaaaaaaaccctaccgaaacccaaaaccgtaaacgacgaaaaaaaaacgaacgacgaaaacccgacgaaccaattcaacgacgaacgcgaaccactaccgaaaaaatacaaccttatttacaaaccgtcgaccctaacccaatacctactacgcgccctacgacgctcaaaaacgctaaaaaccgacccgcgctcctaattctccgaaccccacctacaaaccctctaccattcgtcctacccgtaacgcctaaacctaaactaacccgaaaatacctacaa

SEQ ID NO: 4933 - DNA, 801 bp, Artificial Sequence
  chemically treated genomic DNA (Homo sapiens) CpG-island No: 4933
ttgcgggcgcgcgtttttgcggcggcgttttcggggttcgcgtttcgtgcgtattcgcgttcgttgcgggcgtttgtttttttcgtcgagcggcgtttttgtgtgcgggggtgtgggaggcgagcgcgagttcgcgtagttcgttagagtgttcgtttttttttagggcgggtgggggtttttcgcgtcgttcgtcgtcgtcgtttcgcgaggacgttcgttgttcgtttcgttcgtatcgcgtcgggcgcgtcgttttcgttcgtcgtcgttcgtatatgttcgattcgtagtttcgcgagtaggtagcgtcggtttttcgtttcgcggtttcgggttcggtttcggcgtcgtttttttttttcggtcgggcgtcgcggtttcggtatgaggagcgggcgatgattttcgttaacgttttcgttaggaaggggttcgagggtaagtattcgttgtattatttcgtgtggtataatcgttatcgcgagttggagaaggaggttcgcgcgggttaggtaggagcgttttcggggcgcgcggggatttcgcggtcgggtacgttcgttcggtttggggagggggtgcggcgcgggttgtttcgtttttttggcgagtttgcggcgcgtttttgtttgcggtcgcggtttttgtgtttgttgatcgggaaagggtgatgggagcgggttttgttcgtttttttcggtcgggacgggcgggattatacgtgtttcggatttatttagatgagagtagaggtttttgtgtttttttttcgtcggggtagtgagggttgtagggagg

SEQ ID NO: 4934 - DNA, 801 bp, Artificial Sequence
  chemically treated genomic DNA (Homo sapiens) CpG-island No: 4934
cctccctacaaccctcactaccccgacgaaaaaaaaacacaaaaacctctactctcatctaaataaatccgaaacacgtataatcccgcccgtcccgaccgaaaaaaacgaacaaaacccgctcccatcaccctttcccgatcaacaaacacaaaaaccgcgaccgcaaacaaaaacgcgccgcaaactcgccaaaaaaacgaaacaacccgcgccgcaccccctccccaaaccgaacgaacgtacccgaccgcgaaatccccgcgcgccccgaaaacgctcctacctaacccgcgcgaacctccttctccaactcgcgataacgattataccacacgaaataatacaacgaatacttaccctcgaaccccttcctaacgaaaacgttaacgaaaatcatcgcccgctcctcataccgaaaccgcgacgcccgaccgaaaaaaaaaaacgacgccgaaaccgaacccgaaaccgcgaaacgaaaaaccgacgctacctactcgcgaaactacgaatcgaacatatacgaacgacgacgaacgaaaacgacgcgcccgacgcgatacgaacgaaacgaacaacgaacgtcctcgcgaaacgacgacgacgaacgacgcgaaaaacccccacccgccctaaaaaaaaacgaacactctaacgaactacgcgaactcgcgctcgcctcccacacccccgcacacaaaaacgccgctcgacgaaaaaaacaaacgcccgcaacgaacgcgaatacgcacgaaacgcgaaccccgaaaacgccgccgcaaaaacgcgcgcccgcaa

SEQ ID NO: 4935 - DNA, 801 bp, Artificial Sequence
  chemically treated genomic DNA (Homo sapiens) CpG-island No: 4935
tttttttgtagtttttattgtttcggcggaggaggggtatagaggtttttatttttatttaggtgagttcgaaatacgtgtggtttcgttcgtttcggtcggagggagcgggtagggttcgtttttattattttttttcggttaataagtataaaagtcgcggtcgtaaataaagacgcgtcgtaaattcgttagggaggcgggatagttcgcgtcgtattttttttttaggtcggacgggcgtgttcggtcgcggggttttcgcgcgtttcgaaggcgtttttatttggttcgcgcggatttttttttttagttcgcggtggcggttgtgttatacgaggtagtgtagcggatatttgttttcgggtttttttttggcggaggcgttggcggggattatcgttcgttttttatgtcggggtcgcggcgttcggtcggggaggagggacggcgtcggagtcgggttcggggtcgcggggcggggggtcggcgttgtttgttcgcggggttgcggatcgagtatgtgcgagcggcggcgagcgggggcggcgcgttcggcgcggtgcgggcggagcgggtaacgggcgttttcgcgaggcggcggcggcgggcggcgcggagagtttttattcgttttgggagggagcgggtattttggcgggttgcgcggattcgcgttcgttttttatattttcgtatataaagacgtcgttcggcggagggagtaggcgttcgtagcgggcgcgggtgcgtacgggacgcgggtttcggggacgtcgtcgtagggacgcgcgttcgtag

SEQ ID NO: 4936 - DNA, 801 bp, Artificial Sequence
  chemically treated genomic DNA (Homo sapiens) CpG-island No: 4936
ctacgaacgcgcgtccctacgacgacgtccccgaaacccgcgtcccgtacgcacccgcgcccgctacgaacgcctactccctccgccgaacgacgtctttatatacgaaaatataaaaaacgaacgcgaatccgcgcaacccgccaaaatacccgctccctcccaaaacgaataaaaactctccgcgccgcccgccgccgccgcctcgcgaaaacgcccgttacccgctccgcccgcaccgcgccgaacgcgccgcccccgctcgccgccgctcgcacatactcgatccgcaaccccgcgaacaaacaacgccgaccccccgccccgcgaccccgaacccgactccgacgccgtccctcctccccgaccgaacgccgcgaccccgacataaaaaacgaacgataatccccgccaacgcctccgccaaaaaaaaacccgaaaacaaatatccgctacactacctcgtataacacaaccgccaccgcgaactaaaaaaaaaaatccgcgcgaaccaaataaaaacgccttcgaaacgcgcgaaaaccccgcgaccgaacacgcccgtccgacctaaaaaaaaaatacgacgcgaactatcccgcctccctaacgaatttacgacgcgtctttatttacgaccgcgacttttatacttattaaccgaaaaaaaataataaaaacgaaccctacccgctccctccgaccgaaacgaacgaaaccacacgtatttcgaactcacctaaataaaaataaaaacctctatacccctcctccgccgaaacaataaaaactacaaaaaaa

SEQ ID NO: 4937 - DNA, 768 bp, Artificial Sequence
  chemically treated genomic DNA (Homo sapiens) CpG-island No: 4937
  unsure (710)
attttacgcggaaagtgaaggggagggggttgtgagggtgatttatattgttttcgggttaggcgagcgttgtagcggaggttagggtcgtagcgacgttgttcgtcggggtcgggtatttgtcgcggtttttttaagcgttttcgtttttttttgttcgcgttcgggttttttttttttagggggcgcggtcggtagcgcgcggcggggcgggggtgcggtttttttttttgtgggtagggtttgcgtcgttttttgtagaagcggtcgggagtcgcgtagggggcggagagaggagtcgcgagcggcggcggggcggcgcggggcggagggcgttcgagggcgagcgggtaggcgggtacggcgggtttcgggttagtttcggggcggacggttggtcgggcgcgcggagtttcgtcggggtttcgtcggagtcgggtcgggtagtaggggtcgtcgtcgtcgttcgggttcgtcgttcgcgttttttacgttggtttagagggttgcggtcgcgtcgtcgttgaggatgtttcgaaaggggtcgcgagcggaggtgtgtgcggattgtagcgtttcgggtaagcgcggcggggtcgggggcgggatcgtatagttaggtcgtcgtcgggcgtgcgtcggggtttggtaagagcgttgtgcggggtcggagggttgggcggggcggggggttgcgagttttaggttgnggtttcgtttcggttattgcggattgcgtttttggcgggagggacggtttggggtgtt

SEQ ID NO: 4938 - DNA, 768 bp, Artificial Sequence
  chemically treated genomic DNA (Homo sapiens) CpG-island No: 4938
  unsure (59)
aacaccccaaaccgtccctcccgccaaaaacgcaatccgcaataaccgaaacgaaaccncaacctaaaactcgcaaccccccgccccgcccaaccctccgaccccgcacaacgctcttaccaaaccccgacgcacgcccgacgacgacctaactatacgatcccgcccccgaccccgccgcgcttacccgaaacgctacaatccgcacacacctccgctcgcgacccctttcgaaacatcctcaacgacgacgcgaccgcaaccctctaaaccaacgtaaaaaacgcgaacgacgaacccgaacgacgacgacgacccctactacccgacccgactccgacgaaaccccgacgaaactccgcgcgcccgaccaaccgtccgccccgaaactaacccgaaacccgccgtacccgcctacccgctcgccctcgaacgccctccgccccgcgccgccccgccgccgctcgcgactcctctctccgccccctacgcgactcccgaccgcttctacaaaaaacgacgcaaaccctacccacaaaaaaaaaaaccgcacccccgccccgccgcgcgctaccgaccgcgccccctaaaaaaaaaaaacccgaacgcgaacaaaaaaaaacgaaaacgcttaaaaaaaccgcgacaaatacccgaccccgacgaacaacgtcgctacgaccctaacctccgctacaacgctcgcctaacccgaaaacaatataaatcaccctcacaaccccctccccttcactttccgcgtaaaat

SEQ ID NO: 4939 - DNA, 768 bp, Artificial Sequence
  chemically treated genomic DNA (Homo sapiens) CpG-island No: 4939
  unsure (59)
ggtattttaggtcgtttttttcgttaagggcgtagttcgtagtggtcgaggcggggttntagtttggagttcgtagtttttcgtttcgtttagtttttcggtttcgtatagcgtttttgttaggtttcggcgtacgttcggcggcggtttggttgtgcggtttcgttttcggtttcgtcgcgtttattcggggcgttgtagttcgtatatattttcgttcgcggtttttttcgggatatttttagcggcgacgcggtcgtagttttttgggttagcgtggggggcgcgggcggcgggttcgggcggcggcggcggtttttgttgttcggttcggtttcggcgaggtttcggcgaggtttcgcgcgttcggttaatcgttcgtttcggggttggttcggaattcgtcgtgttcgtttgttcgttcgttttcgggcgtttttcgtttcgcgtcgtttcgtcgtcgttcgcggttttttttttcgttttttgcgcggttttcggtcgtttttgtaggaagcggcgtaggttttgtttatagggggaggggtcgtattttcgtttcgtcgcgcgttgtcggtcgcgttttttagagaaaggaagttcgggcgcgggtaggagggggcgggggcgtttaaaggggtcgcggtagatgttcggtttcggcgggtagcgtcgttgcggttttggttttcgttgtagcgttcgtttggttcggaggtaatgtgagttatttttatagtttttttttttttatttttcgcgtggggt

SEQ ID NO: 4940 - DNA, 768 bp, Artificial Sequence
  chemically treated genomic DNA (Homo sapiens) CpG-island No: 4940
  unsure (710)
accccacgcgaaaaataaaaaaaaaaaaactataaaaataactcacattacctccgaaccaaacgaacgctacaacgaaaaccaaaaccgcaacgacgctacccgccgaaaccgaacatctaccgcgacccctttaaacgcccccgccccctcctacccgcgcccgaacttcctttctctaaaaaacgcgaccgacaacgcgcgacgaaacgaaaatacgacccctccccctataaacaaaacctacgccgcttcctacaaaaacgaccgaaaaccgcgcaaaaaacgaaaaaaaaaaccgcgaacgacgacgaaacgacgcgaaacgaaaaacgcccgaaaacgaacgaacaaacgaacacgacgaattccgaaccaaccccgaaacgaacgattaaccgaacgcgcgaaacctcgccgaaacctcgccgaaaccgaaccgaacaacaaaaaccgccgccgccgcccgaacccgccgcccgcgccccccacgctaacccaaaaaactacgaccgcgtcgccgctaaaaatatcccgaaaaaaaccgcgaacgaaaatatatacgaactacaacgccccgaataaacgcgacgaaaccgaaaacgaaaccgcacaaccaaaccgccgccgaacgtacgccgaaacctaacaaaaacgctatacgaaaccgaaaaactaaacgaaacgaaaaactacgaactccaaactanaaccccgcctcgaccactacgaactacgcccttaacgaaaaaaacgacctaaaatacc

SEQ ID NO: 4941 - DNA, 605 bp, Artificial Sequence
  chemically treated genomic DNA (Homo sapiens) CpG-island No: 4941
tttcggcgtacggttatttttatttcgcgggtttttattcgtacggcgcgcgtgtagtttatagtttggttgtttcgatgttcgttttttattagtattcggaaggtaggtagcgttgcgttttggtcgtatgagtcgattagtaggtacgtgtaggtgtttatgaagtcgaagcgtcggtcgtcgaagtttatatagtgtgggttttcggatttttggtaggtttcgaagcgatcggggtagtagtttaggaggtcgttttggacgttgtagcgtttattcgtcgggtagttttgtttgtcgcggtaggtgatttgatgggtggcgtcgttgtaggtgtagcgtttttggtataattcgttcgtttatattttttggttcggagcgagttggagattttggaaggtgtagttatacgacgaggtcggtacgtaggcgtcgtcgttggttacgaagtttgggaggtatacgtagttttttacgtaggggcgttcggagtagttggacggcgtcgtagtttcgttgtaggaggtcgggtaagtagggtcgtagagtttatagcggttgttggtagggtaggatagggttgcggggagattagagag

SEQ ID NO: 4942 - DNA, 605 bp, Artificial Sequence
  chemically treated genomic DNA (Homo sapiens) CpG-island No: 4942
ctctctaatctccccgcaaccctatcctaccctaccaacaaccgctataaactctacgaccctacttacccgacctcctacaacgaaactacgacgccgtccaactactccgaacgcccctacgtaaaaaactacgtatacctcccaaacttcgtaaccaacgacgacgcctacgtaccgacctcgtcgtataactacaccttccaaaatctccaactcgctccgaaccaaaaaatataaacgaacgaattataccaaaaacgctacacctacaacgacgccacccatcaaatcacctaccgcgacaaacaaaactacccgacgaataaacgctacaacgtccaaaacgacctcctaaactactaccccgatcgcttcgaaacctaccaaaaatccgaaaacccacactatataaacttcgacgaccgacgcttcgacttcataaacacctacacgtacctactaatcgactcatacgaccaaaacgcaacgctacctaccttccgaatactaataaaaaacgaacatcgaaacaaccaaactataaactacacgcgcgccgtacgaataaaaacccgcgaaataaaaataaccgtacgccgaaa

SEQ ID NO: 4943 - DNA, 605 bp, Artificial Sequence
  chemically treated genomic DNA (Homo sapiens) CpG-island No: 4943
ttttttgattttttcgtagttttgttttgttttgttaatagtcgttatgagttttgcggttttgtttgttcgattttttgtaacggggttgcggcgtcgtttaattgtttcgggcgtttttgcgtggagggttgcgtgtgttttttaggtttcgtggttagcggcggcgtttgcgtgtcggtttcgtcgtgtggttgtattttttagggtttttagttcgtttcgggttaggaagtgtgggcggacgagttgtgttaaaggcgttgtatttgtaacggcgttatttattaggttatttgtcgcgataagtagagttgttcggcgggtgagcgttgtagcgtttagaacggttttttgggttgttatttcgatcgtttcgggatttgttaggggttcggggatttatattatgtgagtttcgacggtcggcgtttcgattttatgggtatttgtacgtatttgttggtcggtttatgcggttagaacgtagcgttgtttgtttttcgggtgttggtggaaaacgagtatcggggtagttagattgtgagttatacgcgcgtcgtgcgggtggaggttcgcggggtgaaggtggtcgtgcgtcggga

SEQ ID NO: 4944 - DNA, 605 bp, Artificial Sequence
  chemically treated genomic DNA (Homo sapiens) CpG-island No: 4944
tcccgacgcacgaccaccttcaccccgcgaacctccacccgcacgacgcgcgtataactcacaatctaactaccccgatactcgttttccaccaacacccgaaaaacaaacaacgctacgttctaaccgcataaaccgaccaacaaatacgtacaaatacccataaaatcgaaacgccgaccgtcgaaactcacataatataaatccccgaacccctaacaaatcccgaaacgatcgaaataacaacccaaaaaaccgttctaaacgctacaacgctcacccgccgaacaactctacttatcgcgacaaataacctaataaataacgccgttacaaatacaacgcctttaacacaactcgtccgcccacacttcctaacccgaaacgaactaaaaaccctaaaaaatacaaccacacgacgaaaccgacacgcaaacgccgccgctaaccacgaaacctaaaaaacacacgcaaccctccacgcaaaaacgcccgaaacaattaaacgacgccgcaaccccgttacaaaaaatcgaacaaacaaaaccgcaaaactcataacgactattaacaaaacaaaacaaaactacgaaaaaatcaaaaaa

SEQ ID NO: 4945 - DNA, 1106 bp, Artificial Sequence
  chemically treated genomic DNA (Homo sapiens) CpG-island No: 4945
cggaagaatgaagttttcgtttagacggtacgcgttttattgggagtaatttttttttagtttgcggtaacggtggtattttcgcgttatttttcggttttcgcgttttttttaatatcgtggttatttttttttttttttcgagcgaggtagtttttagagttatatttttggcgatttttttttcgttattcggtcgattcggcgtgcggtcgttcgggggagtaagggagggaagggagcggtttatcgaggcgtagtagttcgttttagattttcgcgtttcgatataaagcgtttggtcgggtcggcgttatttgtttttattcggttcgcggggttggggaagtttttcggttgcgatcgtattttttttcgaagttaagttttttttcgttttggtttttttagttgttcgaggtattgttcggataaattttatcgcgttttggttgggaaagtaaaagttggcgtcgggggtcggggggatcggggagtcgcgtttggttatttattcgggcgtttgggagttttttcggttttttcggagcgttgtcggaggtcgattataggcgttagcgtcggagattagtcggggcgcggcgggaatatagttagggagtgagtggggggcgtagattttttttaggcgtcggttttagattttgtcgttgcgagttgtcgagtttttttcgcggagggaataaagttttcggcgttggttcggttcggttgttttttttatatttcgaagtagtttttcggttttttgtcgttttttgggcggagggcggtcggtaggcggttaatggggattttgtaagcgggttggcggcgcggtttatttattttcgagttgttttgttaggtcggcgttgcgggttttgcgcggcgttcgttgttttttttagtttcgcgtttcgggttcgttggcgcgttttatcgcgtatatttcgtatatatttattcgttttatatttacgtcggtcggggagttagtgcgttcgttcggaacgcgggcgttttatttgtgatatattgttaagttgttttttgattgggttttagggaaatacggttttttcgtttcgagatgtgtattggga

SEQ ID NO: 4946 - DNA, 1106 bp, Artificial Sequence
  chemically treated genomic DNA (Homo sapiens) CpG-island No: 4946
tcccaatacacatctcgaaacgaaaaaaccgtatttccctaaaacccaatcaaaaaacaacttaacaatatatcacaaataaaacgcccgcgttccgaacgaacgcactaactccccgaccgacgtaaatataaaacgaataaatatatacgaaatatacgcgataaaacgcgccaacgaacccgaaacgcgaaactaaaaaaaacaacgaacgccgcgcaaaacccgcaacgccgacctaacaaaacaactcgaaaataaataaaccgcgccgccaacccgcttacaaaatccccattaaccgcctaccgaccgccctccgcccaaaaaacgacaaaaaaccgaaaaactacttcgaaatataaaaaaaacaaccgaaccgaaccaacgccgaaaactttattccctccgcgaaaaaaactcgacaactcgcaacgacaaaatctaaaaccgacgcctaaaaaaaatctacgccccccactcactccctaactatattcccgccgcgccccgactaatctccgacgctaacgcctataatcgacctccgacaacgctccgaaaaaaccgaaaaaactcccaaacgcccgaataaataaccaaacgcgactccccgatccccccgacccccgacgccaacttttactttcccaaccaaaacgcgataaaatttatccgaacaatacctcgaacaactaaaaaaaccaaaacgaaaaaaaacttaacttcgaaaaaaaatacgatcgcaaccgaaaaacttccccaaccccgcgaaccgaataaaaacaaataacgccgacccgaccaaacgctttatatcgaaacgcgaaaatctaaaacgaactactacgcctcgataaaccgctcccttccctcccttactcccccgaacgaccgcacgccgaatcgaccgaataacgaaaaaaaaatcgccaaaaatataactctaaaaactacctcgctcgaaaaaaaaaaaaaaataaccacgatattaaaaaaaacgcgaaaaccgaaaaataacgcgaaaataccaccgttaccgcaaactaaaaaaaaattactcccaataaaacgcgtaccgtctaaacgaaaacttcattcttccg

SEQ ID NO: 4947 - DNA, 1106 bp, Artificial Sequence
  chemically treated genomic DNA (Homo sapiens) CpG-island No: 4947
ttttagtatatatttcgggacggaagaatcgtgtttttttagaatttagttagagggtagtttagtaatgtgttataggtggggcgttcgcgtttcgggcggacgtattggtttttcggtcggcgtgggtgtggggcgagtgggtgtgtgcggggtgtgcgcggtagagcgcgttagcgagttcggagcgcggagttgggaggagtagcgagcgtcgcgtagaattcgtagcgtcggtttggtagggtagttcggaggtgggtgggtcgcgtcgttagttcgtttgtagggtttttattggtcgtttgtcggtcgtttttcgtttaaaaggcggtaaggagtcgagaggttgtttcggagtgtgaggaggatagtcggatcgagttaacgtcggggattttgtttttttcgcggaggggattcggtaattcgtagcggtagggtttggggtcggcgtttgggagggatttgcgttttttatttattttttagttgtgttttcgtcgcgtttcggttagttttcggcgttggcgtttatggtcggttttcgatagcgtttcggagggatcgggggagtttttaggcgttcgggtgagtagttaggcgcggtttttcggttttttcgattttcggcgttagtttttgtttttttagttagggcgcggtggggtttgttcgggtagtgtttcgagtaattgggaaggttaaggcggagggaaatttggtttcggggagaagtgcgatcgtagtcgggaggtttttttagtttcgcgggtcgggtgagaataggtggcgtcggttcgattaggcgttttgtgtcggggcgcgaggatttggagcgaattgttgcgtttcggtgggtcgttttttttttttttttgttttttcgggcggtcgtacgtcgggtcggtcgggtaacggagagggagtcgttaggaatgtggttttggggattgtttcgttcggggaaggggagagggtggttacggtgttaggagaggcgcgggagtcgagaggtggcgcgggggtgttatcgttgtcgtaggttggagagagattgtttttagtgaggcgcgtatcgtttgggcgagggttttattttttcg

SEQ ID NO: 4948 - DNA, 1106 bp, Artificial Sequence
  chemically treated genomic DNA (Homo sapiens) CpG-island No: 4948
cgaaaaaataaaaccctcgcccaaacgatacgcgcctcactaaaaacaatctctctccaacctacgacaacgataacacccccgcgccacctctcgactcccgcgcctctcctaacaccgtaaccaccctctccccttccccgaacgaaacaatccccaaaaccacattcctaacgactccctctccgttacccgaccgacccgacgtacgaccgcccgaaaaaacaaaaaaaaaaaaaaaacgacccaccgaaacgcaacaattcgctccaaatcctcgcgccccgacacaaaacgcctaatcgaaccgacgccacctattctcacccgacccgcgaaactaaaaaaacctcccgactacgatcgcacttctccccgaaaccaaatttccctccgccttaaccttcccaattactcgaaacactacccgaacaaaccccaccgcgccctaactaaaaaaacaaaaactaacgccgaaaatcgaaaaaaccgaaaaaccgcgcctaactactcacccgaacgcctaaaaactcccccgatccctccgaaacgctatcgaaaaccgaccataaacgccaacgccgaaaactaaccgaaacgcgacgaaaacacaactaaaaaataaataaaaaacgcaaatccctcccaaacgccgaccccaaaccctaccgctacgaattaccgaatcccctccgcgaaaaaaacaaaatccccgacgttaactcgatccgactatcctcctcacactccgaaacaacctctcgactccttaccgccttttaaacgaaaaacgaccgacaaacgaccaataaaaaccctacaaacgaactaacgacgcgacccacccacctccgaactaccctaccaaaccgacgctacgaattctacgcgacgctcgctactcctcccaactccgcgctccgaactcgctaacgcgctctaccgcgcacaccccgcacacacccactcgccccacacccacgccgaccgaaaaaccaatacgtccgcccgaaacgcgaacgccccacctataacacattactaaactaccctctaactaaattctaaaaaaacacgattcttccgtcccgaaatatatactaaaa

SEQ ID NO: 4949 - DNA, 637 bp, Artificial Sequence
  chemically treated genomic DNA (Homo sapiens) CpG-island No: 4949
ttggggtttgggtagggtaggcggtttagagggagttatagtggcggcggcggcgggcggttgtggtggatttgggaaaagttgcgaggcggtcgttggaagttgcgcgggcgggcgggtggattgcgtcgagtcgcggttgcggtagtgggcgttgtgcgttcggttatgtttttcggcgcggcgttgcgcggcgggaggattgcggcggggagtaggggatattaaggtgggggttgtgatcgcggggtgggggcgggggtacgggtagagtagagttatcggtttcgtatagttacgcgtaggtggggaggaaagaggtttagcgagcgttcggacgtggggagagaagaggtttagcgagcgttcggagagtcgggagtggagggtatatagttagcggcggtagtttaggagtaggaggtagagagggcgcgttgcgattcgcgtatttcgggtttgttgggcgtcgagtaaattttagggggcgggttgttagagcgttgggtcgcggagagggcgtagcgtagttttcggcgtttcgtttgggtgtagtttgggtttagggttaataatttttttcggcgttttttgtttgttcggcgcggagcggttttggtttggcgggatgtgggtt

SEQ ID NO: 4950 - DNA, 637 bp, Artificial Sequence
  chemically treated genomic DNA (Homo sapiens) CpG-island No: 4950
aacccacatcccgccaaaccaaaaccgctccgcgccgaacaaacaaaaaacgccgaaaaaaattattaaccctaaacccaaactacacccaaacgaaacgccgaaaactacgctacgccctctccgcgacccaacgctctaacaacccgccccctaaaatttactcgacgcccaacaaacccgaaatacgcgaatcgcaacgcgccctctctacctcctactcctaaactaccgccgctaactatataccctccactcccgactctccgaacgctcgctaaacctcttctctccccacgtccgaacgctcgctaaacctctttcctccccacctacgcgtaactatacgaaaccgataactctactctacccgtacccccgcccccaccccgcgatcacaacccccaccttaatatcccctactccccgccgcaatcctcccgccgcgcaacgccgcgccgaaaaacataaccgaacgcacaacgcccactaccgcaaccgcgactcgacgcaatccacccgcccgcccgcgcaacttccaacgaccgcctcgcaacttttcccaaatccaccacaaccgcccgccgccgccgccactataactccctctaaaccgcctaccctacccaaaccccaa

SEQ ID NO: 4951 - DNA, 637 bp, Artificial Sequence
  chemically treated genomic DNA (Homo sapiens) CpG-island No: 4951
agtttatatttcgttagattaaggtcgtttcgcgtcgggtaggtagggggcgtcggggagggttattgattttggatttaggttgtatttagacgaagcgtcggaggttgcgttgcgtttttttcgcggtttaacgttttggtagttcgttttttggggtttgttcggcgtttagtaagttcgaggtgcgcgggtcgtagcgcgttttttttgttttttgtttttaggttgtcgtcgttggttgtgtgttttttattttcggtttttcgagcgttcgttgggttttttttttttttacgttcgagcgttcgttgggttttttttttttttatttgcgcgtggttgtgcggagtcggtagttttgttttgttcgtgttttcgtttttatttcgcgattatagtttttattttggtgttttttatttttcgtcgtagttttttcgtcgcgtagcgtcgcgtcggagagtatggtcgagcgtatagcgtttattatcgtagtcgcggttcggcgtagtttattcgttcgttcgcgtaatttttagcggtcgtttcgtaattttttttaagtttattatagtcgttcgtcgtcgtcgttattgtggttttttttgagtcgtttattttatttaaattttag

SEQ ID NO: 4952 - DNA, 637 bp, Artificial Sequence
  chemically treated genomic DNA (Homo sapiens) CpG-island No: 4952
ctaaaatttaaataaaataaacgactcaaaaaaaaccacaataacgacgacgacgaacgactataataaacttaaaaaaaattacgaaacgaccgctaaaaattacgcgaacgaacgaataaactacgccgaaccgcgactacgataataaacgctatacgctcgaccatactctccgacgcgacgctacgcgacgaaaaaactacgacgaaaaataaaaaacaccaaaataaaaactataatcgcgaaataaaaacgaaaacacgaacaaaacaaaactaccgactccgcacaaccacgcgcaaataaaaaaaaaaaaaacccaacgaacgctcgaacgtaaaaaaaaaaaaaacccaacgaacgctcgaaaaaccgaaaataaaaaacacacaaccaacgacgacaacctaaaaacaaaaaacaaaaaaaacgcgctacgacccgcgcacctcgaacttactaaacgccgaacaaaccccaaaaaacgaactaccaaaacgttaaaccgcgaaaaaaacgcaacgcaacctccgacgcttcgtctaaatacaacctaaatccaaaatcaataaccctccccgacgccccctacctacccgacgcgaaacgaccttaatctaacgaaatataaact

SEQ ID NO: 4953 - DNA, 760 bp, Artificial Sequence
  chemically treated genomic DNA (Homo sapiens) CpG-island No: 4953
  unsure (204, 216, 218, 240, 280, 282, 300, 351, 355, 363, 393, 407)
  unsure (414, 416, 451, 453, 459, 479, 494, 496, 508, 510, 526, 542)
  unsure (573, 581, 611, 629, 639, 661, 672, 681, 687, 690, 706, 708)
  unsure (710, 729, 731, 736)
gttgaggtgcgagacgcggagggttgtttgtgtagtggagagggtgagagtgggcgtgaaaggtgcgacggggtggggagacggtgtggtgagggacgcgtgtacgtgtgtgggtggtgtgtgtgtgtgtgtgtgtgtgtgtgtgtgtgtgtgtgtgtgtgtgtgtgtgtgtgtgtgagggagcgagcggcgtgcgtgcgaggntgcgtgtgtgtngncgcgttagatgtggtcgggtanagtgattgacggtagggttgtgtgtgagtgcgtgcggggngntgcgagcgtgagcgagancgcgtgcgcgaggtggtgcgtgcgggagaggcgatgataagcgtgcgcggngggntgtgtggntgagagcgacggtgtgcgtgtgtgtgagtncgtgcgagagcgtntagcgtngngtggagtgatgaggatgagagtgtgtgttagcgangnagtgtncgcgtgggcgcgagcgcggntggggcgcgcgaggngntgagagtgtgtngntgggtgagtgtgtgtntgagtttgagagaggnattgggcgggagtgtgtgttgcgacgatggngtgtgggncgagagtgcgtggggttgcgtgcgcgagancggtggcgtgggagtttntgcgagagantgagagttgtcgatcgcgtcgncgtcgtgcgangaggtttgntgtgtnatnagaggttggggtttgngngngggattgtgtaagtacggngngcgantgtggagagttagagttacgaggt

SEQ ID NO: 4954 - DNA, 760 bp, Artificial Sequence
  chemically treated genomic DNA (Homo sapiens) CpG-island No: 4954
  unsure (25, 30, 32, 51, 53, 55, 71, 74, 80, 89, 100, 122, 132, 150)
  unsure (180, 188, 219, 235, 251, 253, 265, 267, 282, 302, 308, 310)
  unsure (345, 347, 354, 368, 398, 406, 410, 461, 479, 481, 521, 543)
  unsure (545, 557)
acctcgtaactctaactctccacantcgcncnccgtacttacacaatcccncncncaaaccccaacctctnatnacacancaaacctcntcgcacgacgncgacgcgatcgacaactctcantctctcgcanaaactcccacgccaccgntctcgcgcacgcaaccccacgcactctcgncccacacnccatcgtcgcaacacacactcccgcccaatncctctctcaaactcanacacacactcacccancnacacactctcancncctcgcgcgccccanccgcgctcgcgcccacgcgnacactncntcgctaacacacactctcatcctcatcactccacncnacgctanacgctctcgcacgnactcacacacacgcacaccgtcgctctcanccacacancccnccgcgcacgcttatcatcgcctctcccgcacgcaccacctcgcgcacgcgntctcgctcacgctcgcancnccccgcacgcactcacacacaaccctaccgtcaatcactntacccgaccacatctaacgcgncnacacacacgcancctcgcacgcacgccgctcgctccctcacacacacacacacacacacacacacacacacacacacacacacacacacacacacacaccacccacacacgtacacgcgtccctcaccacaccgtctccccaccccgtcgcacctttcacgcccactctcaccctctccactacacaaacaaccctccgcgtctcgcacctcaac

SEQ ID NO: 4955 - DNA, 760 bp, Artificial Sequence
  chemically treated genomic DNA (Homo sapiens) CpG-island No: 4955
  unsure (25, 30, 32, 51, 53, 55, 71, 74, 80, 89, 100, 122, 132, 150)
  unsure (180, 188, 219, 235, 251, 253, 265, 267, 282, 302, 308, 310)
  unsure (345, 347, 354, 368, 398, 406, 410, 461, 479, 481, 521, 543)
  unsure (545, 557)
atttcgtggttttggttttttatantcgtntntcgtatttgtatagttttntntntaggttttagtttttngtngtatantaggttttntcgtacgacgncgacgcggtcgataatttttantttttcgtangggtttttacgttatcgntttcgcgtacgtaattttacgtattttcgntttatatnttatcgtcgtagtatatattttcgtttagtnttttttttagatttanatatatatttatttantnatatatttttantntttcgcgcgttttantcgcgttcgcgtttacgcgnatattntntcgttaatatatatttttatttttattattttatntngcgttangcgttttcgtacgngtttatatatacgtatatcgtcgtttttanttatatantttntcgcgtacgtttgttatcgtttttttcgtacgtattatttcgcgtacgcgntttcgtttacgttcgtantntttcgtacgtatttatatatagttttatcgttagttattntattcgattatatttagcgcgntngtatatacgtantttcgtacgtacgtcgttcgtttttttatatatatatatatatatatatatatatatatatatatatatatatatatatatatatattatttatatacgtgtacgcgttttttattatatcgtttttttatttcgtcgtattttttacgtttatttttattttttttattgtataaatagtttttcgcgtttcgtattttagt

SEQ ID NO: 4956 - DNA, 760 bp, Artificial Sequence
  chemically treated genomic DNA (Homo sapiens) CpG-island No: 4956
  unsure (204, 216, 218, 240, 280, 282, 300, 351, 355, 363, 393, 407)
  unsure (414, 416, 451, 453, 459, 479, 494, 496, 508, 510, 526, 542)
  unsure (573, 581, 611, 629, 639, 661, 672, 681, 687, 690, 706, 708)
  unsure (710, 729, 731, 736)
actaaaatacgaaacgcgaaaaactatttatacaataaaaaaaataaaaataaacgtaaaaaatacgacgaaataaaaaaacgatataataaaaaacgcgtacacgtatataaataatatatatatatatatatatatatatatatatatatatatatatatatatatatatatataaaaaaacgaacgacgtacgtacgaaantacgtatatacnancgcgctaaatataatcgaatanaataactaacgataaaactatatataaatacgtacgaaanantacgaacgtaaacgaaancgcgtacgcgaaataatacgtacgaaaaaaacgataacaaacgtacgcganaaantatataantaaaaacgacgatatacgtatatataaacncgtacgaaaacgcntaacgcnanataaaataataaaaataaaaatatatattaacgananaatatncgcgtaaacgcgaacgcgantaaaacgcgcgaaanantaaaaatatatnantaaataaatatatatntaaatctaaaaaaaanactaaacgaaaatatatactacgacgataanatataaancgaaaatacgtaaaattacgtacgcgaaancgataacgtaaaaacccntacgaaaaantaaaaattatcgaccgcgtcgncgtcgtacganaaaacctantatacnacnaaaaactaaaacctanananaaaactatacaaatacgananacgantataaaaaaccaaaaccacgaaat

SEQ ID NO: 4957 - DNA, 1000 bp, Artificial Sequence
  chemically treated genomic DNA (Homo sapiens) CpG-island No: 4957
  unsure (1, 15, 17, 44, 62, 66, 68, 89, 117, 125, 151, 154, 187, 190)
  unsure (213, 232, 236, 238, 308, 316, 328, 330, 341, 360, 372, 457)
  unsure (459, 520, 605, 641, 682, 798)
ngcgcgagcgatggngngtgtgtggttcgtgtggtgtgatggantggggtgacggcgaggantgtnantgcgtgcggtgcgagaggagngcgagagttgggcgcgtagcgggtgggngggttggncgcggcgggtgtgaaggatgataggnggngtgtgagaagcgtggagacgaagtcggttgtanggntgtcgtttgcgtgtgggtggagngcgttcggtttgacgtgangggngnggtagtagtaatgtggcgagttgttgacgcggggcgtgtaggacgtattatcggagggatgggggtacgnggttgttntgtacgtcgcgngntggttacgggncgtaagtgtgtaacgcggngtgtgtataggncgtcgagtacggatatcgttgcgtgaatgggaagagcgtattgtgaagagttgtgcgggtgggttcgcgcgtttgttggttaggnanggagacgcgagacgttttttgggagcgagcgagtagttgtgtgttcgtagagaaggtgggngaagttcgtcgacgttgtgagaagcgcgagacgaagttgtggtgtgtgttgataggaaatgagattgttgcgtcgcgtaacgagngtggtgggttggcgggcgaggaagaagtggtggggngaggcggggagagttttacgcgttttgcgtaggtgttgggngaagacgacgatgttgtaaggggagaagatgcgttgtgtgggggtggtgcgtcgcgtcgtacgttatcgagcgcgcgcgtttgttgcgagagcgtgtgcgtgtagaacgcgttagngttcgttttagagtgtcgcgcgtagagagggaagagttgttgcgggaggatgagtagatagaagtttgtgcggatacgatggagagtcgagcgggagggttgttgtggagagaggtcgtacgtgttgtgcgagagagcgagaagtgtgtttgttcgttgtgttgtgttttgtcgtttcggcggagggtatgggttgtggttg

SEQ ID NO: 4958 - DNA, 1000 bp, Artificial Sequence
  chemically treated genomic DNA (Homo sapiens) CpG-island No: 4958
  unsure (203, 319, 360, 396, 481, 542, 544, 629, 641, 660, 671, 673)
  unsure (685, 693, 763, 765, 769, 788, 811, 814, 847, 850, 876, 884)
  unsure (912, 933, 935, 939, 957, 984, 986, 1000)
caaccacaacccataccctccgccgaaacgacaaaacacaacacaacgaacaaacacacttctcgctctctcgcacaacacgtacgacctctctccacaacaaccctcccgctcgactctccatcgtatccgcacaaacttctatctactcatcctcccgcaacaactcttccctctctacgcgcgacactctaaaacgaacnctaacgcgttctacacgcacacgctctcgcaacaaacgcgcgcgctcgataacgtacgacgcgacgcaccacccccacacaacgcatcttctccccttacaacatcgtcgtcttcncccaacacctacgcaaaacgcgtaaaactctccccgcctcnccccaccacttcttcctcgcccgccaacccaccacnctcgttacgcgacgcaacaatctcatttcctatcaacacacaccacaacttcgtctcgcgcttctcacaacgtcgacgaacttcncccaccttctctacgaacacacaactactcgctcgctcccaaaaaacgtctcgcgtctccntncctaaccaacaaacgcgcgaacccacccgcacaactcttcacaatacgctcttcccattcacgcaacgatatccgtactcgacgncctatacacacnccgcgttacacacttacgncccgtaaccancncgcgacgtacanaacaaccncgtacccccatccctccgataatacgtcctacacgccccgcgtcaacaactcgccacattactactaccncncccntcacgtcaaaccgaacgcnctccacccacacgcaaacgacanccntacaaccgacttcgtctccacgcttctcacacnccncctatcatccttcacacccgccgcgnccaacccncccacccgctacgcgcccaactctcgcnctcctctcgcaccgcacgcantnacantcctcgccgtcaccccantccatcacaccacacgaaccacacacncnccatcgctcgcgcn

SEQ ID NO: 4959 - DNA, 1000 bp, Artificial Sequence
  chemically treated genomic DNA (Homo sapiens) CpG-island No: 4959
  unsure (203, 319, 360, 396, 481, 542, 544, 629, 641, 660, 671, 673)
  unsure (685, 693, 763, 765, 769, 788, 811, 814, 847, 850, 876, 884)
  unsure (912, 933, 935, 939, 957, 984, 986, 1000)
taattatagtttatatttttcgtcggagcgataaaatataatatagcgggtaggtatatttttcgttttttcgtatagtacgtgcgatttttttttatagtagttttttcgttcgattttttatcgtgttcgtataaatttttgtttgtttattttttcgtagtaatttttttttttttgcgcgcgatattttaggacggatnttggcgcgttttatacgtatacgttttcgtaataggcgcgcgcgttcggtgacgtgcggcgcggcgtattatttttatataacgtattttttttttttataatatcgtcgtttttntttagtatttacgtagggcgcgtggggtttttttcgttttnttttattatttttttttcgttcgttaatttattatnttcgttgcgcggcgtagtagttttattttttgttaatatatattatagtttcgtttcgcgttttttataacgtcggcgggttttntttattttttttacgagtatataattattcgttcgtttttagagggcgtttcgcgtttttntntttggttaatagacgcgcgggtttattcgtataattttttataatacgttttttttatttacgtagcggtgttcgtgttcggcgntttgtgtatatntcgcgttgtatatttgcgnttcgtggttantncgcgacgtatanaataattncgtgtttttattttttcggtggtgcgttttatacgtttcgcgttagtaattcgttatattgttgttattntntttnttacgttaggtcgagcgtnttttatttatacgtaggcggtanttntatagtcgatttcgtttttacgttttttatatnttntttgttattttttatattcgtcgcgnttagtttntttattcgttgcgcgtttagttttcgtntttttttcgtatcgtacgtantngtanttttcgtcgttattttantttattatattatacgagttatatatntnttatcgttcgcgtn

SEQ ID NO: 4960 - DNA, 1000 bp, Artificial Sequence
  chemically treated genomic DNA (Homo sapiens) CpG-island No: 4960
  unsure (1, 15, 17, 44, 62, 66, 68, 89, 117, 125, 151, 154, 187, 190)
  unsure (213, 232, 236, 238, 308, 316, 328, 330, 341, 360, 372, 457)
  unsure (459, 520, 605, 641, 682, 798)
nacgcgaacgataananatatataactcgtataatataataaantaaaataacgacgaaaantacnantacgtacgatacgaaaaaaanacgaaaactaaacgcgcaacgaataaanaaactaancgcgacgaatataaaaaataacaaanaanatataaaaaacgtaaaaacgaaatcgactatanaantaccgcctacgtataaataaaanacgctcgacctaacgtaanaaananaataacaacaatataacgaattactaacgcgaaacgtataaaacgcaccaccgaaaaaataaaaacacgnaattattntatacgtcgcgnantaaccacgaancgcaaatatacaacgcganatatacacaaancgccgaacacgaacaccgctacgtaaataaaaaaaacgtattataaaaaattatacgaataaacccgcgcgtctattaaccaaananaaaaacgcgaaacgccctctaaaaacgaacgaataattatatactcgtaaaaaaaataaanaaaacccgccgacgttataaaaaacgcgaaacgaaactataatatatattaacaaaaaataaaactactacgccgcgcaacgaanataataaattaacgaacgaaaaaaaaataataaaanaaaacgaaaaaaaccccacgcgccctacgtaaatactaaanaaaaacgacgatattataaaaaaaaaaaatacgttatataaaaataatacgccgcgccgcacgtcaccgaacgcgcgcgcctattacgaaaacgtatacgtataaaacgcgccaanatccgtcctaaaatatcgcgcgcaaaaaaaaaaaaattactacgaaaaaataaacaaacaaaaatttatacgaacacgataaaaaatcgaacgaaaaaactactataaaaaaaaatcgcacgtactatacgaaaaaacgaaaaatatacctacccgctatattatattttatcgctccgacgaaaaatataaactataatta

SEQ ID NO: 4961 - DNA, 803 bp, Artificial Sequence
  chemically treated genomic DNA (Homo sapiens) CpG-island No: 4961
atttttagcgttttatttttttcgtaaaagtggcgttttcgttttttcggtttaggtatattcgttcggggttcgtacgttcggtttagatattagcgcggtggagagtatcgggtggggttttcgaagggtgaggttcggaggcgtcgcggagggggggttttttagagaggagggggcgttgcgggaaggtttttaagggaggttgcgtttaattttcgacgttttgtatttagttcggcgcggcgcgtttagtcgttttttcggatttttttcggggcgcgggagtttagcggcgcgtttagtttttatttatggtggtgatgatcgtgatcgtaaagtagaaggagtcggcgaatttttattggacgtcggcgcggtgcggtttcgattgtaggattattagttttagttgtcggtagttttcgttgttgatgttgtatttttttttgattcggattttttcggttttgagtttttttttttcgcgtatttcgtggttcgattcgagggcgtcgaatacggcggcgtttattagtaggtaggtgaaggtgtagacgatgagggatagagttcgtacgttttgtttttttatggtcgttagtaaggagtcggcgcggggggtatgtttcgtaggtttatagtcgcgcgcgttttattgtagcgttcggcggtcgtcgtcgttttttttttcgtcgtcgtcgtcgtcgtttttaagttgtaagcggcggcggtagtagtagtagtagtagcggggaggcggggggcggggaggttggggggggtttttttcgttggggtcg

SEQ ID NO: 4962 - DNA, 803 bp, Artificial Sequence
  chemically treated genomic DNA (Homo sapiens) CpG-island No: 4962
cgaccccaacgaaaaaaaccccccccaacctccccgccccccgcctccccgctactactactactactaccgccgccgcttacaacttaaaaacgacgacgacgacgacgaaaaaaaaaacgacgacgaccgccgaacgctacaataaaacgcgcgcgactataaacctacgaaacataccccccgcgccgactccttactaacgaccataaaaaaacaaaacgtacgaactctatccctcatcgtctacaccttcacctacctactaataaacgccgccgtattcgacgccctcgaatcgaaccacgaaatacgcgaaaaaaaaaaactcaaaaccgaaaaaatccgaatcaaaaaaaaatacaacatcaacaacgaaaactaccgacaactaaaactaataatcctacaatcgaaaccgcaccgcgccgacgtccaataaaaattcgccgactccttctactttacgatcacgatcatcaccaccataaataaaaactaaacgcgccgctaaactcccgcgccccgaaaaaaatccgaaaaaacgactaaacgcgccgcgccgaactaaatacaaaacgtcgaaaattaaacgcaacctcccttaaaaaccttcccgcaacgccccctcctctctaaaaaaccccccctccgcgacgcctccgaacctcacccttcgaaaaccccacccgatactctccaccgcgctaatatctaaaccgaacgtacgaaccccgaacgaatatacctaaaccgaaaaaacgaaaacgccacttttacgaaaaaaataaaacgctaaaaat

SEQ ID NO: 4963 - DNA, 803 bp, Artificial Sequence
  chemically treated genomic DNA (Homo sapiens) CpG-island No: 4963
cggttttagcggagggggttttttttagttttttcgtttttcgttttttcgttgttgttgttgttgttgtcgtcgtcgtttataatttggaggcggcggcggcggcggcggaggaggaggcggcggcggtcgtcgggcgttgtagtgggacgcgcgcggttgtgagtttgcgggatatgtttttcgcgtcggttttttgttggcggttatgaagaggtagaacgtgcggattttgttttttatcgtttgtatttttatttatttgttggtgggcgtcgtcgtgttcgacgttttcgagtcggattacgagatgcgcgaggaggagaaatttaaagtcgaggagattcggattaaggggaagtataatattagtagcgaggattatcggtagttggagttggtgattttgtagtcggaatcgtatcgcgtcggcgtttagtggaaattcgtcggttttttttattttgcgattacggttattattattataggtaagggttgggcgcgtcgttgggttttcgcgtttcgggaggagttcggggaggcggttgagcgcgtcgcgtcgggttgggtgtagggcgtcgagggttaaacgtagttttttttgggggttttttcgtagcgtttttttttttttagggagtttttttttcgcggcgttttcgagttttatttttcggggattttattcggtgttttttatcgcgttggtgtttgggtcgggcgtgcgagtttcgagcgagtgtgtttgagtcgggagggcggaggcgttatttttgcgaagagagtggagcgttaagaat

SEQ ID NO: 4964 - DNA, 803 bp, Artificial Sequence
  chemically treated genomic DNA (Homo sapiens) CpG-island No: 4964
attcttaacgctccactctcttcgcaaaaataacgcctccgccctcccgactcaaacacactcgctcgaaactcgcacgcccgacccaaacaccaacgcgataaaaaacaccgaataaaatccccgaaaaataaaactcgaaaacgccgcgaaaaaaaaactccctaaaaaaaaaaaaacgctacgaaaaaacccccaaaaaaaactacgtttaaccctcgacgccctacacccaacccgacgcgacgcgctcaaccgcctccccgaactcctcccgaaacgcgaaaacccaacgacgcgcccaacccttacctataataataataaccgtaatcgcaaaataaaaaaaaccgacgaatttccactaaacgccgacgcgatacgattccgactacaaaatcaccaactccaactaccgataatcctcgctactaatattatacttccccttaatccgaatctcctcgactttaaatttctcctcctcgcgcatctcgtaatccgactcgaaaacgtcgaacacgacgacgcccaccaacaaataaataaaaatacaaacgataaaaaacaaaatccgcacgttctacctcttcataaccgccaacaaaaaaccgacgcgaaaaacatatcccgcaaactcacaaccgcgcgcgtcccactacaacgcccgacgaccgccgccgcctcctcctccgccgccgccgccgccgcctccaaattataaacgacgacgacaacaacaacaacaacaacgaaaaaacgaaaaacgaaaaaactaaaaaaaaccccctccgctaaaaccg

SEQ ID NO: 4965 - DNA, 669 bp, Artificial Sequence
  chemically treated genomic DNA (Homo sapiens) CpG-island No: 4965
  unsure (99, 116, 164, 182, 187, 227, 266, 270, 276, 314, 318, 327)
  unsure (344)
ggacgaatcgggttattattgcgattttatttagtagttgaggttttaaggaatagttttaattttttttgggatattaattcgtgtattcgttagagnatcgaggcgagaacgtntcgagaatcgtttagacgcgttcggaattgcgttttggattttttttntagcgatcgcgtagtttnttggngcgttttttggcgttattgttcgtttcgtatcgcgttcgncgtttcgcgttaggtttcgtttgggattatgggtgggtntatngtcggntgcgtttcggttaatgcggcggttgcgtagagatcggntttngtttttgangtcgcgcgtacgtcggngggcgggaacggtgcgcgtaatttttcgggttaataattgagtagcgcgcgggattcgggtggggaagttggagttgttgcggggttcgcggggaagttttggcggtggagttatggtcggttagttgagcgagggggttattgcggtgaggaggtatcgggggttgggtcggcggttcggggtggttgcggtttcgagtttcgcggagtagagagggggaggggagttcggggcgacgggggatgaacgcgaggggaggagatggcggggggaggtgggaaattcgtcgggcgtttttttagtgttatcgttttttttttaaag

SEQ ID NO: 4966 - DNA, 669 bp, Artificial Sequence
  chemically treated genomic DNA (Homo sapiens) CpG-island No: 4966
  unsure (326, 343, 352, 356, 394, 400, 404, 443, 483, 488, 506, 554)
  unsure (571)
ctttaaaaaaaaaacgataacactaaaaaaacgcccgacgaatttcccacctccccccgccatctcctcccctcgcgttcatcccccgtcgccccgaactcccctccccctctctactccgcgaaactcgaaaccgcaaccaccccgaaccgccgacccaacccccgatacctcctcaccgcaataaccccctcgctcaactaaccgaccataactccaccgccaaaacttccccgcgaaccccgcaacaactccaacttccccacccgaatcccgcgcgctactcaattattaacccgaaaaattacgcgcaccgttcccgcccnccgacgtacgcgcgacntcaaaaacnaaanccgatctctacgcaaccgccgcattaaccgaaacgcanccgacnatanacccacccataatcccaaacgaaacctaacgcgaaacgncgaacgcgatacgaaacgaacaataacgccaaaaaacgcnccaanaaactacgcgatcgctanaaaaaaaatccaaaacgcaattccgaacgcgtctaaacgattctcganacgttctcgcctcgatnctctaacgaatacacgaattaatatcccaaaaaaaattaaaactattccttaaaacctcaactactaaataaaatcgcaataataacccgattcgtcc

SEQ ID NO: 4967 - DNA, 669 bp, Artificial Sequence
  chemically treated genomic DNA (Homo sapiens) CpG-island No: 4967
  unsure (326, 343, 352, 356, 394, 400, 404, 443, 483, 488, 506, 554)
  unsure (571)
ttttgaggagggggcgatgatattagagggacgttcggcgggttttttattttttttcgttatttttttttttcgcgtttatttttcgtcgtttcgggtttttttttttttttttatttcgcgaggttcggggtcgtagttatttcggatcgtcggtttagttttcggtatttttttatcgtaatggttttttcgtttagttggtcgattatggttttatcgttaagattttttcgcggatttcgtaatagttttagtttttttattcgggtttcgcgcgttgtttagttattggttcgagaagttgcgcgtatcgttttcgtttntcgacgtgcgcgcggtnttaggggtngggntcggtttttacgtagtcgtcgtattggtcgaggcgtantcgatngtgnatttatttatggttttaagcgaggtttggcgcgggacgncggacgcggtgcggggcggatagtggcgttaaggggcgtnttagngagttgcgcggtcgttgnggagggagtttagggcgtagtttcgggcgcgtttgagcggttttcgangcgttttcgtttcggtnttttggcgagtgtacgggttggtattttagaggaggttaaagttgttttttgagattttagttgttaaatagagtcgtagtagtgattcgattcgttt

SEQ ID NO: 4968 - DNA, 669 bp, Artificial Sequence
  chemically treated genomic DNA (Homo sapiens) CpG-island No: 4968
  unsure (99, 116, 164, 182, 187, 227, 266, 270, 276, 314, 318, 327)
  unsure (344)
aaacgaatcgaatcactactacgactctatttaacaactaaaatctcaaaaaacaactttaacctcctctaaaataccaacccgtacactcgccaaaanaccgaaacgaaaacgcntcgaaaaccgctcaaacgcgcccgaaactacgccctaaactccctccncaacgaccgcgcaactcnctaanacgccccttaacgccactatccgccccgcaccgcgtccgncgtcccgcgccaaacctcgcttaaaaccataaataaatncacnatcgantacgcctcgaccaatacgacgactacgtaaaaaccgancccnacccctaanaccgcgcgcacgtcganaaacgaaaacgatacgcgcaacttctcgaaccaataactaaacaacgcgcgaaacccgaataaaaaaactaaaactattacgaaatccgcgaaaaaatcttaacgataaaaccataatcgaccaactaaacgaaaaaaccattacgataaaaaaataccgaaaactaaaccgacgatccgaaataactacgaccccgaacctcgcgaaataaaaaaaaaaaaaaaaacccgaaacgacgaaaaataaacgcgaaaaaaaaaaataacgaaaaaaaataaaaaacccgccgaacgtccctctaatatcatcgccccctcctcaaaa

SEQ ID NO: 4969 - DNA, 617 bp, Artificial Sequence
  chemically treated genomic DNA (Homo sapiens) CpG-island No: 4969
gaaaagggcggtggtttagtaatgagggggtcggggttggcgatttaggggtcgggttgggtgtaagcggcgtggttggtaatgagtgggtggtgttgcggagtaggtggaattggggaggaaggggcgtggttggtattgagggggcggggttacgaagaaggagaagttggggagaaaacgcgcgtggttggtattaagggtcggggttagggaggaggaggagttggggaggaagcggcgaggttggtaatgagggggcggggttagggaggaggcggagttggggaggaagcggcgaggttggtaatgagggggcggggttagggaggaggcggagttggggaggaagcggcgtggttggtaatgagggggcggggttagggaggaggcggagttggggaggaagcggcgtggttggtaatgacggggcggggttagggaggaggcggagttggggaggaagcggcgtggttggtaatgagggggcggggttagggaggaggcggagttggggaggaagcggcgtggttggttagtaggggacggtttggggaggagggttcgagggttcgagggtttaggtggaggcggggcgtttatttatttagtagtag

SEQ ID NO: 4970 - DNA, 617 bp, Artificial Sequence
  chemically treated genomic DNA (Homo sapiens) CpG-island No: 4970
ctactactaaataaataaacgccccgcctccacctaaaccctcgaaccctcgaaccctcctccccaaaccgtcccctactaaccaaccacgccgcttcctccccaactccgcctcctccctaaccccgccccctcattaccaaccacgccgcttcctccccaactccgcctcctccctaaccccgccccgtcattaccaaccacgccgcttcctccccaactccgcctcctccctaaccccgccccctcattaccaaccacgccgcttcctccccaactccgcctcctccctaaccccgccccctcattaccaacctcgccgcttcctccccaactccgcctcctccctaaccccgccccctcattaccaacctcgccgcttcctccccaactcctcctcctccctaaccccgacccttaataccaaccacgcgcgttttctccccaacttctccttcttcgtaaccccgccccctcaataccaaccacgccccttcctccccaattccacctactccgcaacaccacccactcattaccaaccacgccgcttacacccaacccgacccctaaatcgccaaccccgaccccctcattactaaaccaccgcccttttc

SEQ ID NO: 4971 - DNA, 617 bp, Artificial Sequence
  chemically treated genomic DNA (Homo sapiens) CpG-island No: 4971
ttgttgttgggtgagtgagcgtttcgtttttatttggattttcggattttcggatttttttttttaggtcgttttttgttaattagttacgtcgttttttttttagtttcgttttttttttaatttcgtttttttattattagttacgtcgttttttttttagtttcgttttttttttaatttcgtttcgttattattagttacgtcgttttttttttagtttcgttttttttttaatttcgtttttttattattagttacgtcgttttttttttagtttcgttttttttttaatttcgtttttttattattagtttcgtcgttttttttttagtttcgttttttttttaatttcgtttttttattattagtttcgtcgttttttttttagtttttttttttttttaatttcggtttttagtattagttacgcgcgttttttttttagttttttttttttcgtaatttcgtttttttagtattagttacgtttttttttttttagttttatttgtttcgtaatattatttatttattattagttacgtcgtttgtatttaattcggtttttggatcgttaatttcggtttttttattattaagttatcgtttttttt

SEQ ID NO: 4972 - DNA, 617 bp, Artificial Sequence
  chemically treated genomic DNA (Homo sapiens) CpG-island No: 4972
aaaaaaaacgataacttaataataaaaaaaccgaaattaacgatccaaaaaccgaattaaatacaaacgacgtaactaataataaataaataatattacgaaacaaataaaactaaaaaaaaaaaaacgtaactaatactaaaaaaacgaaattacgaaaaaaaaaaaactaaaaaaaaaacgcgcgtaactaatactaaaaaccgaaattaaaaaaaaaaaaaaactaaaaaaaaaacgacgaaactaataataaaaaaacgaaattaaaaaaaaaacgaaactaaaaaaaaaacgacgaaactaataataaaaaaacgaaattaaaaaaaaaacgaaactaaaaaaaaaacgacgtaactaataataaaaaaacgaaattaaaaaaaaaacgaaactaaaaaaaaaacgacgtaactaataataacgaaacgaaattaaaaaaaaaacgaaactaaaaaaaaaacgacgtaactaataataaaaaaacgaaattaaaaaaaaaacgaaactaaaaaaaaaacgacgtaactaattaacaaaaaacgacctaaaaaaaaaaatccgaaaatccgaaaatccaaataaaaacgaaacgctcactcacccaacaacaa

SEQ ID NO: 4973 - DNA, 1183 bp, Artificial Sequence
  chemically treated genomic DNA (Homo sapiens) CpG-island No: 4973
gtttgttcgggggggggcggttttaggcggttatttgtatgatacgattcgttttagttttttttaattatttgagtaacggtcgttgtttcggggtgttttcgggttttttttttacgttttaggcggtggtgggagttgtcggcggcggcggtatttatcggttgcgcggttaggtttttttgttagcgcggtgtaagggaggagttgaagggaggagtaaaggggtatcgtttttttcgcgtcgttacgtattcgtttgattggtttagtttatttttttagcgcgattttattagtttttgcgagcggtatttcggtagtatcggcgcgttatttgtatatttgtgttcgcgtcgttgattggttcgggcgcggaggggcggtcgtgatcgtcgtcgtttttgtcgcggttttagtcgcgtcgggttgtttaagagggagcgtttttttcgtcgtttttttttttttttggcgcggttcgatttagggcggagggcggtgcgaggcggggtcgttgtttcgttttaatatggtttcgtcgcgtcgtcgatttaatcgttggcgcggttattttcggagttttgggcggtttcggggcggggaaggtttggggtcgggcgttttttggtcggagcgcggggtagtgtagtggttcgggttttttcggtagtttcgtcgcggtcgttacgttaggtcgcgtttttacggcggttttttttttcgcgtcgttcgtttcgcggtttcgtcgttacgttaggtttcggtagggtacgttttagtcgcgagttgattagtggcggggtcggcgtagaggttatttatatgtagggtatttttcgggtagttcgggttcgtcgaggaagggcgagagtttttaaagacgttttttttaaggagtcgtggatttagttttacgtttttttttcgcgcggagattcgggtgttacgcgttcgtgttgtagaatcgggagtacggagcgtgtcgcgatgatgttgcgattgagtttaggtgttagtatttgtagtagtcggcgttcgtcgcggagatttagttttacgtcgcgagttaggggagagcgcgtatttagtttgcggttgtaattttgttttttcgaggtttaggttttcgttttttattgtatagttacgaagggagagaaaaataaacgtaagaatttaa

SEQ ID NO: 4974 - DNA, 1183 bp, Artificial Sequence
  chemically treated genomic DNA (Homo sapiens) CpG-island No: 4974
ttaaattcttacgtttatttttctctcccttcgtaactatacaataaaaaacgaaaacctaaacctcgaaaaaacaaaattacaaccgcaaactaaatacgcgctctcccctaactcgcgacgtaaaactaaatctccgcgacgaacgccgactactacaaatactaacacctaaactcaatcgcaacatcatcgcgacacgctccgtactcccgattctacaacacgaacgcgtaacacccgaatctccgcgcgaaaaaaaaacgtaaaactaaatccacgactccttaaaaaaaacgtctttaaaaactctcgcccttcctcgacgaacccgaactacccgaaaaataccctacatataaataacctctacgccgaccccgccactaatcaactcgcgactaaaacgtaccctaccgaaacctaacgtaacgacgaaaccgcgaaacgaacgacgcgaaaaaaaaaaccgccgtaaaaacgcgacctaacgtaacgaccgcgacgaaactaccgaaaaaacccgaaccactacactaccccgcgctccgaccaaaaaacgcccgaccccaaaccttccccgccccgaaaccgcccaaaactccgaaaataaccgcgccaacgattaaatcgacgacgcgacgaaaccatattaaaacgaaacaacgaccccgcctcgcaccgccctccgccctaaatcgaaccgcgccaaaaaaaaaaaaaaacgacgaaaaaaacgctccctcttaaacaacccgacgcgactaaaaccgcgacaaaaacgacgacgatcacgaccgcccctccgcgcccgaaccaatcaacgacgcgaacacaaatatacaaataacgcgccgatactaccgaaataccgctcgcaaaaactaataaaatcgcgctaaaaaaataaactaaaccaatcaaacgaatacgtaacgacgcgaaaaaaacgatacccctttactcctcccttcaactcctcccttacaccgcgctaacaaaaaaacctaaccgcgcaaccgataaataccgccgccgccgacaactcccaccaccgcctaaaacgtaaaaaaaaaacccgaaaacaccccgaaacaacgaccgttactcaaataattaaaaaaaactaaaacgaatcgtatcatacaaataaccgcctaaaaccgcccccccccgaacaaac

SEQ ID NO: 4975 - DNA, 1183 bp, Artificial Sequence
  chemically treated genomic DNA (Homo sapiens) CpG-island No: 4975
ttaaatttttgcgtttattttttttttttttcgtaattgtgtaatggagaacgggagtttgagtttcgggaagatagggttgtaatcgtaggttaggtgcgcgtttttttttagttcgcggcgtggagttgggttttcgcggcgggcgtcggttattgtaggtgttggtatttgggtttaatcgtagtattatcgcgatacgtttcgtgttttcgattttatagtacgggcgcgtgatattcgggttttcgcgcgaaaggagaacgtgggattaaatttacggttttttaagaaggacgtttttggaaattttcgttttttttcggcggattcgagttgttcgagagatgttttgtatgtgagtgatttttgcgtcgatttcgttattggttagttcgcggttggggcgtgttttgtcggggtttgacgtggcggcggggtcgcggggcgggcggcgcgaggggagaggtcgtcgtgagggcgcggtttgacgtggcggtcgcggcggggttgtcgggggagttcggattattgtattgtttcgcgtttcggttagagggcgttcggttttaagtttttttcgtttcgaggtcgtttagggtttcgggagtaatcgcgttagcgattgggtcggcggcgcggcggggttatgttggagcggagtaacgatttcgtttcgtatcgtttttcgttttgggtcgggtcgcgttaggagggaaggggagcggcgaaggggacgtttttttttaggtagttcgacgcggttggagtcgcggtaggagcggcggcggttacgatcgttttttcgcgttcgggttaattagcggcgcgggtataaatatgtaaatagcgcgtcggtgttgtcggagtgtcgttcgtaggggttggtggggtcgcgttgggggagtgaattgggttaattaggcgggtgcgtggcggcgcgggggaagcggtgtttttttatttttttttttaattttttttttgtatcgcgttgataggggggtttggtcgcgtagtcggtaaatgtcgtcgtcgtcggtagtttttattatcgtttggggcgtggggaggaaattcgggggtatttcggggtaacggtcgttgtttaaatggttgggagaagttggagcgggtcgtgttatataggtggtcgtttgaggtcgttttttttcgggtaagt

SEQ ID NO: 4976 - DNA, 1183 bp, Artificial Sequence
  chemically treated genomic DNA (Homo sapiens) CpG-island No: 4976
acttacccgaaaaaaaacgacctcaaacgaccacctatataacacgacccgctccaacttctcccaaccatttaaacaacgaccgttaccccgaaatacccccgaatttcctccccacgccccaaacgataataaaaactaccgacgacgacgacatttaccgactacgcgaccaaacccccctatcaacgcgatacaaaaaaaaaattaaaaaaaaaaataaaaaaacaccgcttcccccgcgccgccacgcacccgcctaattaacccaattcactcccccaacgcgaccccaccaacccctacgaacgacactccgacaacaccgacgcgctatttacatatttatacccgcgccgctaattaacccgaacgcgaaaaaacgatcgtaaccgccgccgctcctaccgcgactccaaccgcgtcgaactacctaaaaaaaaacgtccccttcgccgctccccttccctcctaacgcgacccgacccaaaacgaaaaacgatacgaaacgaaatcgttactccgctccaacataaccccgccgcgccgccgacccaatcgctaacgcgattactcccgaaaccctaaacgacctcgaaacgaaaaaaacttaaaaccgaacgccctctaaccgaaacgcgaaacaatacaataatccgaactcccccgacaaccccgccgcgaccgccacgtcaaaccgcgccctcacgacgacctctcccctcgcgccgcccgccccgcgaccccgccgccacgtcaaaccccgacaaaacacgccccaaccgcgaactaaccaataacgaaatcgacgcaaaaatcactcacatacaaaacatctctcgaacaactcgaatccgccgaaaaaaaacgaaaatttccaaaaacgtccttcttaaaaaaccgtaaatttaatcccacgttctcctttcgcgcgaaaacccgaatatcacgcgcccgtactataaaatcgaaaacacgaaacgtatcgcgataatactacgattaaacccaaataccaacacctacaataaccgacgcccgccgcgaaaacccaactccacgccgcgaactaaaaaaaaacgcgcacctaacctacgattacaaccctatcttcccgaaactcaaactcccgttctccattacacaattacgaaaaaaaaaaaaaataaacgcaaaaatttaa

SEQ ID NO: 4977 - DNA, 1028 bp, Artificial Sequence
  chemically treated genomic DNA (Homo sapiens) CpG-island No: 4977
ggcggcggggataaaaattttcggcggcgagggtaaaaagtcgcggtggtaaaaagcggcggcgatcggggtaaaaagtcgcggtagtaaaaagtcgcggcggcggggataaaaagtcgttgcggcgggggtaaaaggcggcggtaatagcggtaaaaagtcgcgggcgtaaaaagcggcggtaatagcggcgtcggtaaaaagtcgcggcgaggaaaaagtcgttgcggcgggggggtaaaaagttgtgatagcggggggtaaaaagtcgcggcgggtaaaacgtcgtggcgggtaaaaagtcgcggcgggtaaaaagttacggcggcggtggggtaaaaattagcgtcggtggcggcgggggggtagaaagtcgcggcggtagaaagtcgcggcggtaaaaagttacggcggcgagggtgtaaaaagttgtgtcggcggtggggtaaaaagtttggtcgggtaaaaagtcgcggtcgcggcggggggtaaaaagtcgaggcgggtaaaaagtcgaggtagggtgggggtaaaaagtcgcggcggcggaggggtaaaaagtcgcggcggcgggttagggtagaaagtcgtagcgggtaaaaagtcgaggcggggtgggggtaaaaagtcgcggcggcgggtgggtggtagaaagtcgcggcgggtaaaaagtcgcgggggtagggtggaaaaagttaaggcggtgataaagtcgcggcggcgggggggggggataaagttttggcgggtaaaaagttagggcggtaaaattcgtagcggtgaagagttaaaaatttgcggtggttaaaaagttttagcgttgagggggtaaaaagtcgtagcgtataaaaagtcgaggcgcggtggggggagaaagtcgtcgcgacggggcgggaaaaattcgcggcggcgggggggtaaaaagtcgcggcggcggggggcgaaataatggagatggggtagaaggtcggtatagtttggtattgttggagtggatgtgataggaaatgtgtagttaaagataaaaa

SEQ ID NO: 4978 - DNA, 1028 bp, Artificial Sequence
  chemically treated genomic DNA (Homo sapiens) CpG-island No: 4978
tttttatctttaactacacatttcctatcacatccactccaacaataccaaactataccgaccttctaccccatctccattatttcgccccccgccgccgcgactttttacccccccgccgccgcgaatttttcccgccccgtcgcgacgactttctccccccaccgcgcctcgactttttatacgctacgactttttaccccctcaacgctaaaactttttaaccaccgcaaatttttaactcttcaccgctacgaattttaccgccctaactttttacccgccaaaactttatcccccccccccgccgccgcgactttatcaccgccttaactttttccaccctacccccgcgactttttacccgccgcgactttctaccacccacccgccgccgcgactttttacccccaccccgcctcgactttttacccgctacgactttctaccctaacccgccgccgcgactttttacccctccgccgccgcgactttttacccccaccctacctcgactttttacccgcctcgactttttaccccccgccgcgaccgcgactttttacccgaccaaactttttaccccaccgccgacacaactttttacaccctcgccgccgtaactttttaccgccgcgactttctaccgccgcgactttctacccccccgccgccaccgacgctaatttttaccccaccgccgccgtaactttttacccgccgcgactttttacccgccacgacgttttacccgccgcgactttttaccccccgctatcacaactttttacccccccgccgcaacgactttttcctcgccgcgactttttaccgacgccgctattaccgccgctttttacgcccgcgactttttaccgctattaccgccgccttttacccccgccgcaacgactttttatccccgccgccgcgactttttactaccgcgactttttaccccgatcgccgccgctttttaccaccgcgactttttaccctcgccgccgaaaatttttatccccgccgcc

SEQ ID NO: 4979 - DNA, 1028 bp, Artificial Sequence
  chemically treated genomic DNA (Homo sapiens) CpG-island No: 4979
tttttgtttttggttgtatattttttgttatatttattttagtaatgttaagttgtgtcggttttttattttatttttattatttcgtttttcgtcgtcgcggttttttgttttttcgtcgtcgcggatttttttcgtttcgtcgcggcggttttttttttttatcgcgtttcggttttttgtacgttgcggttttttgtttttttaacgttagagttttttgattatcgtaggtttttgattttttatcgttgcgaattttgtcgttttggttttttgttcgttagggttttgtttttttttttcgtcgtcgcggttttattatcgttttggttttttttattttgttttcgcggttttttgttcgtcgcggttttttgttatttattcgtcgtcgcggttttttgtttttatttcgtttcggttttttgttcgttgcggttttttgttttaattcgtcgtcgcggttttttgttttttcgtcgtcgcggttttttgtttttattttgtttcggttttttgttcgtttcggttttttgtttttcgtcgcggtcgcggttttttgttcgattaggttttttgttttatcgtcgatatagttttttgtattttcgtcgtcgtggttttttgtcgtcgcggttttttgtcgtcgcggttttttgttttttcgtcgttatcggcgttgatttttgttttatcgtcgtcgtggttttttgttcgtcgcggttttttattcgttacggcgttttattcgtcgcggttttttgtttttcgttgttatagttttttgttttttcgtcgtagcgatttttttttcgtcgcggttttttgtcgacgtcgttgttgtcgtcgttttttgcgttcgcggttttttgtcgttgttgtcgtcgttttttgttttcgtcgtagcggttttttgttttcgtcgtcgcggttttttgttatcgcgattttttgtttcggtcgtcgtcgttttttgttatcgcgattttttgttttcgtcgtcgaggatttttgttttcgtcgtt

SEQ ID NO: 4980 - DNA, 1028 bp, Artificial Sequence
  chemically treated genomic DNA (Homo sapiens) CpG-island No: 4980
aacgacgaaaacaaaaatcctcgacgacgaaaacaaaaaatcgcgataacaaaaaacgacgacgaccgaaacaaaaaatcgcgataacaaaaaaccgcgacgacgaaaacaaaaaaccgctacgacgaaaacaaaaaacgacgacaacaacgacaaaaaaccgcgaacgcaaaaaacgacgacaacaacgacgtcgacaaaaaaccgcgacgaaaaaaaaatcgctacgacgaaaaaacaaaaaactataacaacgaaaaacaaaaaaccgcgacgaataaaacgccgtaacgaataaaaaaccgcgacgaacaaaaaaccacgacgacgataaaacaaaaatcaacgccgataacgacgaaaaaacaaaaaaccgcgacgacaaaaaaccgcgacgacaaaaaaccacgacgacgaaaatacaaaaaactatatcgacgataaaacaaaaaacctaatcgaacaaaaaaccgcgaccgcgacgaaaaacaaaaaaccgaaacgaacaaaaaaccgaaacaaaataaaaacaaaaaaccgcgacgacgaaaaaacaaaaaaccgcgacgacgaattaaaacaaaaaaccgcaacgaacaaaaaaccgaaacgaaataaaaacaaaaaaccgcgacgacgaataaataacaaaaaaccgcgacgaacaaaaaaccgcgaaaacaaaataaaaaaaaccaaaacgataataaaaccgcgacgacgaaaaaaaaaaacaaaaccctaacgaacaaaaaaccaaaacgacaaaattcgcaacgataaaaaatcaaaaacctacgataatcaaaaaactctaacgttaaaaaaacaaaaaaccgcaacgtacaaaaaaccgaaacgcgataaaaaaaaaaaaccgccgcgacgaaacgaaaaaaatccgcgacgacgaaaaaacaaaaaaccgcgacgacgaaaaacgaaataataaaaataaaataaaaaaccgacacaacttaacattactaaaataaatataacaaaaaatatacaaccaaaaacaaaaa

SEQ ID NO: 4981 - DNA, 587 bp, Artificial Sequence
  chemically treated genomic DNA (Homo sapiens) CpG-island No: 4981
ttttttagttgtaaattgtttcgattatttatcgcggggtcggatattgacgtaatttttaggtagaaggttcgatttttatttagtatgagagtcgcgatttttttaattttcgtttttggttagcgtttatttttcgtcgtcgttttcgaaatcggttttcgggaggatcgtgcgtcgggggcgcgggcgcggtcgggtttgttttattagcgcgttcgtattcggtgggcgttggtttttttgatttcggcgcggttttttcgtttatttcgttttttcggcgtttcgtcgtaggttcgagtttcggcggtcgtttttcgttattttatttcgtgggggagtcggcggtcgttgggggtgttgtagggtttagcgtattttggaggcgaagggagtcgggaagtgggatcgcgcgggagtttcgtaacgagttatgtaatcgggtaggggttcgtaattcgggacgggagggaggtagtttcgcgggaattttcgttttttcgtttttttgtcgggagcgtagtttcggaagttttattgggtcggtcggtttttacgtggggtttttcgttttttgaggttag

SEQ ID NO: 4982 - DNA, 587 bp, Artificial Sequence
  chemically treated genomic DNA (Homo sapiens) CpG-island No: 4982
ctaacctcaaaaaacgaaaaaccccacgtaaaaaccgaccgacccaataaaacttccgaaactacgctcccgacaaaaaaacgaaaaaacgaaaattcccgcgaaactacctccctcccgtcccgaattacgaacccctacccgattacataactcgttacgaaactcccgcgcgatcccacttcccgactcccttcgcctccaaaatacgctaaaccctacaacacccccaacgaccgccgactcccccacgaaataaaataacgaaaaacgaccgccgaaactcgaacctacgacgaaacgccgaaaaaacgaaataaacgaaaaaaccgcgccgaaatcaaaaaaaccaacgcccaccgaatacgaacgcgctaataaaacaaacccgaccgcgcccgcgcccccgacgcacgatcctcccgaaaaccgatttcgaaaacgacgacgaaaaataaacgctaaccaaaaacgaaaattaaaaaaatcgcgactctcatactaaataaaaatcgaaccttctacctaaaaattacgtcaatatccgaccccgcgataaataatcgaaacaatttacaactaaaaaa

SEQ ID NO: 4983 - DNA, 587 bp, Artificial Sequence
  chemically treated genomic DNA (Homo sapiens) CpG-island No: 4983
ttggttttagggggcggggggttttacgtgggggtcggtcggtttaatggggttttcggggttgcgttttcggtagggaagcgggagggcgaaagttttcgcggggttgtttttttttcgtttcgggttgcgggtttttgttcggttatataattcgttgcggggttttcgcgcggttttatttttcggtttttttcgtttttaggatgcgttgagttttataatatttttagcggtcgtcggtttttttacgaggtgaggtggcggggggcggtcgtcggggttcggatttgcggcggggcgtcgagggggcggggtaggcggggaggtcgcgtcggggttaggggggttagcgtttatcgggtacgagcgcgttggtgaggtaggttcggtcgcgttcgcgttttcggcgtacggttttttcgggagtcggtttcggggacggcggcggggagtgggcgttggttagggacgagggttgaggaggtcgcggtttttatgttgggtgggagtcgggttttttgtttgggggttgcgttagtgttcgatttcgcgatgagtggtcgggataatttgtaattagaggg

SEQ ID NO: 4984 - DNA, 587 bp, Artificial Sequence
  chemically treated genomic DNA (Homo sapiens) CpG-island No: 4984
ccctctaattacaaattatcccgaccactcatcgcgaaatcgaacactaacgcaacccccaaacaaaaaacccgactcccacccaacataaaaaccgcgacctcctcaaccctcgtccctaaccaacgcccactccccgccgccgtccccgaaaccgactcccgaaaaaaccgtacgccgaaaacgcgaacgcgaccgaacctacctcaccaacgcgctcgtacccgataaacgctaacccccctaaccccgacgcgacctccccgcctaccccgccccctcgacgccccgccgcaaatccgaaccccgacgaccgccccccgccacctcacctcgtaaaaaaaccgacgaccgctaaaaatattataaaactcaacgcatcctaaaaacgaaaaaaaccgaaaaataaaaccgcgcgaaaaccccgcaacgaattatataaccgaacaaaaacccgcaacccgaaacgaaaaaaaaacaaccccgcgaaaactttcgccctcccgcttccctaccgaaaacgcaaccccgaaaaccccattaaaccgaccgacccccacgtaaaaccccccgccccctaaaaccaa

SEQ ID NO: 4985 - DNA, 599 bp, Artificial Sequence
  chemically treated genomic DNA (Homo sapiens) CpG-island No: 4985
  unsure (6, 9, 18, 30, 45, 135, 158)
aggcgntanggggagttnacgcgatgtatnttttcgtttcgagangaattttggttgcgttgcgacgggtacgtcggtttgcgttaaggtcgttttttttaggcggcgggcgtttttttcggttcgggtcgcggnttttttcgtttcggcgagcgcgncggttggattgtgggttgggggttgcggcggttttcgggttagttttttcgtattcgatcgggtcgagtcggttgggcgggagatagagggaaagtagtggagtcgggagtagaagcgttagaggtagtggtcgtggcgcggcggggcggtttttttggaggtcggggatgtgggaaaggcggtggtagtagcggcggaggcggcgttcgtaaattcggggaaaattgttggttgattaggatattcgggagagacgtgagggagtcgtcgttgttattttttatttttgaatgaaattgcgttcgagagggcggttttgtgtttttcgagtcgattggtagtcgggcgtagtggtcggggttcggaattcgaggttcgggcgttttaaaaatttgaggaaatttaaaatgaaaaagaattagaaggaattttaatggaaa

SEQ ID NO: 4986 - DNA, 599 bp, Artificial Sequence
  chemically treated genomic DNA (Homo sapiens) CpG-island No: 4986
  unsure (442, 465, 555, 570, 582, 591, 594)
tttccattaaaattccttctaattctttttcattttaaatttcctcaaatttttaaaacgcccgaacctcgaattccgaaccccgaccactacgcccgactaccaatcgactcgaaaaacacaaaaccgccctctcgaacgcaatttcattcaaaaataaaaaataacaacgacgactccctcacgtctctcccgaatatcctaatcaaccaacaattttccccgaatttacgaacgccgcctccgccgctactaccaccgcctttcccacatccccgacctccaaaaaaaccgccccgccgcgccacgaccactacctctaacgcttctactcccgactccactactttccctctatctcccgcccaaccgactcgacccgatcgaatacgaaaaaactaacccgaaaaccgccgcaacccccaacccacaatccaaccgncgcgctcgccgaaacgaaaaaanccgcgacccgaaccgaaaaaaacgcccgccgcctaaaaaaaacgaccttaacgcaaaccgacgtacccgtcgcaacgcaaccaaaattcntctcgaaacgaaaanatacatcgcgtnaactccccntancgcct

SEQ ID NO: 4987 - DNA, 599 bp, Artificial Sequence
  chemically treated genomic DNA (Homo sapiens) CpG-island No: 4987
  unsure (442, 465, 555, 570, 582, 591, 594)
tttttattaaaattttttttagtttttttttattttggatttttttaaatttttgaggcgttcgagtttcgggtttcgggtttcggttattgcgttcgattgttagtcggttcggggagtatagggtcgttttttcgagcgtagttttatttaggggtgagaggtggtagcggcggtttttttacgtttttttcgggtgttttgattagttagtagtttttttcgggtttgcgagcgtcgttttcgtcgttgttgttatcgttttttttatattttcggtttttaggggagtcgtttcgtcgcgttacgattattgtttttagcgtttttgttttcgattttattgttttttttttatttttcgtttagtcggttcggttcggtcgggtgcggggagattagttcggaggtcgtcgtagtttttagtttataatttaatcgncgcgttcgtcggggcggggaggntcgcggttcgggtcggggggagcgttcgtcgtttggggaaagcggttttggcgtaggtcggcgtgttcgtcgtagcgtagttagagtttntttcggggcgggganatatatcgcgtnggttttttntgncgttt

SEQ ID NO: 4988 - DNA, 599 bp, Artificial Sequence
  chemically treated genomic DNA (Homo sapiens) CpG-island No: 4988
  unsure (6, 9, 18, 30, 45, 135, 158)
aaacgncanaaaaaaccnacgcgatatatntccccgccccgaaanaaactctaactacgctacgacgaacacgccgacctacgccaaaaccgctttccccaaacgacgaacgctccccccgacccgaaccgcgancctccccgccccgacgaacgcgncgattaaattataaactaaaaactacgacgacctccgaactaatctccccgcacccgaccgaaccgaaccgactaaacgaaaaataaaaaaaaaacaataaaatcgaaaacaaaaacgctaaaaacaataatcgtaacgcgacgaaacgactcccctaaaaaccgaaaatataaaaaaaacgataacaacaacgacgaaaacgacgctcgcaaacccgaaaaaaactactaactaatcaaaacacccgaaaaaaacgtaaaaaaaccgccgctaccacctctcacccctaaataaaactacgctcgaaaaaacgaccctatactccccgaaccgactaacaatcgaacgcaataaccgaaacccgaaacccgaaactcgaacgcctcaaaaatttaaaaaaatccaaaataaaaaaaaactaaaaaaaattttaataaaaa

SEQ ID NO: 4989 - DNA, 1183 bp, Artificial Sequence
  chemically treated genomic DNA (Homo sapiens) CpG-island No: 4989
  unsure (529, 542, 645, 750, 1087)
cggtttcgcgttagcgtcggtggttcgtttcgtttttttttatttttcgtttttttttcggttttttttttttttttttttcgttttcgttaagtaatggtttgttttttttttttgggcggtagatttgtattgcgttttttttttcggttcggcgttcgtttttttttcggtttcgtgtcgtatcgttattcgtttcgttttttgttttttgttttcgtgtacgtgttttttttttttgttgcgcgtcggcgtgcgtttttcgcgtggtttttacgacgttttcgtcgtttttgcgttttttcgttttattatcgtgcgttagcgttgtgcgcgtttcgtcgggttgacgttttcgtttttattacgtttcgtttgcgtatatttttttgtttgtcgtgtcgttttgtttattcgttttcgcgttttttttcgcgcgatcgcgcgtgattcgtttgttttttgtacgcgttttttttttttttgcgttgtattcgttgcgacgttatcgcgatgtgagacgcgttanttgatatgacgtntacgtgcgtcgtgttgtattttgtttcgtcgttattgcgcgatcgcgacgcgtcgtcgcgatttgtcgttgcgagacgttacgacgttttgtgttgtgtttantttgtattacgattcgattgtgtcgttcgttgtcgtgcgttatattcgtttttattcgttacgcgtcgcgcgttttttcgttgtatcgtgcgtttgtcgatttangcgtttgatgttttgtcgtcgtatataacgttttacgtatattatatgtttttattgttgtgcgtgtgtcgtgcgtatagcgagattagtgtgttcgtttcgatcgcgttttttattatatatatatgcgcgtttgcgcgttttttatcgttatcgtcgttttgtcgtttatgtttgttcggttttgttcgtcgtttgtttcgtttgtaattgtttcgtttcgtttttattttgttatatttttgcggtttttacgtcgttcgttcgtttcgatttttacgtttacgtcggttcgcgtttcgttttgttttttttgtttttttttcgcgatatattngttgcgttcgtttcgtcgtttcgcgttttggtattcgttcgtttcggagttcgtttttttcgtatgtcgttttttttttttcgagtttttcgtttt

SEQ ID NO: 4990 - DNA, 1183 bp, Artificial Sequence
  chemically treated genomic DNA (Homo sapiens) CpG-island No: 4990
  unsure (97, 434, 539, 642, 655)
aaaacgaaaaactcgaaaaaaaaaaaacgacatacgaaaaaaacgaactccgaaacgaacgaataccaaaacgcgaaacgacgaaacgaacgcaacnaatatatcgcgaaaaaaaaacaaaaaaaacaaaacgaaacgcgaaccgacgtaaacgtaaaaatcgaaacgaacgaacgacgtaaaaaccgcaaaaatataacaaaataaaaacgaaacgaaacaattacaaacgaaacaaacgacgaacaaaaccgaacaaacataaacgacaaaacgacgataacgataaaaaacgcgcaaacgcgcatatatatataataaaaaacgcgatcgaaacgaacacactaatctcgctatacgcacgacacacgcacaacaataaaaacatataatatacgtaaaacgttatatacgacgacaaaacatcaaacgcntaaatcgacaaacgcacgatacaacgaaaaaacgcgcgacgcgtaacgaataaaaacgaatataacgcacgacaacgaacgacacaatcgaatcgtaatacaaantaaacacaacacaaaacgtcgtaacgtctcgcaacgacaaatcgcgacgacgcgtcgcgatcgcgcaataacgacgaaacaaaatacaacacgacgcacgtanacgtcatatcaantaacgcgtctcacatcgcgataacgtcgcaacgaatacaacgcaaaaaaaaaaaaaacgcgtacaaaaaacaaacgaatcacgcgcgatcgcgcgaaaaaaaacgcgaaaacgaataaacaaaacgacacgacaaacaaaaaaatatacgcaaacgaaacgtaataaaaacgaaaacgtcaacccgacgaaacgcgcacaacgctaacgcacgataataaaacgaaaaaacgcaaaaacgacgaaaacgtcgtaaaaaccacgcgaaaaacgcacgccgacgcgcaacaaaaaaaaaaaacacgtacacgaaaacaaaaaacaaaaaacgaaacgaataacgatacgacacgaaaccgaaaaaaaaacgaacgccgaaccgaaaaaaaaaacgcaatacaaatctaccgcccaaaaaaaaaaaacaaaccattacttaacgaaaacgaaaaaaaaaaaaaaaaaaaaccgaaaaaaaaacgaaaaataaaaaaaaacgaaacgaaccaccgacgctaacgcgaaaccg

SEQ ID NO: 4991 - DNA, 1183 bp, Artificial Sequence
  chemically treated genomic DNA (Homo sapiens) CpG-island No: 4991
  unsure (97, 434, 539, 642, 655)
aggacgaagagttcgggaggagaagggcggtatacggggaggacggatttcggagcgggcgagtgttaaggcgcggagcggcgaagcgagcgtagtngatgtgtcgcgggaagaagatagagagggtagagcgagacgcgagtcgacgtgggcgtaggagtcgaaacgagcggacggcgtggaggtcgtaaaggtgtgatagggtagaagcgggacggagtagttgtaggcgagataggcgacgagtagagtcgggtagatatgagcgatagagcggcggtggcgatgggagacgcgtagacgcgtatgtgtgtgtgatgaaggacgcgatcggggcgagtatattgatttcgttgtgcgtacgatatacgtatagtagtagggatatatgatgtacgtaggacgttgtgtgcgacggtaaagtattaagcgtntgggtcgatagacgtacgatgtagcgagagagcgcgcgacgcgtgacgagtgagggcgagtgtggcgtacgatagcgagcgatatagtcgagtcgtgatatagantgggtatagtatagagcgtcgtgacgtttcgtagcggtagatcgcgacgacgcgtcgcgatcgcgtagtaacgacgggatagagtatagtacggcgtacgtgnacgttatattagntggcgcgttttatatcgcgatgacgtcgtagcggatgtaacgtaggggggaggagagcgcgtgtaagagatagacgagttacgcgcggtcgcgcgaggaggagcgcgagagcgagtgggtagagcgatacgatagatagagagatgtgcgtaaacggaacgtggtggggacgggagcgttagttcgacggggcgcgtatagcgttggcgtacggtggtagagcgggagagcgtagggacggcgagagcgtcgtagaggttacgcgggagacgtacgtcggcgcgtagtagaggaggagggtacgtgtacggggatagggagtagaggacggagcgggtaacggtgcggtacggagtcgagggaagggcgggcgtcgagtcgagagagagggcgtagtgtaggtttgtcgtttaggagaagagagtaggttattgtttggcgggggcgaagaggggagggggaagaagtcgggggaggagcgaggaatgggagaaggcggagcgggttatcgacgttggcgcggagtcg

SEQ ID NO: 4992 - DNA, 1183 bp, Artificial Sequence
  chemically treated genomic DNA (Homo sapiens) CpG-island No: 4992
  unsure (529, 542, 645, 750, 1087)
cgactccgcgccaacgtcgataacccgctccgccttctcccattcctcgctcctcccccgacttcttccccctcccctcttcgcccccgccaaacaataacctactctcttctcctaaacgacaaacctacactacgccctctctctcgactcgacgcccgcccttccctcgactccgtaccgcaccgttacccgctccgtcctctactccctatccccgtacacgtaccctcctcctctactacgcgccgacgtacgtctcccgcgtaacctctacgacgctctcgccgtccctacgctctcccgctctaccaccgtacgccaacgctatacgcgccccgtcgaactaacgctcccgtccccaccacgttccgtttacgcacatctctctatctatcgtatcgctctacccactcgctctcgcgctcctcctcgcgcgaccgcgcgtaactcgtctatctcttacacgcgctctcctcccccctacgttacatccgctacgacgtcatcgcgatataaaacgcgccanctaatataacgtncacgtacgccgtactatactctatcccgtcgttactacgcgatcgcgacgcgtcgtcgcgatctaccgctacgaaacgtcacgacgctctatactatacccantctatatcacgactcgactatatcgctcgctatcgtacgccacactcgccctcactcgtcacgcgtcgcgcgctctctcgctacatcgtacgtctatcgacccanacgcttaatactttaccgtcgcacacaacgtcctacgtacatcatatatccctactactatacgtatatcgtacgcacaacgaaatcaatatactcgccccgatcgcgtccttcatcacacacacatacgcgtctacgcgtctcccatcgccaccgccgctctatcgctcatatctacccgactctactcgtcgcctatctcgcctacaactactccgtcccgcttctaccctatcacacctttacgacctccacgccgtccgctcgtttcgactcctacgcccacgtcgactcgcgtctcgctctaccctctctatcttcttcccgcgacacatcnactacgctcgcttcgccgctccgcgccttaacactcgcccgctccgaaatccgtcctccccgtataccgcccttctcctcccgaactcttcgtcct

SEQ ID NO: 4993 - DNA, 935 bp, Artificial Sequence
  chemically treated genomic DNA (Homo sapiens) CpG-island No: 4993
  unsure (271)
tatttagtttaatttattttttttttttttttatttttacgtttttcgtattatttagatttattgcgttttttaatttttatttttcgtagtttcgtacgtagtgatttatttattttttaaattttcggtttttattttttttatttaatcgcgtttatcgatatttttttttttttttcgtattttttttttagtcgttttttgttttttcgttttttcgttaattttaggtattttttttatttcgttagtttcgttttttattatntttatatcgttttaatacgtttttttttttttttatcgttacgttgtatgtcgtattttgtttcgcgagttttaagttttttgttaacgttttttcgtattagtatttcgttatttgtttattattatcgtatttttgtatcggtttttattttacgttatttttttatttttttttgttttttgttattcgttcgtttttttcgtatttttcgtttcgtttttatcgtatatcgtttttttattatattttttcgtttttttttttttttattcgttttttggtttttcgtacgcgtatttttttaatttttatttattcgttgatcgttttatcgcgttatgtttattttttatttgttatcgttacgttttattgcgttttcgatttttttatgtcgtttggtatttttataatcgcgattttttatttttacgttattagttttatttatttttttcgtttttttggaagttgtcgtttaagaattcgtttttcgtttttcgaataatcgtatcgattttataatcgttatttatagtttattttaggcgttttatcgatttcgttattttaattcgtattttttacgtgtttcgtttttttatttttaatttgtacgttaattttatcggttttattatacggttattcgttttcgttt

SEQ ID NO: 4994 - DNA, 935 bp, Artificial Sequence
  chemically treated genomic DNA (Homo sapiens) CpG-island No: 4994
  unsure (665)
aaacgaaaacgaataaccgtataataaaaccgataaaattaacgtacaaattaaaaataaaaaaacgaaacacgtaaaaaatacgaattaaaataacgaaatcgataaaacgcctaaaataaactataaataacgattataaaatcgatacgattattcgaaaaacgaaaaacgaattcttaaacgacaacttccaaaaaaacgaaaaaaataaataaaactaataacgtaaaaataaaaaatcgcgattataaaaataccaaacgacataaaaaaatcgaaaacgcaataaaacgtaacgataacaaataaaaaataaacataacgcgataaaacgatcaacgaataaataaaaattaaaaaaatacgcgtacgaaaaaccaaaaaacgaataaaaaaaaaaaaaaacgaaaaaatataataaaaaaacgatatacgataaaaacgaaacgaaaaatacgaaaaaaacgaacgaataacaaaaaacaaaaaaaaataaaaaaataacgtaaaataaaaaccgatacaaaaatacgataataataaacaaataacgaaatactaatacgaaaaaacgttaacaaaaaacttaaaactcgcgaaacaaaatacgacatacaacgtaacgataaaaaaaaaaaaaaacgtattaaaacgatataaanataataaaaaacgaaactaacgaaataaaaaaaatacctaaaattaacgaaaaaacgaaaaaacaaaaaacgactaaaaaaaaaatacgaaaaaaaaaaaaaaatatcgataaacgcgattaaataaaaaaaataaaaaccgaaaatttaaaaaataaataaatcactacgtacgaaactacgaaaaataaaaattaaaaaacgcaataaatctaaataatacgaaaaacgtaaaaataaaaaaaaaaaaaaaataaattaaactaaata

SEQ ID NO: 4995 - DNA, 935 bp, Artificial Sequence
  chemically treated genomic DNA (Homo sapiens) CpG-island No: 4995
  unsure (665)
gagcgaggacgaatgatcgtgtgatagagtcgatgaggttgacgtgtaggttagaagtaggagagcggagtacgtagagggtgcggattggagtaacgagatcggtgaggcgtttagagtgagttgtgggtggcgattatgaggtcgatgcgattgttcggagagcggagagcgggtttttgagcggtaatttttaaggagacgagaggaatgggtgaggttagtagcgtagagataaggggtcgcgattgtgagagtgttaagcggtatagagaggtcggagacgtagtgaggcgtagcgatagtaggtggagagtaggtatgacgcgatgaagcgattaacgagtgagtagaggttgagaggatacgcgtgcgagaaattaagagacgagtgggggaaagggggggcgagagaatatagtgagggagcggtatgcgataaggacgagacggggagtacggaggggacgggcgggtggtagagagtaggaaggagtaagggaatgacgtggagtaagagtcggtataggagtgcggtagtagtgagtagatagcggaatgttaatgcgagaagacgttggtagagggtttgaagttcgcgagatagagtgcgatatatagcgtgacggtgaggagagaaaagggcgtgttggagcggtatgagnatggtaggaggcggggttgacgaagtagaagaagtgtttaaagttagcgggggggcggagaggtagggggcggttagggggagagtacgaggaagaggagggggtgtcggtaggcgcggttgagtggagaggatgagggtcggaagtttgaagggtgagtaggttattacgtacgaagttacggagaatggaggttggggaacgtagtggatttaggtggtgcgggggacgtgggagtagaaaaggggggggagtgggttaggttgggtg

SEQ ID NO: 4996 - DNA, 935 bp, Artificial Sequence
  chemically treated genomic DNA (Homo sapiens) CpG-island No: 4996
  unsure (271)
cacccaacctaacccactccccccccttttctactcccacgtcccccgcaccacctaaatccactacgttccccaacctccattctccgtaacttcgtacgtaataacctactcacccttcaaacttccgaccctcatcctctccactcaaccgcgcctaccgacaccccctcctcttcctcgtactctccccctaaccgccccctacctctccgcccccccgctaactttaaacacttcttctacttcgtcaaccccgcctcctaccatnctcataccgctccaacacgcccttttctctcctcaccgtcacgctatatatcgcactctatctcgcgaacttcaaaccctctaccaacgtcttctcgcattaacattccgctatctactcactactaccgcactcctataccgactcttactccacgtcattcccttactccttcctactctctaccacccgcccgtcccctccgtactccccgtctcgtccttatcgcataccgctccctcactatattctctcgccccccctttcccccactcgtctcttaatttctcgcacgcgtatcctctcaacctctactcactcgttaatcgcttcatcgcgtcatacctactctccacctactatcgctacgcctcactacgtctccgacctctctataccgcttaacactctcacaatcgcgaccccttatctctacgctactaacctcacccattcctctcgtctccttaaaaattaccgctcaaaaacccgctctccgctctccgaacaatcgcatcgacctcataatcgccacccacaactcactctaaacgcctcaccgatctcgttactccaatccgcaccctctacgtactccgctctcctacttctaacctacacgtcaacctcatcgactctatcacacgatcattcgtcctcgctc

SEQ ID NO: 4997 - DNA, 733 bp, Artificial Sequence
  chemically treated genomic DNA (Homo sapiens) CpG-island No: 4997
  unsure (390, 531, 593, 718)
ttcgtcgtttttgtcggagttagtatcgttatcgggttgtttatggtaaaatatacgttcggatcgatgatataggcggaaattagcgttataatcgttacgaaggattttattaatattttatcgtagtcgataaagtacgtttgtttttcgttcgttagtattttcggcgtggttttagaagagattagcgtatggaagttagatatcgcgttataggcgatggtgataaataggaacgggaataggttatcggtttatatcgggttagtgttatcgataaatttggttagcgtaggtatggttagcgtcgggcgtataattaaaatgtttatcgttagatcgacgatagtttcgatttttaggaaggtagagaggtagttacgcggngttagtagtaattatatcggtagtatcgtcgttataaaatcgtaatttattagtatttaggttaattgtacgtcggtaaagttaaagtacggtgtttaggtcggattttttgttatttagtcgttagagataatggcgaanattaggaatattagatcgatgatcgatatttcgttaatacgtttcggacgtagatagcgtangtagatttttataaatagcgttagcggaatggtgaaacgtacggtatatgtttttttacggttatgagttagggtttttattacgattatcgttagtattggtaggataatgattatgattatanagtaggttattagcg

SEQ ID NO: 4998 - DNA, 733 bp, Artificial Sequence
  chemically treated genomic DNA (Homo sapiens) CpG-island No: 4998
  unsure (16, 141, 203, 344)
cgctaataacctactntataatcataatcattatcctaccaatactaacgataatcgtaataaaaaccctaactcataaccgtaaaaaaacatataccgtacgtttcaccattccgctaacgctatttataaaaatctacntacgctatctacgtccgaaacgtattaacgaaatatcgatcatcgatctaatattcctaatnttcgccattatctctaacgactaaataacaaaaaatccgacctaaacaccgtactttaactttaccgacgtacaattaacctaaatactaataaattacgattttataacgacgatactaccgatataattactactaacnccgcgtaactacctctctaccttcctaaaaatcgaaactatcgtcgatctaacgataaacattttaattatacgcccgacgctaaccatacctacgctaaccaaatttatcgataacactaacccgatataaaccgataacctattcccgttcctatttatcaccatcgcctataacgcgatatctaacttccatacgctaatctcttctaaaaccacgccgaaaatactaacgaacgaaaaacaaacgtactttatcgactacgataaaatattaataaaatccttcgtaacgattataacgctaatttccgcctatatcatcgatccgaacgtatattttaccataaacaacccgataacgatactaactccgacaaaaacgacgaa

SEQ ID NO: 4999 - DNA, 733 bp, Artificial Sequence
  chemically treated genomic DNA (Homo sapiens) CpG-island No: 4999
  unsure (16, 141, 203, 344)
cgttggtggtttgttntatgattatggttattattttgttagtgttggcgatgatcgtggtgaaagttttgatttatagtcgtgggggaatatatatcgtgcgttttattatttcgttggcgttgtttatggggatttatntgcgttatttgcgttcggggcgtattggcgaagtgtcggttatcggtttggtatttttgatnttcgttattatttttggcggttgggtggtagaaagttcgatttgggtatcgtattttgattttatcggcgtgtagttgatttggatgttggtgggttacggttttgtggcggcggtgttgtcggtgtggttattgttggtntcgcgtgattatttttttatttttttgaaaatcgggattatcgtcggtttggcggtaggtattttgattatgcgttcgacgttgattatgtttgcgttgattaaatttgtcgatggtattggttcggtatggatcggtaatttgttttcgtttttgtttattattatcgtttgtggcgcggtgtttggtttttatgcgttgattttttttgggattacgtcgaagatgttggcgaacgaagggtaggcgtgttttatcggttacggtgggatgttaatggaatttttcgtggcgattatggcgttggttttcgtttgtattatcgattcgggcgtgtattttgttatgaatagttcgatggcggtgttggtttcggtagggacggcgga

SEQ ID NO: 5000 - DNA, 733 bp, Artificial Sequence
  chemically treated genomic DNA (Homo sapiens) CpG-island No: 5000
  unsure (390, 531, 593, 718)
tccgccgtccctaccgaaaccaacaccgccatcgaactattcataacaaaatacacgcccgaatcgataatacaaacgaaaaccaacgccataatcgccacgaaaaattccattaacatcccaccgtaaccgataaaacacgcctacccttcgttcgccaacatcttcgacgtaatcccaaaaaaaatcaacgcataaaaaccaaacaccgcgccacaaacgataataataaacaaaaacgaaaacaaattaccgatccataccgaaccaataccatcgacaaatttaatcaacgcaaacataatcaacgtcgaacgcataatcaaaatacctaccgccaaaccgacgataatcccgattttcaaaaaaataaaaaaataatcacgcganaccaacaataaccacaccgacaacaccgccgccacaaaaccgtaacccaccaacatccaaatcaactacacgccgataaaatcaaaatacgatacccaaatcgaactttctaccacccaaccgccaaaaataataacgaanatcaaaaataccaaaccgataaccgacacttcgccaatacgccccgaacgcaaataacgcanataaatccccataaacaacgccaacgaaataataaaacgcacgatatatattcccccacgactataaatcaaaactttcaccacgatcatcgccaacactaacaaaataataaccataatcatanaacaaaccaccaacg

SEQ ID NO: 5001 - DNA, 666 bp, Artificial Sequence
  chemically treated genomic DNA (Homo sapiens) CpG-island No: 5001
tatgtttatttagatagcgatttagttcgattattttcgtttatcgattttcgtattatagcggagtaagtagcgtcgggcgacgggcgttggcggaaatgcggtggtagattattttcggtggcgtatggcgatattattttttcggtagtgagcgtgtaattttttagtttaatatcgtttaaacgtttcgttttttaggttttcgttataatgttgttttttataatatgtagcggatgtagttttatgtcgtttacgtcggttttaattattcgttttagcgtttgtaaatatttagtttgtttttcgttaggtaggtcgataattaagtgggaatatatttttagttcgcgttgacgtgttagttgggttgtacgttgataataggtaaaattatggtcgcggttgatgcgatgtagtgttttgtcgtgggcggtttgtagttttagttttagttatatttcgtaattttggtttttatattcgtaaagtagatttagtatcgtattcggtacgtagttcgggcgggtatttatatataaatcgataatattggtttggtttatcgtttgttgatatatagaacgtagtatttgaattttcgtaaaggtgttggtatacgtttgaaagtaggttagatagcgtttagcgcggttaattaaa

SEQ ID NO: 5002 - DNA, 666 bp, Artificial Sequence
  chemically treated genomic DNA (Homo sapiens) CpG-island No: 5002
tttaattaaccgcgctaaacgctatctaacctactttcaaacgtataccaacacctttacgaaaattcaaatactacgttctatatatcaacaaacgataaaccaaaccaatattatcgatttatatataaatacccgcccgaactacgtaccgaatacgatactaaatctactttacgaatataaaaaccaaaattacgaaatataactaaaactaaaactacaaaccgcccacgacaaaacactacatcgcatcaaccgcgaccataattttacctattatcaacgtacaacccaactaacacgtcaacgcgaactaaaaatatattcccacttaattatcgacctacctaacgaaaaacaaactaaatatttacaaacgctaaaacgaataattaaaaccgacgtaaacgacataaaactacatccgctacatattataaaaaacaacattataacgaaaacctaaaaaacgaaacgtttaaacgatattaaactaaaaaattacacgctcactaccgaaaaaataatatcgccatacgccaccgaaaataatctaccaccgcatttccgccaacgcccgtcgcccgacgctacttactccgctataatacgaaaatcgataaacgaaaataatcgaactaaatcgctatctaaataaacata

SEQ ID NO: 5003 - DNA, 666 bp, Artificial Sequence
  chemically treated genomic DNA (Homo sapiens) CpG-island No: 5003
tttagttaatcgcgttaaacgttatttggtttatttttaggcgtatattagtatttttgcggaagtttaggtgttgcgttttatgtattagtaggcggtgagttaggttaatattgtcggtttgtgtgtgggtattcgttcggattgcgtgtcggatgcggtgttggatttgttttgcgaatataaggattagggttacgaagtgtggttggagttggggttataaatcgtttacgataaaatattgtatcgtattaatcgcggttatgattttgtttgttattagcgtataatttagttggtacgttagcgcgggttgaaggtgtgtttttatttaattgtcggtttgtttggcgaagggtaggttgaatgtttgtaaacgttggagcgagtggttgaaatcggcgtggacggtataaagttgtattcgttgtatattgtgaaaggtagtattatggcgaaagtttgggaagcggggcgtttgaacggtattgaattggaggattatacgtttattgtcggagaaatgatatcgttatacgttatcggaagtgatttattatcgtattttcgttagcgttcgtcgttcgacgttgtttgtttcgttgtggtgcgaaaatcgatggacgggaatggtcgagttggatcgttatttgaatgaatatg

SEQ ID NO: 5004 - DNA, 666 bp, Artificial Sequence
  chemically treated genomic DNA (Homo sapiens) CpG-island No: 5004
catattcattcaaataacgatccaactcgaccattcccgtccatcgattttcgcaccacaacgaaacaaacaacgtcgaacgacgaacgctaacgaaaatacgataataaatcacttccgataacgtataacgatatcatttctccgacaataaacgtataatcctccaattcaataccgttcaaacgccccgcttcccaaactttcgccataatactacctttcacaatatacaacgaatacaactttataccgtccacgccgatttcaaccactcgctccaacgtttacaaacattcaacctacccttcgccaaacaaaccgacaattaaataaaaacacaccttcaacccgcgctaacgtaccaactaaattatacgctaataacaaacaaaatcataaccgcgattaatacgatacaatattttatcgtaaacgatttataaccccaactccaaccacacttcgtaaccctaatccttatattcgcaaaacaaatccaacaccgcatccgacacgcaatccgaacgaatacccacacacaaaccgacaatattaacctaactcaccgcctactaatacataaaacgcaacacctaaacttccgcaaaaatactaatatacgcctaaaaataaaccaaataacgtttaacgcgattaactaaa

SEQ ID NO: 5005 - DNA, 569 bp, Artificial Sequence
  chemically treated genomic DNA (Homo sapiens) CpG-island No: 5005
tttttgatggtaaaattattttttattggtatcgtatgattaatcgtttgatgtggatttggcgcggtattgatttacgcgaaattttcgacgtttaggtacgtattgtgatgagcgatgtcgaacgtatcgacgatgatttatacgatacggtgattggttatcgtggcggtaattggatttatgagtgggttatttaggcgatggtgtggtaataaaaagtttgtgcggaagacgattcgtaatttagtggtcgttattggttgtatgcggttacgttgtataatattgtcgtttatttttatttgaaaggagatgatttggtcgagtaagcgtaggttttgttaaatcgcgtttatgaagaggtcgtttagcgtttatcgggtacgatgcggtagatggagtttatcgtattcggcggtgcgtttattatcggttttttgtatatgtcgaaaggcgatggttcgttttcgacggtattaatgtgtggtggtttggatgcgatgtagacggattattatagtttgtatgaacgttattttgcgtcgcgcggtattgcgatgttgatt

SEQ ID NO: 5006 - DNA, 569 bp, Artificial Sequence
  chemically treated genomic DNA (Homo sapiens) CpG-island No: 5006
aatcaacatcgcaataccgcgcgacgcaaaataacgttcatacaaactataataatccgtctacatcgcatccaaaccaccacacattaataccgtcgaaaacgaaccatcgcctttcgacatatacaaaaaaccgataataaacgcaccgccgaatacgataaactccatctaccgcatcgtacccgataaacgctaaacgacctcttcataaacgcgatttaacaaaacctacgcttactcgaccaaatcatctcctttcaaataaaaataaacgacaatattatacaacgtaaccgcatacaaccaataacgaccactaaattacgaatcgtcttccgcacaaactttttattaccacaccatcgcctaaataacccactcataaatccaattaccgccacgataaccaatcaccgtatcgtataaatcatcgtcgatacgttcgacatcgctcatcacaatacgtacctaaacgtcgaaaatttcgcgtaaatcaataccgcgccaaatccacatcaaacgattaatcatacgataccaataaaaaataattttaccatcaaaaa

SEQ ID NO: 5007 - DNA, 569 bp, Artificial Sequence
  chemically treated genomic DNA (Homo sapiens) CpG-island No: 5007
agttagtatcgtaatgtcgcgcggcgtaaaataacgtttatataggttgtaatagttcgtttgtatcgtatttagattattatatattaatatcgtcgggaacgggttatcgtttttcggtatatgtaaaaagtcggtgatgggcgtatcgtcgggtacggtaaattttatttgtcgtatcgtgttcggtagacgttgagcggtttttttataggcgcggtttgataaagtttgcgtttgttcggttaggttatttttttttagatgaggataggcggtaatgttgtataacgtagtcgtatgtagttagtgacgattattgagttgcggatcgtttttcgtataggttttttgttgttatattatcgtttgggtggtttatttataaatttagttgtcgttacggtagttaattatcgtatcgtataaattatcgtcggtacgttcggtatcgtttattataatacgtgtttggacgtcgaggatttcgcgtgggttaatgtcgcgttagatttatattagacggttaattatgcgatattagtgagggatggttttattattaagga

SEQ ID NO: 5008 - DNA, 569 bp, Artificial Sequence
  chemically treated genomic DNA (Homo sapiens) CpG-island No: 5008
tccttaataataaaaccatccctcactaatatcgcataattaaccgtctaatataaatctaacgcgacattaacccacgcgaaatcctcgacgtccaaacacgtattataataaacgataccgaacgtaccgacgataatttatacgatacgataattaactaccgtaacgacaactaaatttataaataaaccacccaaacgataatataacaacaaaaaacctatacgaaaaacgatccgcaactcaataatcgtcactaactacatacgactacgttatacaacattaccgcctatcctcatctaaaaaaaaataacctaaccgaacaaacgcaaactttatcaaaccgcgcctataaaaaaaccgctcaacgtctaccgaacacgatacgacaaataaaatttaccgtacccgacgatacgcccatcaccgactttttacatataccgaaaaacgataacccgttcccgacgatattaatatataataatctaaatacgatacaaacgaactattacaacctatataaacgttattttacgccgcgcgacattacgatactaact

SEQ ID NO: 5009 - DNA, 845 bp, Artificial Sequence
  chemically treated genomic DNA (Homo sapiens) CpG-island No: 5009
  unsure (266, 411, 425, 435, 445, 464, 467, 481, 488, 494, 499, 506)
  unsure (515, 522, 531..532, 538, 545, 656, 735, 753)
ttcgggtaaggtttgttattttttttttcggggtgtggtgggaggagcgcgaaggttttacgcgtttttagtagttggtaaaatttggaattagcgtcggtggtttaggcgggataggagcgggtcgggggcgtgggtaggttaggtaggggcggggagtgggcggggaacgggcgtgttttcgttgcggttacgtgtcgggagggatgttagttcgttaggaggatgcgcgttttaggggcgggttgcggggaggggcggcgttnatttcgcgtttcgtcgtggtttcggcgtcgggtttcggagatagacgttacgcgggttcgagcgttttcggggagtgttagttagagttggtgacgattattttttcgacgtggggcgggcggacgggaagtttggggtcgtggnttatcgtttcgggnagttttgggnagttcgggtngatcgcgtaggttagtttnttncgcggttgtttatngtttggnagtttngaggntcggttnttcgcgttngacgggnttttcgttnngggttngcgtttngggaggtttgttcgcgtttggttgggggtgggcgttttcgtttcgggcgttttagaggatggtcgggtcgtggcgcggcgacgtagggttgtagtcgagttcggttttttnggcggtcgttggttgttttagcgttgtaggaagttaggcgttaaaagtaataagatgttggcgtttgttgtattttttnattcgggtgttacgattnatgttggtgtcgtatgtattttttattagatttttagttgcgtgttttttcggtattttcgtgtgtttatgtgattttttaattttttttta

SEQ ID NO: 5010 - DNA, 845 bp, Artificial Sequence
  chemically treated genomic DNA (Homo sapiens) CpG-island No: 5010
  unsure (93, 111, 190, 301, 308, 314..315, 324, 331, 340, 347, 352)
  unsure (358, 365, 379, 382, 401, 411, 421, 435, 580)
taaaaaaaaattaaaaaatcacataaacacacgaaaataccgaaaaaacacgcaactaaaaatctaataaaaaatacatacgacaccaacatnaatcgtaacacccgaatnaaaaaatacaacaaacgccaacatcttattacttttaacgcctaacttcctacaacgctaaaacaaccaacgaccgccnaaaaaaccgaactcgactacaaccctacgtcgccgcgccacgacccgaccatcctctaaaacgcccgaaacgaaaacgcccacccccaaccaaacgcgaacaaacctcccnaaacgcnaacccnnaacgaaaancccgtcnaacgcgaanaaccgancctcnaaactnccaaacnataaacaaccgcgnaanaaactaacctacgcgatcnacccgaactncccaaaactncccgaaacgataanccacgaccccaaacttcccgtccgcccgccccacgtcgaaaaaataatcgtcaccaactctaactaacactccccgaaaacgctcgaacccgcgtaacgtctatctccgaaacccgacgccgaaaccacgacgaaacgcgaaatnaacgccgcccctccccgcaacccgcccctaaaacgcgcatcctcctaacgaactaacatccctcccgacacgtaaccgcaacgaaaacacgcccgttccccgcccactccccgcccctacctaacctacccacgcccccgacccgctcctatcccgcctaaaccaccgacgctaattccaaattttaccaactactaaaaacgcgtaaaaccttcgcgctcctcccaccacaccccgaaaaaaaaaataacaaaccttacccgaa

SEQ ID NO: 5011 - DNA, 845 bp, Artificial Sequence
  chemically treated genomic DNA (Homo sapiens) CpG-island No: 5011
  unsure (93, 111, 190, 301, 308, 314..315, 324, 331, 340, 347, 352)
  unsure (358, 365, 379, 382, 401, 411, 421, 435, 580)
taggaggaaattaaaaagttatatggatatacgaaagtatcgagaaggtacgtagttgaagatttggtaggggatgtatgcggtattagtatnggtcgtggtattcgagtngggaagtgtaataaacgttaatattttgttatttttaacgtttaattttttgtagcgttggagtagttagcggtcgttngggaagtcgagttcggttgtagttttgcgtcgtcgcgttacgattcgattattttttgagacgttcgggacgggagcgtttatttttaattaggcgcggatagattttttngagcgtnagtttnnggcgggaanttcgttnagcgcgggnaatcggnttttngaattnttaggtngtggatagtcgcgnagnaaattgatttacgcggttnattcgggttntttagagttnttcgaggcggtggnttacgattttaggtttttcgttcgttcgttttacgtcgaggaagtggtcgttattaattttggttggtatttttcgaggacgttcgagttcgcgtaacgtttgttttcgggattcggcgtcgggattacggcggagcgcgaggtnggcgtcgttttttttcgtagttcgtttttggaacgcgtatttttttggcgagttggtatttttttcgatacgtgatcgtagcggggatacgttcgtttttcgtttatttttcgtttttgtttggtttgtttacgttttcggttcgtttttgtttcgtttgggttatcggcgttggttttaggttttgttagttattagggacgcgtaaagttttcgcgttttttttattatatttcgagggaagaagtggtaggttttattcgga

SEQ ID NO: 5012 - DNA, 845 bp, Artificial Sequence
  chemically treated genomic DNA (Homo sapiens) CpG-island No: 5012
  unsure (266, 411, 425, 435, 445, 464, 467, 481, 488, 494, 499, 506)
  unsure (515, 522, 531..532, 538, 545, 656, 735, 753)
tccgaataaaacctaccacttcttccctcgaaatataataaaaaaaacgcgaaaactttacgcgtccctaataactaacaaaacctaaaaccaacgccgataacccaaacgaaacaaaaacgaaccgaaaacgtaaacaaaccaaacaaaaacgaaaaataaacgaaaaacgaacgtatccccgctacgatcacgtatcgaaaaaaataccaactcgccaaaaaaatacgcgttccaaaaacgaactacgaaaaaaaacgacgccnacctcgcgctccgccgtaatcccgacgccgaatcccgaaaacaaacgttacgcgaactcgaacgtcctcgaaaaataccaaccaaaattaataacgaccacttcctcgacgtaaaacgaacgaacgaaaaacctaaaatcgtaanccaccgcctcgaanaactctaaanaacccgaatnaaccgcgtaaatcaatttnctncgcgactatccacnacctaanaattcnaaaanccgattncccgcgctnaacgaanttcccgccnnaaactnacgctcnaaaaaatctatccgcgcctaattaaaaataaacgctcccgtcccgaacgtctcaaaaaataatcgaatcgtaacgcgacgacgcaaaactacaaccgaactcgacttcccnaacgaccgctaactactccaacgctacaaaaaattaaacgttaaaaataacaaaatattaacgtttattacacttcccnactcgaataccacgaccnatactaataccgcatacatcccctaccaaatcttcaactacgtaccttctcgatactttcgtatatccatataactttttaatttcctccta

SEQ ID NO: 5013 - DNA, 573 bp, Artificial Sequence
  chemically treated genomic DNA (Homo sapiens) CpG-island No: 5013
  unsure (25, 32, 42, 58)
cgatttaaaaggttagcgttgtttntcggtgnatatcgagtncgtaaatttttaagtnttcgtttttcgggatacgattttttttcgttttcgcgtttttttttttttcgttaaggacggttgtcgtagcggatttttagtcgtagtagttcgttttaggaaaggaggttgtattttggacgcggggagtaggggtatgtagttagttacgattttttcgtttttttcgttcgcgttttttcgttttgttttttcgtatttagtattttttatttttttttatttagtttaatttttaacgttaaggttttatcggtttataaaattgatagcggaagtgacgttagaggtatttggcggcgcgtaaaattagttacgttatagttataggcgtcgcggttaataagcgtatcggtatacggggttttttcgttcgttaatgtttgatttaagcggggggaagggtcgggtaaggaatgtgaataatgaatttttttttttcgttttgttcgtgaggagttaggcgcgaaacggagggggttggagttacggagtatttatcggtagttttag

SEQ ID NO: 5014 - DNA, 573 bp, Artificial Sequence
  chemically treated genomic DNA (Homo sapiens) CpG-island No: 5014
  unsure (516, 532, 542, 549)
ctaaaactaccgataaatactccgtaactccaaccccctccgtttcgcgcctaactcctcacgaacaaaacgaaaaaaaaaaattcattattcacattccttacccgacccttccccccgcttaaatcaaacattaacgaacgaaaaaaccccgtataccgatacgcttattaaccgcgacgcctataactataacgtaactaattttacgcgccgccaaatacctctaacgtcacttccgctatcaattttataaaccgataaaaccttaacgttaaaaattaaactaaataaaaaaaaataaaaaatactaaatacgaaaaaacaaaacgaaaaaacgcgaacgaaaaaaacgaaaaaatcgtaactaactacatacccctactccccgcgtccaaaatacaacctcctttcctaaaacgaactactacgactaaaaatccgctacgacaaccgtccttaacgaaaaaaaaaaaaacgcgaaaacgaaaaaaaatcgtatcccgaaaaacgaanacttaaaaatttacgnactcgatatncaccganaaacaacgctaaccttttaaatcg

SEQ ID NO: 5015 - DNA, 573 bp, Artificial Sequence
  chemically treated genomic DNA (Homo sapiens) CpG-island No: 5015
  unsure (516, 532, 542, 549)
ttaggattatcggtgggtgtttcgtggttttaatttttttcgtttcgcgtttagttttttacggatagggcgggggaggggggtttattgtttatattttttattcggttttttttttcgtttgaattaaatattggcgggcgggaaggtttcgtgtgtcggtgcgtttgttggtcgcggcgtttgtgattgtggcgtgattggttttacgcgtcgttaggtgtttttgacgttattttcgttattaattttgtgggtcggtgagattttggcgttgggggttgggttgaatgagggaaggtaggaagtgttaggtgcggggggatagggcgggaaggcgcgggcggggagggcgggagagtcgtggttggttgtatgtttttgtttttcgcgtttagagtgtagtttttttttttgaagcgagttgttgcggttggaggttcgttgcggtagtcgtttttggcgagggggaggggaacgcgggagcgggaggaaatcgtatttcgggggacgggngtttggagatttgcgnattcggtgtntatcggnaaatagcgttggttttttgagtcg

SEQ ID NO: 5016 - DNA, 573 bp, Artificial Sequence
  chemically treated genomic DNA (Homo sapiens) CpG-island No: 5016
  unsure (25, 32, 42, 58)
cgactcaaaaaaccaacgctatttnccgatanacaccgaatncgcaaatctccaaacncccgtcccccgaaatacgatttcctcccgctcccgcgttcccctccccctcgccaaaaacgactaccgcaacgaacctccaaccgcaacaactcgcttcaaaaaaaaaaactacactctaaacgcgaaaaacaaaaacatacaaccaaccacgactctcccgccctccccgcccgcgccttcccgccctatccccccgcacctaacacttcctaccttccctcattcaacccaacccccaacgccaaaatctcaccgacccacaaaattaataacgaaaataacgtcaaaaacacctaacgacgcgtaaaaccaatcacgccacaatcacaaacgccgcgaccaacaaacgcaccgacacacgaaaccttcccgcccgccaatatttaattcaaacgaaaaaaaaaaccgaataaaaaatataaacaataaacccccctcccccgccctatccgtaaaaaactaaacgcgaaacgaaaaaaattaaaaccacgaaacacccaccgataatcctaa

SEQ ID NO: 5017 - DNA, 622 bp, Artificial Sequence
  chemically treated genomic DNA (Homo sapiens) CpG-island No: 5017
acgttgtttcgcggtttttaagttcggttcgtttcgtttttgtatttcgatttttttttacgtcggttttttttcgtttttcgggcggcggaagtcgttggttgtttttttttgtttatatgagtttttttcggtgcgttcgtttttttcggtttttcggtcgagatttggtttttattttagggtttttaatgtgttttcggagggatatattttttttaatcgattacgttcggggttttagttttacgggttgtttttaattttagttttttatttttataattttgtttagtcgtttttttatattttttttttcgattggttcgtttttttcggtcggttaatgggggtttcgtttatttttttattttagggtcgtagaagggtaagacgtcgtttaatggttgttaagggtaacgcgggacgtcggttagcgaggttttttgttttttgggttggggttcgtcggttttagttttagggcgggaagagaggcgcggggggaggggaaggttggcgtttgcgtaaagtcgggggcgggggtagtggtttgagagtcgggataaaatacgagttttagttaatgtggaattataaatataatataagattttttatt

SEQ ID NO: 5018 - DNA, 622 bp, Artificial Sequence
  chemically treated genomic DNA (Homo sapiens) CpG-island No: 5018
aataaaaaatcttatattatatttataattccacattaactaaaactcgtattttatcccgactctcaaaccactacccccgcccccgactttacgcaaacgccaaccttcccctccccccgcgcctctcttcccgccctaaaactaaaaccgacgaaccccaacccaaaaaacaaaaaacctcgctaaccgacgtcccgcgttacccttaacaaccattaaacgacgtcttacccttctacgaccctaaaataaaaaaataaacgaaacccccattaaccgaccgaaaaaaacgaaccaatcgaaaaaaaaaatataaaaaaacgactaaacaaaattataaaaataaaaaactaaaattaaaaacaacccgtaaaactaaaaccccgaacgtaatcgattaaaaaaaatatatccctccgaaaacacattaaaaaccctaaaataaaaaccaaatctcgaccgaaaaaccgaaaaaaacgaacgcaccgaaaaaaactcatataaacaaaaaaaaacaaccaacgacttccgccgcccgaaaaacgaaaaaaaaccgacgtaaaaaaaaatcgaaatacaaaaacgaaacgaaccgaacttaaaaaccgcgaaacaacgt

SEQ ID NO: 5019 - DNA, 622 bp, Artificial Sequence
  chemically treated genomic DNA (Homo sapiens) CpG-island No: 5019
gatggggagttttgtgttgtatttatggttttatattagttaaaattcgtgttttgtttcggtttttaagttattgttttcgttttcggttttgcgtaggcgttagttttttttttttttcgcgttttttttttcgttttaaggttggagtcggcgagttttagtttagagaataaaaggtttcgttagtcggcgtttcgcgttgtttttggtaattattgagcggcgttttgtttttttgcgattttgagatgagagagtaaacggggtttttattggtcggtcggggaagacgggttaatcggagaagagggtatagggaggcggttgaataaggttgtgggggtaggaagttagggttagaggtaattcgtgaggttagaatttcgaacgtggtcggttggagaaaatatgttttttcggaggtatattgggaattttgaggtgagggttaggtttcggtcggagagtcggagggggcgggcgtatcggaaaaggtttatgtgggtagggaagagtagttagcgattttcgtcgttcggaaggcgggaaggggtcggcgtgaggaggggtcgggatgtaggggcggggcgggtcgggtttgggggtcgcggggtagcgt

SEQ ID NO: 5020 - DNA, 622 bp, Artificial Sequence
  chemically treated genomic DNA (Homo sapiens) CpG-island No: 5020
acgctaccccgcgacccccaaacccgacccgccccgcccctacatcccgacccctcctcacgccgaccccttcccgccttccgaacgacgaaaatcgctaactactcttccctacccacataaaccttttccgatacgcccgccccctccgactctccgaccgaaacctaaccctcacctcaaaattcccaatatacctccgaaaaaacatattttctccaaccgaccacgttcgaaattctaacctcacgaattacctctaaccctaacttcctacccccacaaccttattcaaccgcctccctataccctcttctccgattaacccgtcttccccgaccgaccaataaaaaccccgtttactctctcatctcaaaatcgcaaaaaaacaaaacgccgctcaataattaccaaaaacaacgcgaaacgccgactaacgaaaccttttattctctaaactaaaactcgccgactccaaccttaaaacgaaaaaaaaaacgcgaaaaaaaaaaaaaactaacgcctacgcaaaaccgaaaacgaaaacaataacttaaaaaccgaaacaaaacacgaattttaactaatataaaaccataaatacaacacaaaactccccatc

SEQ ID NO: 5021 - DNA, 621 bp, Artificial Sequence
  chemically treated genomic DNA (Homo sapiens) CpG-island No: 5021
tgcggcgatgggcgggttaggggcggggcgcgggtgggttttaaaagtcggtgtttattcgtttcgcgttgtcgcggtaattagtatatttcggtattttttttgcggtagttgcgtttcgtaagcgtagtgtcgtagcgtacgtcggagtggttgtagttgttcggcgcggcgtcgttttgcgcgggttgtgggttgcgggttgcgttttcgttgttggttagttttgtacggttgcgggttttgcggcgttcggtgttttgtaacgttgcggcgggcggtatgggataacgcggttatggtgcgtcgagatcgttttcgtaggtgagtgtgcggtgggaacgagggggtgtggttggcggttttgggattagggcgtaggcgagcggaggattgtgtgttcgtgttcgagttggggttgtttttgggcgaaaattttatcgataggcggtacgtatttcgcgttcgttttgtttatttgaggagggggtgttatttttgttcgtaatggaatgtttagaacgcgggatttttttgggttaggatttttagatttcgggatcgtcgtggtgagatttaggatttttggattttagcgttattttgatatgatttaggatt

SEQ ID NO: 5022 - DNA, 621 bp, Artificial Sequence
  chemically treated genomic DNA (Homo sapiens) CpG-island No: 5022
aatcctaaatcatatcaaaataacgctaaaatccaaaaatcctaaatctcaccacgacgatcccgaaatctaaaaatcctaacccaaaaaaatcccgcgttctaaacattccattacgaacaaaaataacaccccctcctcaaataaacaaaacgaacgcgaaatacgtaccgcctatcgataaaattttcgcccaaaaacaaccccaactcgaacacgaacacacaatcctccgctcgcctacgccctaatcccaaaaccgccaaccacaccccctcgttcccaccgcacactcacctacgaaaacgatctcgacgcaccataaccgcgttatcccataccgcccgccgcaacgttacaaaacaccgaacgccgcaaaacccgcaaccgtacaaaactaaccaacaacgaaaacgcaacccgcaacccacaacccgcgcaaaacgacgccgcgccgaacaactacaaccactccgacgtacgctacgacactacgcttacgaaacgcaactaccgcaaaaaaaataccgaaatatactaattaccgcgacaacgcgaaacgaataaacaccgacttttaaaacccacccgcgccccgcccctaacccgcccatcgccgca

SEQ ID NO: 5023 - DNA, 621 bp, Artificial Sequence
  chemically treated genomic DNA (Homo sapiens) CpG-island No: 5023
gattttaagttatattaagatgacgttggggtttagaaattttaaattttattacgacgatttcggggtttagaaattttaatttaaggaggtttcgcgttttgaatattttattgcgggtaggagtgatattttttttttaagtaggtagagcgggcgcggaatgcgtgtcgtttgtcggtagagttttcgtttagaggtagttttagttcggatacgggtatatagtttttcgttcgtttgcgttttagttttagggtcgttagttatattttttcgtttttatcgtatatttatttgcggaggcgatttcggcgtattatggtcgcgttattttatgtcgttcgtcgtagcgttgtagagtatcgggcgtcgtagagttcgtagtcgtgtagagttggttagtagcgggggcgtagttcgtagtttatagttcgcgtagggcggcgtcgcgtcgggtagttatagttatttcggcgtgcgttgcggtattgcgtttgcgaggcgtagttgtcgtagaggaggtgtcggggtgtgttggttgtcgcggtagcgcggagcgagtgggtatcgatttttagagtttattcgcgtttcgtttttagttcgtttatcgtcgta

SEQ ID NO: 5024 - DNA, 621 bp, Artificial Sequence
  chemically treated genomic DNA (Homo sapiens) CpG-island No: 5024
tacgacgataaacgaactaaaaacgaaacgcgaataaactctaaaaatcgatacccactcgctccgcgctaccgcgacaaccaacacaccccgacacctcctctacgacaactacgcctcgcaaacgcaataccgcaacgcacgccgaaataactataactacccgacgcgacgccgccctacgcgaactataaactacgaactacgcccccgctactaaccaactctacacgactacgaactctacgacgcccgatactctacaacgctacgacgaacgacataaaataacgcgaccataatacgccgaaatcgcctccgcaaataaatatacgataaaaacgaaaaaatataactaacgaccctaaaactaaaacgcaaacgaacgaaaaactatatacccgtatccgaactaaaactacctctaaacgaaaactctaccgacaaacgacacgcattccgcgcccgctctacctacttaaaaaaaaaatatcactcctacccgcaataaaatattcaaaacgcgaaacctccttaaattaaaatttctaaaccccgaaatcgtcgtaataaaatttaaaatttctaaaccccaacgtcatcttaatataacttaaaatc

SEQ ID NO: 5025 - DNA, 762 bp, Artificial Sequence
  chemically treated genomic DNA (Homo sapiens) CpG-island No: 5025
  unsure (61, 135, 232, 238, 313, 315, 324, 333, 337, 451, 478, 481)
  unsure (501, 504, 560, 574)
atatttttttgtttgcgttaagatagtttgattcgatttttggtgaattaatgcgtaaaantggcggttgtacgtttgtttttttatttcggcgtataattttgaggaaggacgttacgttattagggtaacgancgtttttgcgtaaaggttcggtttaagggaacgtttagggcgtttcggtttttttcgttgttgtttttgttaggtttagtgcgagattagagtacgnagcganttttcgtcgttttcggttaggtagatgttggtttagttttggcgcgaacgaagcgcgttatttttttgttttttntntaggttaangtttgtttntatnggtagggttcgtttcgggagcgagtatagatcggggtagcgaggttagttaggcgtcgacgaggttttcgaacgcgtacgcgtttcgtttagtttcgggtggcggtcgtcggangtagacgttagttatggaaatcgagangtntggttcgggcggggtcgcgngtngagttcgttattcggtcgtcgtagtttttttgttttcgtattcgggtattaattanatttttcggcgggnatcgtttagttcgggtttatttgtaaaaatgcggtttttgggatgttttcgcgtttttttttttttcgggtgatttgaggtacgttcgttgttcgacgtttatttcgggattttttcggtattttaatgtttaagtttgtgcggagagttaagttgttttaggggtttttattgttataagaaatata

SEQ ID NO: 5026 - DNA, 762 bp, Artificial Sequence
  chemically treated genomic DNA (Homo sapiens) CpG-island No: 5026
  unsure (189, 203, 259, 262, 282, 285, 312, 426, 430, 439, 448, 450)
  unsure (525, 531, 628, 702)
tatatttcttataacaataaaaacccctaaaacaacttaactctccgcacaaacttaaacattaaaataccgaaaaaatcccgaaataaacgtcgaacaacgaacgtacctcaaatcacccgaaaaaaaaaaaaacgcgaaaacatcccaaaaaccgcatttttacaaataaacccgaactaaacgatncccgccgaaaaatntaattaatacccgaatacgaaaacaaaaaaactacgacgaccgaataacgaactcnacncgcgaccccgcccgaaccanacntctcgatttccataactaacgtctacntccgacgaccgccacccgaaactaaacgaaacgcgtacgcgttcgaaaacctcgtcgacgcctaactaacctcgctaccccgatctatactcgctcccgaaacgaaccctaccnatanaaacaaacnttaacctananaaaaaacaaaaaaataacgcgcttcgttcgcgccaaaactaaaccaacatctacctaaccgaaaacgacgaaaantcgctncgtactctaatctcgcactaaacctaacaaaaacaacaacgaaaaaaaccgaaacgccctaaacgttcccttaaaccgaacctttacgcaaaaacgntcgttaccctaataacgtaacgtccttcctcaaaattatacgccgaaataaaaaaacaaacgtacaaccgccanttttacgcattaattcaccaaaaatcgaatcaaactatcttaacgcaaacaaaaaaatat

SEQ ID NO: 5027 - DNA, 762 bp, Artificial Sequence
  chemically treated genomic DNA (Homo sapiens) CpG-island No: 5027
  unsure (189, 203, 259, 262, 282, 285, 312, 426, 430, 439, 448, 450)
  unsure (525, 531, 628, 702)
tatgttttttgtggtaatgaaagtttttagaataatttggtttttcgtataggtttggatattaagatgtcgaagaagtttcgaggtggacgtcggataacgaacgtattttaagttattcgagggaagagaagacgcgaaggtattttagggatcgtatttttgtaggtaaattcgggttgggcgatnttcgtcgggaggtntggttagtgttcgaatgcggaggtagaaaagttgcggcggtcgaataacgagtttnatncgcggtttcgttcgggttangtntttcggtttttatggttaacgtttatnttcggcggtcgttattcggagttgaacggagcgcgtgcgcgttcggggatttcgtcggcgtttggttggtttcgttgtttcggtttgtgttcgttttcgaggcgggttttgttngtanaagtaggtnttggtttangnaggaagtagggaaatagcgcgtttcgttcgcgttaggattaggttaatatttgtttggtcggggacgacgggagntcgttncgtgttttggtttcgtattgggtttagtagaagtagtagcggggagagtcgagacgttttgaacgtttttttgggtcgggtttttacgtaagagcgntcgttgttttggtgacgtgacgtttttttttaggattgtgcgtcggggtggggaaatagacgtgtaatcgttanttttgcgtattaatttattagaggtcgggttaggttgttttaacgtaggtagaggggtgt

SEQ ID NO: 5028 - DNA, 762 bp, Artificial Sequence
  chemically treated genomic DNA (Homo sapiens) CpG-island No: 5028
  unsure (61, 135, 232, 238, 313, 315, 324, 333, 337, 451, 478, 481)
  unsure (501, 504, 560, 574)
acacccctctacctacgttaaaacaacctaacccgacctctaataaattaatacgcaaaantaacgattacacgtctatttccccaccccgacgcacaatcctaaaaaaaaacgtcacgtcaccaaaacaacgancgctcttacgtaaaaacccgacccaaaaaaacgttcaaaacgtctcgactctccccgctactacttctactaaacccaatacgaaaccaaaacacgnaacganctcccgtcgtccccgaccaaacaaatattaacctaatcctaacgcgaacgaaacgcgctatttccctacttcctncntaaaccaanacctacttntacnaacaaaacccgcctcgaaaacgaacacaaaccgaaacaacgaaaccaaccaaacgccgacgaaatccccgaacgcgcacgcgctccgttcaactccgaataacgaccgccgaanataaacgttaaccataaaaaccgaaanacntaacccgaacgaaaccgcgnatnaaactcgttattcgaccgccgcaacttttctacctccgcattcgaacactaaccanacctcccgacgaanatcgcccaacccgaatttacctacaaaaatacgatccctaaaataccttcgcgtcttctcttccctcgaataacttaaaatacgttcgttatccgacgtccacctcgaaacttcttcgacatcttaatatccaaacctatacgaaaaaccaaattattctaaaaactttcattaccacaaaaaacata

SEQ ID NO: 5029 - DNA, 675 bp, Artificial Sequence
  chemically treated genomic DNA (Homo sapiens) CpG-island No: 5029
  unsure (90, 326, 334, 363, 420, 451)
ttcgagcgttcggtttttcgggaggagcgtcgcgaaagtaggcggggtaggggacggtggtatttgttattcgagcggtttttacggggntttcgggaggtttagcggtcgtcggtttgggagtcgggtgcgagttttttttcgtcgtttcgagttttgcgtcgagcgtcgggtcgcggtatttcgtgttttttgtttagcggtttcggttagtggggttcgtcgttttaggtcgagttttcgttattcgaggtcggggcgtcgaggggaagcgttgtcgagtcgttgtttacgttttcggggtgtcggagcggatattcgtaagngcgggttncgtttcgcgtatttatcgggtttttcgtngtcgtcggttcggtttttttttttttttttttttcgtcgtcgtttttttcgcggttntttcgggcggtcgtattgggcgttgggattnggtttgggttaagtgtcggtagagttgggggttaggttcgcgtcgggcggtggtcgcggtcggtttatagtttgggtattaacgggtatcgggggcgtcggggcggatagcgggaggtgaacgcggttgtaggatacggtgtaggggcgaggagagttaggttaaaaaaaaattcgtcgatcgaaaagggagaaaaaaaatatcggagaaagaaatcgtagaaa

SEQ ID NO: 5030 - DNA, 675 bp, Artificial Sequence
  chemically treated genomic DNA (Homo sapiens) CpG-island No: 5030
  unsure (225, 256, 313, 342, 350, 586)
tttctacgatttctttctccgatattttttttctcccttttcgatcgacgaatttttttttaacctaactctcctcgcccctacaccgtatcctacaaccgcgttcacctcccgctatccgccccgacgcccccgatacccgttaatacccaaactataaaccgaccgcgaccaccgcccgacgcgaacctaacccccaactctaccgacacttaacccaaaccnaatcccaacgcccaatacgaccgcccgaaanaaccgcgaaaaaaacgacgacgaaaaaaaaaaaaaaaaaaaaaccgaaccgacgacnacgaaaaacccgataaatacgcgaaacgnaacccgcncttacgaatatccgctccgacaccccgaaaacgtaaacaacgactcgacaacgcttcccctcgacgccccgacctcgaataacgaaaactcgacctaaaacgacgaaccccactaaccgaaaccgctaaacaaaaaacacgaaataccgcgacccgacgctcgacgcaaaactcgaaacgacgaaaaaaaactcgcacccgactcccaaaccgacgaccgctaaacctcccgaaanccccgtaaaaaccgctcgaataacaaataccaccgtcccctaccccgcctactttcgcgacgctcctcccgaaaaaccgaacgctcgaa

SEQ ID NO: 5031 - DNA, 675 bp, Artificial Sequence
  chemically treated genomic DNA (Homo sapiens) CpG-island No: 5031
  unsure (225, 256, 313, 342, 350, 586)
tttttgcggttttttttttcggtgtttttttttttttttttcggtcggcgggtttttttttagtttggtttttttcgtttttatatcgtattttgtagtcgcgtttatttttcgttgttcgtttcggcgttttcggtattcgttagtgtttaggttgtgggtcgatcgcgattatcgttcggcgcgagtttgatttttagttttgtcgatatttgatttagattnagttttaacgtttagtgcggtcgttcggggnagtcgcgggagaggcggcggcggggggaggagggagaggagggtcgaatcggcggtnacgggaggttcggtgagtacgcggagcgnggttcgtntttgcgggtgttcgtttcggtatttcggaggcgtaggtagcggttcgatagcgttttttttcggcgtttcggtttcgggtggcggggattcggtttgaggcgacgggttttattgatcggagtcgttgggtagagggtacgggatgtcgcggttcgacgttcggcgtaaggttcggggcggcggggagggattcgtattcgatttttaggtcggcgatcgttgagtttttcgagantttcgtgggggtcgttcgagtgataggtgttatcgttttttatttcgtttgttttcgcggcgtttttttcggggagtcgggcgttcgga

SEQ ID NO: 5032 - DNA, 675 bp, Artificial Sequence
  chemically treated genomic DNA (Homo sapiens) CpG-island No: 5032
  unsure (90, 326, 334, 363, 420, 451)
tccgaacgcccgactccccgaaaaaaacgccgcgaaaacaaacgaaataaaaaacgataacacctatcactcgaacgacccccacgaaantctcgaaaaactcaacgatcgccgacctaaaaatcgaatacgaatccctccccgccgccccgaaccttacgccgaacgtcgaaccgcgacatcccgtaccctctacccaacgactccgatcaataaaacccgtcgcctcaaaccgaatccccgccacccgaaaccgaaacgccgaaaaaaaacgctatcgaaccgctacctacgcctccgaaataccgaaacgaacacccgcaaanacgaaccncgctccgcgtactcaccgaacctcccgtnaccgccgattcgaccctcctctccctcctccccccgccgccgcctctcccgcgactnccccgaacgaccgcactaaacgttaaaactnaatctaaatcaaatatcgacaaaactaaaaatcaaactcgcgccgaacgataatcgcgatcgacccacaacctaaacactaacgaataccgaaaacgccgaaacgaacaacgaaaaataaacgcgactacaaaatacgatataaaaacgaaaaaaaccaaactaaaaaaaaacccgccgaccgaaaaaaaaaaaaaaaaacaccgaaaaaaaaaaccgcaaaaa

SEQ ID NO: 5033 - DNA, 1106 bp, Artificial Sequence
  chemically treated genomic DNA (Homo sapiens) CpG-island No: 5033
  unsure (89, 92, 109..110, 114, 125, 192, 238, 266, 294, 309, 339)
  unsure (762, 895, 932, 978, 1082, 1096)
ttcgtttcggagtcggaggcgtcgggaggtcggacgtcgcgaagttgttagtttaggaatgtgtcgtttaattcgtaggtcgcgggcgnaanagcggcgggcgcgttgnntggntttgcggcggngagcggggtagaggtacggttggcgtagggtaggttgtagcggcgggtcggacgcgacgtcgcgtantttgagagttcgggggcggggcgttagcggttacgattttttttancgcgcgacgcgtttttcgcgcgtcgttntcggtttttttcgttcgtgtttcggcgncgttcggtttttttntacgtttttggttttttttttttttttttnttttttttttttttttttttttttgttttgggaatgtttggaatttcgtatcgcgagtttgtcgcggtattttcgcgcggcggaagagcgcgcgttagtttcggtatatttgggagtcggattttagttttacgtttcgttttttataagtttttttaaggtaaggcgttcgtttatattcggttttttttacgttcggcgggatagttgggttttcgttttttttgcgaatcggttaggagtttcgcgtttcgttttgggagtggggttgtagttgacggggatttcggatcggcggtggttagagcgcggagtaggcgatacgacgagtcgataggtggcgggtttagttttagtatttcgatcgtcgtcggcgcggattttggtggggatggggcgggcgggtcgatttgggggtggggnttagttttttttttttttttttaggggcggcgatcgtcggggttcgtattgtaggtgcgtgggagaaattttgtagggtggggattcggcggttgttggtcggtagtgattggtgggcgcgttcgaggatttntaaggggcgtagttcgggggtagatttttgggtcggngcggggattttacgttttttttattcgtttttttttgttttttatntttagtttcgtcggttgttgtgggagcggcggtcgttttttttttggaggtcgttttttggtattttcggggtcgtaggaaggaagaggaggtagcggtcgganttttggtgggcggntttgaggtga

SEQ ID NO: 5034 - DNA, 1106 bp, Artificial Sequence
  chemically treated genomic DNA (Homo sapiens) CpG-island No: 5034
  unsure (11, 25, 129, 175, 212, 345, 768, 798, 813, 841, 869, 915)
  unsure (982, 993, 997..998, 1015, 1018)
tcacctcaaanccgcccaccaaaantccgaccgctacctcctcttccttcctacgaccccgaaaataccaaaaaacgacctccaaaaaaaaaacgaccgccgctcccacaacaaccgacgaaactaaanataaaaaacaaaaaaaaacgaataaaaaaaacgtaaaatccccgcnccgacccaaaaatctacccccgaactacgccccttanaaatcctcgaacgcgcccaccaatcactaccgaccaacaaccgccgaatccccaccctacaaaatttctcccacgcacctacaatacgaaccccgacgatcgccgcccctaaaaaaaaaaaaaaaaaactaanccccacccccaaatcgacccgcccgccccatccccaccaaaatccgcgccgacgacgatcgaaatactaaaactaaacccgccacctatcgactcgtcgtatcgcctactccgcgctctaaccaccgccgatccgaaatccccgtcaactacaaccccactcccaaaacgaaacgcgaaactcctaaccgattcgcaaaaaaaacgaaaacccaactatcccgccgaacgtaaaaaaaaccgaatataaacgaacgccttaccttaaaaaaacttataaaaaacgaaacgtaaaactaaaatccgactcccaaatataccgaaactaacgcgcgctcttccgccgcgcgaaaataccgcgacaaactcgcgatacgaaattccaaacattcccaaaacaaaaaaaaaaaaaaaaaaaaaaaanaaaaaaaaaaaaaaaaaaccaaaaacgtanaaaaaaaccgaacgncgccgaaacacgaacgaaaaaaaccganaacgacgcgcgaaaaacgcgtcgcgcgntaaaaaaaatcgtaaccgctaacgccccgcccccgaactctcaaantacgcgacgtcgcgtccgacccgccgctacaacctaccctacgccaaccgtacctctaccccgctcnccgccgcaaanccanncaacgcgcccgccgctnttncgcccgcgacctacgaattaaacgacacattcctaaactaacaacttcgcgacgtccgacctcccgacgcctccgactccgaaacgaa

SEQ ID NO: 5035 - DNA, 1106 bp, Artificial Sequence
  chemically treated genomic DNA (Homo sapiens) CpG-island No: 5035
  unsure (11, 25, 129, 175, 212, 345, 768, 798, 813, 841, 869, 915)
  unsure (982, 993, 997..998, 1015, 1018)
ttattttaggntcgtttattagggnttcggtcgttgttttttttttttttttgcggtttcgaggatgttaggagacgatttttaggagagggacggtcgtcgtttttatagtagtcggcggggttgagngtgaaagataaaagggggcgggtaagggaagcgtaagattttcgtntcgatttaagggtttgttttcgggttgcgttttttgngagttttcgagcgcgtttattagttattatcggttagtagtcgtcgggtttttattttgtaaagttttttttacgtatttatagtacggatttcgacgatcgtcgtttttagaagggaggagagaggattganttttatttttaagtcggttcgttcgttttatttttattaaggttcgcgtcggcggcggtcgagatattagggttagattcgttatttgtcggttcgtcgtatcgtttgtttcgcgttttagttatcgtcggttcgaggttttcgttagttataattttatttttaaggcgaggcgcggagtttttagtcggttcgtagaggaggcggggatttagttgtttcgtcgagcgtggaaaggatcgggtgtgagcgagcgttttattttggaggagtttgtaggggacgaggcgtagggttgggattcggtttttaggtgtgtcgaagttggcgcgcgttttttcgtcgcgcgaaagtgtcgcggtaaattcgcggtgcggagttttaggtatttttaggataggagggagggagaagaaggagggnagggagggagggagggagttaggggcgtgnaagggagtcgagcgncgtcgaagtacgagcggaaaaggtcganggcggcgcgcgaggggcgcgtcgcgcgntgggaagggtcgtggtcgttgacgtttcgttttcgggtttttaggntgcgcggcgtcgcgttcggttcgtcgttgtagtttgttttgcgttagtcgtgtttttgtttcgtttntcgtcgtaganttanntagcgcgttcgtcgttnttncgttcgcggtttgcgagttagacggtatatttttgggttagtagtttcgcggcgttcggtttttcggcgttttcgatttcggggcggg

SEQ ID NO: 5036 - DNA, 1106 bp, Artificial Sequence
  chemically treated genomic DNA (Homo sapiens) CpG-island No: 5036
  unsure (89, 92, 109..110, 114, 125, 192, 238, 266, 294, 309, 339)
  unsure (762, 895, 932, 978, 1082, 1096)
cccgccccgaaatcgaaaacgccgaaaaaccgaacgccgcgaaactactaacccaaaaatataccgtctaactcgcaaaccgcgaacgnaanaacgacgaacgcgctanntaantctacgacganaaacgaaacaaaaacacgactaacgcaaaacaaactacaacgacgaaccgaacgcgacgccgcgcancctaaaaacccgaaaacgaaacgtcaacgaccacgacccttcccancgcgcgacgcgcccctcgcgcgccgccntcgaccttttccgctcgtacttcgacgncgctcgactcccttncacgcccctaactccctccctccctccctnccctccttcttctccctccctcctatcctaaaaatacctaaaactccgcaccgcgaatttaccgcgacactttcgcgcgacgaaaaaacgcgcgccaacttcgacacacctaaaaaccgaatcccaaccctacgcctcgtcccctacaaactcctccaaaataaaacgctcgctcacacccgatcctttccacgctcgacgaaacaactaaatccccgcctcctctacgaaccgactaaaaactccgcgcctcgccttaaaaataaaattataactaacgaaaacctcgaaccgacgataactaaaacgcgaaacaaacgatacgacgaaccgacaaataacgaatctaaccctaatatctcgaccgccgccgacgcgaaccttaataaaaataaaacgaacgaaccgacttaaaaataaaantcaatcctctctcctcccttctaaaaacgacgatcgtcgaaatccgtactataaatacgtaaaaaaaactttacaaaataaaaacccgacgactactaaccgataataactaataaacgcgctcgaaaactcncaaaaaacgcaacccgaaaacaaacccttaaatcganacgaaaatcttacgcttcccttacccgcccccttttatctttcacnctcaaccccgccgactactataaaaacgacgaccgtccctctcctaaaaatcgtctcctaacatcctcgaaaccgcaaaaaaaaaaaaaaaacaacgaccgaanccctaataaacgancctaaaataa

SEQ ID NO: 5037 - DNA, 521 bp, Artificial Sequence
  chemically treated genomic DNA (Homo sapiens) CpG-island No: 5037
  unsure (115, 128, 131, 153, 159, 180, 182, 204, 218, 224, 233, 250)
  unsure (256, 298, 331, 340, 350, 370..371, 399, 427, 443, 454)
gttcgatcggtttttttgggaatatggcgatcggtggttatcggattagtagcggtttcggcggtagtattatagattttttggaggagtggaaggcgaaacgcgagaatgatgncgcgttaagtagnaanttttttcgggttcggttttttncgggangggaattagtagtaacgtcgntntgggaagtttttcgcgggattntttgggtatttcgngcggtncgtcgttgnttaacgagtttaataantaattntttcgggcggcgcgtcggtcgtattcgtgttcgttttcggtnttcggggcggtgaattgcgcggttcgcgtacgnttatgttgnatgcggcgtngttttcggttcgcgtcggtnncggaggacgagtttttagtcgtttttgntttcgattatatcgtcgttttagcgtgnacgaggaggagacggnacgattttttnagagaagggtaagagttcgggttttattgtaagaaaaggtaagagtattaaaatgaagtgaaagttt

SEQ ID NO: 5038 - DNA, 521 bp, Artificial Sequence
  chemically treated genomic DNA (Homo sapiens) CpG-island No: 5038
  unsure (68, 79, 95, 123, 151..152, 172, 182, 191, 224, 266, 272, 289)
  unsure (298, 304, 318, 340, 342, 363, 369, 391, 394, 407)
aaactttcacttcattttaatactcttaccttttcttacaataaaacccgaactcttacccttctctnaaaaaatcgtnccgtctcctcctcgtncacgctaaaacgacgatataatcgaaancaaaaacgactaaaaactcgtcctccgnnaccgacgcgaaccgaaaacnacgccgcatncaacataancgtacgcgaaccgcgcaattcaccgccccgaanaccgaaaacgaacacgaatacgaccgacgcgccgcccgaaanaattanttattaaactcgttaancaacgacgnaccgcncgaaatacccaaanaatcccgcgaaaaacttcccanancgacgttactactaattcccntcccgnaaaaaaccgaacccgaaaaaanttnctacttaacgcgncatcattctcgcgtttcgccttccactcctccaaaaaatctataatactaccgccgaaaccgctactaatccgataaccaccgatcgccatattcccaaaaaaaccgatcgaac

SEQ ID NO: 5039 - DNA, 521 bp, Artificial Sequence
  chemically treated genomic DNA (Homo sapiens) CpG-island No: 5039
  unsure (68, 79, 95, 123, 151..152, 172, 182, 191, 224, 266, 272, 289)
  unsure (298, 304, 318, 340, 342, 363, 369, 391, 394, 407)
aagtttttattttattttaatgtttttgtttttttttgtaatggggttcgagtttttgtttttttttngggaagtcgtntcgtttttttttcgtntacgttggggcggcggtgtagtcgaggntagaggcggttgagggttcgtttttcgnnatcgacgcgggtcgggggtngcgtcgtatntagtatggncgtgcgcgagtcgcgtagtttatcgtttcgggnatcgggaacggatacggatgcggtcggcgcgtcgttcggganggttgnttattgagttcgttggntagcggcgngtcgtncggggtgtttaganggtttcgcggggggttttttangncggcgttgttgttgatttttntttcgnggggagtcgggttcgggggganttnttgtttggcgcgntattattttcgcgtttcgttttttatttttttaggaagtttgtggtgttgtcgtcgaggtcgttgttggttcggtagttatcggtcgttatatttttaaaggggtcggtcgggt

SEQ ID NO: 5040 - DNA, 521 bp, Artificial Sequence
  chemically treated genomic DNA (Homo sapiens) CpG-island No: 5040
  unsure (115, 128, 131, 153, 159, 180, 182, 204, 218, 224, 233, 250)
  unsure (256, 298, 331, 340, 350, 370..371, 399, 427, 443, 454)
acccgaccgacccctttaaaaatataacgaccgataactaccgaaccaacaacgacctcgacgacaacaccacaaacttcctaaaaaaataaaaaacgaaacgcgaaaataatancgcgccaaacaanaantccccccgaacccgactccccncgaaanaaaaatcaacaacaacgccgncntaaaaaaccccccgcgaaaccntctaaacaccccgnacgacncgccgctanccaacgaactcaataancaaccntcccgaacgacgcgccgaccgcatccgtatccgttcccgatncccgaaacgataaactacgcgactcgcgcacgnccatactanatacgacgcnacccccgacccgcgtcgatnncgaaaaacgaaccctcaaccgcctctancctcgactacaccgccgccccaacgtanacgaaaaaaaaacganacgacttcccnaaaaaaaaacaaaaactcgaaccccattacaaaaaaaaacaaaaacattaaaataaaataaaaactt

SEQ ID NO: 5041 - DNA, 523 bp, Artificial Sequence
  chemically treated genomic DNA (Homo sapiens) CpG-island No: 5041
tttggtgtcgtttttagtcgggcgttcggtcgacggcggttgcgtttcgagtttttgcgttaaagaaagtacgggttttcggacgtcgggttttttcgttcgtcgtttttcggcgtttcgtttcgtagaacgtgtaatttcgagattcgggttttgtagttatttttagaattggaggttttcgtttttttaggtcggttttttttcgtttcgttttcgggttcgttttcgtttagttcgcggggtggggtttcggcgagttttagttggtggcgtagagttcggttgtgtttcgaagtgatttttttagttacgtcgttttttcggtttcgggaagggtggggcgtcgagtagggtatttcgggtcgttcgcggcgttttttgcggtgggcggaggatattgaatttatgtggtgcggattattcggtggtttcgtggtaaaaattcggtcgtttcgtaaagtgtaaagaagaattttaaaatttttcgggtagataggtatcgtggtttttattttatata

SEQ ID NO: 5042 - DNA, 523 bp, Artificial Sequence
  chemically treated genomic DNA (Homo sapiens) CpG-island No: 5042
tatataaaataaaaaccacgatacctatctacccgaaaaattttaaaattcttctttacactttacgaaacgaccgaatttttaccacgaaaccaccgaataatccgcaccacataaattcaatatcctccgcccaccgcaaaaaacgccgcgaacgacccgaaataccctactcgacgccccacccttcccgaaaccgaaaaaacgacgtaactaaaaaaatcacttcgaaacacaaccgaactctacgccaccaactaaaactcgccgaaaccccaccccgcgaactaaacgaaaacgaacccgaaaacgaaacgaaaaaaaaccgacctaaaaaaacgaaaacctccaattctaaaaataactacaaaacccgaatctcgaaattacacgttctacgaaacgaaacgccgaaaaacgacgaacgaaaaaacccgacgtccgaaaacccgtactttctttaacgcaaaaactcgaaacgcaaccgccgtcgaccgaacgcccgactaaaaacgacaccaaa

SEQ ID NO: 5043 - DNA, 523 bp, Artificial Sequence
  chemically treated genomic DNA (Homo sapiens) CpG-island No: 5043
tgtataaaatgagggttacggtgtttgtttgttcgagaggttttaaagtttttttttatattttgcggagcggtcggatttttattacgaagttatcgagtagttcgtattatataggtttagtatttttcgtttatcgtaggaaacgtcgcggacggttcggggtgttttgttcggcgttttatttttttcggggtcggggaagcggcgtgattaggaaagttatttcggaatatagtcggattttgcgttattagttggagttcgtcgggattttatttcgcgggttgggcgggggcggattcgggggcggggcggggaggggtcggtttggaaaggcggaagtttttagttttaggggtggttgtagaattcggatttcggagttatacgttttacggagcggggcgtcgggagacggcgggcgagaaaattcggcgttcggaagttcgtgttttttttgacgtaagggttcgagacgtagtcgtcgtcggtcgagcgttcggttagaagcgatattaga

SEQ ID NO: 5044 - DNA, 523 bp, Artificial Sequence
  chemically treated genomic DNA (Homo sapiens) CpG-island No: 5044
tctaatatcgcttctaaccgaacgctcgaccgacgacgactacgtctcgaacccttacgtcaaaaaaaacacgaacttccgaacgccgaattttctcgcccgccgtctcccgacgccccgctccgtaaaacgtataactccgaaatccgaattctacaaccacccctaaaactaaaaacttccgcctttccaaaccgacccctccccgccccgcccccgaatccgcccccgcccaacccgcgaaataaaatcccgacgaactccaactaataacgcaaaatccgactatattccgaaataactttcctaatcacgccgcttccccgaccccgaaaaaaataaaacgccgaacaaaacaccccgaaccgtccgcgacgtttcctacgataaacgaaaaatactaaacctatataatacgaactactcgataacttcgtaataaaaatccgaccgctccgcaaaatataaaaaaaaactttaaaacctctcgaacaaacaaacaccgtaaccctcattttataca

SEQ ID NO: 5045 - DNA, 910 bp, Artificial Sequence
  chemically treated genomic DNA (Homo sapiens) CpG-island No: 5045
tcgcgatgttagttacgttttgtaggtcgggttttttttaggttattatagcggttggcggagggagcgcgcgttttgttggtttggagggggcgggggtcgtggcggttttaaagcgtttagtttaggcgtcgcggggtggggcggttttggcggttgcggggcgtagggcgtagcggttaagcggggttttcggaagtatagttggggtgtttttatttacgattggtcgcgcgttttttttttttcgcgttagggaaggagcggttgcggttttcgtcgggcggaggtacggggggcgtacgaggggcggaggggatcgcgtcgcggaggagatggcgcggtacgtgcggtgacggtattcgagttttgagggttttagtttcgcgtttcgcgttttcgggatagtatggagcgttcggagttcgagttgattcggtagagttggcgggtagtgagtcgtagttcgttggagtacggtatcgttttgtttgttaggtgagggttatacgagcgttcggggatgcgggtggaggttgtttcggcgggaaaggggttacgcggtaggatcggtttcgaaggagggaaaattggtcgttgtcggggcgttggggcgtttgttagatgtgcgttagaggagcggggcgcggcgacgggtggtatagtttttttgtttttttttcgatcgtgggcgtttgttgttaattagcgtcgtatattatttttttagcggggtttatcgggtcgggcgggattttttttcgcggatttttttatatttgggcgggtggattttcgtttttgcgcggcgtttttatttcgttttgtgttttttgcgttttttttaggtagcgattgtaggggtgtatttcgttgtcggtattagggtattggggtgtttcgagagtcg

SEQ ID NO: 5046 - DNA, 910 bp, Artificial Sequence
  chemically treated genomic DNA (Homo sapiens) CpG-island No: 5046
cgactctcgaaacaccccaataccctaataccgacaacgaaatacacccctacaatcgctacctaaaaaaaacgcaaaaaacacaaaacgaaataaaaacgccgcgcaaaaacgaaaatccacccgcccaaatataaaaaaatccgcgaaaaaaaatcccgcccgacccgataaaccccgctaaaaaaataatatacgacgctaattaacaacaaacgcccacgatcgaaaaaaaaacaaaaaaactataccacccgtcgccgcgccccgctcctctaacgcacatctaacaaacgccccaacgccccgacaacgaccaattttccctccttcgaaaccgatcctaccgcgtaacccctttcccgccgaaacaacctccacccgcatccccgaacgctcgtataaccctcacctaacaaacaaaacgataccgtactccaacgaactacgactcactacccgccaactctaccgaatcaactcgaactccgaacgctccatactatcccgaaaacgcgaaacgcgaaactaaaaccctcaaaactcgaataccgtcaccgcacgtaccgcgccatctcctccgcgacgcgatcccctccgcccctcgtacgccccccgtacctccgcccgacgaaaaccgcaaccgctccttccctaacgcgaaaaaaaaaaaacgcgcgaccaatcgtaaataaaaacaccccaactatacttccgaaaaccccgcttaaccgctacgccctacgccccgcaaccgccaaaaccgccccaccccgcgacgcctaaactaaacgctttaaaaccgccacgacccccgccccctccaaaccaacaaaacgcgcgctccctccgccaaccgctataataacctaaaaaaaacccgacctacaaaacgtaactaacatcgcga

SEQ ID NO: 5047 - DNA, 910 bp, Artificial Sequence
  chemically treated genomic DNA (Homo sapiens) CpG-island No: 5047
cggttttcggggtattttagtattttgatatcggtagcggggtgtatttttgtagtcgttatttaaggaagacgtaggaggtataaggcggggtggaggcgtcgcgtagggacggaggtttattcgtttagatgtggggagattcgcgggaggggatttcgttcggttcggtgagtttcgttgggagagtggtgtgcggcgttggttggtaataggcgtttacggtcgagagagaggtagaggggttgtgttattcgtcgtcgcgtttcgtttttttggcgtatatttggtaggcgttttagcgtttcggtagcggttagttttttttttttcggggtcggttttgtcgcgtgatttttttttcgtcgaggtagtttttattcgtattttcgggcgttcgtgtagtttttatttggtaaataggacggtgtcgtgttttagcgggttgcggtttattgttcgttagttttgtcggattagttcgggtttcgggcgttttatgttgtttcggggacgcggagcgcggggttgggatttttagggttcgggtgtcgttatcgtacgtgtcgcgttatttttttcgcgacgcggtttttttcgtttttcgtacgtttttcgtgttttcgttcggcgggggtcgtagtcgttttttttttggcgcgggagagaaaaggcgcgcggttagtcgtaggtggagatattttagttgtgttttcggggatttcgtttggtcgttgcgttttgcgtttcgtagtcgttagagtcgttttatttcgcgacgtttgggttgggcgttttaaagtcgttacggttttcgttttttttaggttagtaaggcgcgcgtttttttcgttagtcgttatggtggtttgggaaaggttcggtttgtagaacgtaattgatatcgcgg

SEQ ID NO: 5048 - DNA, 910 bp, Artificial Sequence
  chemically treated genomic DNA (Homo sapiens) CpG-island No: 5048
ccgcgatatcaattacgttctacaaaccgaacctttcccaaaccaccataacgactaacgaaaaaaacgcgcgccttactaacctaaaaaaaacgaaaaccgtaacgactttaaaacgcccaacccaaacgtcgcgaaataaaacgactctaacgactacgaaacgcaaaacgcaacgaccaaacgaaatccccgaaaacacaactaaaatatctccacctacgactaaccgcgcgccttttctctcccgcgccaaaaaaaaaacgactacgacccccgccgaacgaaaacacgaaaaacgtacgaaaaacgaaaaaaaccgcgtcgcgaaaaaaataacgcgacacgtacgataacgacacccgaaccctaaaaatcccaaccccgcgctccgcgtccccgaaacaacataaaacgcccgaaacccgaactaatccgacaaaactaacgaacaataaaccgcaacccgctaaaacacgacaccgtcctatttaccaaataaaaactacacgaacgcccgaaaatacgaataaaaactacctcgacgaaaaaaaaatcacgcgacaaaaccgaccccgaaaaaaaaaaaactaaccgctaccgaaacgctaaaacgcctaccaaatatacgccaaaaaaacgaaacgcgacgacgaataacacaacccctctacctctctctcgaccgtaaacgcctattaccaaccaacgccgcacaccactctcccaacgaaactcaccgaaccgaacgaaatcccctcccgcgaatctccccacatctaaacgaataaacctccgtccctacgcgacgcctccaccccgccttatacctcctacgtcttccttaaataacgactacaaaaatacaccccgctaccgatatcaaaatactaaaataccccgaaaaccg

SEQ ID NO: 5049 - DNA, 991 bp, Artificial Sequence
  chemically treated genomic DNA (Homo sapiens) CpG-island No: 5049
  unsure (35, 61, 98, 111, 129, 277, 290, 297, 311, 321, 340, 532, 611)
  unsure (626)
cggtagtggcgcgtgtggttagtttcgcgcgcgtngtcgcgagggtcggggtagggcgtgnggtttatttcggtcgagtcgttatttttttttcgggncggcggtaggttncgtttcggcgtttttagngattcggttttcgtcgttcggtgttttcgaaggacgagagttaaaaggtttagagttcggaagtcgggcgttcgtttttttttcgttttcggttcgttttcggtttttttttttttcgttaagtcgggacgttagtagtttcggggangttaggcggcggncgttttngtgttcgggcgggntgggttcgtnttttcgcgggcggtcggangacgtgcgggcgcgggggtttttgggtttcgggtattgcggggggttgcgggttcggcgttcgggaaaggcgggttatgggcgcgggtgcgggcgttttagtcggtcgcgatcgcggggtgagttttgtttttcggcgttttagtaggattttcgcgcgggttgcgagtagggtgttttttttgtcgcgggntaaataagtttgtgtagacgcggttgggagcgcggcggggttgtatttgtttcggttgtagggcgggtttgtcgggggntattttttcgggggnttcggggcggttcggtcggggtaggggagagtgagcgggtgcgtgtaggggttgtgggggggcggggacggcgttcggcgcggtcgggatggggtgggggtgcgcgaggcgtcgtacgagtcgcgttttttttcggagttttgagagttcgttcgttattcgggagggcgttgcggttggtttcggggagggggcgagggtagggtgtggggtgcgtatagttttttttttaggcggcgacgtttatttagaagtagttttttttcgtttcgttattaagagaggttttcggttagcggagggtttgtttcgttttttggtgaatttgaatagaggtagaggtaaaagtaaaacgtatgtatttt

SEQ ID NO: 5050 - DNA, 991 bp, Artificial Sequence
  chemically treated genomic DNA (Homo sapiens) CpG-island No: 5050
  unsure (366, 381, 460, 652, 671, 681, 695, 702, 715, 863, 881, 894)
  unsure (931, 957)
aaaatacatacgttttacttttacctctacctctattcaaattcaccaaaaaacgaaacaaaccctccgctaaccgaaaacctctcttaataacgaaacgaaaaaaaactacttctaaataaacgtcgccgcctaaaaaaaaaactatacgcaccccacaccctaccctcgccccctccccgaaaccaaccgcaacgccctcccgaataacgaacgaactctcaaaactccgaaaaaaaacgcgactcgtacgacgcctcgcgcacccccaccccatcccgaccgcgccgaacgccgtccccgcccccccacaacccctacacgcacccgctcactctcccctaccccgaccgaaccgccccgaancccccgaaaaaatancccccgacaaacccgccctacaaccgaaacaaatacaaccccgccgcgctcccaaccgcgtctacacaaacttatttancccgcgacaaaaaaaacaccctactcgcaacccgcgcgaaaatcctactaaaacgccgaaaaacaaaactcaccccgcgatcgcgaccgactaaaacgcccgcacccgcgcccataacccgcctttcccgaacgccgaacccgcaaccccccgcaatacccgaaacccaaaaacccccgcgcccgcacgtcntccgaccgcccgcgaaaanacgaacccancccgcccgaacacnaaaacgnccgccgcctaacntccccgaaactactaacgtcccgacttaacgaaaaaaaaaaaaaccgaaaacgaaccgaaaacgaaaaaaaaacgaacgcccgacttccgaactctaaaccttttaactctcgtccttcgaaaacaccgaacgacgaaaaccgaatcnctaaaaacgccgaaacgnaacctaccgccgncccgaaaaaaaaataacgactcgaccgaaataaaccncacgccctaccccgaccctcgcgacnacgcgcgcgaaactaaccacacgcgccactaccg

SEQ ID NO: 5051 - DNA, 991 bp, Artificial Sequence
  chemically treated genomic DNA (Homo sapiens) CpG-island No: 5051
  unsure (366, 381, 460, 652, 671, 681, 695, 702, 715, 863, 881, 894)
  unsure (931, 957)
aaaatatatacgttttgtttttgtttttgtttttgtttaagtttattaagagacggagtaaatttttcgttgatcggaagttttttttggtagcggaacgagagggagttgtttttgggtaaacgtcgtcgtttaggagggaagttgtgcgtattttatattttgttttcgtttttttttcgggattaatcgtagcgttttttcgggtgacggacgggtttttaggatttcggagggggacgcggttcgtgcggcgtttcgcgtatttttattttatttcggtcgcgtcgagcgtcgttttcgtttttttataatttttgtacgtattcgtttatttttttttgtttcggtcgagtcgtttcgggnttttcgggaaggtgnttttcggtaagttcgttttgtagtcggagtaggtgtagtttcgtcgcgtttttaatcgcgtttgtataaatttgtttgnttcgcggtaaggggaatattttgttcgtagttcgcgcgggggttttgttggagcgtcgagagataggatttatttcgcgatcgcggtcggttggggcgttcgtattcgcgtttatggttcgtttttttcgggcgtcgagttcgtagtttttcgtagtgttcggagtttagaagttttcgcgttcgtacgttnttcggtcgttcgcgggaangcggatttanttcgttcgggtatnagggcgntcgtcgtttggtnttttcggggttgttggcgtttcggtttaacgggggggaggagggtcgggggcggatcgagggcggggggggggcgggcgttcggttttcgggttttgggttttttagttttcgtttttcggggatatcgggcggcgggggtcgggttnttagaggcgtcggagcgngatttgtcgtcgnttcgggggaggggtggcggttcggtcggagtgggttntacgttttgtttcggttttcgcgatnacgcgcgcggggttggttatacgcgttattgtcg

SEQ ID NO: 5052 - DNA, 991 bp, Artificial Sequence
  chemically treated genomic DNA (Homo sapiens) CpG-island No: 5052
  unsure (35, 61, 98, 111, 129, 277, 290, 297, 311, 321, 340, 532, 611)
  unsure (626)
cgacaataacgcgtataaccaaccccgcgcgcgtnatcgcgaaaaccgaaacaaaacgtanaacccactccgaccgaaccgccacccctcccccgaancgacgacaaatcncgctccgacgcctctaanaacccgacccccgccgcccgatatccccgaaaaacgaaaactaaaaaacccaaaacccgaaaaccgaacgcccgccccccccccgccctcgatccgcccccgaccctcctcccccccgttaaaccgaaacgccaacaaccccgaaaanaccaaacgacgancgccctnatacccgaacgaantaaatccgcnttcccgcgaacgaccgaanaacgtacgaacgcgaaaacttctaaactccgaacactacgaaaaactacgaactcgacgcccgaaaaaaacgaaccataaacgcgaatacgaacgccccaaccgaccgcgatcgcgaaataaatcctatctctcgacgctccaacaaaacccccgcgcgaactacgaacaaaatattccccttaccgcgaancaaacaaatttatacaaacgcgattaaaaacgcgacgaaactacacctactccgactacaaaacgaacttaccgaaaancaccttcccgaaaancccgaaacgactcgaccgaaacaaaaaaaaataaacgaatacgtacaaaaattataaaaaaacgaaaacgacgctcgacgcgaccgaaataaaataaaaatacgcgaaacgccgcacgaaccgcgtccccctccgaaatcctaaaaacccgtccgtcacccgaaaaaacgctacgattaatcccgaaaaaaaaacgaaaacaaaatataaaatacgcacaacttccctcctaaacgacgacgtttacccaaaaacaactccctctcgttccgctaccaaaaaaaacttccgatcaacgaaaaatttactccgtctcttaataaacttaaacaaaaacaaaaacaaaaacaaaacgtatatatttt

SEQ ID NO: 5053 - DNA, 1153 bp, Artificial Sequence
  chemically treated genomic DNA (Homo sapiens) CpG-island No: 5053
ttacgaagtttatttaggattgaggaagtaaaaacgggataattagaggcgcgttcgatattttagaataagtacggattattttgggttaggaatagtcgcggggtagttttggcgtgagtgtgaggggtagagcgcgggcgttataaattgcggggtcggcggtcgatagggagaggtcgcgggtacgtttttttcgtaaacgttcggaaagttcgagggcggtttgcgcgtttaggagatttggtttaggcgtaggttaggcgcggagtggggaatttcgcggtagggatttagcggtgtttgttcggcggtttcggcgtttaggtgcgcgtttaggacgagtagcgttttttggtcgcggcgtcggtataggtaattttataattttaagcggcgtattttaacgataagaattatattttaggattttagtttttcgttcgttttagtcggcgtcgcgagtcggaggcggtgggggaagggcgtttggagggggggtggggttgcggttgcggcgcgattttcgttagtcgtatagatttggtttcggattttcgggtcgttttgagtggttgtttatgtttggtcgattcgggtattagtcggtttgtcggtttcggatcgggtgtttatcgtgtcgagttcgcgttggtttcggttggcgaggcggttgcgttcggcgggttcgttttagttaaagaaaggatcgggcgttttttagtttttagtagttgtcggcggagtcgttgttttttcgcgttcgtgggtttcgtttttttatttgtattaagttcgttttcgcggttcgttttttttatttgtattttgtcggattattttaattgtatatcgttcgttaggcgcggttcgttttcgttatttgtatattgttcgtttattttatttgtattttttttttggttgttagaaggtttcgcgtcgtgggcgggacgtatcggttgatcggttgtaggttttcgttcgcggatgttgagaatcgtagttgtataaggtaggttggaaaaattttattgcggtgaggcggaagtttagtgtcgtcggaaaggtaaaattttgttcgtgtgaagttagatttattaggataagagaaatttaggattagcgtaggataggcgtttaataagtattt

SEQ ID NO: 5054 - DNA, 1153 bp, Artificial Sequence
  chemically treated genomic DNA (Homo sapiens) CpG-island No: 5054
aaatacttattaaacgcctatcctacgctaatcctaaatttctcttatcctaataaatctaacttcacacgaacaaaattttacctttccgacgacactaaacttccgcctcaccgcaataaaatttttccaacctaccttatacaactacgattctcaacatccgcgaacgaaaacctacaaccgatcaaccgatacgtcccgcccacgacgcgaaaccttctaacaaccaaaaaaaaaatacaaataaaataaacgaacaatatacaaataacgaaaacgaaccgcgcctaacgaacgatatacaattaaaataatccgacaaaatacaaataaaaaaaacgaaccgcgaaaacgaacttaatacaaataaaaaaacgaaacccacgaacgcgaaaaaacaacgactccgccgacaactactaaaaactaaaaaacgcccgatcctttctttaactaaaacgaacccgccgaacgcaaccgcctcgccaaccgaaaccaacgcgaactcgacacgataaacacccgatccgaaaccgacaaaccgactaatacccgaatcgaccaaacataaacaaccactcaaaacgacccgaaaatccgaaaccaaatctatacgactaacgaaaatcgcgccgcaaccgcaaccccaccccccctccaaacgcccttcccccaccgcctccgactcgcgacgccgactaaaacgaacgaaaaactaaaatcctaaaatataattcttatcgttaaaatacgccgcttaaaattataaaattacctataccgacgccgcgaccaaaaaacgctactcgtcctaaacgcgcacctaaacgccgaaaccgccgaacaaacaccgctaaatccctaccgcgaaattccccactccgcgcctaacctacgcctaaaccaaatctcctaaacgcgcaaaccgccctcgaactttccgaacgtttacgaaaaaaacgtacccgcgacctctccctatcgaccgccgaccccgcaatttataacgcccgcgctctacccctcacactcacgccaaaactaccccgcgactattcctaacccaaaataatccgtacttattctaaaatatcgaacgcgcctctaattatcccgtttttacttcctcaatcctaaataaacttcgtaa

SEQ ID NO: 5055 - DNA, 1153 bp, Artificial Sequence
  chemically treated genomic DNA (Homo sapiens) CpG-island No: 5055
aaatgtttattaagcgtttgttttgcgttagttttaggttttttttgttttgataggtttagttttatacgagtaggattttgttttttcggcggtattaggttttcgttttatcgtagtggggtttttttagtttattttgtgtagttgcggtttttagtattcgcgggcggaggtttgtagtcggttagtcggtgcgtttcgtttacggcgcggggttttttggtagttaagaaggaaatatagatgaggtgggcggatagtatgtagatgacgggggcgggtcgcgtttggcgggcggtgtgtagttgaggtggttcggtaggatgtagatgaagggggcgggtcgcgagggcgggtttgatgtagatgagggggcggggtttacgggcgcgggagagtagcggtttcgtcggtagttgttgggaattggaaggcgttcggttttttttttgattggagcggattcgtcggacgtaatcgtttcgttagtcggagttagcgcgagttcggtacggtggatattcggttcgaggtcggtaagtcggttggtgttcgagtcggttaagtatgggtaattatttaggacggttcgaggattcggaattaggtttgtgcggttggcgggggtcgcgtcgtagtcgtaattttattttttttttaggcgttttttttttatcgttttcggttcgcggcgtcgattggggcgagcgaaaggttaaggttttggggtgtgatttttgtcgttggaatgcgtcgtttgggattgtgaaattatttgtgtcgacgtcgcgattagaaaacgttgttcgttttgaacgcgtatttgggcgtcggggtcgtcgggtaggtatcgttgggtttttgtcgcggggttttttatttcgcgtttggtttgcgtttagattaggttttttgagcgcgtaggtcgttttcggatttttcgggcgtttgcggggagggcgtgttcgcggtttttttttgtcggtcgtcggtttcgtagtttgtggcgttcgcgttttgttttttatatttacgttagggttgtttcgcgattgtttttaatttagaatagttcgtgtttgttttggggtgtcgggcgcgtttttggttatttcgtttttatttttttagttttgagtgagtttcgtgg

SEQ ID NO: 5056 - DNA, 1153 bp, Artificial Sequence
  chemically treated genomic DNA (Homo sapiens) CpG-island No: 5056
ccacgaaactcactcaaaactaaaaaaataaaaacgaaataaccaaaaacgcgcccgacaccccaaaacaaacacgaactattctaaattaaaaacaatcgcgaaacaaccctaacgtaaatataaaaaacaaaacgcgaacgccacaaactacgaaaccgacgaccgacaaaaaaaaaccgcgaacacgccctccccgcaaacgcccgaaaaatccgaaaacgacctacgcgctcaaaaaacctaatctaaacgcaaaccaaacgcgaaataaaaaaccccgcgacaaaaacccaacgatacctacccgacgaccccgacgcccaaatacgcgttcaaaacgaacaacgttttctaatcgcgacgtcgacacaaataatttcacaatcccaaacgacgcattccaacgacaaaaatcacaccccaaaaccttaacctttcgctcgccccaatcgacgccgcgaaccgaaaacgataaaaaaaaaacgcctaaaaaaaaaataaaattacgactacgacgcgacccccgccaaccgcacaaacctaattccgaatcctcgaaccgtcctaaataattacccatacttaaccgactcgaacaccaaccgacttaccgacctcgaaccgaatatccaccgtaccgaactcgcgctaactccgactaacgaaacgattacgtccgacgaatccgctccaatcaaaaaaaaaaccgaacgccttccaattcccaacaactaccgacgaaaccgctactctcccgcgcccgtaaaccccgccccctcatctacatcaaacccgccctcgcgacccgcccccttcatctacatcctaccgaaccacctcaactacacaccgcccgccaaacgcgacccgcccccgtcatctacatactatccgcccacctcatctatatttccttcttaactaccaaaaaaccccgcgccgtaaacgaaacgcaccgactaaccgactacaaacctccgcccgcgaatactaaaaaccgcaactacacaaaataaactaaaaaaaccccactacgataaaacgaaaacctaataccgccgaaaaaacaaaatcctactcgtataaaactaaacctatcaaaacaaaaaaaacctaaaactaacgcaaaacaaacgcttaataaacattt

SEQ ID NO: 5057 - DNA, 925 bp, Artificial Sequence
  chemically treated genomic DNA (Homo sapiens) CpG-island No: 5057
attagagcgtcgcgttggagttcgaggcgtcgtcgcgaattgttggcgtttcgggttcgcggtgggtcgttcggggacggtttcgagttggatttcgacgtgttgtagcgtttcgagcgggttcggttgagcgagaatattcggttggttattcgttacgtcgtgcgtatttttcgggagtatttgagcgagaaggcgtagagttcggatttcgagattatggataagggggcgttgtgtcgcgtgttgcgttttttttatgtcgaggttcgttttaaaagcggttagttttatagtaagtcgtcgtttattagtattcgtagtttttttaatcgttattttaatgagttttcgtattgtcgtacgttcgattttattaaggatttcgagttgcgtagcgttaatttgacgttggtcgcggttattcgtaagttcgaggagtagggcgtcgggtcggtggtgtagaagtaagttattacgcgcgtcgatttgcgtaagttgtatatttttagcgtttttagtattaatacgtttttcggttgtttaataaggtttggttcgagacgtgtatgtatttttgtattcgcggtcgcgagaattagcgtgagttggaggaggatttttttgggttggttatggacgaggacggtcgtaagttcgtttattttaagtttttcgggttttattataagtcgcgttcgtcgtcgtggagtaagaagcgcgtcgagagtagcgacgaggagaatttgtttcgtatgtatgagacgggtatcgagttttgtttttacgttagtttcgttaagtatttgtcgaaacgtaattttttttgtaaggcgtttttttagcggtttcgggattattgtagcgagggcgatgtgatttggtacgagaataaagttatcggtaagaatttgttaggtattcg

SEQ ID NO: 5058 - DNA, 925 bp, Artificial Sequence
  chemically treated genomic DNA (Homo sapiens) CpG-island No: 5058
cgaatacctaacaaattcttaccgataactttattctcgtaccaaatcacatcgccctcgctacaataatcccgaaaccgctaaaaaaacgccttacaaaaaaaattacgtttcgacaaatacttaacgaaactaacgtaaaaacaaaactcgatacccgtctcatacatacgaaacaaattctcctcgtcgctactctcgacgcgcttcttactccacgacgacgaacgcgacttataataaaacccgaaaaacttaaaataaacgaacttacgaccgtcctcgtccataaccaacccaaaaaaatcctcctccaactcacgctaattctcgcgaccgcgaatacaaaaatacatacacgtctcgaaccaaaccttattaaacaaccgaaaaacgtattaatactaaaaacgctaaaaatatacaacttacgcaaatcgacgcgcgtaataacttacttctacaccaccgacccgacgccctactcctcgaacttacgaataaccgcgaccaacgtcaaattaacgctacgcaactcgaaatccttaataaaatcgaacgtacgacaatacgaaaactcattaaaataacgattaaaaaaactacgaatactaataaacgacgacttactataaaactaaccgcttttaaaacgaacctcgacataaaaaaaacgcaacacgcgacacaacgcccccttatccataatctcgaaatccgaactctacgccttctcgctcaaatactcccgaaaaatacgcacgacgtaacgaataaccaaccgaatattctcgctcaaccgaacccgctcgaaacgctacaacacgtcgaaatccaactcgaaaccgtccccgaacgacccaccgcgaacccgaaacgccaacaattcgcgacgacgcctcgaactccaacgcgacgctctaat

SEQ ID NO: 5059 - DNA, 925 bp, Artificial Sequence
  chemically treated genomic DNA (Homo sapiens) CpG-island No: 5059
cgagtgtttagtaagtttttgtcgatggttttgttttcgtattaggttatatcgttttcgttgtagtggtttcggggtcgttggaagaacgttttgtagagagggttgcgtttcgataggtatttgacgaagttggcgtaggggtagaattcggtgttcgttttatatatgcggggtaagtttttttcgtcgttgttttcggcgcgttttttgttttacgacgacgagcgcgatttgtggtagggttcgagggatttgaagtagacgaatttgcgatcgttttcgtttatggttagtttaaaagagtttttttttaatttacgttggttttcgcggtcgcgggtatagaagtatatgtacgtttcgaattagattttgttgagtagtcgaagggcgtgttggtgttgaagacgttggaggtgtatagtttgcgtaggtcggcgcgcgtgatggtttgtttttgtattatcggttcggcgttttgtttttcgagtttgcggatgatcgcggttagcgttaggttggcgttgcgtagttcggggtttttggtgaggtcgagcgtgcggtagtacgggggtttattgaggtagcggttgagggagttgcggatgttgatgagcgacgatttgttgtagagttggtcgtttttggagcgggtttcggtatagaaggagcgtagtacgcggtatagcgtttttttgtttatggtttcgaagttcgggttttgcgttttttcgtttaggtattttcggaagatgcgtacggcgtagcgggtggttagtcgggtgttttcgtttagtcgggttcgttcggggcgttgtagtacgtcggggtttagttcggagtcgttttcgggcggtttatcgcgggttcggggcgttagtagttcgcggcggcgtttcgggttttagcgcggcgttttggt

SEQ ID NO: 5060 - DNA, 925 bp, Artificial Sequence
  chemically treated genomic DNA (Homo sapiens) CpG-island No: 5060
accaaaacgccgcgctaaaacccgaaacgccgccgcgaactactaacgccccgaacccgcgataaaccgcccgaaaacgactccgaactaaaccccgacgtactacaacgccccgaacgaacccgactaaacgaaaacacccgactaaccacccgctacgccgtacgcatcttccgaaaatacctaaacgaaaaaacgcaaaacccgaacttcgaaaccataaacaaaaaaacgctataccgcgtactacgctccttctataccgaaacccgctccaaaaacgaccaactctacaacaaatcgtcgctcatcaacatccgcaactccctcaaccgctacctcaataaacccccgtactaccgcacgctcgacctcaccaaaaaccccgaactacgcaacgccaacctaacgctaaccgcgatcatccgcaaactcgaaaaacaaaacgccgaaccgataatacaaaaacaaaccatcacgcgcgccgacctacgcaaactatacacctccaacgtcttcaacaccaacacgcccttcgactactcaacaaaatctaattcgaaacgtacatatacttctatacccgcgaccgcgaaaaccaacgtaaattaaaaaaaaactcttttaaactaaccataaacgaaaacgatcgcaaattcgtctacttcaaatccctcgaaccctaccacaaatcgcgctcgtcgtcgtaaaacaaaaaacgcgccgaaaacaacgacgaaaaaaacttaccccgcatatataaaacgaacaccgaattctacccctacgccaacttcgtcaaatacctatcgaaacgcaaccctctctacaaaacgttcttccaacgaccccgaaaccactacaacgaaaacgatataacctaatacgaaaacaaaaccatcgacaaaaacttactaaacactcg

SEQ ID NO: 5061 - DNA, 656 bp, Artificial Sequence
  chemically treated genomic DNA (Homo sapiens) CpG-island No: 5061
  unsure (198, 384)
cggagttgcggaggttagacgggggattttagttgagggggtcggcgtcggagaatttgcgacgtcggatcgggacggcgagaaatagtttgtaatgtcggggtgacggatagcgagcggtagcgattgaaagtaatacgggtaacgatatgcgaggagtcgtggcgcggcgtcgggcgcgggattgatagttttagntttcgtttttagattttcggtttcgttttttttttggacgcgcggtttgtttcgtttttttcgtttatcgtcggggttaaattgggtttatcggttcggacggcggggatgttcgttttcgattggttttaaaggtgttcgtttcgtttatttttcgttttttttttggtagggaagaaagcgcgntgcgtcgtggttgcgggagggtagcggttacgttgagcgtcggcgttgttggttttcgatttttggtattcgggtatcgtttttttatttcgggtagttgggatttcgggatgatttaaggaataaggatttagacgtagattttacggtgaattggttttatttacgtgtgaacgaacgtttaggagaaaattaaattcgaatgggttaggttttaattagaggagattttaaaattgtgatttgtattagaaaacgaattagttagtcgg

SEQ ID NO: 5062 - DNA, 656 bp, Artificial Sequence
  chemically treated genomic DNA (Homo sapiens) CpG-island No: 5062
  unsure (273, 459)
ccgactaactaattcgttttctaatacaaatcacaattttaaaatctcctctaattaaaacctaacccattcgaatttaattttctcctaaacgttcgttcacacgtaaataaaaccaattcaccgtaaaatctacgtctaaatccttattccttaaatcatcccgaaatcccaactacccgaaataaaaaaacgatacccgaataccaaaaatcgaaaaccaacaacgccgacgctcaacgtaaccgctaccctcccgcaaccacgacgcancgcgctttcttccctaccaaaaaaaaaacgaaaaataaacgaaacgaacacctttaaaaccaatcgaaaacgaacatccccgccgtccgaaccgataaacccaatttaaccccgacgataaacgaaaaaaacgaaacaaaccgcgcgtccaaaaaaaaaacgaaaccgaaaatctaaaaacgaaanctaaaactatcaatcccgcgcccgacgccgcgccacgactcctcgcatatcgttacccgtattactttcaatcgctaccgctcgctatccgtcaccccgacattacaaactatttctcgccgtcccgatccgacgtcgcaaattctccgacgccgaccccctcaactaaaatcccccgtctaacctccgcaactccg

SEQ ID NO: 5063 - DNA, 656 bp, Artificial Sequence
  chemically treated genomic DNA (Homo sapiens) CpG-island No: 5063
  unsure (273, 459)
tcggttggttggttcgttttttgatgtagattatagttttggggttttttttggttagagtttggtttattcgggtttggtttttttttggacgttcgtttatacgtgaataaggttaatttatcgtggagtttgcgtttgaatttttgttttttaggttatttcggggttttagttgttcgggatgaaaaaacgatgttcgggtattaggggtcggggattagtaacgtcggcgtttagcgtaatcgttattttttcgtagttacggcgtancgcgtttttttttttgttaaggaaggggcggggagtaggcggggcgggtatttttgaggttaatcgaaagcgagtattttcgtcgttcgggtcgatggatttagtttgatttcggcggtgggcggaggaggcggggtaagtcgcgcgtttaggaagggggcggggtcgggggtttggaggcggggnttggggttgttagtttcgcgttcggcgtcgcgttacggtttttcgtatgtcgttgttcgtgttgtttttagtcgttgtcgttcgttgttcgttatttcggtattgtaagttgtttttcgtcgtttcggttcggcgtcgtaggtttttcggcgtcggtttttttagttggggtttttcgtttggttttcgtagtttcg

SEQ ID NO: 5064 - DNA, 656 bp, Artificial Sequence
  chemically treated genomic DNA (Homo sapiens) CpG-island No: 5064
  unsure (198, 384)
cgaaactacgaaaaccaaacgaaaaaccccaactaaaaaaaccgacgccgaaaaacctacgacgccgaaccgaaacgacgaaaaacaacttacaataccgaaataacgaacaacgaacgacaacgactaaaaacaacacgaacaacgacatacgaaaaaccgtaacgcgacgccgaacgcgaaactaacaaccccaanccccgcctccaaacccccgaccccgcccccttcctaaacgcgcgacttaccccgcctcctccgcccaccgccgaaatcaaactaaatccatcgacccgaacgacgaaaatactcgctttcgattaacctcaaaaatacccgccccgcctactccccgccccttccttaacaaaaaaaaaaacgcgntacgccgtaactacgaaaaaataacgattacgctaaacgccgacgttactaatccccgacccctaatacccgaacatcgttttttcatcccgaacaactaaaaccccgaaataacctaaaaaacaaaaattcaaacgcaaactccacgataaattaaccttattcacgtataaacgaacgtccaaaaaaaaaccaaacccgaataaaccaaactctaaccaaaaaaaaccccaaaactataatctacatcaaaaaacgaaccaaccaaccga

SEQ ID NO: 5065 - DNA, 542 bp, Artificial Sequence
  chemically treated genomic DNA (Homo sapiens) CpG-island No: 5065
ttttttcggttgtattcgaggttttttagaggtcggcgcgcgttcgggcgtatattcgtatatttgttcgcgcgtatatattcgcgtttggtttcgcgcgcgtacgtttcgcgatttcgtaggttcgcggttcgtaatcggtagggtaggagtttttattaattttttcgttttacgttttttgtttaaatatagaaatcgatttttttgttttagagttcggagcggcggtcgttttttttcgttgggttttcgaggcggcgttttttaggcgggcgcggggacggttttgtttggttttattagtacgtggggcgttgtttgcgttttagtcgcggtattttggtattttggtattttggtatcgatcgttcggtcgtttttttttcggtcgcgtagtttttcggttagcgggttttgtttttatttaggttttttggtcgcgatttagtagcggcgtttcgtttcggaataggttttattcggagaggggttgatattgatcgtgttttttgggggttggggcgtatttaaggtaattt

SEQ ID NO: 5066 - DNA, 542 bp, Artificial Sequence
  chemically treated genomic DNA (Homo sapiens) CpG-island No: 5066
aaattaccttaaatacgccccaacccccaaaaaacacgatcaatatcaacccctctccgaataaaacctattccgaaacgaaacgccgctactaaatcgcgaccaaaaaacctaaataaaaacaaaacccgctaaccgaaaaactacgcgaccgaaaaaaaaacgaccgaacgatcgataccaaaataccaaaataccaaaataccgcgactaaaacgcaaacaacgccccacgtactaataaaaccaaacaaaaccgtccccgcgcccgcctaaaaaacgccgcctcgaaaacccaacgaaaaaaaacgaccgccgctccgaactctaaaacaaaaaaatcgatttctatatttaaacaaaaaacgtaaaacgaaaaaattaataaaaactcctaccctaccgattacgaaccgcgaacctacgaaatcgcgaaacgtacgcgcgcgaaaccaaacgcgaatatatacgcgcgaacaaatatacgaatatacgcccgaacgcgcgccgacctctaaaaaacctcgaatacaaccgaaaaaa

SEQ ID NO: 5067 - DNA, 542 bp, Artificial Sequence
  chemically treated genomic DNA (Homo sapiens) CpG-island No: 5067
aggttattttgaatgcgttttagtttttagggggtacgattagtgttagttttttttcgggtggggtttgtttcggggcgaggcgtcgttgttgagtcgcggttagagaatttgggtggggataaggttcgttggtcgaggggttgcgcgatcgggagagagacgatcgggcggtcggtgttagggtgttagggtgttagggtgtcgcggttggagcgtaggtagcgttttacgtgttggtgaggttagatagggtcgttttcgcgttcgtttggggagcgtcgtttcgggagtttagcgagggagggcggtcgtcgtttcgagttttaggataaggaagtcggtttttatatttgggtaggaggcgtgaggcgaggggattggtggaagtttttgttttgtcggttgcgggtcgcgaatttgcgaggtcgcgggacgtgcgcgcgcggggttaggcgcgggtgtgtgcgcgcgggtaggtgtgcgagtgtgcgttcgggcgcgcgtcggtttttggggagtttcggatgtagtcggagaaa

SEQ ID NO: 5068 - DNA, 542 bp, Artificial Sequence
  chemically treated genomic DNA (Homo sapiens) CpG-island No: 5068
tttctccgactacatccgaaactccccaaaaaccgacgcgcgcccgaacgcacactcgcacacctacccgcgcgcacacacccgcgcctaaccccgcgcgcgcacgtcccgcgacctcgcaaattcgcgacccgcaaccgacaaaacaaaaacttccaccaatcccctcgcctcacgcctcctacccaaatataaaaaccgacttccttatcctaaaactcgaaacgacgaccgccctccctcgctaaactcccgaaacgacgctccccaaacgaacgcgaaaacgaccctatctaacctcaccaacacgtaaaacgctacctacgctccaaccgcgacaccctaacaccctaacaccctaacaccgaccgcccgatcgtctctctcccgatcgcgcaacccctcgaccaacgaaccttatccccacccaaattctctaaccgcgactcaacaacgacgcctcgccccgaaacaaaccccacccgaaaaaaaactaacactaatcgtaccccctaaaaactaaaacgcattcaaaataacct

SEQ ID NO: 5069 - DNA, 943 bp, Artificial Sequence
  chemically treated genomic DNA (Homo sapiens) CpG-island No: 5069
  unsure (522..)
ttacggcgttttcgttttcgttttttggatttttagcgtttagcgattttcgaggcgatattttttaagaaggggaagggggtttttgttttatagaggggatagcgttcgtggcgtttcgagggtcggttgttgcggggtcgcgggaaggcgaaggtagtttcggacgcggagggcgaggggcggttgttcgcggttcgggatggcgttgcgtcgcggtcggagttcgtttgtcggcgttcgggacgggttttggtaggttcgtcgttttttttttttcgttttttttttttttttgcggcggcggcggcggcgaagcgggggggcgggggcggggaggcggttcgtattgcggcggcggcgggcggtgagcggtcgcggaaggggcggattcgggcgtttagcggggaaggttcgggggttcggtcggcgcggcgaggttgggcgtattgggcgttcgtacggggttatggcgagcgtcgagttttcgtttttgtagagtttcgcgtcgtcggcggggannataaagcggtcgttttatttcggatttcgttgcgggtcgtagggttaagtcgggggaagaggggaggttgcggcgggcggcgcgtttcgcgttcgggcgattcggcggattagcgcgtttggcggcggcgagcgcggcgatatcgcgggagcggaggttcggtttagagggcgggcggtagagggtaaggatcgggtttggggagttttcgggcggtggtcgttgagggttcggacgcgttattttcgagttcggggtgcggttttttttcgggcgttttcggcgtggggcgcgcgttttcggggttttttggggaagagtcggtttttcgcgtcgtacgttgggagtttgatttgttttttttagattatgtgggttttttatttgtatattttcgaattatagatgaaaacgtattta

SEQ ID NO: 5070 - DNA, 943 bp, Artificial Sequence
  chemically treated genomic DNA (Homo sapiens) CpG-island No: 5070
  unsure (421..)
taaatacgttttcatctataattcgaaaatatacaaataaaaaacccacataatctaaaaaaaacaaatcaaactcccaacgtacgacgcgaaaaaccgactcttccccaaaaaaccccgaaaacgcgcgccccacgccgaaaacgcccgaaaaaaaaccgcaccccgaactcgaaaataacgcgtccgaaccctcaacgaccaccgcccgaaaactccccaaacccgatccttaccctctaccgcccgccctctaaaccgaacctccgctcccgcgatatcgccgcgctcgccgccgccaaacgcgctaatccgccgaatcgcccgaacgcgaaacgcgccgcccgccgcaacctcccctcttcccccgacttaaccctacgacccgcaacgaaatccgaaataaaacgaccgctttatnntccccgccgacgacgcgaaactctacaaaaacgaaaactcgacgctcgccataaccccgtacgaacgcccaatacgcccaacctcgccgcgccgaccgaacccccgaaccttccccgctaaacgcccgaatccgccccttccgcgaccgctcaccgcccgccgccgccgcaatacgaaccgcctccccgcccccgcccccccgcttcgccgccgccgccgccgcaaaaaaaaaaaaaaaacgaaaaaaaaaaaacgacgaacctaccaaaacccgtcccgaacgccgacaaacgaactccgaccgcgacgcaacgccatcccgaaccgcgaacaaccgcccctcgccctccgcgtccgaaactaccttcgccttcccgcgaccccgcaacaaccgaccctcgaaacgccacgaacgctatcccctctataaaacaaaaacccccttccccttcttaaaaaatatcgcctcgaaaatcgctaaacgctaaaaatccaaaaaacgaaaacgaaaacgccgtaa

SEQ ID NO: 5071 - DNA, 943 bp, Artificial Sequence
  chemically treated genomic DNA (Homo sapiens) CpG-island No: 5071
  unsure (421..)
tggatacgtttttatttataattcggaaatatgtaaatgaaaggtttatatggtttgaaaggggtaaattaagtttttagcgtgcggcgcggggaatcggtttttttttagggagtttcggaggcgcgcgttttacgtcgagggcgttcggggaggaatcgtatttcgggttcgggagtagcgcgttcgggtttttagcggttatcgttcgggggttttttaggttcggtttttgttttttgtcgttcgttttttaggtcgagttttcgttttcgcgatgtcgtcgcgttcgtcgtcgttaggcgcgttggttcgtcgggtcgttcgggcgcggggcgcgtcgttcgtcgtagtttttttttttttttcggtttggttttgcggttcgtagcggggttcggggtagagcggtcgttttgtnnttttcgtcgacggcgcggggttttgtaaaggcggaagttcggcgttcgttatgatttcgtgcggacgtttagtgcgtttagtttcgtcgcgtcggtcgagttttcgggtttttttcgttgagcgttcgaattcgtttttttcgcggtcgtttatcgttcgtcgtcgtcgtagtacgagtcgttttttcgttttcgttttttcgtttcgtcgtcgtcgtcgtcgtaggagagggagggaggcggagggagggaggcggcgggtttgttagagttcgtttcgggcgtcggtaagcgagtttcggtcgcggcgtagcgttatttcgggtcgcgggtagtcgtttttcgtttttcgcgttcggaattgttttcgttttttcgcgatttcgtagtagtcggttttcggggcgttacgaacgttgttttttttgtggagtagagattttttttttttttttagggggtgtcgtttcggggatcgttgagcgttaggggtttaggaggcggggacgggagcgtcgtga

SEQ ID NO: 5072 - DNA, 943 bp, Artificial Sequence
  chemically treated genomic DNA (Homo sapiens) CpG-island No: 5072
  unsure (522..)
tcacgacgctcccgtccccgcctcctaaacccctaacgctcaacgatccccgaaacgacaccccctaaaaaaaaaaaaaaaatctctactccacaaaaaaaacaacgttcgtaacgccccgaaaaccgactactacgaaatcgcgaaaaaacgaaaacaattccgaacgcgaaaaacgaaaaacgactacccgcgacccgaaataacgctacgccgcgaccgaaactcgcttaccgacgcccgaaacgaactctaacaaacccgccgcctccctccctccgcctccctccctctcctacgacgacgacgacgacgaaacgaaaaaacgaaaacgaaaaaacgactcgtactacgacgacgacgaacgataaacgaccgcgaaaaaaacgaattcgaacgctcaacgaaaaaaacccgaaaactcgaccgacgcgacgaaactaaacgcactaaacgtccgcacgaaatcataacgaacgccgaacttccgcctttacaaaaccccgcgccgtcgacgaaaannacaaaacgaccgctctaccccgaaccccgctacgaaccgcaaaaccaaaccgaaaaaaaaaaaaaaactacgacgaacgacgcgccccgcgcccgaacgacccgacgaaccaacgcgcctaacgacgacgaacgcgacgacatcgcgaaaacgaaaactcgacctaaaaaacgaacgacaaaaaacaaaaaccgaacctaaaaaacccccgaacgataaccgctaaaaacccgaacgcgctactcccgaacccgaaatacgattcctccccgaacgccctcgacgtaaaacgcgcgcctccgaaactccctaaaaaaaaaccgattccccgcgccgcacgctaaaaacttaatttacccctttcaaaccatataaacctttcatttacatatttccgaattataaataaaaacgtatcca

SEQ ID NO: 5073 - DNA, 542 bp, Artificial Sequence
  chemically treated genomic DNA (Homo sapiens) CpG-island No: 5073
cgtcggcgttttacgtttttttcgggaggggtttcgattcgattcggttgcggatcgtttcgttttttttttgggtaggttcggggcggagtcggggttttttttgagcgtcgtaatttttcgttcgggtagtcgtcgtcggcgtcgggttttacgagagggcgggcgggggagggggggtacgaaggtcgtagattttcgggttcgcgtatagagttaggcgttcgacgcgggttcgggtcgggcggcgcggggggcgcgggatcggtttttttggcgtcggataaaggttaagggaggcgtaggagggtttaggtcgggtacggaggtgggggttcgttcggttgggggttattcgcgtgcggcgcggagggcgggggggtcggaatcgttggtgtttaggattcgttttcggttttttaattcggatcggttcggttcggattagtagtgatcggtgtaaatatattagtgaaatcgcgtgttttttcgcgagatttgtacggttgggaggcggggggggttttgggggggtgggggaa

SEQ ID NO: 5074 - DNA, 542 bp, Artificial Sequence
  chemically treated genomic DNA (Homo sapiens) CpG-island No: 5074
ttcccccacccccccaaaaccccccccgcctcccaaccgtacaaatctcgcgaaaaaacacgcgatttcactaatatatttacaccgatcactactaatccgaaccgaaccgatccgaattaaaaaaccgaaaacgaatcctaaacaccaacgattccgacccccccgccctccgcgccgcacgcgaataacccccaaccgaacgaacccccacctccgtacccgacctaaaccctcctacgcctcccttaacctttatccgacgccaaaaaaaccgatcccgcgccccccgcgccgcccgacccgaacccgcgtcgaacgcctaactctatacgcgaacccgaaaatctacgaccttcgtaccccccctcccccgcccgccctctcgtaaaacccgacgccgacgacgactacccgaacgaaaaattacgacgctcaaaaaaaaccccgactccgccccgaacctacccaaaaaaaaaacgaaacgatccgcaaccgaatcgaatcgaaacccctcccgaaaaaaacgtaaaacgccgacg

SEQ ID NO: 5075 - DNA, 542 bp, Artificial Sequence
  chemically treated genomic DNA (Homo sapiens) CpG-island No: 5075
tttttttatttttttaggatttttttcgttttttagtcgtgtaaatttcgcgaggaaatacgcggttttattagtgtgtttatatcgattattattaattcggatcgaatcgattcggattaaggggtcggaggcgggttttgggtattagcggtttcgattttttcgtttttcgcgtcgtacgcgagtggtttttagtcgagcgggtttttattttcgtgttcggtttgggtttttttgcgttttttttggtttttgttcggcgttaggagagtcggtttcgcgtttttcgcgtcgttcggttcgggttcgcgtcgggcgtttggttttgtacgcgagttcggggatttgcggttttcgtgttttttttttttcgttcgttttttcgtggagttcggcgtcggcggcggttgttcgggcggggggttgcggcgtttaggagaggtttcggtttcgtttcgggtttgtttagggggagagcggagcggttcgtagtcgggtcgggtcggggtttttttcgggaggagcgtggagcgtcggcg

SEQ ID NO: 5076 - DNA, 542 bp, Artificial Sequence
  chemically treated genomic DNA (Homo sapiens) CpG-island No: 5076
cgccgacgctccacgctcctcccgaaaaaaaccccgacccgacccgactacgaaccgctccgctctccccctaaacaaacccgaaacgaaaccgaaacctctcctaaacgccgcaaccccccgcccgaacaaccgccgccgacgccgaactccacgaaaaaacgaacgaaaaaaaaaaaacacgaaaaccgcaaatccccgaactcgcgtacaaaaccaaacgcccgacgcgaacccgaaccgaacgacgcgaaaaacgcgaaaccgactctcctaacgccgaacaaaaaccaaaaaaaacgcaaaaaaacccaaaccgaacacgaaaataaaaacccgctcgactaaaaaccactcgcgtacgacgcgaaaaacgaaaaaatcgaaaccgctaatacccaaaacccgcctccgaccccttaatccgaatcgattcgatccgaattaataataatcgatataaacacactaataaaaccgcgtatttcctcgcgaaatttacacgactaaaaaacgaaaaaaatcctaaaaaaataaaaaaa

SEQ ID NO: 5077 - DNA, 578 bp, Artificial Sequence
  chemically treated genomic DNA (Homo sapiens) CpG-island No: 5077
ggcggcggtttttgttcgtcgatagacgtttttagagattacgcggtatttttaggtgataggtcgaggttcgcggcggattcggtttaggaggtttagttcgtacgttttcggatcgggattcgttgaattcgggtgttcgagggagtttggcggtcgttttaggcgggatcgttgggggtttcggtcgttttggttttttttttttttcgggtcgtatttatcgaattttatttagttttattcgttgagcgcgtttatgttgcggtataggtcgtttagtatttaggagggtagttggtagatgtagtaggttatggtacgttacggggtcggtttcggcgcgggacgattgggtcggatattgcgggttgcggtttttttagttaggggcggatcggcggggaagtgggcggggcgggagggtattagcgtttttagcggttacgggcggtacgacggtttcgtcggttttattttagcgtcggttagagaatcggaattgcgaggggaaattgaggttttggtgggagaaggttatacgggaattttgtcgtagcggtaggaggttttttgat

SEQ ID NO: 5078 - DNA, 578 bp, Artificial Sequence
  chemically treated genomic DNA (Homo sapiens) CpG-island No: 5078
atcaaaaaacctcctaccgctacgacaaaattcccgtataaccttctcccaccaaaacctcaatttcccctcgcaattccgattctctaaccgacgctaaaataaaaccgacgaaaccgtcgtaccgcccgtaaccgctaaaaacgctaataccctcccgccccgcccacttccccgccgatccgcccctaactaaaaaaaccgcaacccgcaatatccgacccaatcgtcccgcgccgaaaccgaccccgtaacgtaccataacctactacatctaccaactaccctcctaaatactaaacgacctataccgcaacataaacgcgctcaacgaataaaactaaataaaattcgataaatacgacccgaaaaaaaaaaaaaaccaaaacgaccgaaacccccaacgatcccgcctaaaacgaccgccaaactccctcgaacacccgaattcaacgaatcccgatccgaaaacgtacgaactaaacctcctaaaccgaatccgccgcgaacctcgacctatcacctaaaaataccgcgtaatctctaaaaacgtctatcgacgaacaaaaaccgccgcc

SEQ ID NO: 5079 - DNA, 578 bp, Artificial Sequence
  chemically treated genomic DNA (Homo sapiens) CpG-island No: 5079
gttagaaggttttttgtcgttgcggtagaattttcgtgtggtttttttttattagggttttagttttttttcgtagtttcgattttttggtcggcgttggggtggagtcggcggggtcgtcgtgtcgttcgtggtcgttggggacgttggtgttttttcgtttcgtttattttttcgtcggttcgtttttggttagagaagtcgtagttcgtagtgttcgatttagtcgtttcgcgtcggagtcggtttcgtagcgtgttatggtttgttatatttattagttgtttttttgggtgttggacgatttgtgtcgtaatatggacgcgtttagcgagtgggattggatggagttcggtgagtgcggttcggggaggggaggggattagggcgatcggagtttttagcgatttcgtttggagcggtcgttaagttttttcgggtattcgggtttagcgggtttcgattcgagggcgtgcgagttgagttttttggatcgggttcgtcgcggatttcggtttgttatttgaaggtgtcgcgtggtttttgaggacgtttgtcgacgagtaggggtcgtcgtt

SEQ ID NO: 5080 - DNA, 578 bp, Artificial Sequence
  chemically treated genomic DNA (Homo sapiens) CpG-island No: 5080
aacgacgacccctactcgtcgacaaacgtcctcaaaaaccacgcgacaccttcaaataacaaaccgaaatccgcgacgaacccgatccaaaaaactcaactcgcacgccctcgaatcgaaacccgctaaacccgaatacccgaaaaaacttaacgaccgctccaaacgaaatcgctaaaaactccgatcgccctaatcccctcccctccccgaaccgcactcaccgaactccatccaatcccactcgctaaacgcgtccatattacgacacaaatcgtccaacacccaaaaaaacaactaataaatataacaaaccataacacgctacgaaaccgactccgacgcgaaacgactaaatcgaacactacgaactacgacttctctaaccaaaaacgaaccgacgaaaaaataaacgaaacgaaaaaacaccaacgtccccaacgaccacgaacgacacgacgaccccgccgactccaccccaacgccgaccaaaaaatcgaaactacgaaaaaaaactaaaaccctaataaaaaaaaaccacacgaaaattctaccgcaacgacaaaaaaccttctaac

SEQ ID NO: 5081 - DNA, 603 bp, Artificial Sequence
  chemically treated genomic DNA (Homo sapiens) CpG-island No: 5081
cgtatagttttcggtcggttattttcgcgagcgcgttttattttttatcgagcgcgcgcgaagattacggaggtcgattcgggagcgcgtacgtagtttcgtttcgcgttcgattcgcggatttcgcggcgttcggttcgggtggtttggatcgcggagggaatgtttcggagggcggagaattgggacgaggtcgaggtaggcgcggaggaggtaggcgtcgaagagtacggttttgaagaagacggcggggaggagtcgggcgtcgaggagttcggttcggaagagttcggttcggaggaattgggcgtcgaggaggagatggaggtcgggcggtcgcggttcgtgttgcgttcggtgaattcgcgcgagtttttttaggttattttttgtaatcgtagttcgcgcgtcgtgttgttcgtatggtttaatttcgacggcgagtcgtagttttatttaagcgttgtcgtttggtacgggtcgtcgtatttatagttatcgaggtacgggttcggcgtttaggttcgatttagtagggacgatagtacggtttgaagtttttttatcgtttcggggtttattttgtagacggggaattgaggt

SEQ ID NO: 5082 - DNA, 603 bp, Artificial Sequence
  chemically treated genomic DNA (Homo sapiens) CpG-island No: 5082
acctcaattccccgtctacaaaataaaccccgaaacgataaaaaaacttcaaaccgtactatcgtccctactaaatcgaacctaaacgccgaacccgtacctcgataactataaatacgacgacccgtaccaaacgacaacgcttaaataaaactacgactcgccgtcgaaattaaaccatacgaacaacacgacgcgcgaactacgattacaaaaaataacctaaaaaaactcgcgcgaattcaccgaacgcaacacgaaccgcgaccgcccgacctccatctcctcctcgacgcccaattcctccgaaccgaactcttccgaaccgaactcctcgacgcccgactcctccccgccgtcttcttcaaaaccgtactcttcgacgcctacctcctccgcgcctacctcgacctcgtcccaattctccgccctccgaaacattccctccgcgatccaaaccacccgaaccgaacgccgcgaaatccgcgaatcgaacgcgaaacgaaactacgtacgcgctcccgaatcgacctccgtaatcttcgcgcgcgctcgataaaaaataaaacgcgctcgcgaaaataaccgaccgaaaactatacg

SEQ ID NO: 5083 - DNA, 603 bp, Artificial Sequence
  chemically treated genomic DNA (Homo sapiens) CpG-island No: 5083
gttttagtttttcgtttgtaaaatggatttcggggcggtagaggggttttagatcgtgttatcgtttttgttgggtcgggtttaagcgtcgggttcgtatttcggtagttgtggatgcggcggttcgtgttaggcggtagcgtttgggtagggttgcggttcgtcgtcgaagttgagttatacgggtagtacgacgcgcggattgcgattgtagaagatgatttgggagggttcgcgcgagtttatcgagcgtagtacgggtcgcggtcgttcggtttttatttttttttcggcgtttagttttttcgggtcggattttttcgggtcggatttttcggcgttcgattttttttcgtcgttttttttagggtcgtatttttcgacgtttgtttttttcgcgtttatttcggtttcgttttagtttttcgtttttcggggtatttttttcgcgatttagattattcgggtcggacgtcgcgggattcgcgggtcggacgcggggcggagttgcgtgcgcgttttcgagtcgattttcgtagttttcgcgcgcgttcggtagaggatggaacgcgttcgcggaaatagtcggtcggaggttgtgcg

SEQ ID NO: 5084 - DNA, 603 bp, Artificial Sequence
  chemically treated genomic DNA (Homo sapiens) CpG-island No: 5084
cgcacaacctccgaccgactatttccgcgaacgcgttccatcctctaccgaacgcgcgcgaaaactacgaaaatcgactcgaaaacgcgcacgcaactccgccccgcgtccgacccgcgaatcccgcgacgtccgacccgaataatctaaatcgcgaaaaaaataccccgaaaaacgaaaaactaaaacgaaaccgaaataaacgcgaaaaaaacaaacgtcgaaaaatacgaccctaaaaaaaacgacgaaaaaaaatcgaacgccgaaaaatccgacccgaaaaaatccgacccgaaaaaactaaacgccgaaaaaaaaataaaaaccgaacgaccgcgacccgtactacgctcgataaactcgcgcgaaccctcccaaatcatcttctacaatcgcaatccgcgcgtcgtactacccgtataactcaacttcgacgacgaaccgcaaccctacccaaacgctaccgcctaacacgaaccgccgcatccacaactaccgaaatacgaacccgacgcttaaacccgacccaacaaaaacgataacacgatctaaaacccctctaccgccccgaaatccattttacaaacgaaaaactaaaac

SEQ ID NO: 5085 - DNA, 612 bp, Artificial Sequence
  chemically treated genomic DNA (Homo sapiens) CpG-island No: 5085
gcgggcggggattcgtggcgaaagtgtagtttagtagcgtcgcggcgttacgtttattttgcgtagacgtcgtcgtcgtcgttgttgtcgtcgtcgttgttatagtttttgtcgttacggttttcgtcgtcgttgttttcgcgttgtttttgggagtttttattgttttagtagcgttcggtttcgagatcgggtattttgggggttcgcgaaacgggcggcggtcgacggagttgagattttagggcgtcggcgggattaggagcggtaggggttagtttaggaatttcggggagtcgggattaaagcgtggggcggtagggggtcggggtggcgaggtttacggttttcggagttggggtttttttttttcggttcgatttttttcgtcgatttttttaagtggggtcggagtttcggcgggcgttttcggcgatgagttcggattcgaggtggtcggtgagtgcgggtttgggattagggcgggagtggtcggtagggaaggggtaggttacgttcgtgggacgcgtattgagtcgcgtggttcgggaatttttttggtaattttagttgggagaattgatagtgtattgttttttagtaggtattttg

SEQ ID NO: 5086 - DNA, 612 bp, Artificial Sequence
  chemically treated genomic DNA (Homo sapiens) CpG-island No: 5086
caaaatacctactaaaaaacaatacactatcaattctcccaactaaaattaccaaaaaaattcccgaaccacgcgactcaatacgcgtcccacgaacgtaacctaccccttccctaccgaccactcccgccctaatcccaaacccgcactcaccgaccacctcgaatccgaactcatcgccgaaaacgcccgccgaaactccgaccccacttaaaaaaatcgacgaaaaaaatcgaaccgaaaaaaaaaaaccccaactccgaaaaccgtaaacctcgccaccccgaccccctaccgccccacgctttaatcccgactccccgaaattcctaaactaacccctaccgctcctaatcccgccgacgccctaaaatctcaactccgtcgaccgccgcccgtttcgcgaacccccaaaatacccgatctcgaaaccgaacgctactaaaacaataaaaactcccaaaaacaacgcgaaaacaacgacgacgaaaaccgtaacgacaaaaactataacaacgacgacgacaacaacgacgacgacgacgtctacgcaaaataaacgtaacgccgcgacgctactaaactacactttcgccacgaatccccgcccgc

SEQ ID NO: 5087 - DNA, 612 bp, Artificial Sequence
  chemically treated genomic DNA (Homo sapiens) CpG-island No: 5087
taggatgtttgttgggaagtaatgtattgttagtttttttaattggagttgttagagaggttttcgggttacgcggtttagtgcgcgttttacgaacgtagtttattttttttttgtcggttattttcgttttggttttaggttcgtatttatcggttatttcgagttcgggtttatcgtcgggggcgttcgtcggggtttcgattttatttggggaggtcggcggggaaagtcgggtcgggaagggggagttttaatttcggagatcgtagatttcgttatttcggttttttgtcgttttacgttttggtttcggtttttcgggatttttgagttgatttttgtcgtttttggtttcgtcggcgttttggggttttaatttcgtcggtcgtcgttcgtttcgcgagtttttaagatgttcggtttcgggatcgggcgttgttggaataatggaggtttttagaggtagcgcgaggatagcggcggcggagatcgtggcggtaaaggttgtggtagcggcggcggtagtagcggcggcgacggcgtttgcgtagggtaaacgtggcgtcgcggcgttattgagttgtattttcgttacggattttcgttcgt

SEQ ID NO: 5088 - DNA, 612 bp, Artificial Sequence
  chemically treated genomic DNA (Homo sapiens) CpG-island No: 5088
acgaacgaaaatccgtaacgaaaatacaactcaataacgccgcgacgccacgtttaccctacgcaaacgccgtcgccgccgctactaccgccgccgctaccacaacctttaccgccacgatctccgccgccgctatcctcgcgctacctctaaaaacctccattattccaacaacgcccgatcccgaaaccgaacatcttaaaaactcgcgaaacgaacgacgaccgacgaaattaaaaccccaaaacgccgacgaaaccaaaaacgacaaaaatcaactcaaaaatcccgaaaaaccgaaaccaaaacgtaaaacgacaaaaaaccgaaataacgaaatctacgatctccgaaattaaaactcccccttcccgacccgactttccccgccgacctccccaaataaaatcgaaaccccgacgaacgcccccgacgataaacccgaactcgaaataaccgataaatacgaacctaaaaccaaaacgaaaataaccgacaaaaaaaaaataaactacgttcgtaaaacgcgcactaaaccgcgtaacccgaaaacctctctaacaactccaattaaaaaaactaacaatacattacttcccaacaaacatccta

SEQ ID NO: 5089 - DNA, 507 bp, Artificial Sequence
  chemically treated genomic DNA (Homo sapiens) CpG-island No: 5089
  unsure (168)
tacgatgaaggttagtacgatgatgaaagttattttgatcgtgcggattttggttttggagatgagtttgacgttgttgatacgcgttagggttacgcgttttttatcgttagtcgtcgcgttttttggcgtttcggtcgtcgtcgttgtagcggttttgagtcgtanattttgttagattttgaagttgataagggtcgtagtaggtatgcgagtacgatgatcggtacgatgtagatagttagcgtgatttatgtgatgtaggttttgggtttttagggttggatgaagacggtttagtagtcgaagacgtcgttagttatttcgcgtagagagaagatgtgtatttgcggcgcgttggttattaggtagtcgagttacgtggcgagtattgttaggcggtcggtgcggcggcgtatcgagcgtagcggttggtagatggttaggtagcggtttagggatatgagtagtagtaggtaggtggaggcgaatatgtttattatttgt

SEQ ID NO: 5090 - DNA, 507 bp, Artificial Sequence
  chemically treated genomic DNA (Homo sapiens) CpG-island No: 5090
  unsure (340)
acaaataataaacatattcgcctccacctacctactactactcatatccctaaaccgctacctaaccatctaccaaccgctacgctcgatacgccgccgcaccgaccgcctaacaatactcgccacgtaactcgactacctaataaccaacgcgccgcaaatacacatcttctctctacgcgaaataactaacgacgtcttcgactactaaaccgtcttcatccaaccctaaaaacccaaaacctacatcacataaatcacgctaactatctacatcgtaccgatcatcgtactcgcatacctactacgacccttatcaacttcaaaatctaacaaaatntacgactcaaaaccgctacaacgacgacgaccgaaacgccaaaaaacgcgacgactaacgataaaaaacgcgtaaccctaacgcgtatcaacaacgtcaaactcatctccaaaaccaaaatccgcacgatcaaaataactttcatcatcgtactaaccttcatcgta

SEQ ID NO: 5091 - DNA, 507 bp, Artificial Sequence
  chemically treated genomic DNA (Homo sapiens) CpG-island No: 5091
  unsure (340)
gtaggtggtgggtatgttcgtttttatttatttgttgttgtttatgtttttggatcgttgtttggttatttgttagtcgttgcgttcgatgcgtcgtcgtatcgatcgtttggtagtgttcgttacgtggttcggttgtttggtggttagcgcgtcgtaggtgtatattttttttttgcgcgaggtggttgacggcgttttcgattgttgggtcgtttttatttagttttggggatttaaggtttatattatatggattacgttagttgtttatatcgtgtcggttatcgtgttcgtatgtttgttacggtttttattagttttaagatttggtagaatntgcggtttaagatcgttgtagcggcggcggtcgaggcgttagagggcgcggcggttggcgatggggggcgcgtggttttggcgcgtgttagtagcgttaagtttatttttaaggttaagattcgtacggttaagatgatttttattatcgtgttggtttttatcgtg

SEQ ID NO: 5092 - DNA, 507 bp, Artificial Sequence
  chemically treated genomic DNA (Homo sapiens) CpG-island No: 5092
  unsure (168)
cacgataaaaaccaacacgataataaaaatcatcttaaccgtacgaatcttaaccttaaaaataaacttaacgctactaacacgcgccaaaaccacgcgccccccatcgccaaccgccgcgccctctaacgcctcgaccgccgccgctacaacgatcttaaaccgcanattctaccaaatcttaaaactaataaaaaccgtaacaaacatacgaacacgataaccgacacgatataaacaactaacgtaatccatataatataaaccttaaatccccaaaactaaataaaaacgacccaacaatcgaaaacgccgtcaaccacctcgcgcaaaaaaaaaatatacacctacgacgcgctaaccaccaaacaaccgaaccacgtaacgaacactaccaaacgatcgatacgacgacgcatcgaacgcaacgactaacaaataaccaaacaacgatccaaaaacataaacaacaacaaataaataaaaacgaacatacccaccacctac

SEQ ID NO: 5093 - DNA, 558 bp, Artificial Sequence
  chemically treated genomic DNA (Homo sapiens) CpG-island No: 5093
gtcggcgatgtttaggtgttttatgaagaagaagaggcgcgagtgtttttggcgtgtggtgcgtagcgttagtagtatatacgtattttcgtttagcgttaggagtaggatgagatatagtatcgttatttttacgcgcgttagggtttcgttgcgtcgcgggggttcggcggtgcggttgttttcggttttcggcggcgcggcgttggcgttggttgtttcggcgttttagttggttgcgagcgcgttttttatgattttggcggtagcggtgcgtttcggttttcgagttttttacggtttggcgcggttgggtcggattcggcgtgtcggagggtgtaggggcgttcggggttttatttttggagattttacggacggatttgttgagtttattttgaaataaatcgggagggtcgtgaggagatcgtagcgtttttttttcgacgcgggtagggcgtgtttgttttatttttaggaatttaatttatttgaaataatagggtataatcgtcggtttcgggttgtttagtcgttattttagaaattttcgttgga

SEQ ID NO: 5094 - DNA, 558 bp, Artificial Sequence
  chemically treated genomic DNA (Homo sapiens) CpG-island No: 5094
tccaacgaaaatttctaaaataacgactaaacaacccgaaaccgacgattataccctattatttcaaataaattaaattcctaaaaataaaacaaacacgccctacccgcgtcgaaaaaaaaacgctacgatctcctcacgaccctcccgatttatttcaaaataaactcaacaaatccgtccgtaaaatctccaaaaataaaaccccgaacgcccctacaccctccgacacgccgaatccgacccaaccgcgccaaaccgtaaaaaactcgaaaaccgaaacgcaccgctaccgccaaaatcataaaaaacgcgctcgcaaccaactaaaacgccgaaacaaccaacgccaacgccgcgccgccgaaaaccgaaaacaaccgcaccgccgaacccccgcgacgcaacgaaaccctaacgcgcgtaaaaataacgatactatatctcatcctactcctaacgctaaacgaaaatacgtatatactactaacgctacgcaccacacgccaaaaacactcgcgcctcttcttcttcataaaacacctaaacatcgccgac

SEQ ID NO: 5095 - DNA, 558 bp, Artificial Sequence
  chemically treated genomic DNA (Homo sapiens) CpG-island No: 5095
tttaacggggatttttggggtggcggttgagtaattcgaggtcggcggttgtgttttgttgttttagatgagttgggtttttgggaatgggataagtacgttttattcgcgtcggaagagaaacgttgcggtttttttacggttttttcggtttgttttagggtggatttagtagattcgttcgtggagtttttaggagtggagtttcgggcgtttttatatttttcgatacgtcggattcggtttagtcgcgttaagtcgtaaagggttcgaaggtcggggcgtatcgttgtcgttagggttatggagggcgcgttcgtagttaattggagcgtcgaggtagttaacgttagcgtcgcgtcgtcgggggtcgagggtaatcgtatcgtcggattttcgcggcgtaacgaggttttggcgcgcgtggaggtggcggtgttgtgttttattttgtttttggcgttgagcgggaatgcgtgtgtgttgttggcgttgcgtattatacgttagaagtattcgcgtttttttttttttatgaagtatttaagtatcgtcgat

SEQ ID NO: 5096 - DNA, 558 bp, Artificial Sequence
  chemically treated genomic DNA (Homo sapiens) CpG-island No: 5096
atcgacgatacttaaatacttcataaaaaaaaaaaaacgcgaatacttctaacgtataatacgcaacgccaacaacacacacgcattcccgctcaacgccaaaaacaaaataaaacacaacaccgccacctccacgcgcgccaaaacctcgttacgccgcgaaaatccgacgatacgattaccctcgacccccgacgacgcgacgctaacgttaactacctcgacgctccaattaactacgaacgcgccctccataaccctaacgacaacgatacgccccgaccttcgaaccctttacgacttaacgcgactaaaccgaatccgacgtatcgaaaaatataaaaacgcccgaaactccactcctaaaaactccacgaacgaatctactaaatccaccctaaaacaaaccgaaaaaaccgtaaaaaaaccgcaacgtttctcttccgacgcgaataaaacgtacttatcccattcccaaaaacccaactcatctaaaacaacaaaacacaaccgccgacctcgaattactcaaccgccaccccaaaaatccccgttaaa

SEQ ID NO: 5097 - DNA, 941 bp, Artificial Sequence
  chemically treated genomic DNA (Homo sapiens) CpG-island No: 5097
gcgtagagaaaatgcgaggagtacgcggggaggtttggtatttttgttacggcgattttaggttgaggtcgttcgtacgttcgtttttttacgtcgggtattgtcgttttcggtacgcgtataggtcggatacgattcgtttcggtttttatttttaacggcggtacggcggtacggcggtacgtattaagatagtgcgagagtcgtttttttttttgtatcgattttaagtcggttttattttcggtttttttgaatttcgtttggaaattttgtttaagtcgtttattgtttaaggttttcgtataaaatggcggcgaggtttgaggaattaattatagagacgttcgtcggtcgcggatagagcgtaggtttttgagcgttggtttcgtttcgcgtcggtttggtttttcggcgggggcggggaaagggcgtatttttaagggtttttttaggagaatagcgtgcggtttttatggtgtcgggttattcgagtcgggttacgtggttggcgaaagtcgtcgcggaggcgtggggaggagaaatgggcgggaggttgtggggatagcgagatatttagcgacgacgaggttgttatggtgtcgcggggtcgtgttcgcgtatgcgttatttgatttataggtcggtcgtggagttgcgatttcggttttaggtgagaaagggagggttcggttcgggaggaggggagtagggatgacggcgggagagggattgggcgaggagcgtggggaaaggaggtggaagtaggggagagaggaagaggagcgagtaggtaagaggggtaaatcgggattttcggaggacggagagttaaatggtgggagtagggttttggtttgttgtgaggggcgtgggagagggaatcgcgggtgaggagggggttgcgtgtggggaggaggtttgtgtgaggggtaggtggg

SEQ ID NO: 5098 - DNA, 941 bp, Artificial Sequence
  chemically treated genomic DNA (Homo sapiens) CpG-island No: 5098
cccacctacccctcacacaaacctcctccccacacgcaaccccctcctcacccgcgattccctctcccacgcccctcacaacaaaccaaaaccctactcccaccatttaactctccgtcctccgaaaatcccgatttacccctcttacctactcgctcctcttcctctctcccctacttccacctcctttccccacgctcctcgcccaatccctctcccgccgtcatccctactcccctcctcccgaaccgaaccctccctttctcacctaaaaccgaaatcgcaactccacgaccgacctataaatcaaataacgcatacgcgaacacgaccccgcgacaccataacaacctcgtcgtcgctaaatatctcgctatccccacaacctcccgcccatttctcctccccacgcctccgcgacgactttcgccaaccacgtaacccgactcgaataacccgacaccataaaaaccgcacgctattctcctaaaaaaacccttaaaaatacgccctttccccgcccccgccgaaaaaccaaaccgacgcgaaacgaaaccaacgctcaaaaacctacgctctatccgcgaccgacgaacgtctctataattaattcctcaaacctcgccgccattttatacgaaaaccttaaacaataaacgacttaaacaaaatttccaaacgaaattcaaaaaaaccgaaaataaaaccgacttaaaatcgatacaaaaaaaaaaacgactctcgcactatcttaatacgtaccgccgtaccgccgtaccgccgttaaaaataaaaaccgaaacgaatcgtatccgacctatacgcgtaccgaaaacgacaatacccgacgtaaaaaaacgaacgtacgaacgacctcaacctaaaatcgccgtaacaaaaataccaaacctccccgcgtactcctcgcattttctctacgc

SEQ ID NO: 5099 - DNA, 941 bp, Artificial Sequence
  chemically treated genomic DNA (Homo sapiens) CpG-island No: 5099
tttatttgttttttatataagttttttttttatacgtagttttttttttattcgcgatttttttttttacgttttttatagtaaattaaagttttgtttttattatttggtttttcgtttttcgaaagtttcggtttgttttttttgtttattcgttttttttttttttttttttatttttattttttttttttacgtttttcgtttaatttttttttcgtcgttatttttgttttttttttttcggatcgagtttttttttttttatttagggtcggggtcgtagttttacgatcggtttgtgggttaggtggcgtatgcgcgagtacggtttcgcggtattatgataatttcgtcgtcgttgggtgtttcgttatttttatagtttttcgtttattttttttttttacgttttcgcgacggttttcgttagttacgtgattcgattcggatgattcggtattatggagatcgtacgttgtttttttagaagggtttttggaaatgcgtttttttttcgttttcgtcggaagattaggtcggcgcggggcggggttagcgtttagaggtttacgttttgttcgcggtcggcgggcgtttttatggttggttttttaggtttcgtcgttattttgtacgggggttttgagtaatgagcggtttgggtaaggtttttaggcggggtttagaggagtcgggggtggggtcggtttggagtcgatatagagagaggagcgattttcgtattgttttggtgcgtgtcgtcgtgtcgtcgtgtcgtcgttgggggtgggggtcggggcgagtcgtgttcggtttgtgcgcgtgtcgggagcgatagtgttcggcgtgggagagcgggcgtgcgggcggttttagtttggagtcgtcgtgataggggtgttagattttttcgcgtgtttttcgtattttttttacgt

SEQ ID NO: 5100 - DNA, 941 bp, Artificial Sequence
  chemically treated genomic DNA (Homo sapiens) CpG-island No: 5100
acgtaaaaaaaatacgaaaaacacgcgaaaaaatctaacacccctatcacgacgactccaaactaaaaccgcccgcacgcccgctctcccacgccgaacactatcgctcccgacacgcgcacaaaccgaacacgactcgccccgacccccacccccaacgacgacacgacgacacgacgacacgcaccaaaacaatacgaaaatcgctcctctctctatatcgactccaaaccgaccccacccccgactcctctaaaccccgcctaaaaaccttacccaaaccgctcattactcaaaacccccgtacaaaataacgacgaaacctaaaaaaccaaccataaaaacgcccgccgaccgcgaacaaaacgtaaacctctaaacgctaaccccgccccgcgccgacctaatcttccgacgaaaacgaaaaaaaaacgcatttccaaaaacccttctaaaaaaacaacgtacgatctccataataccgaatcatccgaatcgaatcacgtaactaacgaaaaccgtcgcgaaaacgtaaaaaaaaaaaataaacgaaaaactataaaaataacgaaacacccaacgacgacgaaattatcataataccgcgaaaccgtactcgcgcatacgccacctaacccacaaaccgatcgtaaaactacgaccccgaccctaaataaaaaaaaaaaaactcgatccgaaaaaaaaaaaacaaaaataacgacgaaaaaaaaattaaacgaaaaacgtaaaaaaaaaaaataaaaataaaaaaaaaaaaaaaaaaaacgaataaacaaaaaaaacaaaccgaaactttcgaaaaacgaaaaaccaaataataaaaacaaaactttaatttactataaaaaacgtaaaaaaaaaaatcgcgaataaaaaaaaaactacgtataaaaaaaaaacttatataaaaaacaaataaa

SEQ ID NO: 5101 - DNA, 904 bp, Artificial Sequence
  chemically treated genomic DNA (Homo sapiens) CpG-island No: 5101
atcggttcgttttagtcgcgggggaaggcgttttatcgttaaagtgcgtttcggcggtttcggttcgttttgcgggtcgtcgtcggagggagtgcgggggcgtttcgaagtcgtttaggtcgtattcgttggatgttgcgttttttttttcggcgtcggtcgtttcgggtcggcggtagttgattgcggtcgtgagttcgcggagcggcgagagttaagaggaggtgttcgcggcgttttcgttttttttagatatatatttttttttttttcgttttttttcggagggtggaagagataaaaacggggggttagttttttagttcgtcggttgtcggtacgcggggcggcgtttcgttcggttttcgaggattagcggcgtggcggttgcgttcggattcggttcgtcggtcggaggagcgcgcggcgttcgcggtcgcgttcgtatcgtaggtttttttagagagttcgggggcgggcgcgggttcggcggcggcggcggtcgtagttttcggcggcgcgtaatcgttcgtcgtcgttcgtcgttgttcggttttcggcgcgtcgtcggtttcggttttgtgcggagggagcgagttcgcggtttcggttttcggcgtttttagtggtcgcgtcgttagcggattgttgtagcggcgtgagtagcgggggtcgcggttgcgggaaacgtttcggagtttaggaatatagttttcgttggttagcggcggtagtagtagtagcggggtttttgcgcgcggcgtttatcgtttttttttcgcgtcgggttcgcggtgttgtaggcggtagttacgtagattgtttttttatttttttgttttttagttagaacgtgaatgtattgttgacgtatattgttttgggagaagattagcgtgatgta

SEQ ID NO: 5102 - DNA, 904 bp, Artificial Sequence
  chemically treated genomic DNA (Homo sapiens) CpG-island No: 5102
tacatcacgctaatcttctcccaaaacaatatacgtcaacaatacattcacgttctaactaaaaaacaaaaaaataaaaaaacaatctacgtaactaccgcctacaacaccgcgaacccgacgcgaaaaaaaaacgataaacgccgcgcgcaaaaaccccgctactactactaccgccgctaaccaacgaaaactatattcctaaactccgaaacgtttcccgcaaccgcgacccccgctactcacgccgctacaacaatccgctaacgacgcgaccactaaaaacgccgaaaaccgaaaccgcgaactcgctccctccgcacaaaaccgaaaccgacgacgcgccgaaaaccgaacaacgacgaacgacgacgaacgattacgcgccgccgaaaactacgaccgccgccgccgccgaacccgcgcccgcccccgaactctctaaaaaaacctacgatacgaacgcgaccgcgaacgccgcgcgctcctccgaccgacgaaccgaatccgaacgcaaccgccacgccgctaatcctcgaaaaccgaacgaaacgccgccccgcgtaccgacaaccgacgaactaaaaaactaaccccccgtttttatctcttccaccctccgaaaaaaaacgaaaaaaaaaaaaatatatatctaaaaaaaacgaaaacgccgcgaacacctcctcttaactctcgccgctccgcgaactcacgaccgcaatcaactaccgccgacccgaaacgaccgacgccgaaaaaaaaaacgcaacatccaacgaatacgacctaaacgacttcgaaacgcccccgcactccctccgacgacgacccgcaaaacgaaccgaaaccgccgaaacgcactttaacgataaaacgccttcccccgcgactaaaacgaaccgat

SEQ ID NO: 5103 - DNA, 904 bp, Artificial Sequence
  chemically treated genomic DNA (Homo sapiens) CpG-island No: 5103
tgtattacgttaatttttttttagaatagtatgcgttagtagtatatttacgttttgattgaaggataaaaggatgagagagtagtttgcgtggttgtcgtttgtaatatcgcgagttcggcgcgaggaggagacggtgggcgtcgcgcgtaggggtttcgttgttgttgttgtcgtcgttagttagcggggattatgtttttgggtttcggagcgtttttcgtagtcgcgattttcgttgtttacgtcgttgtagtagttcgttggcggcgcggttattgagggcgtcgggagtcgaagtcgcgaattcgtttttttcgtataaagtcggagtcggcggcgcgtcgggggtcgggtagcggcgggcggcgacgggcggttgcgcgtcgtcgggggttgcggtcgtcgtcgtcgtcggattcgcgttcgttttcggattttttgaaggggtttgcggtgcgggcgcgatcgcgggcgtcgcgcgttttttcggtcggcggatcgggttcgagcgtagtcgttacgtcgttggttttcgggggtcggacggagcgtcgtttcgcgtgtcggtagtcggcggattggagaattgatttttcgtttttgttttttttatttttcgagaagaggcgaggagaaagggggtgtgtgtttggggagggcgaaggcgtcgcgaatatttttttttaattttcgtcgtttcgcgagtttacgatcgtaattagttgtcgtcggttcggagcggtcgacgtcgggagagggagcgtagtatttagcgagtgcggtttgggcggtttcggggcgttttcgtatttttttcggcggcggttcgtagagcgggtcggggtcgtcggagcgtattttggcgatgaagcgttttttttcgcggttggagcgagtcggt

SEQ ID NO: 5104 - DNA, 904 bp, Artificial Sequence
  chemically treated genomic DNA (Homo sapiens) CpG-island No: 5104
accgactcgctccaaccgcgaaaaaaaacgcttcatcgccaaaatacgctccgacgaccccgacccgctctacgaaccgccgccgaaaaaaatacgaaaacgccccgaaaccgcccaaaccgcactcgctaaatactacgctccctctcccgacgtcgaccgctccgaaccgacgacaactaattacgatcgtaaactcgcgaaacgacgaaaattaaaaaaaaatattcgcgacgccttcgccctccccaaacacacaccccctttctcctcgcctcttctcgaaaaataaaaaaaacaaaaacgaaaaatcaattctccaatccgccgactaccgacacgcgaaacgacgctccgtccgacccccgaaaaccaacgacgtaacgactacgctcgaacccgatccgccgaccgaaaaaacgcgcgacgcccgcgatcgcgcccgcaccgcaaaccccttcaaaaaatccgaaaacgaacgcgaatccgacgacgacgacgaccgcaacccccgacgacgcgcaaccgcccgtcgccgcccgccgctacccgacccccgacgcgccgccgactccgactttatacgaaaaaaacgaattcgcgacttcgactcccgacgccctcaataaccgcgccgccaacgaactactacaacgacgtaaacaacgaaaatcgcgactacgaaaaacgctccgaaacccaaaaacataatccccgctaactaacgacgacaacaacaacaacgaaacccctacgcgcgacgcccaccgtctcctcctcgcgccgaactcgcgatattacaaacgacaaccacgcaaactactctctcatccttttatccttcaatcaaaacgtaaatatactactaacgcatactattctaaaaaaaaattaacgtaataca

SEQ ID NO: 5105 - DNA, 647 bp, Artificial Sequence
  chemically treated genomic DNA (Homo sapiens) CpG-island No: 5105
ttttcgtcgtttgtttcgcggggttaacgtcggcgttttttagcgtcgcgtcggtcggcgtcgcgtagtttcgcgttttcggtcgttcgtttttttttttttttttttttttttttttttttttttttttttttttttttttttttttttttcgggtcgtttttttttcgttttttttagacgagcggagcggggttagggcgagcgggcgagcgagtcggagtgagcgttaagtgaggggtcgcgcgtaagtcgtaggcgttcgtagttattttgggtcggtcggagggagtagttgggtggtcgttgataggttggagcggcgcggggttgcggcgggagagttcgcgtcggttttcgtttttcggttcgtattcggggttttttggttttgaagagcggggtttaggggttcggcggttcgcggcggggttgttgtatttggtttgtttttcgttcggttcgcgttatttttattttcgttgattgttgacggggcgcggattcgcgttcggagttcggaattgcgtggtggggattcgggggacggcggtcggggttacgaggtttttaggatcgagagttcgggtttcgttgttgtattgtcgttagtttttttttcgttttgttttattttttttgtgttt

SEQ ID NO: 5106 - DNA, 647 bp, Artificial Sequence
  chemically treated genomic DNA (Homo sapiens) CpG-island No: 5106
aaacacaaaaaaaataaaacaaaacgaaaaaaaaactaacgacaatacaacaacgaaacccgaactctcgatcctaaaaacctcgtaaccccgaccgccgtcccccgaatccccaccacgcaattccgaactccgaacgcgaatccgcgccccgtcaacaatcaacgaaaataaaaataacgcgaaccgaacgaaaaacaaaccaaatacaacaaccccgccgcgaaccgccgaacccctaaaccccgctcttcaaaaccaaaaaaccccgaatacgaaccgaaaaacgaaaaccgacgcgaactctcccgccgcaaccccgcgccgctccaacctatcaacgaccacccaactactccctccgaccgacccaaaataactacgaacgcctacgacttacgcgcgacccctcacttaacgctcactccgactcgctcgcccgctcgccctaaccccgctccgctcgtctaaaaaaaacgaaaaaaaaacgacccgaaaaaaaaaaaaaaaaaaaaaaaaaaaaaaaaaaaaaaaaaaaaaaaaaaaaaaaaaaaaaaacgaacgaccgaaaacgcgaaactacgcgacgccgaccgacgcgacgctaaaaaacgccgacgttaaccccgcgaaacaaacgacgaaaa

SEQ ID NO: 5107 - DNA, 647 bp, Artificial Sequence
  chemically treated genomic DNA (Homo sapiens) CpG-island No: 5107
gagtataggaggggtgaggtaaagcgaaggaggggttggcggtagtgtagtagcgaagttcgggttttcggttttgggagtttcgtggtttcggtcgtcgtttttcgagtttttattacgtagtttcgaatttcgaacgcgagttcgcgtttcgttagtagttagcgggggtgaggatgacgcgggtcgggcgagaggtaggttaaatgtagtagtttcgtcgcgggtcgtcgggtttttgagtttcgttttttagagttagggggtttcgggtgcgggtcggagggcgggggtcggcgcgggttttttcgtcgtagtttcgcgtcgttttagtttattagcggttatttaattgtttttttcgatcggtttaaaatagttgcgaacgtttgcgatttgcgcgcggttttttatttgacgtttatttcggttcgttcgttcgttcgttttggtttcgtttcgttcgtttagagggggcggggaggaagcggttcggggaggggggaggggggagggggagagaggaagagaggaggaaggaaggaggaaagaggaagacgggcggtcggaggcgcggggttgcgcggcgtcggtcggcgcggcgttggaaggcgtcggcgttaatttcgcgaggtaggcgacggagg

SEQ ID NO: 5108 - DNA, 647 bp, Artificial Sequence
  chemically treated genomic DNA (Homo sapiens) CpG-island No: 5108
cctccgtcgcctacctcgcgaaattaacgccgacgccttccaacgccgcgccgaccgacgccgcgcaaccccgcgcctccgaccgcccgtcttcctctttcctccttccttcctcctctcttcctctctccccctcccccctcccccctccccgaaccgcttcctccccgccccctctaaacgaacgaaacgaaaccaaaacgaacgaacgaacgaaccgaaataaacgtcaaataaaaaaccgcgcgcaaatcgcaaacgttcgcaactattttaaaccgatcgaaaaaaacaattaaataaccgctaataaactaaaacgacgcgaaactacgacgaaaaaacccgcgccgacccccgccctccgacccgcacccgaaaccccctaactctaaaaaacgaaactcaaaaacccgacgacccgcgacgaaactactacatttaacctacctctcgcccgacccgcgtcatcctcacccccgctaactactaacgaaacgcgaactcgcgttcgaaattcgaaactacgtaataaaaactcgaaaaacgacgaccgaaaccacgaaactcccaaaaccgaaaacccgaacttcgctactacactaccgccaacccctccttcgctttacctcacccctcctatactc

SEQ ID NO: 5109 - DNA, 714 bp, Artificial Sequence
  chemically treated genomic DNA (Homo sapiens) CpG-island No: 5109
atttttcggggatagacgtttttcggggcgttattattttggtcggggtgttgggttcggcgggagtttttttgaggagtttgtttttaggtaaaagggtagacgttgttttcgattttttcggagtttgcggtcggaaaagcgttttcgttttatggtttcggttcgaggcggagaacggagttgttcgtgcggggtgcgcgttaaggcgggggataggacgggttcggcgtttgtcgagatttaggttgttcgtatttcgttcgcggttttttttttgtttttcgttttagcggcgtcggagtcgcgttggttttcgtttcgttcggtagttttcgcgagttagagttcggtgtttttagatcgcgggtagtcggggttttatttcgggttagagtaggaaagagttcgatttattttttcggtttttttagggaattttttttcggagggcgttttgggttttcgcgttatatttttggtttttcgttttcggtgatttcggttttttgggttatttcgggagaggcggttattttagttgtaggggtttcgttggggcgcggggggcgcggagggggataaacggtagcgaagggggtcgtttatttatcggggtcggggttggaggcgacgagttggttgttaaggttggtggttggtagttcgtatttattgcgcggagttgtttttttagttgggatgggaagtggt

SEQ ID NO: 5110 - DNA, 714 bp, Artificial Sequence
  chemically treated genomic DNA (Homo sapiens) CpG-island No: 5110
accacttcccatcccaactaaaaaaacaactccgcgcaataaatacgaactaccaaccaccaaccttaacaaccaactcgtcgcctccaaccccgaccccgataaataaacgacccccttcgctaccgtttatccccctccgcgccccccgcgccccaacgaaacccctacaactaaaataaccgcctctcccgaaataacccaaaaaaccgaaatcaccgaaaacgaaaaaccaaaaatataacgcgaaaacccaaaacgccctccgaaaaaaaattccctaaaaaaaccgaaaaaataaatcgaactctttcctactctaacccgaaataaaaccccgactacccgcgatctaaaaacaccgaactctaactcgcgaaaactaccgaacgaaacgaaaaccaacgcgactccgacgccgctaaaacgaaaaacaaaaaaaaaaccgcgaacgaaatacgaacaacctaaatctcgacaaacgccgaacccgtcctatcccccgccttaacgcgcaccccgcacgaacaactccgttctccgcctcgaaccgaaaccataaaacgaaaacgcttttccgaccgcaaactccgaaaaaatcgaaaacaacgtctacccttttacctaaaaacaaactcctcaaaaaaactcccgccgaacccaacaccccgaccaaaataataacgccccgaaaaacgtctatccccgaaaaat

SEQ ID NO: 5111 - DNA, 714 bp, Artificial Sequence
  chemically treated genomic DNA (Homo sapiens) CpG-island No: 5111
attattttttattttagttagagagatagtttcgcgtagtaagtgcggattgttagttattagttttggtagttagttcgtcgtttttagtttcgatttcggtaagtgaacggtttttttcgttgtcgtttgttttttttcgcgtttttcgcgttttagcgggatttttgtaattgggatggtcgtttttttcggaatgatttagggagtcggagttatcgggagcgggggattaggaatatggcgcggaggtttagggcgtttttcgagaaggggttttttggaagaatcgaggaggtgggtcgggtttttttttgttttggttcggaatgaggtttcgattgttcgcggtttgggggtatcgggttttgattcgcgggagttgtcgggcggggcgggggttagcgcggtttcggcgtcgttagagcgggaggtagaaggggagtcgcgagcggaatgcgggtagtttaggtttcggtagacgtcgggttcgttttgtttttcgttttggcgcgtatttcgtacgggtagtttcgtttttcgtttcggatcgagattatgaaacggagacgttttttcggtcgtagatttcggggaggtcgggagtaacgtttgtttttttatttgggagtaaattttttaaagggattttcgtcgagtttagtatttcgattaggatggtggcgtttcgaggggcgtttgttttcggagagt

SEQ ID NO: 5112 - DNA, 714 bp, Artificial Sequence
  chemically treated genomic DNA (Homo sapiens) CpG-island No: 5112
actctccgaaaacaaacgcccctcgaaacgccaccatcctaatcgaaatactaaactcgacgaaaatccctttaaaaaatttactcccaaataaaaaaacaaacgttactcccgacctccccgaaatctacgaccgaaaaaacgtctccgtttcataatctcgatccgaaacgaaaaacgaaactacccgtacgaaatacgcgccaaaacgaaaaacaaaacgaacccgacgtctaccgaaacctaaactacccgcattccgctcgcgactccccttctacctcccgctctaacgacgccgaaaccgcgctaacccccgccccgcccgacaactcccgcgaatcaaaacccgatacccccaaaccgcgaacaatcgaaacctcattccgaaccaaaacaaaaaaaaacccgacccacctcctcgattcttccaaaaaaccccttctcgaaaaacgccctaaacctccgcgccatattcctaatcccccgctcccgataactccgactccctaaatcattccgaaaaaaacgaccatcccaattacaaaaatcccgctaaaacgcgaaaaacgcgaaaaaaaacaaacgacaacgaaaaaaaccgttcacttaccgaaatcgaaactaaaaacgacgaactaactaccaaaactaataactaacaatccgcacttactacgcgaaactatctctctaactaaaataaaaaataat

SEQ ID NO: 5113 - DNA, 573 bp, Artificial Sequence
  chemically treated genomic DNA (Homo sapiens) CpG-island No: 5113
gggttagcggtcggatattgtcgtttatatttgcgaacggcgttcgtttcgcggattgtttagcggatggttcggagatttcgtttcgttcggtcgttttttcgttagtttatatcgttatttcggtttcgtcgcgcgggtttttcgtatttggtcggcggcggttgcggttgcggttgtagcgttgttttttacgtattcgtttcgtattttttcgttcgttacgtagttattcgttcgtatcgtgcggcggtagtagtagttttcgggtttcggtcgtatttttttggtagtattaggcgtaaggtaggttttgtaggcggtggtagcggcggcggttgttttaagtttcgtttcgtattttatttattttttcgaaatcggaaatggttgtagcgtcgtcgttaattttcgggcgggtttttatagagggcggggtttttttcgtagaggatcggtttcggttaaggttacgtagcgaagggaaaaagcggcggggatttgtcgagagggatgtggttttgaggatcgttgattaatttggaagagaaggaggcggattttatgttgttg

SEQ ID NO: 5114 - DNA, 573 bp, Artificial Sequence
  chemically treated genomic DNA (Homo sapiens) CpG-island No: 5114
caacaacataaaatccgcctccttctcttccaaattaatcaacgatcctcaaaaccacatccctctcgacaaatccccgccgctttttcccttcgctacgtaaccttaaccgaaaccgatcctctacgaaaaaaaccccgccctctataaaaacccgcccgaaaattaacgacgacgctacaaccatttccgatttcgaaaaaataaataaaatacgaaacgaaacttaaaacaaccgccgccgctaccaccgcctacaaaacctaccttacgcctaatactaccaaaaaaatacgaccgaaacccgaaaactactactaccgccgcacgatacgaacgaataactacgtaacgaacgaaaaaatacgaaacgaatacgtaaaaaacaacgctacaaccgcaaccgcaaccgccgccgaccaaatacgaaaaacccgcgcgacgaaaccgaaataacgatataaactaacgaaaaaacgaccgaacgaaacgaaatctccgaaccatccgctaaacaatccgcgaaacgaacgccgttcgcaaatataaacgacaatatccgaccgctaaccc

SEQ ID NO: 5115 - DNA, 573 bp, Artificial Sequence
  chemically treated genomic DNA (Homo sapiens) CpG-island No: 5115
tagtagtatggggttcgttttttttttttttagattggttagcggtttttaggattatatttttttcggtaggttttcgtcgtttttttttttcgttgcgtggttttggtcgagatcggttttttgcggagagggtttcgttttttgtgaaggttcgttcgggaattggcggcggcgttgtagttattttcggtttcggggaggtgggtggggtgcggagcgggatttggagtagtcgtcgtcgttgttatcgtttatagagtttgttttgcgtttggtgttgttaggaagatgcggtcggagttcggaggttgttgttgtcgtcgtacggtgcgggcgaatggttgcgtggcgaacggggaagtacggaacgggtacgtgaggagtagcgttgtagtcgtagtcgtagtcgtcgtcggttaggtacgaggggttcgcgcggcggggtcggggtggcggtgtggattggcggaggggcggtcgggcggggcgaggttttcgggttattcgttgggtaattcgcggggcgggcgtcgttcgtaggtgtgggcggtagtgttcggtcgttggttt

SEQ ID NO: 5116 - DNA, 573 bp, Artificial Sequence
  chemically treated genomic DNA (Homo sapiens) CpG-island No: 5116
aaaccaacgaccgaacactaccgcccacacctacgaacgacgcccgccccgcgaattacccaacgaataacccgaaaacctcgccccgcccgaccgcccctccgccaatccacaccgccaccccgaccccgccgcgcgaacccctcgtacctaaccgacgacgactacgactacgactacaacgctactcctcacgtacccgttccgtacttccccgttcgccacgcaaccattcgcccgcaccgtacgacgacaacaacaacctccgaactccgaccgcatcttcctaacaacaccaaacgcaaaacaaactctataaacgataacaacgacgacgactactccaaatcccgctccgcaccccacccacctccccgaaaccgaaaataactacaacgccgccgccaattcccgaacgaaccttcacaaaaaacgaaaccctctccgcaaaaaaccgatctcgaccaaaaccacgcaacgaaaaaaaaaaacgacgaaaacctaccgaaaaaaatataatcctaaaaaccgctaaccaatctaaaaaaaaaaaaaacgaaccccatactacta

SEQ ID NO: 5117 - DNA, 750 bp, Artificial Sequence
  chemically treated genomic DNA (Homo sapiens) CpG-island No: 5117
tgtaacggaggggtaggagcggttattgttttgtaacggagggggaagagcgggttatcgttttgtaacggagggggaggagagggttatcgttttgtaacggaggggtaggagcggttattgttttgtaacggagggggaagagcgggttatcgttttgtaacggagggggaggagagggttatcgttttgtaacggagggggaggagagggttatcgttttgtaacggaggggtaggagcgggttatcgttttgtaacggaggggtaggagtgggttatcgttttgtaacggagggggaggagtgggttatcgttttgtaacggagggggaggggcgggttatcgttttgtaacggaggggtaggggcgggttatcgttttgtaacggagggggaggggcgggttatcgttttgtaacggaggggtaggagcggttatcgttttgtaacggagggggaagagcgggttatcgttttgtaacggagggggaggagcgggttatcgttttgtaacggaggggtaggagcgggttatcgttttgtaacggagggggaggagcgggttatcgttttgtaacggaggggtaggagcggttatcgttttgtaacggaggggtaggagcggttatcgttttgtaacggagggggaggagcgggttatcgttttgtaacggagggggaggagcgggttatcgttttgtaacggaggggtaggagcgggtttttaatagtgttagttgtattgtggg

SEQ ID NO: 5118 - DNA, 750 bp, Artificial Sequence
  chemically treated genomic DNA (Homo sapiens) CpG-island No: 5118
cccacaatacaactaacactattaaaaacccgctcctacccctccgttacaaaacgataacccgctcctccccctccgttacaaaacgataacccgctcctccccctccgttacaaaacgataaccgctcctacccctccgttacaaaacgataaccgctcctacccctccgttacaaaacgataacccgctcctccccctccgttacaaaacgataacccgctcctacccctccgttacaaaacgataacccgctcctccccctccgttacaaaacgataacccgctcttccccctccgttacaaaacgataaccgctcctacccctccgttacaaaacgataacccgcccctccccctccgttacaaaacgataacccgcccctacccctccgttacaaaacgataacccgcccctccccctccgttacaaaacgataacccactcctccccctccgttacaaaacgataacccactcctacccctccgttacaaaacgataacccgctcctacccctccgttacaaaacgataaccctctcctccccctccgttacaaaacgataaccctctcctccccctccgttacaaaacgataacccgctcttccccctccgttacaaaacaataaccgctcctacccctccgttacaaaacgataaccctctcctccccctccgttacaaaacgataacccgctcttccccctccgttacaaaacaataaccgctcctacccctccgttaca

SEQ ID NO: 5119 - DNA, 750 bp, Artificial Sequence
  chemically treated genomic DNA (Homo sapiens) CpG-island No: 5119
tttatagtgtagttgatattattgagggttcgtttttgttttttcgttataggacggtggttcgttttttttttttcgttataggacggtggttcgttttttttttttcgttataggacggtggtcgtttttgttttttcgttataggacggtggtcgtttttgttttttcgttataggacggtggttcgttttttttttttcgttataggacggtggttcgtttttgttttttcgttataggacggtggttcgttttttttttttcgttataggacggtggttcgttttttttttttcgttataggacggtggtcgtttttgttttttcgttataggacggtggttcgttttttttttttcgttataggacggtggttcgtttttgttttttcgttataggacggtggttcgttttttttttttcgttataggacggtggtttattttttttttttcgttataggacggtggtttatttttgttttttcgttataggacggtggttcgtttttgttttttcgttataggacggtggttttttttttttttttcgttataggacggtggttttttttttttttttcgttataggacggtggttcgttttttttttttcgttataggatagtggtcgtttttgttttttcgttataggacggtggttttttttttttttttcgttataggacggtggttcgttttttttttttcgttataggatagtggtcgtttttgttttttcgttata

SEQ ID NO: 5120 - DNA, 750 bp, Artificial Sequence
  chemically treated genomic DNA (Homo sapiens) CpG-island No: 5120
tataacgaaaaaacaaaaacgaccactatcctataacgaaaaaaaaaaaacgaaccaccgtcctataacgaaaaaaaaaaaaaaaaccaccgtcctataacgaaaaaacaaaaacgaccactatcctataacgaaaaaaaaaaaacgaaccaccgtcctataacgaaaaaaaaaaaaaaaaccaccgtcctataacgaaaaaaaaaaaaaaaaccaccgtcctataacgaaaaaacaaaaacgaaccaccgtcctataacgaaaaaacaaaaataaaccaccgtcctataacgaaaaaaaaaaaataaaccaccgtcctataacgaaaaaaaaaaaacgaaccaccgtcctataacgaaaaaacaaaaacgaaccaccgtcctataacgaaaaaaaaaaaacgaaccaccgtcctataacgaaaaaacaaaaacgaccaccgtcctataacgaaaaaaaaaaaacgaaccaccgtcctataacgaaaaaaaaaaaacgaaccaccgtcctataacgaaaaaacaaaaacgaaccaccgtcctataacgaaaaaaaaaaaacgaaccaccgtcctataacgaaaaaacaaaaacgaccaccgtcctataacgaaaaaacaaaaacgaccaccgtcctataacgaaaaaaaaaaaacgaaccaccgtcctataacgaaaaaaaaaaaacgaaccaccgtcctataacgaaaaaacaaaaacgaaccctcaataatatcaactacactataaa

SEQ ID NO: 5121 - DNA, 576 bp, Artificial Sequence
  chemically treated genomic DNA (Homo sapiens) CpG-island No: 5121
tttgtcgttttttttcgtttttagtttttcggaaatgaattcggtcgggtttttagtttggcgggcgagttaggttcgatagtttcgcgtcgggcgagcggaggatttatcgttcgttcgtcgtttatttcgggggttttattcggttcgattgtagtttttttttttggtataggcggttgaggaaggatttttgttcgcggtatagcgtttgtcgggtggttaggaatatcgtgttttttacgttgagtcgtatttatttgttttagtcgtttgcggcgcggtcgttcgttttcgtcggcggcgttgttttttcggtttttatttttatcgtcggtcgcggcgtttgtatttttttttcgggcgttgggggcgggcggggatcgtacgcggggtaggtcgggagttgtagttcgcgttttttggtttcgcgtgggtcgcgggtagggtttcgtttcgcgttgttttcgttttcggtttcgtttcgtttcgttttttttcgtaggttcgtagtttggggtggtgaagatgttttttggttaaattattgtgtatggggaaggtcgaattttcggt

SEQ ID NO: 5122 - DNA, 576 bp, Artificial Sequence
  chemically treated genomic DNA (Homo sapiens) CpG-island No: 5122
accgaaaattcgaccttccccatacacaataatttaaccaaaaaacatcttcaccaccccaaactacgaacctacgaaaaaaaacgaaacgaaacgaaaccgaaaacgaaaacaacgcgaaacgaaaccctacccgcgacccacgcgaaaccaaaaaacgcgaactacaactcccgacctaccccgcgtacgatccccgcccgcccccaacgcccgaaaaaaaaatacaaacgccgcgaccgacgataaaaataaaaaccgaaaaaacaacgccgccgacgaaaacgaacgaccgcgccgcaaacgactaaaacaaataaatacgactcaacgtaaaaaacacgatattcctaaccacccgacaaacgctataccgcgaacaaaaatccttcctcaaccgcctataccaaaaaaaaaaactacaatcgaaccgaataaaacccccgaaataaacgacgaacgaacgataaatcctccgctcgcccgacgcgaaactatcgaacctaactcgcccgccaaactaaaaacccgaccgaattcatttccgaaaaactaaaaacgaaaaaaaacgacaaa

SEQ ID NO: 5123 - DNA, 576 bp, Artificial Sequence
  chemically treated genomic DNA (Homo sapiens) CpG-island No: 5123
gtcgggagttcgattttttttatatatagtgatttggttagagggtatttttattattttagattgcgggtttgcggggaagggcgaagcggggcgggatcgggggcgggagtagcgcggggcgggattttattcgcggtttacgcggagttaggaggcgcggattatagttttcggtttgtttcgcgtgcggttttcgttcgtttttagcgttcgggaggaggatgtagacgtcgcggtcggcgatgaggatggaggtcggggaggtagcgtcgtcggcgggggcgggcggtcgcgtcgtaggcggttggggtaagtgggtgcggtttaacgtggggggtacggtgtttttgattattcggtagacgttgtgtcgcgagtagaagtttttttttagtcgtttgtgttagggggaagagttgtagtcggatcgggtgaggttttcggggtgggcggcgagcgggcggtgggtttttcgttcgttcgacgcggggttgtcgggtttggttcgttcgttaggttggggattcggtcgggtttattttcgaggaattggaggcgggaagaagcggtagg

SEQ ID NO: 5124 - DNA, 576 bp, Artificial Sequence
  chemically treated genomic DNA (Homo sapiens) CpG-island No: 5124
cctaccgcttcttcccgcctccaattcctcgaaaataaacccgaccgaatccccaacctaacgaacgaaccaaacccgacaaccccgcgtcgaacgaacgaaaaacccaccgcccgctcgccgcccaccccgaaaacctcacccgatccgactacaactcttccccctaacacaaacgactaaaaaaaaacttctactcgcgacacaacgtctaccgaataatcaaaaacaccgtaccccccacgttaaaccgcacccacttaccccaaccgcctacgacgcgaccgcccgcccccgccgacgacgctacctccccgacctccatcctcatcgccgaccgcgacgtctacatcctcctcccgaacgctaaaaacgaacgaaaaccgcacgcgaaacaaaccgaaaactataatccgcgcctcctaactccgcgtaaaccgcgaataaaatcccgccccgcgctactcccgcccccgatcccgccccgcttcgcccttccccgcaaacccgcaatctaaaataataaaaataccctctaaccaaatcactatatataaaaaaaatcgaactcccgac

SEQ ID NO: 5125 - DNA, 741 bp, Artificial Sequence
  chemically treated genomic DNA (Homo sapiens) CpG-island No: 5125
cgcgttgttagtatttcgtagcgcgtggtcgtgtatttcggaatttgtagtagttgtatatttgaggggggttttttttgttcgcgtcgttttcgtttttcgtgtttttgggtgtgtggagggttttagtgcgcggcgttttcgttttttcgtaatttttcgtttcgcgttcggattcgtttcgcgttattaagatggttatttagaaagagaagaagagttgcgggtaggtggttgaggagtggaaggagttcgtgtggaattcgaggacgtattagtttatgggtcgtatcgggattagttggggtacgtagggtcggtacgtaaggggcgggggaaagtcgcggggcgacgtttcgggggcgtagggtttcgtcgacgcggttttagtttttttttcgggttttcggcgtttagtttttttgtcgggttttgggttgggagggggtcgaatcgttagtttaattttttcggttggtcgtgcggaggcggagaaagtaggttatagtcgttttttcgtttttcgcggagttttttcgggcggggggtcgttagtttcgtttgcgtgttcgcgtcgcggcgtttatattttttttcggggtttgttcgttttatacgggcgttttttatttttaaagagcgtttttttttttttttcggtttttattagtttcgtagtttcgtttatttttagttcgtgtttattttttggattttgggaacgtttatgagggggcgggt

SEQ ID NO: 5126 - DNA, 741 bp, Artificial Sequence
  chemically treated genomic DNA (Homo sapiens) CpG-island No: 5126
acccgccccctcataaacgttcccaaaatccaaaaaataaacacgaactaaaaataaacgaaactacgaaactaataaaaaccgaaaaaaaaaaaaaaacgctctttaaaaataaaaaacgcccgtataaaacgaacaaaccccgaaaaaaaatataaacgccgcgacgcgaacacgcaaacgaaactaacgaccccccgcccgaaaaaactccgcgaaaaacgaaaaaacgactataacctactttctccgcctccgcacgaccaaccgaaaaaattaaactaacgattcgaccccctcccaacccaaaacccgacaaaaaaactaaacgccgaaaacccgaaaaaaaaactaaaaccgcgtcgacgaaaccctacgcccccgaaacgtcgccccgcgactttcccccgccccttacgtaccgaccctacgtaccccaactaatcccgatacgacccataaactaatacgtcctcgaattccacacgaactccttccactcctcaaccacctacccgcaactcttcttctctttctaaataaccatcttaataacgcgaaacgaatccgaacgcgaaacgaaaaattacgaaaaaacgaaaacgccgcgcactaaaaccctccacacacccaaaaacacgaaaaacgaaaacgacgcgaacaaaaaaaacccccctcaaatatacaactactacaaattccgaaatacacgaccacgcgctacgaaatactaacaacgcg

SEQ ID NO: 5127 - DNA, 741 bp, Artificial Sequence
  chemically treated genomic DNA (Homo sapiens) CpG-island No: 5127
attcgtttttttatgaacgtttttagggtttagggggtgggtacgagttaaaaatagacggggttgcggagttagtgagagtcggagggagggaaggggcgttttttggaggtgggggacgttcgtgtggagcggataggtttcgagagggagtgtgagcgtcgcggcgcggatacgtaggcggagttggcgatttttcgttcgagggggtttcgcggggggcgggaaggcggttgtgatttatttttttcgttttcgtacggttagtcggggagattagattggcgattcggtttttttttagtttagagttcggtagggaggttggacgtcggggattcgggaggggagttggggtcgcgtcggcgggattttgcgttttcgaggcgtcgtttcgcggttttttttcgttttttgcgtgtcggttttgcgtattttagttggtttcggtgcggtttataaattggtgcgttttcgggttttatacgaattttttttattttttaattatttgttcgtagttttttttttttttttggatgattattttggtggcgcggggcgagttcgggcgcggggcggggggttgcggagaagcgggggcgtcgcgtattgaagttttttatatatttaaaagtacggggagcgaaggcggcgcgggtaaaggagattttttttagatatgtagttgttgtagatttcggggtgtacgattacgcgttgcggggtgttggtagcgcg

SEQ ID NO: 5128 - DNA, 741 bp, Artificial Sequence
  chemically treated genomic DNA (Homo sapiens) CpG-island No: 5128
cgcgctaccaacaccccgcaacgcgtaatcgtacaccccgaaatctacaacaactacatatctaaaaaaaatctcctttacccgcgccgccttcgctccccgtacttttaaatatataaaaaacttcaatacgcgacgcccccgcttctccgcaaccccccgccccgcgcccgaactcgccccgcgccaccaaaataatcatccaaaaaaaaaaaaaaaactacgaacaaataattaaaaaataaaaaaaattcgtataaaacccgaaaacgcaccaatttataaaccgcaccgaaaccaactaaaatacgcaaaaccgacacgcaaaaaacgaaaaaaaaccgcgaaacgacgcctcgaaaacgcaaaatcccgccgacgcgaccccaactcccctcccgaatccccgacgtccaacctccctaccgaactctaaactaaaaaaaaaccgaatcgccaatctaatctccccgactaaccgtacgaaaacgaaaaaaataaatcacaaccgccttcccgccccccgcgaaaccccctcgaacgaaaaatcgccaactccgcctacgtatccgcgccgcgacgctcacactccctctcgaaacctatccgctccacacgaacgtcccccacctccaaaaaacgccccttccctccctccgactctcactaactccgcaaccccgtctatttttaactcgtacccaccccctaaaccctaaaaacgttcataaaaaaacgaat

SEQ ID NO: 5129 - DNA, 732 bp, Artificial Sequence
  chemically treated genomic DNA (Homo sapiens) CpG-island No: 5129
ggcgtttttagtcggcgcgtcgttttattttgtagaaggtttcgttggagtcgcgtatttcgacgggtagtttcggttttatattttttttagaggttaggtcgtttatggcgtcgttatcgttttcgattttttcggcggcggttgtagtagtagtttgagtgcgggtcgggttaggttttcggcgttttttcggaggaggagtcggagggggagtcgcggggggcgggagtcgggtcggttttacggcggttttgttatagttaacgagtagggggtcggggtcgggtcgtttttcgttcgtcgtcgtcgttttggttttcgttatcgtgagggaaacggtcgtcgtcgtcgttgttttcgttattttagttttcgttcgtcgtcgttttcgttgttgttttagtttcgggattcgttgttgtcgttgtcgttttatagtttttatttttttttgttatcgtcgtttattgcgtaggcgtatcgggtattcgttcgttgcgcgcggggtttcgagggttatcgcgtaggcgttaaggttagagttttagttagcgttagttagcgtatcggggtttttatatttttttttatttttttatttttttttttggtcgtttgttagcgtttgcgtagaataagattagttttttttttttatcgttttatcgtttagttatttcgttttttttttttttcgttttataatattgagaattaattaattagggg

SEQ ID NO: 5130 - DNA, 732 bp, Artificial Sequence
  chemically treated genomic DNA (Homo sapiens) CpG-island No: 5130
cccctaattaattaattctcaatattataaaacgaaaaaaaaaaaaaacgaaataactaaacgataaaacgataaaaaaaaaaaactaatcttattctacgcaaacgctaacaaacgaccaaaaaaaaaaataaaaaaataaaaaaaaatataaaaaccccgatacgctaactaacgctaactaaaactctaaccttaacgcctacgcgataaccctcgaaaccccgcgcgcaacgaacgaatacccgatacgcctacgcaataaacgacgataacaaaaaaaaataaaaactataaaacgacaacgacaacaacgaatcccgaaactaaaacaacaacgaaaacgacgacgaacgaaaactaaaataacgaaaacaacgacgacgacgaccgtttccctcacgataacgaaaaccaaaacgacgacgacgaacgaaaaacgacccgaccccgaccccctactcgttaactataacaaaaccgccgtaaaaccgacccgactcccgccccccgcgactccccctccgactcctcctccgaaaaaacgccgaaaacctaacccgacccgcactcaaactactactacaaccgccgccgaaaaaatcgaaaacgataacgacgccataaacgacctaacctctaaaaaaaatataaaaccgaaactacccgtcgaaatacgcgactccaacgaaaccttctacaaaataaaacgacgcgccgactaaaaacgcc

SEQ ID NO: 5131 - DNA, 732 bp, Artificial Sequence
  chemically treated genomic DNA (Homo sapiens) CpG-island No: 5131
tttttgattggttggtttttagtgttgtggggcggggaaaggaagagacggggtggttgggcggtggagcggtgaagaaagaaggttaattttgttttgcgtaagcgttagtaagcgattaggagggggagtgagagagtgaaagggaatgtggaagtttcgatgcgttagttggcgttagttggggttttaattttgacgtttgcgcggtggttttcggggtttcgcgcgtagcgggcgggtgttcggtgcgtttgcgtagtaggcggcggtggtagggggaggtggaggttgtggagcggtagcggtagtagcgggtttcgggattgaggtagtagcgggggcggcggcgggcggaagttgaggtgacgaaggtagcggcggcggcggtcgttttttttacggtggcggagattaaggcggcggcggcggacggggagcggttcggtttcggttttttgttcgttggttgtggtagggtcgtcgtggggtcggttcggttttcgtttttcgcggtttttttttcggtttttttttcggggagacgtcgggggtttggttcggttcgtatttagattgttgttgtagtcgtcgtcgggggagtcggaggcggtggcggcgttatgggcggtttggtttttgggggggatgtggagtcgggattgttcgtcgaggtgcgcggttttaacggggttttttataaggtgagacggcgcgtcgattggggacgtt

SEQ ID NO: 5132 - DNA, 732 bp, Artificial Sequence
  chemically treated genomic DNA (Homo sapiens) CpG-island No: 5132
aacgtccccaatcgacgcgccgtctcaccttataaaaaaccccgttaaaaccgcgcacctcgacgaacaatcccgactccacatcccccccaaaaaccaaaccgcccataacgccgccaccgcctccgactcccccgacgacgactacaacaacaatctaaatacgaaccgaaccaaacccccgacgtctccccgaaaaaaaaaccgaaaaaaaaaccgcgaaaaacgaaaaccgaaccgaccccacgacgaccctaccacaaccaacgaacaaaaaaccgaaaccgaaccgctccccgtccgccgccgccgccttaatctccgccaccgtaaaaaaaacgaccgccgccgccgctaccttcgtcacctcaacttccgcccgccgccgcccccgctactacctcaatcccgaaacccgctactaccgctaccgctccacaacctccacctccccctaccaccgccgcctactacgcaaacgcaccgaacacccgcccgctacgcgcgaaaccccgaaaaccaccgcgcaaacgtcaaaattaaaaccccaactaacgccaactaacgcatcgaaacttccacattccctttcactctctcactccccctcctaatcgcttactaacgcttacgcaaaacaaaattaaccttctttcttcaccgctccaccgcccaaccaccccgtctcttcctttccccgccccacaacactaaaaaccaaccaatcaaaaa

SEQ ID NO: 5133 - DNA, 671 bp, Artificial Sequence
  chemically treated genomic DNA (Homo sapiens) CpG-island No: 5133
  unsure (3, 8, 19, 30, 47, 135, 152, 162, 178, 189, 256, 427)
tantttgncggtcgaggtngcggtttattnttgagatagtcgttttntcgagcgtagtttttttatttttcgtagtagttttttttttttcgtcgttggtacgagtcgagattgttcgtttaggttgggtttttntgggggtttcggggatntggtcgtttncggtggcgagcgtttntcggatatttnttcgttacgtcgggtttcgcgaaatttttcgaaatttcgttcgggatgtttcggttttcgggatagngcgttcgcggcgagaggcgcggtcgacggagcgttgggggtttagggttgttcggcggcgtttttcgggttgcggggttcggcgtcggcgtttttcgtgggggtttacggtcgttggagttcgtgtcggattcggcgtcgttgttggcggtagggagtaagcgttgttcgntcggataggggtttcgaggggtagttagagaggtcggagttgttgttcgtgtggttgatgcgcgagtaagcgcgggggattcggttatcgaggttatcgcgagggttacggtagggattcgggcgatcggggacggggggtagaaagtgcgggcggatggcgttcgggagttagcgaatggttttgcggttttattgtttagaagtgaagatattgaggtaagttgtttgtttaaggatagttg

SEQ ID NO: 5134 - DNA, 671 bp, Artificial Sequence
  chemically treated genomic DNA (Homo sapiens) CpG-island No: 5134
  unsure (245, 416, 483, 494, 510, 520, 537, 625, 642, 653, 664, 669)
caactatccttaaacaaacaacttacctcaatatcttcacttctaaacaataaaaccgcaaaaccattcgctaactcccgaacgccatccgcccgcactttctaccccccgtccccgatcgcccgaatccctaccgtaaccctcgcgataacctcgataaccgaatcccccgcgcttactcgcgcatcaaccacacgaacaacaactccgacctctctaactacccctcgaaacccctatccgancgaacaacgcttactccctaccgccaacaacgacgccgaatccgacacgaactccaacgaccgtaaacccccacgaaaaacgccgacgccgaaccccgcaacccgaaaaacgccgccgaacaaccctaaacccccaacgctccgtcgaccgcgcctctcgccgcgaacgcnctatcccgaaaaccgaaacatcccgaacgaaatttcgaaaaatttcgcgaaacccgacgtaacgaanaaatatccganaaacgctcgccaccgnaaacgaccanatccccgaaacccccanaaaaacccaacctaaacgaacaatctcgactcgtaccaacgacgaaaaaaaaaaaactactacgaaaaataaaaaaactacgctcganaaaacgactatctcaanaataaaccgcnacctcgaccgncaaanta

SEQ ID NO: 5135 - DNA, 671 bp, Artificial Sequence
  chemically treated genomic DNA (Homo sapiens) CpG-island No: 5135
  unsure (245, 416, 483, 494, 510, 520, 537, 625, 642, 653, 664, 669)
tagttgtttttaggtaagtagtttattttagtgtttttatttttaggtagtagggtcgtaaagttattcgttggttttcgggcgttattcgttcgtattttttgtttttcgttttcggtcgttcggatttttgtcgtgattttcgcggtgatttcggtggtcgggtttttcgcgtttgttcgcgtattagttatacggatagtagtttcgatttttttgattgtttttcggaatttttgttcgancgagtagcgtttgttttttgtcgttagtagcgacgtcgaattcggtacgggttttagcgatcgtgaatttttacgaggagcgtcgacgtcgagtttcgtagttcgaggagcgtcgtcgggtagttttgagtttttagcgtttcgtcgatcgcgtttttcgtcgcgggcgtnttgtttcgggggtcggagtatttcgagcggggtttcggggggtttcgcggggttcggcgtggcgganggatgttcggngggcgttcgttatcgngagcgattangttttcgggatttttanaggagtttagtttgggcgagtagtttcggttcgtgttagcggcggaggaagaagagttgttgcgggagatggaggagttgcgttcggnagaacgattattttaanggtgagtcgtngtttcggtcgntaggntg

SEQ ID NO: 5136 - DNA, 671 bp, Artificial Sequence
  chemically treated genomic DNA (Homo sapiens) CpG-island No: 5136
  unsure (3, 8, 19, 30, 47, 135, 152, 162, 178, 189, 256, 427)
cancctancgaccgaaacnacgactcaccnttaaaataatcgttctnccgaacgcaactcctccatctcccgcaacaactcttcttcctccgccgctaacacgaaccgaaactactcgcccaaactaaactcctntaaaaatcccgaaaacntaatcgctcncgataacgaacgcccnccgaacatccntccgccacgccgaaccccgcgaaaccccccgaaaccccgctcgaaatactccgacccccgaaacaanacgcccgcgacgaaaaacgcgatcgacgaaacgctaaaaactcaaaactacccgacgacgctcctcgaactacgaaactcgacgtcgacgctcctcgtaaaaattcacgatcgctaaaacccgtaccgaattcgacgtcgctactaacgacaaaaaacaaacgctactcgntcgaacaaaaattccgaaaaacaatcaaaaaaatcgaaactactatccgtataactaatacgcgaacaaacgcgaaaaacccgaccaccgaaatcaccgcgaaaatcacgacaaaaatccgaacgaccgaaaacgaaaaacaaaaaatacgaacgaataacgcccgaaaaccaacgaataactttacgaccctactacctaaaaataaaaacactaaaataaactacttacctaaaaacaacta

SEQ ID NO: 5137 - DNA, 657 bp, Artificial Sequence
  chemically treated genomic DNA (Homo sapiens) CpG-island No: 5137
cgttttttttttttaggaagtttttcgggatagtgttttttttttgcggattttattagaatcggatggattaggtttttaggtagtttcggttcggcgcgttttcggttttggttttcggggtttcgcgaaggttcgggggacgtggtgttcgtagtcgggcggggattttggtagtgttagggggtgatttcggcggggcgcgagggttagggcgcggtagaggtgtcgcgggttcgagttttgcggggatcgggtaggagtagttcgtggagcgtagagttgtggtcgagaggcgaatttagttagttttgtgttttcggggattttttcgcggcgttatacgtggtatcggtcggcggggaggtggaggggcgcggtggggcgggggttcgggtttcggggcgagtgcggaagtagcgggattcggtcgcgtcgtcggttcggggttcgggcgatgggacgcgcggttttttttttgtaggcgttcggagaggtggggttggatatcggttttggggggtttgcgttttttcgggttggcggggggcggcgcgggacgttacgtttcggcgttttttttttttttcgttggttttgggtttgagttttttggttttgttttattgttttttgttagtttggtttttgaatttt

SEQ ID NO: 5138 - DNA, 657 bp, Artificial Sequence
  chemically treated genomic DNA (Homo sapiens) CpG-island No: 5138
aaaattcaaaaaccaaactaacaaaaaacaataaaacaaaaccaaaaaactcaaacccaaaaccaacgaaaaaaaaaaaaaacgccgaaacgtaacgtcccgcgccgccccccgccaacccgaaaaaacgcaaaccccccaaaaccgatatccaaccccacctctccgaacgcctacaaaaaaaaaaccgcgcgtcccatcgcccgaaccccgaaccgacgacgcgaccgaatcccgctacttccgcactcgccccgaaacccgaacccccgccccaccgcgcccctccacctccccgccgaccgataccacgtataacgccgcgaaaaaatccccgaaaacacaaaactaactaaattcgcctctcgaccacaactctacgctccacgaactactcctacccgatccccgcaaaactcgaacccgcgacacctctaccgcgccctaaccctcgcgccccgccgaaatcaccccctaacactaccaaaatccccgcccgactacgaacaccacgtcccccgaaccttcgcgaaaccccgaaaaccaaaaccgaaaacgcgccgaaccgaaactacctaaaaacctaatccatccgattctaataaaatccgcaaaaaaaaaacactatcccgaaaaacttcctaaaaaaaaaaaacg

SEQ ID NO: 5139 - DNA, 657 bp, Artificial Sequence
  chemically treated genomic DNA (Homo sapiens) CpG-island No: 5139
aggatttaggaattagattaatagagggtaatgaaataaaattagagaatttaggtttagagttagcgagggagaggaaggacgtcgaagcgtagcgtttcgcgtcgtttttcgttaattcgggaggacgtagattttttagagtcggtgtttagttttattttttcgggcgtttgtaggaggggaatcgcgcgttttatcgttcggatttcgggtcggcggcgcggtcgagtttcgttgttttcgtattcgtttcgggattcggattttcgttttatcgcgtttttttattttttcgtcggtcggtgttacgtgtaacgtcgcgggggaattttcggggatatagggttggttggattcgtttttcggttatagttttgcgttttacgagttgtttttgttcggttttcgtaggattcgaattcgcgatatttttgtcgcgttttagttttcgcgtttcgtcggagttattttttgatattgttaggattttcgttcggttgcgggtattacgtttttcgggttttcgcggggtttcgagggttaagatcgaggacgcgtcgagtcgaggttgtttggggatttggtttattcggttttgatggggttcgtagggaaaaggtattatttcggaaagttttttggaggaggggagcg

SEQ ID NO: 5140 - DNA, 657 bp, Artificial Sequence
  chemically treated genomic DNA (Homo sapiens) CpG-island No: 5140
cgctcccctcctccaaaaaactttccgaaataataccttttccctacgaaccccatcaaaaccgaataaaccaaatccccaaacaacctcgactcgacgcgtcctcgatcttaaccctcgaaaccccgcgaaaacccgaaaaacgtaatacccgcaaccgaacgaaaatcctaacaatatcaaaaaataactccgacgaaacgcgaaaactaaaacgcgacaaaaatatcgcgaattcgaatcctacgaaaaccgaacaaaaacaactcgtaaaacgcaaaactataaccgaaaaacgaatccaaccaaccctatatccccgaaaattcccccgcgacgttacacgtaacaccgaccgacgaaaaaataaaaaaacgcgataaaacgaaaatccgaatcccgaaacgaatacgaaaacaacgaaactcgaccgcgccgccgacccgaaatccgaacgataaaacgcgcgattcccctcctacaaacgcccgaaaaaataaaactaaacaccgactctaaaaaatctacgtcctcccgaattaacgaaaaacgacgcgaaacgctacgcttcgacgtccttcctctccctcgctaactctaaacctaaattctctaattttatttcattaccctctattaatctaattcctaaatcct

SEQ ID NO: 5141 - DNA, 977 bp, Artificial Sequence
  chemically treated genomic DNA (Homo sapiens) CpG-island No: 5141
tcgtgattcgggttattttgacgtatcgggatgcggtttatttgatattcggtattaatttttgttaggaaggaaaattaatttcgcgaaaataaaatgggttttcgaggaggcgtgcgggtgtttttagagtttttttttgtttatatttcgaaagcgagggggttacgtttatttcgattttcgtcggcgttcgttatttgttagacgaggtcgcggttagggattcgggttcggtcgtaaggaaggggtagtttagtttaggttttttcggcgtttgtttcggttcggtagtagaggaaggaattcggggtcggaggttttcgtttcgtacggtcgagttcgttaggggtttagttcgggggtcgttcgtattttcgaggattcgtttttatcgtgcggagcgtatagtcgttttagttcgattcgtagagttttcgggtagcgggcgcggcgttcgtatttgtttcgcgttttgttgtagtttcgttagcggttttatttatttggcgttttcgtcgcgtttttcgttcgttatagcgcgatttcgcgttttttagtatcggtagtttgggcgcgggtaggcgcggggagattttgttttgtcgtcgtcgtcgttattgtagttggtttggtcgttaggtcgtcgttcgcgaatttgttgcgtagtttgttatagtcgtttagggtttcgtcgcgtcgttttagttttataataatatggcggtcgcggttttcgtaggaagtcggggggcggggaggtaggcgtcgggtcgggtagttgacggtcgttcgttgtcgggtatcgattttttatttttcggagttcgaaattgttcgggcgtggtttttcgttttaggagtttcggggtattgaattttgaaggtttgtttcgagtcggtcgggttcgaagcgtttttttttgttttcggggaggtttcgaagttttagatttggtagttttttttggagttgt

SEQ ID NO: 5142 - DNA, 977 bp, Artificial Sequence
  chemically treated genomic DNA (Homo sapiens) CpG-island No: 5142
acaactccaaaaaaaactaccaaatctaaaacttcgaaacctccccgaaaacaaaaaaaaacgcttcgaacccgaccgactcgaaacaaaccttcaaaattcaataccccgaaactcctaaaacgaaaaaccacgcccgaacaatttcgaactccgaaaaataaaaaatcgatacccgacaacgaacgaccgtcaactacccgacccgacgcctacctccccgccccccgacttcctacgaaaaccgcgaccgccatattattataaaactaaaacgacgcgacgaaaccctaaacgactataacaaactacgcaacaaattcgcgaacgacgacctaacgaccaaaccaactacaataacgacgacgacgacaaaacaaaatctccccgcgcctacccgcgcccaaactaccgatactaaaaaacgcgaaatcgcgctataacgaacgaaaaacgcgacgaaaacgccaaataaataaaaccgctaacgaaactacaacaaaacgcgaaacaaatacgaacgccgcgcccgctacccgaaaactctacgaatcgaactaaaacgactatacgctccgcacgataaaaacgaatcctcgaaaatacgaacgacccccgaactaaacccctaacgaactcgaccgtacgaaacgaaaacctccgaccccgaattccttcctctactaccgaaccgaaacaaacgccgaaaaaacctaaactaaactaccccttccttacgaccgaacccgaatccctaaccgcgacctcgtctaacaaataacgaacgccgacgaaaatcgaaataaacgtaaccccctcgctttcgaaatataaacaaaaaaaaactctaaaaacacccgcacgcctcctcgaaaacccattttattttcgcgaaattaattttccttcctaacaaaaattaataccgaatatcaaataaaccgcatcccgatacgtcaaaataacccgaatcacga

SEQ ID NO: 5143 - DNA, 977 bp, Artificial Sequence
  chemically treated genomic DNA (Homo sapiens) CpG-island No: 5143
gtaattttaggaagggttgttaggtttggggtttcggggttttttcgagggtagagaggagcgtttcggattcgatcgattcggagtagatttttagggtttaatgtttcggaatttttggggcgaggagttacgttcgggtagtttcgggtttcggagggtggggagtcggtgttcggtagcgggcggtcgttagttgttcggttcggcgtttattttttcgtttttcggttttttgcggaggtcgcggtcgttatgttgttgtggggttgaggcggcgcggcggagttttgagcggttgtgataggttacgtaataggttcgcgggcggcggtttgacgattaagttagttgtagtggcggcgacggcggtagagtagggttttttcgcgtttgttcgcgtttaggttgtcggtgttgagggacgcggagtcgcgttgtgacgagcgggaggcgcggcgagggcgttaggtgggtgaagtcgttagcggggttgtagtaaggcgcggggtaggtgcgggcgtcgcgttcgttgttcggaggttttgcgggtcgggttgaggcggttgtgcgtttcgtacgatggggacgggttttcgggagtacgggcggttttcgagttaggtttttggcgggttcggtcgtgcggggcggaaattttcggtttcgggtttttttttttgttgtcgggtcgggatagacgtcgagggggtttgggttgggttgttttttttttgcggtcgagttcgggtttttggtcgcggtttcgtttggtaggtggcggacgtcggcgagggtcggggtgggcgtggttttttcgttttcggggtgtgagtagaagagagttttgggggtattcgtacgttttttcggggatttattttattttcgcggagttggtttttttttttggtaagggttggtgtcgaatgttaggtgagtcgtatttcggtgcgttaaagtagttcgagttacga

SEQ ID NO: 5144 - DNA, 977 bp, Artificial Sequence
  chemically treated genomic DNA (Homo sapiens) CpG-island No: 5144
tcgtaactcgaactactttaacgcaccgaaatacgactcacctaacattcgacaccaacccttaccaaaaaaaaaaaccaactccgcgaaaataaaataaatccccgaaaaaacgtacgaatacccccaaaactctcttctactcacaccccgaaaacgaaaaaaccacgcccaccccgaccctcgccgacgtccgccacctaccaaacgaaaccgcgaccaaaaacccgaactcgaccgcaaaaaaaaaacaacccaacccaaaccccctcgacgtctatcccgacccgacaacaaaaaaaaaaacccgaaaccgaaaatttccgccccgcacgaccgaacccgccaaaaacctaactcgaaaaccgcccgtactcccgaaaacccgtccccatcgtacgaaacgcacaaccgcctcaacccgacccgcaaaacctccgaacaacgaacgcgacgcccgcacctaccccgcgccttactacaaccccgctaacgacttcacccacctaacgccctcgccgcgcctcccgctcgtcacaacgcgactccgcgtccctcaacaccgacaacctaaacgcgaacaaacgcgaaaaaaccctactctaccgccgtcgccgccactacaactaacttaatcgtcaaaccgccgcccgcgaacctattacgtaacctatcacaaccgctcaaaactccgccgcgccgcctcaaccccacaacaacataacgaccgcgacctccgcaaaaaaccgaaaaacgaaaaaataaacgccgaaccgaacaactaacgaccgcccgctaccgaacaccgactccccaccctccgaaacccgaaactacccgaacgtaactcctcgccccaaaaattccgaaacattaaaccctaaaaatctactccgaatcgatcgaatccgaaacgctcctctctaccctcgaaaaaaccccgaaaccccaaacctaacaacccttcctaaaattac

SEQ ID NO: 5145 - DNA, 769 bp, Artificial Sequence
  chemically treated genomic DNA (Homo sapiens) CpG-island No: 5145
tcggattcggataggttcgtttttttcgtttcggttttcgttatcgtttaatggtcgagggtagggttcgttgagtaagtcgcggtagttcgtcgggttttcgttttgttttcggttttcgagtcggtttcggaggtttttaaatgttgtttagggtcgacgcgtacggttttcgttattttttttggtcgggtagcggtagcggtagcggtagtaagtagtttcgtcggttcgggttcggggtcgttttgggtcgcggtaagtattttcgtttttttagttcgcgttgtttttttttttttttttttttttaggttttgtttgttaggtcggcgtcgggtttcggcgatcggtcgtttttcgtgtgtgcgcgcgttcgtcgttagttcggattcgcgttttcgttttttttcgcgtaggatagtttcgggatttttcgttcgcgtcgcgttttacgtatttcgtcgcgtcgggtaagaagatggcgggattagtggtcgatagcgatgtcgtggtggtgagtgtggtagggcgcgcgcgagcgttttttttcgtcgtttcgtatttcgtcgtcgtttgttttagtagtgttggggtgttgagtagtcgtaggttcggtcggcgttcgcgcgtgggaaggcgttcggtatttgttagtagtcgttgttgcgcgcggtcggtgttaggggttggagaggttttcgggttgcggggttttgggttggggagggagtttggggaggatggcgggtagggacgttcgatagtt

SEQ ID NO: 5146 - DNA, 769 bp, Artificial Sequence
  chemically treated genomic DNA (Homo sapiens) CpG-island No: 5146
aactatcgaacgtccctacccgccatcctccccaaactccctccccaacccaaaaccccgcaacccgaaaacctctccaacccctaacaccgaccgcgcgcaacaacgactactaacaaataccgaacgccttcccacgcgcgaacgccgaccgaacctacgactactcaacaccccaacactactaaaacaaacgacgacgaaatacgaaacgacgaaaaaaaacgctcgcgcgcgccctaccacactcaccaccacgacatcgctatcgaccactaatcccgccatcttcttacccgacgcgacgaaatacgtaaaacgcgacgcgaacgaaaaatcccgaaactatcctacgcgaaaaaaaacgaaaacgcgaatccgaactaacgacgaacgcgcgcacacacgaaaaacgaccgatcgccgaaacccgacgccgacctaacaaacaaaacctaaaaaaaaaaaaaaaaaaaaaaacaacgcgaactaaaaaaacgaaaatacttaccgcgacccaaaacgaccccgaacccgaaccgacgaaactacttactaccgctaccgctaccgctacccgaccaaaaaaaataacgaaaaccgtacgcgtcgaccctaaacaacatttaaaaacctccgaaaccgactcgaaaaccgaaaacaaaacgaaaacccgacgaactaccgcgacttactcaacgaaccctaccctcgaccattaaacgataacgaaaaccgaaacgaaaaaaacgaacctatccgaatccga

SEQ ID NO: 5147 - DNA, 769 bp, Artificial Sequence
  chemically treated genomic DNA (Homo sapiens) CpG-island No: 5147
ggttgtcgggcgtttttattcgttattttttttaaattttttttttagtttagagtttcgtagttcgggagtttttttagtttttaatatcggtcgcgcgtagtagcggttgttaataggtatcgggcgtttttttacgcgcgggcgtcggtcgggtttgcggttgtttagtattttagtattgttggagtaggcggcggcggagtgcgggacggcggggaggggcgttcgcgcgcgttttgttatatttattattacggtatcgttgtcggttattgatttcgttatttttttgttcggcgcggcggggtacgtgggacgcggcgcgggcgggggatttcggggttgttttgcgcgggggggggcgggggcgcgggttcgagttggcggcgggcgcgcgtatatacgaggggcggtcggtcgtcggggttcggcgtcgatttggtaggtagagtttgggaggaggggaggggagggaggtagcgcgagttgggagggcgaaggtgtttgtcgcggtttagaacggtttcggattcgggtcgacggggttgtttgttgtcgttgtcgttgtcgttgttcgattaagaaaagtggcgagggtcgtgcgcgtcggttttgggtagtatttaaaggttttcggggtcggttcgggaatcgggaatagggcggggattcggcgggttgtcgcggtttgtttagcgggttttgttttcggttattggacggtggcggaggtcggggcgggagggacgggtttgttcgggttcgg

SEQ ID NO: 5148 - DNA, 769 bp, Artificial Sequence
  chemically treated genomic DNA (Homo sapiens) CpG-island No: 5148
ccgaacccgaacaaacccgtccctcccgccccgacctccgccaccgtccaataaccgaaaacaaaacccgctaaacaaaccgcgacaacccgccgaatccccgccctattcccgattcccgaaccgaccccgaaaacctttaaatactacccaaaaccgacgcgcacgaccctcgccacttttcttaatcgaacaacgacaacgacaacgacaacaaacaaccccgtcgacccgaatccgaaaccgttctaaaccgcgacaaacaccttcgccctcccaactcgcgctacctccctcccctcccctcctcccaaactctacctaccaaatcgacgccgaaccccgacgaccgaccgcccctcgtatatacgcgcgcccgccgccaactcgaacccgcgcccccgcccccccccgcgcaaaacaaccccgaaatcccccgcccgcgccgcgtcccacgtaccccgccgcgccgaacaaaaaaataacgaaatcaataaccgacaacgataccgtaataataaatataacaaaacgcgcgcgaacgcccctccccgccgtcccgcactccgccgccgcctactccaacaatactaaaatactaaacaaccgcaaacccgaccgacgcccgcgcgtaaaaaaacgcccgatacctattaacaaccgctactacgcgcgaccgatattaaaaactaaaaaaactcccgaactacgaaactctaaactaaaaaaaaaatttaaaaaaaataacgaataaaaacgcccgacaacc

SEQ ID NO: 5149 - DNA, 891 bp, Artificial Sequence
  chemically treated genomic DNA (Homo sapiens) CpG-island No: 5149
tattcggtcggtgttcgggatggcgaggagggggtcgtgcgtttcgggcgttattagcggcgttttcgtattcgtcgtagaagagagtagagtcgggagttcgtaggttcgtagagttagtttcgtttttatagttttcggtttcgcggcgggtagatgttttcggttcgggtgagggtttggttgttgggtcgggtttggttttcgtatttttttttttcggcgtagttaggggagcggagcggcggcgtttatttggttttttcggggcggttgcgatgggtatggtttaggggttcggggaggaattgatttttcggggaaggatcgtttatttcgacgcggaattggtgagagcggaaggtcggttgtttatagttttgttagcgtagtagtattatggacgtttattcggagttttatcgttgtcgcgggatttttattttattatttttcgttttttttcgtcgtcgtcgtcgttttttttatttttttcgcggagatttttcgtttattttatatatttttttattatgtagcgggggaatcgttgtcgtcgatacgttattttcgggcgtaggtggttaggtcgggatcgggcgttggtgggtgttgtggggtgggggaggatattttaggggaattggtgttatagaacgtttatttttgcgtaggcgttgtcgtgtagagcgtcgatcgttattttgggtgcgggtaagttgttttttttttttatttttttgcgagttatagagttgtagggggatagacgttttttcgtatttaggcgtcggttgaggttgcgtttttggcgaaggataggtgttttttttagtcggttaacgtttagtttaagatcggattaagttttttgttttttaaataaaattg

SEQ ID NO: 5150 - DNA, 891 bp, Artificial Sequence
  chemically treated genomic DNA (Homo sapiens) CpG-island No: 5150
caattttatttaaaaaacaaaaaacttaatccgatcttaaactaaacgttaaccgactaaaaaaaacacctatccttcgccaaaaacgcaacctcaaccgacgcctaaatacgaaaaaacgtctatccccctacaactctataactcgcaaaaaaataaaaaaaaaaaacaacttacccgcacccaaaataacgatcgacgctctacacgacaacgcctacgcaaaaataaacgttctataacaccaattcccctaaaatatcctcccccaccccacaacacccaccaacgcccgatcccgacctaaccacctacgcccgaaaataacgtatcgacgacaacgattcccccgctacataataaaaaaatatataaaataaacgaaaaatctccgcgaaaaaaataaaaaaaacgacgacgacgacgaaaaaaaacgaaaaataataaaataaaaatcccgcgacaacgataaaactccgaataaacgtccataatactactacgctaacaaaactataaacaaccgaccttccgctctcaccaattccgcgtcgaaataaacgatccttccccgaaaaatcaattcctccccgaacccctaaaccatacccatcgcaaccgccccgaaaaaaccaaataaacgccgccgctccgctcccctaactacgccgaaaaaaaaaaatacgaaaaccaaacccgacccaacaaccaaaccctcacccgaaccgaaaacatctacccgccgcgaaaccgaaaactataaaaacgaaactaactctacgaacctacgaactcccgactctactctcttctacgacgaatacgaaaacgccgctaataacgcccgaaacgcacgaccccctcctcgccatcccgaacaccgaccgaata

SEQ ID NO: 5151 - DNA, 891 bp, Artificial Sequence
  chemically treated genomic DNA (Homo sapiens) CpG-island No: 5151
taattttatttggagagtaagagatttaattcggttttgagttgaacgttaatcggttgaaaggagtatttgtttttcgttaggagcgtagttttaatcggcgtttgagtgcgggaagacgtttatttttttatagttttatgattcgtaaggaagtaaaaggaaagggtagtttgttcgtatttaaaatggcggtcggcgttttgtacgatagcgtttgcgtagggataagcgttttgtgatattaatttttttggagtgtttttttttattttatagtatttattagcgttcggtttcgatttagttatttgcgttcggaagtgacgtgtcggcggtagcggttttttcgttgtatgatgggagagtgtgtggagtgggcggggggttttcgcggaggaggtggaggaggcggcggcggcggcggaagagggcggagggtagtgggatgggggtttcgcggtagcggtgaaatttcgggtgggcgtttatggtgttgttgcgttgatagggttgtgagtagtcggtttttcgtttttattagtttcgcgtcggaatagacggttttttttcggggagttagttttttttcgggtttttgagttatgtttatcgtagtcgtttcgaaggagttaggtaagcgtcgtcgtttcgtttttttagttgcgtcggggaaagagggtgcggggattaggttcggtttagtagttagatttttattcgggtcgggagtatttgttcgtcgcggagtcgggagttgtgaggacggagttggttttgcgggtttgcgggttttcggttttgtttttttttgcggcgagtgcgggaacgtcgttggtggcgttcgaagcgtacggtttttttttcgttatttcgggtatcggtcgggta

SEQ ID NO: 5152 - DNA, 891 bp, Artificial Sequence
  chemically treated genomic DNA (Homo sapiens) CpG-island No: 5152
tacccgaccgatacccgaaataacgaaaaaaaaaccgtacgcttcgaacgccaccaacgacgttcccgcactcgccgcaaaaaaaaacaaaaccgaaaacccgcaaacccgcaaaaccaactccgtcctcacaactcccgactccgcgacgaacaaatactcccgacccgaataaaaatctaactactaaaccgaacctaatccccgcaccctctttccccgacgcaactaaaaaaacgaaacgacgacgcttacctaactccttcgaaacgactacgataaacataactcaaaaacccgaaaaaaaactaactccccgaaaaaaaaccgtctattccgacgcgaaactaataaaaacgaaaaaccgactactcacaaccctatcaacgcaacaacaccataaacgcccacccgaaatttcaccgctaccgcgaaacccccatcccactaccctccgccctcttccgccgccgccgccgcctcctccacctcctccgcgaaaaccccccgcccactccacacactctcccatcatacaacgaaaaaaccgctaccgccgacacgtcacttccgaacgcaaataactaaatcgaaaccgaacgctaataaatactataaaataaaaaaaaacactccaaaaaaattaatatcacaaaacgcttatccctacgcaaacgctatcgtacaaaacgccgaccgccattttaaatacgaacaaactaccctttccttttacttccttacgaatcataaaactataaaaaaataaacgtcttcccgcactcaaacgccgattaaaactacgctcctaacgaaaaacaaatactcctttcaaccgattaacgttcaactcaaaaccgaattaaatctcttactctccaaataaaatta

SEQ ID NO: 5153 - DNA, 1646 bp, Artificial Sequence
  chemically treated genomic DNA (Homo sapiens) CpG-island No: 5153
cgggaagttcggggatttgggtagcggatttagatgtttttatagttgtgttttcgtcgtttcgtttcgggggtcgagaattagtaagattaacgcgaggaggcgttacggtatttgatatttcgtttttaggaggttcggacgaggtttcgtcggcgagcggtcggggtttgtttttcgaggtgtttgcgagcgttttatgtttttttttatcggttttaatttcgtttcgttttattcgatcgcgggttttgtttattcgtcgcggtgcggttttttttagttttcgatagttttttttcgttttttttgtcggttttattttttaggcggcggagcgggtcggggagggaagggttaattcgcggtttttttcggcgcggagggattcggaggcgagtcgagcgcggtggtgaggtcgttttagcgaaaaaaatgttcgtttgaagagatttataagttttattcggggggatcgatagttcgtttcgggaggaaggggcggttaggttcgaaagtcgttttttttttttagattcgagagttcgtgcggggtaaagtgaatcgagtcgttgggcggtgtaaggggaagtttaagttcgttttttcggttaaagtgaattttaatcggggtggttggatgcggagacggggcggtaggtaattgcgggttagcgagcgggagtggggcggcgcggcggggttgggggttgcggggtttcgtcgcgtttttgtcggagtgggggcgttttcgtttttcgttttaatttcgcgtttttttgtatagcgcgaaattcggggttttttttaagttggggagcggagtgggggcggaggttcgagtcgcgggcgtttaggttcgttggcggcgcgttcggtttgtgcgtttcgttcggtgttcgattcgggtcggcgtttaggtttcggggcgcgcgggagatcgggcggtttcggtcgcggagttaggtttattgttcggtaggttcggggtagggtagtaaaagtgggaggaggtcgagtttggggaggaggacgtcggtcgagagcgagattagttgtcggggtttttgttttttgtttaaaaacgttttttggatgagttgggggtgtttttcgattttttgggttcgtcggggacgttcgggcggcggcggtcgtagacgcgggtttgcgagcggcgcgttttttgtaatttgttagttttattgttgtcgagcgagtgagttatttcgtattttcgttcgtcgtcgtttcgttcgttggacgtcgaattgttttttatttcgtttttcgagattttagtcgcggtcgggttcggcgcgcggagtattcggcggcggcgcggagtagggggcgtcgaggaggtggtagagattggttcggaaatttgggggagaggcggcgagttgcgggagtcgtcgcgtcgatttcgggtcgcggcgaggaacgcgtggatttcgggattcggcgcgggtattgagttttttcgttttttgttcgcgtcgcggtgggagcgagtcggggttttggaagttatttcggcgtttttagcgtttttgcgtaattttttttagtatttttttttgtttttttatatattttgggtttcggtggtttttcgttgagttcgttttttttgttttagg

SEQ ID NO: 5154 - DNA, 1646 bp, Artificial Sequence
  chemically treated genomic DNA (Homo sapiens) CpG-island No: 5154
cctaaaacaaaaaaaacgaactcaacgaaaaaccaccgaaacccaaaatatataaaaaaacaaaaaaaaatactaaaaaaaattacgcaaaaacgctaaaaacgccgaaataacttccaaaaccccgactcgctcccaccgcgacgcgaacaaaaaacgaaaaaactcaatacccgcgccgaatcccgaaatccacgcgttcctcgccgcgacccgaaatcgacgcgacgactcccgcaactcgccgcctctcccccaaatttccgaaccaatctctaccacctcctcgacgccccctactccgcgccgccgccgaatactccgcgcgccgaacccgaccgcgactaaaatctcgaaaaacgaaataaaaaacaattcgacgtccaacgaacgaaacgacgacgaacgaaaatacgaaataactcactcgctcgacaacaataaaactaacaaattacaaaaaacgcgccgctcgcaaacccgcgtctacgaccgccgccgcccgaacgtccccgacgaacccaaaaaatcgaaaaacacccccaactcatccaaaaaacgtttttaaacaaaaaacaaaaaccccgacaactaatctcgctctcgaccgacgtcctcctccccaaactcgacctcctcccacttttactaccctaccccgaacctaccgaacaataaacctaactccgcgaccgaaaccgcccgatctcccgcgcgccccgaaacctaaacgccgacccgaatcgaacaccgaacgaaacgcacaaaccgaacgcgccgccaacgaacctaaacgcccgcgactcgaacctccgcccccactccgctccccaacttaaaaaaaaccccgaatttcgcgctatacaaaaaaacgcgaaattaaaacgaaaaacgaaaacgcccccactccgacaaaaacgcgacgaaaccccgcaacccccaaccccgccgcgccgccccactcccgctcgctaacccgcaattacctaccgccccgtctccgcatccaaccaccccgattaaaattcactttaaccgaaaaaacgaacttaaacttccccttacaccgcccaacgactcgattcactttaccccgcacgaactctcgaatctaaaaaaaaaaaacgactttcgaacctaaccgccccttcctcccgaaacgaactatcgatccccccgaataaaacttataaatctcttcaaacgaacatttttttcgctaaaacgacctcaccaccgcgctcgactcgcctccgaatccctccgcgccgaaaaaaaccgcgaattaacccttccctccccgacccgctccgccgcctaaaaaataaaaccgacaaaaaaaacgaaaaaaaactatcgaaaactaaaaaaaaccgcaccgcgacgaataaacaaaacccgcgatcgaataaaacgaaacgaaattaaaaccgataaaaaaaaacataaaacgctcgcaaacacctcgaaaaacaaaccccgaccgctcgccgacgaaacctcgtccgaacctcctaaaaacgaaatatcaaataccgtaacgcctcctcgcgttaatcttactaattctcgacccccgaaacgaaacgacgaaaacacaactataaaaacatctaaatccgctacccaaatccccgaacttcccg

SEQ ID NO: 5155 - DNA, 1646 bp, Artificial Sequence
  chemically treated genomic DNA (Homo sapiens) CpG-island No: 5155
tttagggtagaggaaacgggtttagcgagagattatcgaggtttaaagtgtgtgagggaatagagagaggtattggggaagattacgtaagagcgttgggggcgtcgggatgatttttaggatttcgattcgtttttatcgcggcgcgagtaaggggcgggagggtttagtgttcgcgtcgggtttcggaatttacgcgtttttcgtcgcggttcgagatcgacgcggcggttttcgtaattcgtcgttttttttttaagttttcgagttagtttttgttattttttcggcgttttttgtttcgcgtcgtcgtcgggtgtttcgcgcgtcgggttcggtcgcggttggggtttcgaggagcggggtgaggggtaattcggcgtttagcgagcggagcggcggcgagcggagatgcgaagtgatttattcgttcggtaataatagaattgataagttgtagggaacgcgtcgttcgtaggttcgcgtttgcggtcgtcgtcgttcggacgttttcggcgggtttaggaggtcggaaagtatttttagtttatttaaggggcgtttttaaatagaaaatagaaatttcgataattagtttcgttttcggtcggcgtttttttttttaggttcggtttttttttatttttgttgttttgtttcggatttgtcgaataatgagtttggtttcgcggtcgaagtcgttcgatttttcgcgcgtttcggagtttgggcgtcggttcgagtcgggtatcgaacggggcgtataggtcgagcgcgtcgttagcgggtttgagcgttcgcgattcgagttttcgtttttatttcgttttttaatttggaggggatttcgggtttcgcgttgtataaaggggcgcggagttgaggcgggggacgggggcgtttttatttcggtagggacgcggcggggtttcgtagtttttagtttcgtcgcgtcgttttattttcgttcgttagttcgtaattatttgtcgtttcgttttcgtatttaattatttcgattaaagtttattttggtcgggagaacgggtttgggtttttttttgtatcgtttagcggttcggtttattttgtttcgtacgagttttcgggtttgggagggggaggcggttttcgggtttggtcgtttttttttttcggggcgggttgtcggttttttcgaatagaatttgtgggtttttttaggcggatatttttttcgttgaggcggttttattatcgcgttcggttcgttttcggattttttcgcgtcgggaagagtcgcgggttaattttttttttttcgattcgtttcgtcgtttaggaagtggggtcggtagagggggcggggaggagttgtcggggattgggaggagtcgtatcgcggcgggtggataaagttcgcggtcgggtgaggcgggacggagttggggtcggtggggaggggtatgaggcgttcgtaggtatttcgagaagtaggtttcgatcgttcgtcgacgaagtttcgttcgggttttttgggagcggggtgttaggtatcgtggcgttttttcgcgttggttttgttggttttcggttttcgaagcggagcgacggagatatagttgtggaagtatttggattcgttgtttaggttttcgagtttttcg

SEQ ID NO: 5156 - DNA, 1646 bp, Artificial Sequence
  chemically treated genomic DNA (Homo sapiens) CpG-island No: 5156
cgaaaaactcgaaaacctaaacaacgaatccaaatacttccacaactatatctccgtcgctccgcttcgaaaaccgaaaaccaacaaaaccaacgcgaaaaaacgccacgatacctaacaccccgctcccaaaaaacccgaacgaaacttcgtcgacgaacgatcgaaacctacttctcgaaatacctacgaacgcctcatacccctccccaccgaccccaactccgtcccgcctcacccgaccgcgaactttatccacccgccgcgatacgactcctcccaatccccgacaactcctccccgccccctctaccgaccccacttcctaaacgacgaaacgaatcgaaaaaaaaaaaattaacccgcgactcttcccgacgcgaaaaaatccgaaaacgaaccgaacgcgataataaaaccgcctcaacgaaaaaaatatccgcctaaaaaaacccacaaattctattcgaaaaaaccgacaacccgccccgaaaaaaaaaaacgaccaaacccgaaaaccgcctccccctcccaaacccgaaaactcgtacgaaacaaaataaaccgaaccgctaaacgatacaaaaaaaaacccaaacccgttctcccgaccaaaataaactttaatcgaaataattaaatacgaaaacgaaacgacaaataattacgaactaacgaacgaaaataaaacgacgcgacgaaactaaaaactacgaaaccccgccgcgtccctaccgaaataaaaacgcccccgtcccccgcctcaactccgcgcccctttatacaacgcgaaacccgaaatcccctccaaattaaaaaacgaaataaaaacgaaaactcgaatcgcgaacgctcaaacccgctaacgacgcgctcgacctatacgccccgttcgatacccgactcgaaccgacgcccaaactccgaaacgcgcgaaaaatcgaacgacttcgaccgcgaaaccaaactcattattcgacaaatccgaaacaaaacaacaaaaataaaaaaaaaccgaacctaaaaaaaaaaacgccgaccgaaaacgaaactaattatcgaaatttctattttctatttaaaaacgccccttaaataaactaaaaatactttccgacctcctaaacccgccgaaaacgtccgaacgacgacgaccgcaaacgcgaacctacgaacgacgcgttccctacaacttatcaattctattattaccgaacgaataaatcacttcgcatctccgctcgccgccgctccgctcgctaaacgccgaattacccctcaccccgctcctcgaaaccccaaccgcgaccgaacccgacgcgcgaaacacccgacgacgacgcgaaacaaaaaacgccgaaaaaataacaaaaactaactcgaaaacttaaaaaaaaaacgacgaattacgaaaaccgccgcgtcgatctcgaaccgcgacgaaaaacgcgtaaattccgaaacccgacgcgaacactaaaccctcccgccccttactcgcgccgcgataaaaacgaatcgaaatcctaaaaatcatcccgacgcccccaacgctcttacgtaatcttccccaatacctctctctattccctcacacactttaaacctcgataatctctcgctaaacccgtttcctctaccctaaa

SEQ ID NO: 5157 - DNA, 510 bp, Artificial Sequence
  chemically treated genomic DNA (Homo sapiens) CpG-island No: 5157
  unsure (491, 495, 505)
cgttttaacgttgtattatcgtgggttttcgagtcgtgttcgtagtcgttgagattttcggtgcggagaagatgtgtttttttaatttttaggtcgtgattttttttatttagattcggttaattatttcgttcgaggcgagcgggaggatgcggttttaggaatcgtgaagcgtcgttaagagcgcgcgtcgtatcggtttcgtttcggtggtttttcgtttcggtaggtgaagcggcgtcggttatattttttgtcggtaggtgaagcggttcggtagtttatttttcgttcgttatggttgcgggggtttttcgtatagcgttcgttttttttttttagttcgtttttcggggttggagtgttcggcggcggcggcggcgaaattgcggtttgcgcgtacggggagcgatagtagaagttcgaaaagcgtcgagattaaagttatggtattaaatttttttaaaataataaattttttggtttcggtnggtnttgtagattngattt

SEQ ID NO: 5158 - DNA, 510 bp, Artificial Sequence
  chemically treated genomic DNA (Homo sapiens) CpG-island No: 5158
  unsure (6, 16, 20)
aaatcnaatctacaanaccnaccgaaaccaaaaaatttattattttaaaaaaatttaataccataactttaatctcgacgcttttcgaacttctactatcgctccccgtacgcgcaaaccgcaatttcgccgccgccgccgccgaacactccaaccccgaaaaacgaactaaaaaaaaaaaacgaacgctatacgaaaaacccccgcaaccataacgaacgaaaaataaactaccgaaccgcttcacctaccgacaaaaaatataaccgacgccgcttcacctaccgaaacgaaaaaccaccgaaacgaaaccgatacgacgcgcgctcttaacgacgcttcacgattcctaaaaccgcatcctcccgctcgcctcgaacgaaataattaaccgaatctaaataaaaaaaatcacgacctaaaaattaaaaaaacacatcttctccgcaccgaaaatctcaacgactacgaacacgactcgaaaacccacgataatacaacgttaaaacg

SEQ ID NO: 5159 - DNA, 510 bp, Artificial Sequence
  chemically treated genomic DNA (Homo sapiens) CpG-island No: 5159
  unsure (6, 16, 20)
aagttnagtttgtagngttngtcggggttagaaggtttgttgttttggagggatttagtgttatggttttggtttcggcgtttttcgaatttttgttgtcgtttttcgtgcgcgtaaatcgtagtttcgtcgtcgtcgtcgtcgggtattttagtttcggggggcgggttggagggagggggcgggcgttgtgcgggggattttcgtaattatggcgggcggggagtgggttgtcgagtcgttttatttgtcgatagagggtgtggtcggcgtcgttttatttgtcggagcgggaggttatcgaggcgaggtcgatgcggcgcgcgtttttggcggcgttttacggtttttagaatcgtattttttcgttcgtttcgggcgaggtgattggtcgggtttgggtgaaggggattacggtttggggattggaggggtatatttttttcgtatcgaggattttagcgattgcgagtacggttcggagatttacggtggtgtagcgttggggcg

SEQ ID NO: 5160 - DNA, 510 bp, Artificial Sequence
  chemically treated genomic DNA (Homo sapiens) CpG-island No: 5160
  unsure (491, 495, 505)
cgccccaacgctacaccaccgtaaatctccgaaccgtactcgcaatcgctaaaatcctcgatacgaaaaaaatatacccctccaatccccaaaccgtaatccccttcacccaaacccgaccaatcacctcgcccgaaacgaacgaaaaaatacgattctaaaaaccgtaaaacgccgccaaaaacgcgcgccgcatcgacctcgcctcgataacctcccgctccgacaaataaaacgacgccgaccacaccctctatcgacaaataaaacgactcgacaacccactccccgcccgccataattacgaaaatcccccgcacaacgcccgccccctccctccaacccgccccccgaaactaaaatacccgacgacgacgacgacgaaactacgatttacgcgcacgaaaaacgacaacaaaaattcgaaaaacgccgaaaccaaaaccataacactaaatccctccaaaacaacaaaccttctaaccccgacnaacnctacaaactnaactt

SEQ ID NO: 5161 - DNA, 511 bp, Artificial Sequence
  chemically treated genomic DNA (Homo sapiens) CpG-island No: 5161
  unsure (47, 59, 132, 198, 200, 211, 213, 215, 221, 229, 244, 246)
  unsure (419, 436)
tttacggacggggtcgtttcgatgggacgtcgcgtttcggtttttgncgcgtcgatgangtcgagcgtttttcgttgtcgagattatcgtcgatatcgttagacgttgatttttcgatttcgttcgggtcgnggagtttcgttttcgtttttcggaaagttggattttcgaggttggaggcgtatggtcggttgggtngngggattataantngnggtaancgcggttnggaagcgtagagtangnttcgcgggtttcgtcgcgtcgttttttaagtagttcgcgttttttaagtagtcgatgttcgcggtcggagagttggaggagaggtttaatcgcgttttggtgagtgcgattcggaggcgggtcggacgcgggcggggggcggtaggggttcggtaggggttgggcgcgcgttntttcgttttcggggatnttaggtgtcgtttggagattttcggttcggtagttgttttttttaggaggtgggagcgatagtggtttttttttt

SEQ ID NO: 5162 - DNA, 511 bp, Artificial Sequence
  chemically treated genomic DNA (Homo sapiens) CpG-island No: 5162
  unsure (76, 93, 266, 268, 283, 291, 297, 299, 301, 312, 314, 380)
  unsure (453, 465)
aaaaaaaaaaccactatcgctcccacctcctaaaaaaaacaactaccgaaccgaaaatctccaaacgacacctaanatccccgaaaacgaaanaacgcgcgcccaacccctaccgaacccctaccgccccccgcccgcgtccgacccgcctccgaatcgcactcaccaaaacgcgattaaacctctcctccaactctccgaccgcgaacatcgactacttaaaaaacgcgaactacttaaaaaacgacgcgacgaaacccgcgaancntactctacgcttccnaaccgcgnttaccncnanttataatcccncnacccaaccgaccatacgcctccaacctcgaaaatccaactttccgaaaaacgaaaacgaaactccncgacccgaacgaaatcgaaaaatcaacgtctaacgatatcgacgataatctcgacaacgaaaaacgctcgacntcatcgacgcgncaaaaaccgaaacgcgacgtcccatcgaaacgaccccgtccgtaaa

SEQ ID NO: 5163 - DNA, 511 bp, Artificial Sequence
  chemically treated genomic DNA (Homo sapiens) CpG-island No: 5163
  unsure (76, 93, 266, 268, 283, 291, 297, 299, 301, 312, 314, 380)
  unsure (453, 465)
gaaaaaaaggttattgtcgtttttattttttggagggggtagttgtcggatcggggatttttaagcggtatttgangttttcgggggcgggangacgcgcgtttagtttttgtcgggtttttgtcgtttttcgttcgcgttcgattcgttttcgggtcgtatttattagggcgcggttgaattttttttttagtttttcggtcgcgggtatcggttgtttgggaggcgcgggttgtttggggggcggcgcggcggggttcgcgggntntgttttgcgtttttnggtcgcgnttgttntnanttgtggttttntnatttagtcggttatgcgtttttagtttcggaaatttagtttttcgggggacggggacgaggttttncggttcgggcggggtcgaggggttagcgtttggcggtgtcggcggtggtttcggtagcggggggcgttcggtnttatcggcgcgntaggggtcggagcgcggcgttttatcggggcggtttcgttcgtggg

SEQ ID NO: 5164 - DNA, 511 bp, Artificial Sequence
  chemically treated genomic DNA (Homo sapiens) CpG-island No: 5164
  unsure (47, 59, 132, 198, 200, 211, 213, 215, 221, 229, 244, 246)
  unsure (419, 436)
cccacgaacgaaaccgccccgataaaacgccgcgctccgacccctancgcgccgataanaccgaacgccccccgctaccgaaaccaccgccgacaccgccaaacgctaacccctcgaccccgcccgaaccgnaaaacctcgtccccgtcccccgaaaaactaaatttccgaaactaaaaacgcataaccgactaaatnanaaaaccacaantnanaacaancgcgaccnaaaaacgcaaaacanancccgcgaaccccgccgcgccgccccccaaacaacccgcgcctcccaaacaaccgatacccgcgaccgaaaaactaaaaaaaaaattcaaccgcgccctaataaatacgacccgaaaacgaatcgaacgcgaacgaaaaacgacaaaaacccgacaaaaactaaacgcgcgtcntcccgcccccgaaaacntcaaataccgcttaaaaatccccgatccgacaactaccccctccaaaaaataaaaacgacaataacctttttttc

SEQ ID NO: 5165 - DNA, 1010 bp, Artificial Sequence
  chemically treated genomic DNA (Homo sapiens) CpG-island No: 5165
ggttttcgggaaagtcgttttttgaggtcggggcggtgggcgtatttcggtttgagaggtttttcgtttcgtttttcgtttgtgaagtttacgttttcggagttttttaaatacgtttttaaatttatatttttttagttttttttcgttttaggttttcgcgtcgggcggtcggggttgcgatgggggtacgttgtcgagcgggggtgagggtagaggggatttacgcgggcggtcgtggtgcggggttcgggttgcgcgtcgtcgtggttttttttaggcgtcggcgagtcgggcgggttttcgaaatgcgcggggttgcggattattggagtttagggtaggggtgggagcgggttgtagcgtcggagggtcggcgaattcgggaaggttttttttttagtttcgatatttttacggtcggggaggcggtcggttatttaggtggagagttcgtttgcggagaggagtgggagttttcgttgtttttttagcgtagaggagaggaggagggaggaaagtttttgagaaatcgtttagttcggttgcgcggcggaggcgcggtcgttcgggcgcgggaattgcgcgcgacgacggcgatagtgcggggggttgtacgttatagatgagggagtaatatttgatggttttttcgtttcgaggtattagttagttcgatttcgtaattgtcgcggcgggcgggcgcggaattgcggggtagtttggggagacgacggcgtagtggtttgggtagtggggtaaggggtggcgggcgacggcggtcgtaatttcgtaaagggacgtttacggcgaaggacgagttgaattgcgggttattttgggaggtttgatataggcgggtaaaggacgaaggatacggtgattcggggttgcgtttttgtggacgtgtttggcgcggcgagtatttatttttttttggttcgtataattaaaacgtaattttttaaaattttgtttaaagagatttttttaggaaaggagattggggt

SEQ ID NO: 5166 - DNA, 1010 bp, Artificial Sequence
  chemically treated genomic DNA (Homo sapiens) CpG-island No: 5166
accccaatctcctttcctaaaaaaatctctttaaacaaaattttaaaaaattacgttttaattatacgaaccaaaaaaaaataaatactcgccgcgccaaacacgtccacaaaaacgcaaccccgaatcaccgtatccttcgtcctttacccgcctatatcaaacctcccaaaataacccgcaattcaactcgtccttcgccgtaaacgtccctttacgaaattacgaccgccgtcgcccgccaccccttaccccactacccaaaccactacgccgtcgtctccccaaactaccccgcaattccgcgcccgcccgccgcgacaattacgaaatcgaactaactaatacctcgaaacgaaaaaaccatcaaatattactccctcatctataacgtacaaccccccgcactatcgccgtcgtcgcgcgcaattcccgcgcccgaacgaccgcgcctccgccgcgcaaccgaactaaacgatttctcaaaaactttcctccctcctcctctcctctacgctaaaaaaacaacgaaaactcccactcctctccgcaaacgaactctccacctaaataaccgaccgcctccccgaccgtaaaaatatcgaaactaaaaaaaaaaccttcccgaattcgccgaccctccgacgctacaacccgctcccacccctaccctaaactccaataatccgcaaccccgcgcatttcgaaaacccgcccgactcgccgacgcctaaaaaaaaccacgacgacgcgcaacccgaaccccgcaccacgaccgcccgcgtaaatcccctctaccctcacccccgctcgacaacgtacccccatcgcaaccccgaccgcccgacgcgaaaacctaaaacgaaaaaaaactaaaaaaatataaatttaaaaacgtatttaaaaaactccgaaaacgtaaacttcacaaacgaaaaacgaaacgaaaaacctctcaaaccgaaatacgcccaccgccccgacctcaaaaaacgactttcccgaaaacc

SEQ ID NO: 5167 - DNA, 1010 bp, Artificial Sequence
  chemically treated genomic DNA (Homo sapiens) CpG-island No: 5167
attttagtttttttttttaaagaggtttttttaaatagaattttgagagattgcgttttagttatgcgggttagggagaagtggatgttcgtcgcgttaggtacgtttataggaacgtagtttcgagttatcgtgtttttcgttttttattcgtttgtgttaagttttttaaaatgattcgtagtttagttcgtttttcgtcgtgaacgtttttttgcggggttgcggtcgtcgtcgttcgttattttttgttttattatttaagttattgcgtcgtcgtttttttaaattgtttcgtagtttcgcgttcgttcgtcgcggtagttgcggggtcgggttggttggtgtttcgggacgagaaggttattaagtgttgtttttttatttgtaacgtgtagtttttcgtattgtcgtcgtcgtcgcgcgtagttttcgcgttcgggcggtcgcgttttcgtcgcgtagtcgggttgggcggttttttagaaattttttttttttttttttttttttgcgttgagaaagtagcgaaagtttttattttttttcgtaaacggattttttatttgagtaatcggtcgttttttcggtcgtggggatatcggagttaaggggagagttttttcgagttcgtcgatttttcggcgttgtagttcgtttttatttttattttgggttttaatgattcgtagtttcgcgtatttcgaaagttcgttcggttcgtcggcgtttggggagggttacggcggcgcgtagttcgggtttcgtattacggtcgttcgcgtgggttttttttgtttttattttcgttcggtaacgtgtttttatcgtaatttcggtcgttcggcgcgggggtttgggacggggaagaattggggaaatgtgggtttgggggcgtgtttgggggatttcgggagcgtgggttttataggcgaggagcggggcgagaggttttttaggtcggggtgcgtttatcgtttcggttttagggagcgattttttcggaggtt

SEQ ID NO: 5168 - DNA, 1010 bp, Artificial Sequence
  chemically treated genomic DNA (Homo sapiens) CpG-island No: 5168
aacctccgaaaaaatcgctccctaaaaccgaaacgataaacgcaccccgacctaaaaaacctctcgccccgctcctcgcctataaaacccacgctcccgaaatcccccaaacacgcccccaaacccacatttccccaattcttccccgtcccaaacccccgcgccgaacgaccgaaattacgataaaaacacgttaccgaacgaaaataaaaacaaaaaaaacccacgcgaacgaccgtaatacgaaacccgaactacgcgccgccgtaaccctccccaaacgccgacgaaccgaacgaactttcgaaatacgcgaaactacgaatcattaaaacccaaaataaaaataaaaacgaactacaacgccgaaaaatcgacgaactcgaaaaaactctccccttaactccgatatccccacgaccgaaaaaacgaccgattactcaaataaaaaatccgtttacgaaaaaaaataaaaactttcgctactttctcaacgcaaaaaaaaaaaaaaaaaaaaaaaatttctaaaaaaccgcccaacccgactacgcgacgaaaacgcgaccgcccgaacgcgaaaactacgcgcgacgacgacgacaatacgaaaaactacacgttacaaataaaaaaacaacacttaataaccttctcgtcccgaaacaccaaccaacccgaccccgcaactaccgcgacgaacgaacgcgaaactacgaaacaatttaaaaaaacgacgacgcaataacttaaataataaaacaaaaaataacgaacgacgacgaccgcaaccccgcaaaaaaacgttcacgacgaaaaacgaactaaactacgaatcattttaaaaaacttaacacaaacgaataaaaaacgaaaaacacgataactcgaaactacgttcctataaacgtacctaacgcgacgaacatccacttctccctaacccgcataactaaaacgcaatctctcaaaattctatttaaaaaaacctctttaaaaaaaaaaactaaaat

SEQ ID NO: 5169 - DNA, 550 bp, Artificial Sequence
  chemically treated genomic DNA (Homo sapiens) CpG-island No: 5169
gtttggcgtttattcgttttaggttagggttttcgttagatattcgtacgtttgatatttttttttcgggtttgtacgatcgtttttttcgtatttttaaaaaaataaaatcgaataaaataaagcgtttttacgtagttcgaatttttttcggaagtttagcgattgttttcggagttaaaagatatagatttcgacgagttacggttcgagttttaggagcgcgtaggggttgcggggaagtttcggttcggtcgtcgagttttcgttgattaaatggattggcgagcgggagggcggagaggagaggggattaggtaagcggagagggtggtaaagttcgttcgagtttgggcgggtgtaagttcgcgggtttcgcgaatttagtcgttttttaaattttgtcggcgtcggagtcgtagagtcgtgagtaagcggggataggggagggggagaaaaatatttcgaaaagacgagttttttttttttagtggtttaatatggcggtggaagggaggttgacgaagaagaaaatgattgatacggcgag

SEQ ID NO: 5170 - DNA, 550 bp, Artificial Sequence
  chemically treated genomic DNA (Homo sapiens) CpG-island No: 5170
ctcgccgtatcaatcattttcttcttcgtcaacctcccttccaccgccatattaaaccactaaaaaaaaaaaactcgtcttttcgaaatatttttctccccctcccctatccccgcttactcacgactctacgactccgacgccgacaaaatttaaaaaacgactaaattcgcgaaacccgcgaacttacacccgcccaaactcgaacgaactttaccaccctctccgcttacctaatcccctctcctctccgccctcccgctcgccaatccatttaatcaacgaaaactcgacgaccgaaccgaaacttccccgcaacccctacgcgctcctaaaactcgaaccgtaactcgtcgaaatctatatcttttaactccgaaaacaatcgctaaacttccgaaaaaaattcgaactacgtaaaaacgctttattttattcgattttatttttttaaaaatacgaaaaaaacgatcgtacaaacccgaaaaaaaaatatcaaacgtacgaatatctaacgaaaaccctaacctaaaacgaataaacgccaaac

SEQ ID NO: 5171 - DNA, 550 bp, Artificial Sequence
  chemically treated genomic DNA (Homo sapiens) CpG-island No: 5171
ttcgtcgtgttaattattttttttttcgttagttttttttttatcgttatattgggttattaaaaaaagggggttcgttttttcggggtgttttttttttttttttttgttttcgtttgtttacggttttgcgatttcgacgtcggtaaggtttggagagcggttgggttcgcgggattcgcgggtttgtattcgtttagattcggacgggttttgttatttttttcgtttgtttggttttttttttttttcgttttttcgttcgttagtttatttgattagcggagattcggcggtcgggtcggggttttttcgtagtttttgcgcgtttttagagttcgggtcgtggttcgtcggggtttgtgttttttggtttcgagggtagtcgttgggttttcgagaggggttcgggttgcgtaggggcgttttgttttgttcggttttgtttttttgagagtgcgagagaggcggtcgtgtagattcgggagaaagatgttaaacgtgcgagtgtttaacgggagttttagtttggagcggatggacgttaggt

SEQ ID NO: 5172 - DNA, 550 bp, Artificial Sequence
  chemically treated genomic DNA (Homo sapiens) CpG-island No: 5172
acctaacgtccatccgctccaaactaaaactcccgttaaacactcgcacgtttaacatctttctcccgaatctacacgaccgcctctctcgcactctcaaaaaaacaaaaccgaacaaaacaaaacgcccctacgcaacccgaacccctctcgaaaacccaacgactaccctcgaaaccaaaaaacacaaaccccgacgaaccacgacccgaactctaaaaacgcgcaaaaactacgaaaaaaccccgacccgaccgccgaatctccgctaatcaaataaactaacgaacgaaaaaacgaaaaaaaaaaaaaaccaaacaaacgaaaaaaataacaaaacccgtccgaatctaaacgaatacaaacccgcgaatcccgcgaacccaaccgctctccaaaccttaccgacgtcgaaatcgcaaaaccgtaaacaaacgaaaacaaaaaaaaaaaaaaaaaacaccccgaaaaaacgaaccccctttttttaataacccaatataacgataaaaaaaaaactaacgaaaaaaaaaataattaacacgacgaa

SEQ ID NO: 5173 - DNA, 1291 bp, Artificial Sequence
  chemically treated genomic DNA (Homo sapiens) CpG-island No: 5173
tgatcgtcgtgtggtaaattgatgaatttcgattttgatgaatatgagatgatcgtcgtgtggtaaattgatgaatttcgattttgattaatatgagatgatcgtcgtgtggtaaattgatgaatttcgattttgattaatatgagatgatcgtcgtgtggtaaattgatgaatttcgattttgatgaacgtgagatgatcgtcgtgtcgtaaattgatgaatttcgattttgatgaacgtgagatggtcgtcgtgtggtaaattgatgaatttcgattttgatgaacgtgagatggtcgtcgtgtggtaaattgatgaatttcgattttgatgaacgtgagatggtcgtcgtgtggtaaattgatgaatttcgattttgatgaacgtgagatgatcgtcgtgtggtaaattgatgaatttcgattttgatgaacgtgagatggtcgtcgtgtggtaaattgatgaatttcgattttgattaacgtgagatggtcgtcgtgtggtaaattgatgaatttcgattttgatgaatatgagatggtcgtcgtgtggtaaattgatgaatttcgattttgatgaacgtgagatgatcgtcgtgtggtaaattgatgaatttcgattttgatgaacgtgagatgatcgtcgtgtggtaaattgatgaatttcgattttgattaacgtgagatggtcgtcgtgtggtaaattgatgaatttcgattttgatgaacgtgagatggtcgtcgtgtggtaaattgatgaatttcgattttgatgaacgtgagatggtcgtcgtgtggtaaattgatgaatttcgattttgatgaacgtgagatggtcgtcgtgtggtaaattgatgaatttcgattttgattaacgtgagatggtcgtcgtgtggtaaattgatgaatttcgattttgatgaacgtgagatggtcgtcgtgtggtaaattgatgaatttcgattttgatgaacgtgagatggtcgtcgtgtggtaaattgatgaatttcgattttgattaacgtgagatggtcgtcgtgtggtaaattgatgaatttcgattttgatgaacgtgagatggtcgtcgtgtggtaaattgatgaatttcgattttgatgaacgtgagatggtcgtcgtgtggtaaattgatgaatttcgattttgatgaacgtgagatggtcgtcgtgtggtaaattgatgaatttcgattttgatgaacgtgagatggtcgtcgtgtggtaaattgatgaatttcgattttgattaacgtgagatgatcgtcgtgtggtaa

SEQ ID NO: 5174 - DNA, 1291 bp, Artificial Sequence
  chemically treated genomic DNA (Homo sapiens) CpG-island No: 5174
ttaccacacgacgatcatctcacgttaatcaaaatcgaaattcatcaatttaccacacgacgaccatctcacgttcatcaaaatcgaaattcatcaatttaccacacgacgaccatctcacgttcatcaaaatcgaaattcatcaatttaccacacgacgaccatctcacgttcatcaaaatcgaaattcatcaatttaccacacgacgaccatctcacgttcatcaaaatcgaaattcatcaatttaccacacgacgaccatctcacgttaatcaaaatcgaaattcatcaatttaccacacgacgaccatctcacgttcatcaaaatcgaaattcatcaatttaccacacgacgaccatctcacgttcatcaaaatcgaaattcatcaatttaccacacgacgaccatctcacgttaatcaaaatcgaaattcatcaatttaccacacgacgaccatctcacgttcatcaaaatcgaaattcatcaatttaccacacgacgaccatctcacgttcatcaaaatcgaaattcatcaatttaccacacgacgaccatctcacgttcatcaaaatcgaaattcatcaatttaccacacgacgaccatctcacgttaatcaaaatcgaaattcatcaatttaccacacgacgatcatctcacgttcatcaaaatcgaaattcatcaatttaccacacgacgatcatctcacgttcatcaaaatcgaaattcatcaatttaccacacgacgaccatctcatattcatcaaaatcgaaattcatcaatttaccacacgacgaccatctcacgttaatcaaaatcgaaattcatcaatttaccacacgacgaccatctcacgttcatcaaaatcgaaattcatcaatttaccacacgacgatcatctcacgttcatcaaaatcgaaattcatcaatttaccacacgacgaccatctcacgttcatcaaaatcgaaattcatcaatttaccacacgacgaccatctcacgttcatcaaaatcgaaattcatcaatttaccacacgacgaccatctcacgttcatcaaaatcgaaattcatcaatttacgacacgacgatcatctcacgttcatcaaaatcgaaattcatcaatttaccacacgacgatcatctcatattaatcaaaatcgaaattcatcaatttaccacacgacgatcatctcatattaatcaaaatcgaaattcatcaatttaccacacgacgatcatctcatattcatcaaaatcgaaattcatcaatttaccacacgacgatca

SEQ ID NO: 5175 - DNA, 1291 bp, Artificial Sequence
  chemically treated genomic DNA (Homo sapiens) CpG-island No: 5175
ttattatacggcggttattttacgttgattagggtcggggtttattagtttattatacggcggttattttacgtttattagggtcggggtttattagtttattatacggcggttattttacgtttattagggtcggggtttattagtttattatacggcggttattttacgtttattagggtcggggtttattagtttattatacggcggttattttacgtttattagggtcggggtttattagtttattatacggcggttattttacgttgattagggtcggggtttattagtttattatacggcggttattttacgtttattagggtcggggtttattagtttattatacggcggttattttacgtttattagggtcggggtttattagtttattatacggcggttattttacgttgattagggtcggggtttattagtttattatacggcggttattttacgtttattagggtcggggtttattagtttattatacggcggttattttacgtttattagggtcggggtttattagtttattatacggcggttattttacgtttattagggtcggggtttattagtttattatacggcggttattttacgttgattagggtcggggtttattagtttattatacggcggttattttacgtttattagggtcggggtttattagtttattatacggcggttattttacgtttattagggtcggggtttattagtttattatacggcggttattttatgtttattagggtcggggtttattagtttattatacggcggttattttacgttgattagggtcggggtttattagtttattatacggcggttattttacgtttattagggtcggggtttattagtttattatacggcggttattttacgtttattagggtcggggtttattagtttattatacggcggttattttacgtttattagggtcggggtttattagtttattatacggcggttattttacgtttattagggtcggggtttattagtttattatacggcggttattttacgtttattagggtcggggtttattagtttacgatacggcggttattttacgtttattagggtcggggtttattagtttattatacggcggttattttatgttgattagggtcggggtttattagtttattatacggcggttattttatgttgattagggtcggggtttattagtttattatacggcggttattttatgtttattagggtcggggtttattagtttattatacggcggtta

SEQ ID NO: 5176 - DNA, 1291 bp, Artificial Sequence
  chemically treated genomic DNA (Homo sapiens) CpG-island No: 5176
taaccgccgtataataaactaataaaccccgaccctaataaacataaaataaccgccgtataataaactaataaaccccgaccctaatcaacataaaataaccgccgtataataaactaataaaccccgaccctaatcaacataaaataaccgccgtataataaactaataaaccccgaccctaataaacgtaaaataaccgccgtatcgtaaactaataaaccccgaccctaataaacgtaaaataaccgccgtataataaactaataaaccccgaccctaataaacgtaaaataaccgccgtataataaactaataaaccccgaccctaataaacgtaaaataaccgccgtataataaactaataaaccccgaccctaataaacgtaaaataaccgccgtataataaactaataaaccccgaccctaataaacgtaaaataaccgccgtataataaactaataaaccccgaccctaatcaacgtaaaataaccgccgtataataaactaataaaccccgaccctaataaacataaaataaccgccgtataataaactaataaaccccgaccctaataaacgtaaaataaccgccgtataataaactaataaaccccgaccctaataaacgtaaaataaccgccgtataataaactaataaaccccgaccctaatcaacgtaaaataaccgccgtataataaactaataaaccccgaccctaataaacgtaaaataaccgccgtataataaactaataaaccccgaccctaataaacgtaaaataaccgccgtataataaactaataaaccccgaccctaataaacgtaaaataaccgccgtataataaactaataaaccccgaccctaatcaacgtaaaataaccgccgtataataaactaataaaccccgaccctaataaacgtaaaataaccgccgtataataaactaataaaccccgaccctaataaacgtaaaataaccgccgtataataaactaataaaccccgaccctaatcaacgtaaaataaccgccgtataataaactaataaaccccgaccctaataaacgtaaaataaccgccgtataataaactaataaaccccgaccctaataaacgtaaaataaccgccgtataataaactaataaaccccgaccctaataaacgtaaaataaccgccgtataataaactaataaaccccgaccctaataaacgtaaaataaccgccgtataataaactaataaaccccgaccctaatcaacgtaaaataaccgccgtataataa

SEQ ID NO: 5177 - DNA, 909 bp, Artificial Sequence
  chemically treated genomic DNA (Homo sapiens) CpG-island No: 5177
agatggtcgtcgtgtggtaaattgatgaatttcgattttgatgaacgtgagatggtcgtcgtgtggtaaattgatgaatttcgattttgattaacgtgagatggtcgtcgtgtggtaaattgatgaatttcgattttgatgaacgtgagatggtcgtcgtgtggtaaattgatgaatttcgattttgatgaacgtgagatggtcgtcgtgtggtaaattgatgaatttcgattttgatgaacgtgagatggtcgtcgtgtggtaaattgatgaatttcgattttgatgaacgtgagatggtcgtcgtgtggtaaattgatgaatttcgattttgatgaacgtgagatggtcgtcgtgtggtaaattgatgaatttcgattttgattaacgtgagatgatcgtcgtgtggtaaattgatgaatttcgattttgattaacgtgagatgatcgtcgtgtggtaaattgatgaatttcgattttgattaacgtgagatggtcgtcgtgtggtaaattgatgaatttcgattttgatgaacgtgagatggtcgtcgtgtggtaaattgatgaatttcgattttgattaatatgagatgatcgtcgtgtggtaaattgatgaatttcgattttgatgaatatgagatggttgtcgtgtggtaaattgatgaatttcgattttgatgaatatgagatgatcgtcgtgtggtaaattgatgaatttcgattttgatgaatatgagatggtcgtcgtgtggtaaattgatgaatttcgattttgatgaacgtgagatggtcgtcgtgtggtaaattgatgaatttcgattttgattaatatgagatgattgtcgtgtggtaaattgatgaatttcgatattgattaatatgagatggtcgttgtgtggtaaattgatg

SEQ ID NO: 5178 - DNA, 909 bp, Artificial Sequence
  chemically treated genomic DNA (Homo sapiens) CpG-island No: 5178
catcaatttaccacacaacgaccatctcatattaatcaatatcgaaattcatcaatttaccacacgacaatcatctcatattaatcaaaatcgaaattcatcaatttaccacacgacgaccatctcacgttcatcaaaatcgaaattcatcaatttaccacacgacgaccatctcatattcatcaaaatcgaaattcatcaatttaccacacgacgatcatctcatattcatcaaaatcgaaattcatcaatttaccacacgacaaccatctcatattcatcaaaatcgaaattcatcaatttaccacacgacgatcatctcatattaatcaaaatcgaaattcatcaatttaccacacgacgaccatctcacgttcatcaaaatcgaaattcatcaatttaccacacgacgaccatctcacgttaatcaaaatcgaaattcatcaatttaccacacgacgatcatctcacgttaatcaaaatcgaaattcatcaatttaccacacgacgatcatctcacgttaatcaaaatcgaaattcatcaatttaccacacgacgaccatctcacgttcatcaaaatcgaaattcatcaatttaccacacgacgaccatctcacgttcatcaaaatcgaaattcatcaatttaccacacgacgaccatctcacgttcatcaaaatcgaaattcatcaatttaccacacgacgaccatctcacgttcatcaaaatcgaaattcatcaatttaccacacgacgaccatctcacgttcatcaaaatcgaaattcatcaatttaccacacgacgaccatctcacgttaatcaaaatcgaaattcatcaatttaccacacgacgaccatctcacgttcatcaaaatcgaaattcatcaatttaccacacgacgaccatct

SEQ ID NO: 5179 - DNA, 909 bp, Artificial Sequence
  chemically treated genomic DNA (Homo sapiens) CpG-island No: 5179
tattagtttattatatagcggttattttatgttgattagtgtcggggtttattagtttattatacggtagttattttatgttgattagggtcggggtttattagtttattatacggcggttattttacgtttattagggtcggggtttattagtttattatacggcggttattttatgtttattagggtcggggtttattagtttattatacggcggttattttatgtttattagggtcggggtttattagtttattatacggtagttattttatgtttattagggtcggggtttattagtttattatacggcggttattttatgttgattagggtcggggtttattagtttattatacggcggttattttacgtttattagggtcggggtttattagtttattatacggcggttattttacgttgattagggtcggggtttattagtttattatacggcggttattttacgttgattagggtcggggtttattagtttattatacggcggttattttacgttgattagggtcggggtttattagtttattatacggcggttattttacgtttattagggtcggggtttattagtttattatacggcggttattttacgtttattagggtcggggtttattagtttattatacggcggttattttacgtttattagggtcggggtttattagtttattatacggcggttattttacgtttattagggtcggggtttattagtttattatacggcggttattttacgtttattagggtcggggtttattagtttattatacggcggttattttacgttgattagggtcggggtttattagtttattatacggcggttattttacgtttattagggtcggggtttattagtttattatacggcggttattt

SEQ ID NO: 5180 - DNA, 909 bp, Artificial Sequence
  chemically treated genomic DNA (Homo sapiens) CpG-island No: 5180
aaataaccgccgtataataaactaataaaccccgaccctaataaacgtaaaataaccgccgtataataaactaataaaccccgaccctaatcaacgtaaaataaccgccgtataataaactaataaaccccgaccctaataaacgtaaaataaccgccgtataataaactaataaaccccgaccctaataaacgtaaaataaccgccgtataataaactaataaaccccgaccctaataaacgtaaaataaccgccgtataataaactaataaaccccgaccctaataaacgtaaaataaccgccgtataataaactaataaaccccgaccctaataaacgtaaaataaccgccgtataataaactaataaaccccgaccctaatcaacgtaaaataaccgccgtataataaactaataaaccccgaccctaatcaacgtaaaataaccgccgtataataaactaataaaccccgaccctaatcaacgtaaaataaccgccgtataataaactaataaaccccgaccctaataaacgtaaaataaccgccgtataataaactaataaaccccgaccctaatcaacataaaataaccgccgtataataaactaataaaccccgaccctaataaacataaaataactaccgtataataaactaataaaccccgaccctaataaacataaaataaccgccgtataataaactaataaaccccgaccctaataaacataaaataaccgccgtataataaactaataaaccccgaccctaataaacgtaaaataaccgccgtataataaactaataaaccccgaccctaatcaacataaaataactaccgtataataaactaataaaccccgacactaatcaacataaaataaccgctatataataaactaata

SEQ ID NO: 5181 - DNA, 938 bp, Artificial Sequence
  chemically treated genomic DNA (Homo sapiens) CpG-island No: 5181
tgaggtcgcgcgcgataggatgggcggacggtgaagagaattagggtggaagggtcggataggggcgattttagtgacggaatcggatatagacgtagatttggtagttgggcgataggtttcggagtattttcgggcgtcgcgggatttttcgtcgataggagggcggttgtcgagtttgtgatattcgcggagattagtagatttcgggtgtggaggacgtcgtaggaagggaattgcgtggttgggtttggttataaaaagcggagggtatttattcgagcggatttcggtttcggagaattcgttttcgggttaataaaaaacgtcgcgcgaggggcggggttcgtacgtgtagggaggggaggtagagaaaaaggcggggtcgggtcggggcggggtttcgggtaggggcggggagtttatcgatttttcgttttcgttgcgcgcgtttttggttttgttagtgttttcgtcggttgaaagcgcgtgtttgcgtcgggttttgttggagtgcgttcggtgtgtcgtgggttcgcgttgtttttatttaattttttgttaggtaagaggcgcgtgaggtttttgtgtcgggggcggtgttgttttcgagtcggcgcgcggcggggacgcgagttcgtaggtgttggcgggagcgagagtcgggtggggattttcgcgagttcgtatttcgtttttgggtagtagttttttcggttttatacggcgtgacgcgcgttcgggtttcgcgttcgcgtcgaggtagaggcgtagtaggggtcgggtttagggttggaggggtcgggatcgggcggggtgtcgttttggatatcgcgtcggtagttgtttcgcgcgggtttatgttatttttatttttaatttgttttgtttcgtatttgagatgatttataaattcggtatttttgggataggcgtgg

SEQ ID NO: 5182 - DNA, 938 bp, Artificial Sequence
  chemically treated genomic DNA (Homo sapiens) CpG-island No: 5182
ccacgcctatcccaaaaataccgaatttataaatcatctcaaatacgaaacaaaacaaattaaaaataaaaataacataaacccgcgcgaaacaactaccgacgcgatatccaaaacgacaccccgcccgatcccgacccctccaaccctaaacccgacccctactacgcctctacctcgacgcgaacgcgaaacccgaacgcgcgtcacgccgtataaaaccgaaaaaactactacccaaaaacgaaatacgaactcgcgaaaatccccacccgactctcgctcccgccaacacctacgaactcgcgtccccgccgcgcgccgactcgaaaacaacaccgcccccgacacaaaaacctcacgcgcctcttacctaacaaaaaattaaataaaaacaacgcgaacccacgacacaccgaacgcactccaacaaaacccgacgcaaacacgcgctttcaaccgacgaaaacactaacaaaaccaaaaacgcgcgcaacgaaaacgaaaaatcgataaactccccgcccctacccgaaaccccgccccgacccgaccccgcctttttctctacctcccctccctacacgtacgaaccccgcccctcgcgcgacgttttttattaacccgaaaacgaattctccgaaaccgaaatccgctcgaataaataccctccgctttttataaccaaacccaaccacgcaattcccttcctacgacgtcctccacacccgaaatctactaatctccgcgaatatcacaaactcgacaaccgccctcctatcgacgaaaaatcccgcgacgcccgaaaatactccgaaacctatcgcccaactaccaaatctacgtctatatccgattccgtcactaaaatcgcccctatccgacccttccaccctaattctcttcaccgtccgcccatcctatcgcgcgcgacctca

SEQ ID NO: 5183 - DNA, 938 bp, Artificial Sequence
  chemically treated genomic DNA (Homo sapiens) CpG-island No: 5183
ttacgtttgttttaaaggtatcgaatttataaattattttaggtgcggagtaggataggttgaaaataggaatgatatgaattcgcgcggaatagttgtcggcgcggtgtttagggcggtatttcgttcggtttcggtttttttagttttgggttcgatttttattacgtttttgtttcgacgcgaacgcggagttcgagcgcgcgttacgtcgtgtggggtcgaagaggttgttatttagaggcggagtgcgggttcgcgagggtttttattcgattttcgttttcgttagtatttacggattcgcgttttcgtcgcgcgtcgattcgggagtagtatcgttttcggtataggagttttacgcgttttttatttaataggaagttgggtggaagtagcgcggatttacggtatatcgaacgtattttaatagaattcgacgtagatacgcgtttttaatcggcggagatattggtagggttagaaacgcgcgtagcgggggcgggaggtcggtaagtttttcgtttttgttcgagatttcgtttcggttcggtttcgtttttttttttgttttttttttttgtacgtacgggtttcgtttttcgcgcgacgttttttgttgattcggaaacggatttttcggagtcgaggttcgttcgggtgagtgtttttcgttttttgtggttaaatttagttacgtagttttttttttgcggcgttttttatattcggggtttgttggttttcgcggatgttataggttcggtaatcgtttttttgtcggcggggagtttcgcgacgttcggaaatgtttcgaagtttgtcgtttagttgttagatttgcgtttgtgttcggtttcgttattgaggtcgtttttgttcggtttttttattttagttttttttatcgttcgtttattttatcgcgcgcggtttta

SEQ ID NO: 5184 - DNA, 938 bp, Artificial Sequence
  chemically treated genomic DNA (Homo sapiens) CpG-island No: 5184
taaaaccgcgcgcgataaaataaacgaacgataaaaaaaactaaaataaaaaaaccgaacaaaaacgacctcaataacgaaaccgaacacaaacgcaaatctaacaactaaacgacaaacttcgaaacatttccgaacgtcgcgaaactccccgccgacaaaaaaacgattaccgaacctataacatccgcgaaaaccaacaaaccccgaatataaaaaacgccgcaaaaaaaaaactacgtaactaaatttaaccacaaaaaacgaaaaacactcacccgaacgaacctcgactccgaaaaatccgtttccgaatcaacaaaaaacgtcgcgcgaaaaacgaaacccgtacgtacaaaaaaaaaaaacaaaaaaaaaaacgaaaccgaaccgaaacgaaatctcgaacaaaaacgaaaaacttaccgacctcccgcccccgctacgcgcgtttctaaccctaccaatatctccgccgattaaaaacgcgtatctacgtcgaattctattaaaatacgttcgatataccgtaaatccgcgctacttccacccaacttcctattaaataaaaaacgcgtaaaactcctataccgaaaacgatactactcccgaatcgacgcgcgacgaaaacgcgaatccgtaaatactaacgaaaacgaaaatcgaataaaaaccctcgcgaacccgcactccgcctctaaataacaacctcttcgaccccacacgacgtaacgcgcgctcgaactccgcgttcgcgtcgaaacaaaaacgtaataaaaatcgaacccaaaactaaaaaaaccgaaaccgaacgaaataccgccctaaacaccgcgccgacaactattccgcgcgaattcatatcattcctattttcaacctatcctactccgcacctaaaataatttataaattcgatacctttaaaacaaacgtaa

SEQ ID NO: 5185 - DNA, 934 bp, Artificial Sequence
  chemically treated genomic DNA (Homo sapiens) CpG-island No: 5185
gcgtaggcgcgaggtgacgtcgcggtagggtcggaaggagtgtagcggttgttacggagttcgtagttgcggtttttgaggagtaagcggcgcggtagcgaaggtcgtcgaatttgtttggttagtcggcgatttgagtgacgagtgagtgtcggttgcggggcgcgttcgagtttttgggcgggtttgtgaggcgacgcggtttttttgaggggcgtttttgtggagtttcgggggtgggggcgggggcgcgggtcgtgagggtcgtcgagttgaggggcgcgggtcgaggttcgggcgggatcgggttaaggggttgggttgggcgtttcgagttcggtgcggtggcgaggttggagcgataaaggcgttgagcggtcgggtggttttttttcgttatttcgcgaagtttcgcgggtcggtttttcgggtttgttgcgcgagggtaatagttcgggagatcgcgtttttttttttcgggttcgaggtcgtcgcggaggcggtgttcgtgtattcgagcgcggtttggaggagcggcgggaggcgggtcgtgtttgtgaattttagtttaggcgggcggcgtttttttttttttttttttatatttggagcgcgtgtttcgcgaaagttggcgattgttattcggtattcgcgagggcgtcgtaagtgcgttaaatttttttgcggggcgttgggggttggttcggttcgggtgttcgggcgttgggtagcgagcgaggtcgttgttttcgcgtcgaggtggttttgttttcggtggaataggattagggatttaagattttgggttatttgtaattaattttggagcgtgcgcggcgtgcgggttatagaaatttttgataaattcgatagggttttgtaaatttttaagggtttgggtagtagttgttttaggtatttagatcgtgtaaag

SEQ ID NO: 5186 - DNA, 934 bp, Artificial Sequence
  chemically treated genomic DNA (Homo sapiens) CpG-island No: 5186
ctttacacgatctaaatacctaaaacaactactacccaaacccttaaaaatttacaaaaccctatcgaatttatcaaaaatttctataacccgcacgccgcgcacgctccaaaattaattacaaataacccaaaatcttaaatccctaatcctattccaccgaaaacaaaaccacctcgacgcgaaaacaacgacctcgctcgctacccaacgcccgaacacccgaaccgaaccaacccccaacgccccgcaaaaaaatttaacgcacttacgacgccctcgcgaataccgaataacaatcgccaactttcgcgaaacacgcgctccaaatataaaaaaaaaaaaaaaaaaacgccgcccgcctaaactaaaattcacaaacacgacccgcctcccgccgctcctccaaaccgcgctcgaatacacgaacaccgcctccgcgacgacctcgaacccgaaaaaaaaaaacgcgatctcccgaactattaccctcgcgcaacaaacccgaaaaaccgacccgcgaaacttcgcgaaataacgaaaaaaaaccacccgaccgctcaacgcctttatcgctccaacctcgccaccgcaccgaactcgaaacgcccaacccaaccccttaacccgatcccgcccgaacctcgacccgcgcccctcaactcgacgaccctcacgacccgcgcccccgcccccacccccgaaactccacaaaaacgcccctcaaaaaaaccgcgtcgcctcacaaacccgcccaaaaactcgaacgcgccccgcaaccgacactcactcgtcactcaaatcgccgactaaccaaacaaattcgacgaccttcgctaccgcgccgcttactcctcaaaaaccgcaactacgaactccgtaacaaccgctacactccttccgaccctaccgcgacgtcacctcgcgcctacgc

SEQ ID NO: 5187 - DNA, 934 bp, Artificial Sequence
  chemically treated genomic DNA (Homo sapiens) CpG-island No: 5187
ttttgtacgatttaagtatttaggatagttgttatttaggtttttagggatttatagagttttgtcggatttgttagaaatttttgtaattcgtacgtcgcgtacgttttagggttggttgtaagtggtttagagttttggatttttggttttgttttatcgggagtagaattatttcgacgcggggatagcggtttcgttcgttgtttagcgttcggatattcgagtcgggttagtttttagcgtttcgtagaagggtttgacgtatttgcggcgttttcgcgagtgtcgggtgatagtcgttaattttcgcggaatacgcgttttagatgtgagggaagaggaggaaaaacgtcgttcgtttgggttggggtttataggtacggttcgtttttcgtcgtttttttaggtcgcgttcgggtgtacggatatcgttttcgcggcggtttcgggttcgggggagggaagcgcggtttttcgggttgttgttttcgcgtagtagattcgaggggtcggttcgcgaaatttcgcgaagtggcgagagggggttattcggtcgtttagcgtttttgtcgttttagtttcgttatcgtatcgggttcgagacgtttagtttagttttttggttcgatttcgttcgggtttcggttcgcgttttttagttcggcggtttttacggttcgcgttttcgtttttattttcggagttttatagaggcgttttttagagaggtcgcgtcgttttatagattcgtttaggagttcgagcgcgtttcgtagtcgatatttattcgttatttaagtcgtcggttagttaggtaggttcggcggttttcgttatcgcgtcgtttattttttagaagtcgtagttgcgagtttcgtggtagtcgttgtatttttttcggttttgtcgcggcgttatttcgcgtttgcgt

SEQ ID NO: 5188 - DNA, 934 bp, Artificial Sequence
  chemically treated genomic DNA (Homo sapiens) CpG-island No: 5188
acgcaaacgcgaaataacgccgcgacaaaaccgaaaaaaatacaacgactaccacgaaactcgcaactacgacttctaaaaaataaacgacgcgataacgaaaaccgccgaacctacctaactaaccgacgacttaaataacgaataaatatcgactacgaaacgcgctcgaactcctaaacgaatctataaaacgacgcgacctctctaaaaaacgcctctataaaactccgaaaataaaaacgaaaacgcgaaccgtaaaaaccgccgaactaaaaaacgcgaaccgaaacccgaacgaaatcgaaccaaaaaactaaactaaacgtctcgaacccgatacgataacgaaactaaaacgacaaaaacgctaaacgaccgaataaccccctctcgccacttcgcgaaatttcgcgaaccgacccctcgaatctactacgcgaaaacaacaacccgaaaaaccgcgcttccctcccccgaacccgaaaccgccgcgaaaacgatatccgtacacccgaacgcgacctaaaaaaacgacgaaaaacgaaccgtacctataaaccccaacccaaacgaacgacgtttttcctcctcttccctcacatctaaaacgcgtattccgcgaaaattaacgactatcacccgacactcgcgaaaacgccgcaaatacgtcaaacccttctacgaaacgctaaaaactaacccgactcgaatatccgaacgctaaacaacgaacgaaaccgctatccccgcgtcgaaataattctactcccgataaaacaaaaccaaaaatccaaaactctaaaccacttacaaccaaccctaaaacgtacgcgacgtacgaattacaaaaatttctaacaaatccgacaaaactctataaatccctaaaaacctaaataacaactatcctaaatacttaaatcgtacaaaa

SEQ ID NO: 5189 - DNA, 735 bp, Artificial Sequence
  chemically treated genomic DNA (Homo sapiens) CpG-island No: 5189
  unsure (340, 576)
gttttttcgtttttgtttttttcggcggtacgattacgttattcggttttacgtcgttttgttcgcgtagtattggcggaacgcgttcggtgttcggacgtttgttattatttaaggttttcgtttatcgtttggtcggttacggttatggcgtttagatgtagtaggtcgaggtcgcgtacgtggagtattattttcggtatgtcgttcgttaggtaggcgcgtacggtcgggtgatagttcgggtcgttgggtagtacgtttattagacgcggtattttacggttgatgcgcgtttagtgtttaacgttcggtatcgtgtagttcgtcgcgtgggtantggtcggattgtgtagagtaaattcgtggagtcgtcgaacgtcgcgtggtttattatcgcgttttatatggttttattcggataggatatttcgcgtggtgatgtcgcggttatttagttcgttgatcgttcgttacgattggcgggcgatttttagttatatcgtttgttcggacggcgttatcgcgagtgcggtaggttagatttagcgtttttggattatatgttaggtcgtngtcgtgcgaggaatgatatcgttgcgggaggtgtagcggatagtagttcggggtttttgaggagattttggtgagaatcggttatggtttattttcgtttttcgaggtgcggagttttcgtcgtaaaatatggaggttatacgtaataatatgggggat

SEQ ID NO: 5190 - DNA, 735 bp, Artificial Sequence
  chemically treated genomic DNA (Homo sapiens) CpG-island No: 5190
  unsure (160, 396)
atcccccatattattacgtataacctccatattttacgacgaaaactccgcacctcgaaaaacgaaaataaaccataaccgattctcaccaaaatctcctcaaaaaccccgaactactatccgctacacctcccgcaacgatatcattcctcgcacgacnacgacctaacatataatccaaaaacgctaaatctaacctaccgcactcgcgataacgccgtccgaacaaacgatataactaaaaatcgcccgccaatcgtaacgaacgatcaacgaactaaataaccgcgacatcaccacgcgaaatatcctatccgaataaaaccatataaaacgcgataataaaccacgcgacgttcgacgactccacgaatttactctacacaatccgaccantacccacgcgacgaactacacgataccgaacgttaaacactaaacgcgcatcaaccgtaaaataccgcgtctaataaacgtactacccaacgacccgaactatcacccgaccgtacgcgcctacctaacgaacgacataccgaaaataatactccacgtacgcgacctcgacctactacatctaaacgccataaccgtaaccgaccaaacgataaacgaaaaccttaaataataacaaacgtccgaacaccgaacgcgttccgccaatactacgcgaacaaaacgacgtaaaaccgaataacgtaatcgtaccgccgaaaaaaacaaaaacgaaaaaac

SEQ ID NO: 5191 - DNA, 735 bp, Artificial Sequence
  chemically treated genomic DNA (Homo sapiens) CpG-island No: 5191
  unsure (160, 396)
attttttatattgttgcgtatagtttttatattttacggcgggaatttcgtatttcgaaaagcgaaagtgaattatggtcggtttttattagaatttttttagagatttcgaattgttgttcgttgtatttttcgtagcggtgttatttttcgtacggtngcgatttggtatgtggtttagaggcgttgggtttggtttgtcgtattcgcgatggcgtcgttcgggtaggcggtgtggttggagatcgttcgttagtcgtggcgggcggttagcgagttggatagtcgcggtattattacgcgggatattttgttcggataaagttatgtaaaacgcgatggtgagttacgcggcgttcggcggttttacgaatttattttgtatagttcggttantgtttacgcggcgggttgtacgatgtcggacgttgagtattggacgcgtattaatcgtaaagtgtcgcgtttggtgagcgtgttgtttaacggttcggattattattcgatcgtgcgcgtttgtttggcgggcggtatgtcggaggtgatgttttacgtgcgcgatttcggtttgttgtatttggacgttatgatcgtgatcggttagacggtgggcgagaattttgaatggtggtaggcgttcgagtatcgggcgcgtttcgttagtgttgcgcgagtaggacggcgtagagtcggatgacgtgatcgtgtcgtcggagaaggtaaaagcgaaagggt

SEQ ID NO: 5192 - DNA, 735 bp, Artificial Sequence
  chemically treated genomic DNA (Homo sapiens) CpG-island No: 5192
  unsure (340, 576)
accctttcgcttttaccttctccgacgacacgatcacgtcatccgactctacgccgtcctactcgcgcaacactaacgaaacgcgcccgatactcgaacgcctaccaccattcaaaattctcgcccaccgtctaaccgatcacgatcataacgtccaaatacaacaaaccgaaatcgcgcacgtaaaacatcacctccgacataccgcccgccaaacaaacgcgcacgatcgaataataatccgaaccgttaaacaacacgctcaccaaacgcgacactttacgattaatacgcgtccaatactcaacgtccgacatcgtacaacccgccgcgtaaacantaaccgaactatacaaaataaattcgtaaaaccgccgaacgccgcgtaactcaccatcgcgttttacataactttatccgaacaaaatatcccgcgtaataataccgcgactatccaactcgctaaccgcccgccacgactaacgaacgatctccaaccacaccgcctacccgaacgacgccatcgcgaatacgacaaaccaaacccaacgcctctaaaccacataccaaatcgcnaccgtacgaaaaataacaccgctacgaaaaatacaacgaacaacaattcgaaatctctaaaaaaattctaataaaaaccgaccataattcactttcgcttttcgaaatacgaaattcccgccgtaaaatataaaaactatacgcaacaatataaaaaat

SEQ ID NO: 5193 - DNA, 547 bp, Artificial Sequence
  chemically treated genomic DNA (Homo sapiens) CpG-island No: 5193
  unsure (80, 85, 91, 93, 96)
gcgtaggttgtttcgtcgtttcgtcggcgcgttggtagttgaagtaggtttttgttatgtttaggtggtcgaggggtagncgggntttcgntnggncgggtttttgaagtagtagaggtagtagcggcgttcgtttaatacgaatcgacggttgcggtagttacgtagtcgcgttggttttcgcgcggtattcgtttcgggttttgtagtttttttatcgtcgtcgttgtttttttttgttcgggtttcggtttcggtatggttgtttgcgcgttaatcgtttgtttttcggttttcgcgttttcgcgttgcggttgttgcgttttttgttttcgcggtgtttttttttcgtcgtttcgttttttttttaggttcgcgttaaagtggtttggaatttgtagaacgtttttttttaagttcgttggtagttgttttagttcgttggtttttgttttcgttcgttggtcgttgttttcgcgacgtttcggaagttaggttttgtttttcgtatttgttaagttttcgttttgtcggagtttcgttttgt

SEQ ID NO: 5194 - DNA, 547 bp, Artificial Sequence
  chemically treated genomic DNA (Homo sapiens) CpG-island No: 5194
  unsure (452, 455, 457, 463, 468)
acaaaacgaaactccgacaaaacgaaaacttaacaaatacgaaaaacaaaacctaacttccgaaacgtcgcgaaaacaacgaccaacgaacgaaaacaaaaaccaacgaactaaaacaactaccaacgaacttaaaaaaaaacgttctacaaattccaaaccactttaacgcgaacctaaaaaaaaaacgaaacgacgaaaaaaaaacaccgcgaaaacaaaaaacgcaacaaccgcaacgcgaaaacgcgaaaaccgaaaaacaaacgattaacgcgcaaacaaccataccgaaaccgaaacccgaacaaaaaaaaacaacgacgacgataaaaaaactacaaaacccgaaacgaataccgcgcgaaaaccaacgcgactacgtaactaccgcaaccgtcgattcgtattaaacgaacgccgctactacctctactacttcaaaaacccgnccnancgaaancccgnctacccctcgaccacctaaacataacaaaaacctacttcaactaccaacgcgccgacgaaacgacgaaacaacctacgc

SEQ ID NO: 5195 - DNA, 547 bp, Artificial Sequence
  chemically treated genomic DNA (Homo sapiens) CpG-island No: 5195
  unsure (452, 455, 457, 463, 468)
atagagcgagatttcggtagggcggggatttggtaggtgcgggaggtaggatttggttttcggggcgtcgcgggggtaacggttagcgggcgggggtaagggttagcgggttaggataattgttaacgggtttggaggggggcgttttataaattttaggttattttgacgcgggtttgagagaggagcggggcggcgggaagggggtatcgcgggggtagggagcgtagtagtcgtagcgcgaaggcgcgggggtcggggaataaacggttggcgcgtaggtagttatatcggggtcggaattcgggtagaggagggtagcgacggcgatggggaggttgtagagttcggggcgggtatcgcgcgggaattagcgcgattgcgtggttatcgtagtcgtcggttcgtgttggacgggcgtcgttgttgtttttgttattttaagaattcgnttnancggganttcgnttgtttttcggttatttggatatagtagaagtttgttttagttattagcgcgtcgacgaggcggcggagtagtttgcgt

SEQ ID NO: 5196 - DNA, 547 bp, Artificial Sequence
  chemically treated genomic DNA (Homo sapiens) CpG-island No: 5196
  unsure (80, 85, 91, 93, 96)
acgcaaactactccgccgcctcgtcgacgcgctaataactaaaacaaacttctactatatccaaataaccgaaaaacaancgaantcccgntnaancgaattcttaaaataacaaaaacaacaacgacgcccgtccaacacgaaccgacgactacgataaccacgcaatcgcgctaattcccgcgcgatacccgccccgaactctacaacctccccatcgccgtcgctaccctcctctacccgaattccgaccccgatataactacctacgcgccaaccgtttattccccgacccccgcgccttcgcgctacgactactacgctccctacccccgcgatacccccttcccgccgccccgctcctctctcaaacccgcgtcaaaataacctaaaatttataaaacgcccccctccaaacccgttaacaattatcctaacccgctaacccttacccccgcccgctaaccgttacccccgcgacgccccgaaaaccaaatcctacctcccgcacctaccaaatccccgccctaccgaaatctcgctctat

SEQ ID NO: 5197 - DNA, 578 bp, Artificial Sequence
  chemically treated genomic DNA (Homo sapiens) CpG-island No: 5197
gatacgtaggattttttttttaatatttagaatattttgagcggtatcggtttttggtagacgtataacgttcgtattatcgcgaacgacggtttttaggtcgttaatattttattcggaatttagcgcgttgatacgtataatggttttaatatcgcgatatagcggatgttgtagcgcgtggtaaattatgcggcgggcggtgttttttttacgtaatgttacggagttttcgaggttaaatattagggtattagtcgggtagatgaaggagttgttgattatcgcggtattggtattaggtataaataatatgttgcggcgggtgttgtttttacgttgttgtagcgaagggaattttattggtaatttttttatggtagagtcgggatatcgttggcgcgtgttagtagggtttttagtcgtgtacgtaaaatgtagtttagtgcgtttttgttatcgatatttagttgtacgtcgcgtacgttgtagcgggcgagaacgtttagaatggtggttgcgaattgtatcgttaaattgttttttaacgttgttattgatttgtaggtcgatatttt

SEQ ID NO: 5198 - DNA, 578 bp, Artificial Sequence
  chemically treated genomic DNA (Homo sapiens) CpG-island No: 5198
aaaatatcgacctacaaatcaataacaacgttaaaaaacaatttaacgatacaattcgcaaccaccattctaaacgttctcgcccgctacaacgtacgcgacgtacaactaaatatcgataacaaaaacgcactaaactacattttacgtacacgactaaaaaccctactaacacgcgccaacgatatcccgactctaccataaaaaaattaccaataaaattcccttcgctacaacaacgtaaaaacaacacccgccgcaacatattatttatacctaataccaataccgcgataatcaacaactccttcatctacccgactaataccctaatatttaacctcgaaaactccgtaacattacgtaaaaaaaacaccgcccgccgcataatttaccacgcgctacaacatccgctatatcgcgatattaaaaccattatacgtatcaacgcgctaaattccgaataaaatattaacgacctaaaaaccgtcgttcgcgataatacgaacgttatacgtctaccaaaaaccgataccgctcaaaatattctaaatattaaaaaaaaaatcctacgtatc

SEQ ID NO: 5199 - DNA, 578 bp, Artificial Sequence
  chemically treated genomic DNA (Homo sapiens) CpG-island No: 5199
aagatatcgatttgtaaattaatagtagcgttgagaaatagtttggcgatgtaattcgtaattattattttggacgttttcgttcgttataacgtgcgcggcgtatagttgaatgtcgatgataaaggcgtattggattgtattttacgtgtacgattggaagttttgttggtacgcgttagcggtatttcggttttgttatgggaggattgttaataaaatttttttcgttgtaataacgtaaaaatagtattcgtcgtagtatgttgtttgtgtttggtgttaatgtcgcgatggttagtaatttttttatttattcggttgatgttttgatgtttgatttcgaagatttcgtagtattgcgtgaaaaagatatcgttcgtcgtatggtttattacgcgttgtaatattcgttgtatcgcgatattgaaattattgtgcgtgttaacgcgttggatttcgaatggggtgttaacgatttggaagtcgtcgttcgcggtggtgcggacgttgtgcgtttgttaaaaatcgatatcgtttaggatgttttggatattgaaaaagagattttgcgtatt

SEQ ID NO: 5200 - DNA, 578 bp, Artificial Sequence
  chemically treated genomic DNA (Homo sapiens) CpG-island No: 5200
aatacgcaaaatctctttttcaatatccaaaacatcctaaacgatatcgatttttaacaaacgcacaacgtccgcaccaccgcgaacgacgacttccaaatcgttaacaccccattcgaaatccaacgcgttaacacgcacaataatttcaatatcgcgatacaacgaatattacaacgcgtaataaaccatacgacgaacgatatctttttcacgcaatactacgaaatcttcgaaatcaaacatcaaaacatcaaccgaataaataaaaaaattactaaccatcgcgacattaacaccaaacacaaacaacatactacgacgaatactatttttacgttattacaacgaaaaaaattttattaacaatcctcccataacaaaaccgaaataccgctaacgcgtaccaacaaaacttccaatcgtacacgtaaaatacaatccaatacgcctttatcatcgacattcaactatacgccgcgcacgttataacgaacgaaaacgtccaaaataataattacgaattacatcgccaaactatttctcaacgctactattaatttacaaatcgatatctt

SEQ ID NO: 5201 - DNA, 768 bp, Artificial Sequence
  chemically treated genomic DNA (Homo sapiens) CpG-island No: 5201
ggggttgcgttgcgatgtttgttatcgcgattgttcgaaaattgatgaggttattattttggagttggagcgtaatacgcgtatcggtaagtacgttcgttttttgtcgacggtttatagcgacgtttgtatcggttgcggtaagtgcgaaaaagtatgcgtgttggaataatcggtaattaaggtgttatcgttgttattggcgaaaggggagtttggttattattatcgtttcggttggttggaggggaattttggtaaatcgtaaacgtgacgtcgggcgcgaggcgttggagaaaaaaggttggtggcgtagttatcgttggttggtgttttttcgtttttgttagtttttcgtgttggggatgtttttgagcggtttatggtttggtgtgtggattttgtacggtaattatagtagtagtttgttattcgatatcgtttcgttgatcgattcgttgatgacgttgtaaagttttgttagtggttattttgtttgtacggtggcgttgatcggtgcggtgattattatcgtgttttacgttttggcgggaaagcgattattttgtagttgggtttgttcgttgaattcgaatatcgatttagcgaatttggttacgcgggcgtttttgatttttaattaagtttgcgacgaatttttcgtaatattcggttacgtgttgtttggtggttaatttcgggtggggatttagtttttaaattggtaacgtttttatttgggggaattggattaaattttcggtgttt

SEQ ID NO: 5202 - DNA, 768 bp, Artificial Sequence
  chemically treated genomic DNA (Homo sapiens) CpG-island No: 5202
aaacaccgaaaatttaatccaattcccccaaataaaaacgttaccaatttaaaaactaaatccccacccgaaattaaccaccaaacaacacgtaaccgaatattacgaaaaattcgtcgcaaacttaattaaaaatcaaaaacgcccgcgtaaccaaattcgctaaatcgatattcgaattcaacgaacaaacccaactacaaaataatcgctttcccgccaaaacgtaaaacacgataataatcaccgcaccgatcaacgccaccgtacaaacaaaataaccactaacaaaactttacaacgtcatcaacgaatcgatcaacgaaacgatatcgaataacaaactactactataattaccgtacaaaatccacacaccaaaccataaaccgctcaaaaacatccccaacacgaaaaactaacaaaaacgaaaaaacaccaaccaacgataactacgccaccaaccttttttctccaacgcctcgcgcccgacgtcacgtttacgatttaccaaaattcccctccaaccaaccgaaacgataataataaccaaactcccctttcgccaataacaacgataacaccttaattaccgattattccaacacgcatactttttcgcacttaccgcaaccgatacaaacgtcgctataaaccgtcgacaaaaaacgaacgtacttaccgatacgcgtattacgctccaactccaaaataataacctcatcaattttcgaacaatcgcgataacaaacatcgcaacgcaacccc

SEQ ID NO: 5203 - DNA, 768 bp, Artificial Sequence
  chemically treated genomic DNA (Homo sapiens) CpG-island No: 5203
agatatcgggggtttgatttaatttttttaaatggaagcgttgttagtttaaaggttgaatttttattcggaattgattattaaatagtacgtagtcgaatgttgcgaaggattcgtcgtaggtttgattggaggttaaaggcgttcgcgtaattaagttcgttaagtcggtattcgggtttagcgggtagatttagttgtaaaataatcgttttttcgttagggcgtagagtacggtgataattatcgtatcggttaacgttatcgtgtaggtaagatgattattggtaagattttgtagcgttattagcggatcggttagcggaacggtgtcgaataataggttattgttgtagttgtcgtgtaagatttatatattaaattatggatcgtttaaaaatatttttagtacgaagaattgataaaggcgaagagatattagttaacggtgattgcgttattagttttttttttttagcgtttcgcgttcggcgttacgtttacgatttgttaaagtttttttttagttagtcgaagcggtaatggtgattaaatttttttttcgttagtgatagcggtaatattttgattgtcggttgttttagtacgtatattttttcgtatttatcgtaatcggtataggcgtcgttgtgaatcgtcggtagaaagcgggcgtgtttatcggtacgcgtgttgcgttttagttttagggtgatggttttattaattttcgggtaatcgcgataataaatatcgtagcgtagtttt

SEQ ID NO: 5204 - DNA, 768 bp, Artificial Sequence
  chemically treated genomic DNA (Homo sapiens) CpG-island No: 5204
aaaactacgctacgatatttattatcgcgattacccgaaaattaataaaaccatcaccctaaaactaaaacgcaacacgcgtaccgataaacacgcccgctttctaccgacgattcacaacgacgcctataccgattacgataaatacgaaaaaatatacgtactaaaacaaccgacaatcaaaatattaccgctatcactaacgaaaaaaaaatttaatcaccattaccgcttcgactaactaaaaaaaaactttaacaaatcgtaaacgtaacgccgaacgcgaaacgctaaaaaaaaaaaactaataacgcaatcaccgttaactaatatctcttcgcctttatcaattcttcgtactaaaaatatttttaaacgatccataatttaatatataaatcttacacgacaactacaacaataacctattattcgacaccgttccgctaaccgatccgctaataacgctacaaaatcttaccaataatcatcttacctacacgataacgttaaccgatacgataattatcaccgtactctacgccctaacgaaaaaacgattattttacaactaaatctacccgctaaacccgaataccgacttaacgaacttaattacgcgaacgcctttaacctccaatcaaacctacgacgaatccttcgcaacattcgactacgtactatttaataatcaattccgaataaaaattcaacctttaaactaacaacgcttccatttaaaaaaattaaatcaaacccccgatatct

SEQ ID NO: 5205 - DNA, 1035 bp, Artificial Sequence
  chemically treated genomic DNA (Homo sapiens) CpG-island No: 5205
ttcgggggggcggtcgtataattttttttttttttttttttcgtttttttgttgtcggatttttcgtattttttttttttattgtcgttttcgtttttttttgcggttcgttttcgttttgtgttttcgttcgtcggtttttttttttttggtttttttttgttttcgttttttgtgtttgtcgttttcggtcgtgtcgcgtggtttttcgttttttcgtcgggtttttgcgtttcggttttttggtatttttcgcgttttttgttcgtggttgtttcggtgtgtttgcgttgtttatttttcgattttttttttgttttagggtttttttcgagcgggattgcgtttgcgtcgtcggttttttttgaggcgtggtgcgatgagtttgtgtttgcgttatttcgcggtcgttttttttttgttgttttttcggcgttggcgggttattttgattttttttgtttttttgttcgcgtttttttgttttcgtgttttttcggtttttttttcgtttcgtcgcgtcgttgtcggtttttttttttttttttcgttttgtttcgttgggtttttttcgtcgttttcgttttgtttcgttttttttggttcgttttttttcggtttttgttttttggcgcgcgtttttttttttttttttcgcgtttgaggtttttttcgagtttttttcgggtttgttttttgtcgttttttcgtcgttcgttttgtcgttttttttttttttttttttcgggtttttttgcgttgcgtttcgttttcgttttggttttttttttttttttttttttttttggtttttttcgttttttttcggttttcgtttcggtttttcgcgttcgtttttttttgtttacgttttttcgttcgcgttttttttttttttattaggttaagttgttttatcgtacgtaatgttagttttagtttatcgttgcgatttatatgtttaatattattacgtttttcggtcgttattttttttgtttgatgggtaatattttttatcgggcgtataatttg

SEQ ID NO: 5206 - DNA, 1035 bp, Artificial Sequence
  chemically treated genomic DNA (Homo sapiens) CpG-island No: 5206
caaattatacgcccgataaaaaatattacccatcaaacaaaaaaaataacgaccgaaaaacgtaataatattaaacatataaatcgcaacgataaactaaaactaacattacgtacgataaaacaacttaacctaataaaaaaaaaaaaaacgcgaacgaaaaaacgtaaacaaaaaaaaacgaacgcgaaaaaccgaaacgaaaaccgaaaaaaaacgaaaaaaaccaaaaaaaaaaaaaaaaaaaaaaaaaaccaaaacgaaaacgaaacgcaacgcaaaaaaacccgaaaaaaaaaaaaaaaaaaaacgacaaaacgaacgacgaaaaaacgacaaaaaacaaacccgaaaaaaactcgaaaaaaacctcaaacgcgaaaaaaaaaaaaaaaaacgcgcgccaaaaaacaaaaaccgaaaaaaaacgaaccaaaaaaaacgaaacaaaacgaaaacgacgaaaaaaacccaacgaaacaaaacgaaaaaaaaaaaaaaaaaccgacaacgacgcgacgaaacgaaaaaaaaaccgaaaaaacacgaaaacaaaaaaacgcgaacaaaaaaacaaaaaaaatcaaaataacccgccaacgccgaaaaaacaacaaaaaaaaaacgaccgcgaaataacgcaaacacaaactcatcgcaccacgcctcaaaaaaaaccgacgacgcaaacgcaatcccgctcgaaaaaaaccctaaaacaaaaaaaaaatcgaaaaataaacaacgcaaacacaccgaaacaaccacgaacaaaaaacgcgaaaaataccaaaaaaccgaaacgcaaaaacccgacgaaaaaacgaaaaaccacgcgacacgaccgaaaacgacaaacacaaaaaacgaaaacaaaaaaaaaccaaaaaaaaaaaaaccgacgaacgaaaacacaaaacgaaaacgaaccgcaaaaaaaaacgaaaacgacaataaaaaaaaaaaatacgaaaaatccgacaacaaaaaaacgaaaaaaaaaaaaaaaaaaaattatacgaccgcccccccgaa

SEQ ID NO: 5207 - DNA, 1035 bp, Artificial Sequence
  chemically treated genomic DNA (Homo sapiens) CpG-island No: 5207
tagattgtgcgttcgatagaaaatgttgtttattaggtaaagaaggtggcgatcggagaacgtaatagtgttgagtatatgaatcgtagcgatgagttggggttgatattacgtgcggtagggtaatttggtttgatggagagggaaagaacgcgagcggggagacgtaagtagggaagggcgggcgcggagaatcgaaacgaggatcgagaaagagcggagggggttaagaagggagaaggggggagagagggttagggcggggacgaggcgtaacgtagagaagttcgagggggggaaagggagggagcggtagggcggacggcgaaggggcggtaggggataggttcgaaaagggttcgggaggggttttaagcgcggaggggagagggagaagcgcgcgttaaagagtaggagtcgaaaggaggcggattagggggaacgaagtaaggcgagagcggcgggagggatttagcgaggtagagcgaaggggggagagggggatcgatagcgacgcgacggaacggggagagagtcgaggaagtacgggagtaggggagcgcgaataggagaataggagggattagaatagttcgttagcgtcgagaaagtagtaggaggagaacgatcgcgggatgacgtaagtatagatttatcgtattacgttttaggaggagtcggcggcgtaagcgtagtttcgttcggagaggattttaggataaaggagagatcggagggtgggtagcgtagatatatcggggtagttacgaatagggagcgcggagggtgttagaagatcgagacgtaagagttcggcggaaaaacgaagagttacgcggtacgatcgaggacgataaatataagaaacgggagtaggaaagggttagaaaggaaggggtcgacggacgagggtataaggcggaagcgggtcgtaggaaaagacgaaagcgatagtgaaaagaggagatgcggaaaattcggtagtaggagagcgggggggaaaaaaaaagggggttgtgcggtcgttttttcggg

SEQ ID NO: 5208 - DNA, 1035 bp, Artificial Sequence
  chemically treated genomic DNA (Homo sapiens) CpG-island No: 5208
cccgaaaaaacgaccgcacaaccccctttttttttcccccccgctctcctactaccgaattttccgcatctcctcttttcactatcgctttcgtcttttcctacgacccgcttccgccttataccctcgtccgtcgaccccttcctttctaaccctttcctactcccgtttcttatatttatcgtcctcgatcgtaccgcgtaactcttcgtttttccgccgaactcttacgtctcgatcttctaacaccctccgcgctccctattcgtaactaccccgatatatctacgctacccaccctccgatctctcctttatcctaaaatcctctccgaacgaaactacgcttacgccgccgactcctcctaaaacgtaatacgataaatctatacttacgtcatcccgcgatcgttctcctcctactactttctcgacgctaacgaactattctaatccctcctattctcctattcgcgctcccctactcccgtacttcctcgactctctccccgttccgtcgcgtcgctatcgatccccctctccccccttcgctctacctcgctaaatccctcccgccgctctcgccttacttcgttccccctaatccgcctcctttcgactcctactctttaacgcgcgcttctccctctcccctccgcgcttaaaacccctcccgaacccttttcgaacctatcccctaccgccccttcgccgtccgccctaccgctccctccctttccccccctcgaacttctctacgttacgcctcgtccccgccctaaccctctctccccccttctcccttcttaaccccctccgctctttctcgatcctcgtttcgattctccgcgcccgcccttccctacttacgtctccccgctcgcgttctttccctctccatcaaaccaaattaccctaccgcacgtaatatcaaccccaactcatcgctacgattcatatactcaacactattacgttctccgatcgccaccttctttacctaataaacaacattttctatcgaacgcacaatcta

SEQ ID NO: 5209 - DNA, 540 bp, Artificial Sequence
  chemically treated genomic DNA (Homo sapiens) CpG-island No: 5209
attagagtaatttttgtgaagtttgttttcgatttttcgcgtttttttgatcgtacgttttgtatacgggtatttttattagttcgcggtttcgtaaattttgtatttcgagttcggtagtttttcgttatttcgtatttgatgtttttttcgttttgtgttttcgtaattcgtttgttttagagttttatttgttttcgtttttcggtttgttattttgttcgcgcggcgtgggggcggttcgtagtttgtgtgcgttttttttcggggggggggtaaaaaaaaaaatttttttttttttttttttatcgtaatttgtttgtgttgcgtaagtttttttcgttttttcgcgtcgtcgttttttcgatcgtttttttcgtttttttgatttagtttttttttattatttcgttttttttttcggtttttttagtttttttttatcgttttttttttttattcgttttttttttttattattttatttttttttttttttattttttttttttattattatttgttttttttttatttttt

SEQ ID NO: 5210 - DNA, 540 bp, Artificial Sequence
  chemically treated genomic DNA (Homo sapiens) CpG-island No: 5210
aaaaaataaaaaaaaaacaaataataataaaaaaaaaaaataaaaaaaaaaaaaaataaaataataaaaaaaaaaaacgaataaaaaaaaaaaacgataaaaaaaaactaaaaaaaccgaaaaaaaaaacgaaataataaaaaaaaactaaatcaaaaaaacgaaaaaaacgatcgaaaaaacgacgacgcgaaaaaacgaaaaaaacttacgcaacacaaacaaattacgataaaaaaaaaaaaaaaaaaatttttttttttaccccccccccgaaaaaaaacgcacacaaactacgaaccgcccccacgccgcgcgaacaaaataacaaaccgaaaaacgaaaacaaataaaactctaaaacaaacgaattacgaaaacacaaaacgaaaaaaacatcaaatacgaaataacgaaaaactaccgaactcgaaatacaaaatttacgaaaccgcgaactaataaaaatacccgtatacaaaacgtacgatcaaaaaaacgcgaaaaatcgaaaacaaacttcacaaaaattactctaat

SEQ ID NO: 5211 - DNA, 540 bp, Artificial Sequence
  chemically treated genomic DNA (Homo sapiens) CpG-island No: 5211
ggagagtaagaaagaggtagataatgatgaaggaggggaatagggggaaagagaggtgagatggtggagaaaaggggcgagtaggggaagagagcgatgggagagggttgggaaagtcggggggaggaacggggtggtgagaaaaaattgggttagaagggcggaagaggcggtcgaagagacgacgacgcggaggagcggaggaagtttgcgtagtatagataggttacgatggagggggaaaaaaaaaaatttttttttttgtttttttttcgggggggggcgtatatagattgcgaatcgtttttacgtcgcgcgggtaaaatagtaaatcgagaagcgaaggtaggtgggattttgaagtaggcgaattacgagagtataggacggaaagagtattagatgcgaggtggcgagggattgtcggattcggggtgtagggtttacgaggtcgcgggttggtagaggtgttcgtgtgtagagcgtgcggttaggggggcgcgggagatcgggagtaagttttataggggttattttggt

SEQ ID NO: 5212 - DNA, 540 bp, Artificial Sequence
  chemically treated genomic DNA (Homo sapiens) CpG-island No: 5212
accaaaataacccctataaaacttactcccgatctcccgcgcccccctaaccgcacgctctacacacgaacacctctaccaacccgcgacctcgtaaaccctacaccccgaatccgacaatccctcgccacctcgcatctaatactctttccgtcctatactctcgtaattcgcctacttcaaaatcccacctaccttcgcttctcgatttactattttacccgcgcgacgtaaaaacgattcgcaatctatatacgcccccccccgaaaaaaaaacaaaaaaaaaaatttttttttttccccctccatcgtaacctatctatactacgcaaacttcctccgctcctccgcgtcgtcgtctcttcgaccgcctcttccgcccttctaacccaattttttctcaccaccccgttcctccccccgactttcccaaccctctcccatcgctctcttcccctactcgccccttttctccaccatctcacctctctttccccctattcccctccttcatcattatctacctctttcttactctcc

SEQ ID NO: 5213 - DNA, 708 bp, Artificial Sequence
  chemically treated genomic DNA (Homo sapiens) CpG-island No: 5213
gggttgggcgtattttacgagcgtttcggcggttggcgaagcggacggggtgtagttttttcggtgcgaggaacggttttcgttgatagatatttttttttcggtcgcgttattcgggaggcggatttcgtgggtttgaggaggtttttttcgttcggtttgttttttttttttcgttggcgttgtcgcgagtttatcgagcggtttttgaggagtagtcgtaggaggaggaggaggtcgtcgggggcggcgggcggagatcgcgttttcgttttttcggcggcggtaagggtaggataatggaggtggcggtggagaaggcggtggcggcggcggtagcggtttcggttgcggttttcggggggttttcggcggcgttagtcggggagaacgaggtcgagagtttgtagggttcggatttcgagcgtcgcggcgaggcggttcggtttaatttgttggatatttgcgtcgtgttttatagaatatttatatcgggttttaagttttgtttgttttattttttgtacgtttttttcggtttacgtattatgtgtttttatttggtcgttaatcgtatttttgtcggttcgtaggtttgttttatagtaacgcggttttgatataaagtaaggcgttttggattttattcgcggttgggagtataattttgttaatacgttgttgttaattattttttttttttttttt

SEQ ID NO: 5214 - DNA, 708 bp, Artificial Sequence
  chemically treated genomic DNA (Homo sapiens) CpG-island No: 5214
aaaaaaaaaaaaaaaaataattaacaacaacgtattaacaaaattatactcccaaccgcgaataaaatccaaaacgccttactttatatcaaaaccgcgttactataaaacaaacctacgaaccgacaaaaatacgattaacgaccaaataaaaacacataatacgtaaaccgaaaaaaacgtacaaaaaataaaacaaacaaaacttaaaacccgatataaatattctataaaacacgacgcaaatatccaacaaattaaaccgaaccgcctcgccgcgacgctcgaaatccgaaccctacaaactctcgacctcgttctccccgactaacgccgccgaaaaccccccgaaaaccgcaaccgaaaccgctaccgccgccgccaccgccttctccaccgccacctccattatcctacccttaccgccgccgaaaaaacgaaaacgcgatctccgcccgccgcccccgacgacctcctcctcctcctacgactactcctcaaaaaccgctcgataaactcgcgacaacgccaacgaaaaaaaaaaaacaaaccgaacgaaaaaaacctcctcaaacccacgaaatccgcctcccgaataacgcgaccgaaaaaaaaatatctatcaacgaaaaccgttcctcgcaccgaaaaaactacaccccgtccgcttcgccaaccgccgaaacgctcgtaaaatacgcccaaccc

SEQ ID NO: 5215 - DNA, 708 bp, Artificial Sequence
  chemically treated genomic DNA (Homo sapiens) CpG-island No: 5215
aggaaaaagaggaagggtggttgataataacgtattagtaaaattgtgtttttagtcgcggataaggtttaaagcgttttgttttgtgttaaggtcgcgttattgtgaagtagatttacggatcggtagaggtgcggttggcgattagatgggggtatatagtacgtgggtcgggaggagcgtgtagaagatgaggtaggtagagtttggggttcggtatggatgttttgtgggatacggcgtaagtgtttaataggttgagtcgggtcgtttcgtcgcggcgttcggagttcgggttttgtagattttcggtttcgtttttttcgattggcgtcgtcgagggtttttcggaggtcgtagtcgaggtcgttgtcgtcgtcgttatcgttttttttatcgttatttttattgttttgtttttgtcgtcgtcggggaagcgagagcgcggttttcgttcgtcgttttcgacgatttttttttttttttgcggttgttttttagaggtcgttcggtggattcgcggtagcgttagcgagggagggaaagtaaatcgggcgggggaagtttttttaggtttacgggattcgtttttcgagtggcgcggtcggaaggagggtatttgttagcggagatcgtttttcgtatcggggaggttgtatttcgttcgtttcgttaatcgtcgaggcgttcgtggaatacgtttagttt

SEQ ID NO: 5216 - DNA, 708 bp, Artificial Sequence
  chemically treated genomic DNA (Homo sapiens) CpG-island No: 5216
aaactaaacgtattccacgaacgcctcgacgattaacgaaacgaacgaaatacaacctccccgatacgaaaaacgatctccgctaacaaataccctccttccgaccgcgccactcgaaaaacgaatcccgtaaacctaaaaaaacttcccccgcccgatttactttccctccctcgctaacgctaccgcgaatccaccgaacgacctctaaaaaacaaccgcaaaaaaaaaaaaaaatcgtcgaaaacgacgaacgaaaaccgcgctctcgcttccccgacgacgacaaaaacaaaacaataaaaataacgataaaaaaaacgataacgacgacgacaacgacctcgactacgacctccgaaaaaccctcgacgacgccaatcgaaaaaaacgaaaccgaaaatctacaaaacccgaactccgaacgccgcgacgaaacgacccgactcaacctattaaacacttacgccgtatcccacaaaacatccataccgaaccccaaactctacctacctcatcttctacacgctcctcccgacccacgtactatatacccccatctaatcgccaaccgcacctctaccgatccgtaaatctacttcacaataacgcgaccttaacacaaaacaaaacgctttaaaccttatccgcgactaaaaacacaattttactaatacgttattatcaaccacccttcctctttttcct

SEQ ID NO: 5217 - DNA, 748 bp, Artificial Sequence
  chemically treated genomic DNA (Homo sapiens) CpG-island No: 5217
ttattggttggagattttagtcgttcgcgggtatagttataagtttcggaggtattggttcgcgttgtgtacgtcgggagttgtagttttttttattttttttcgtcgttcgcgggttttcgtcgtacgagcgtttttagcggcgcgtaggtttcgtgaagcgtagcgcgcgcggatttcgggggtagttttttagtaatcggcggagcggttacgttacggtggtaggttttaagcgttgttgggtatcgtaaggtcgtcgtgtgtattttttagtagttacgggttggtggaagcgttgtttatagttagtgtcggtacgttttcgttcgtttttattttttttattttgttttaggtagcggagagtcgtttttcgtcgcgttttcgttatcgaggttcgggttagaggttagaggtcgttcgtttttgcgcggtttttttttttgagttcgcggagttcgtcgtttcgggtttcggggcgacgatgttggagtttattcgcgtgacgggtgagtgtcgggaagggttggtcgcggcgggggtgcggggcggatcggggtttcgtcgttcggggtttaggtaatggtagttatcggttgggcgcgtcgttcgggattttattttgcgtttcgattttttcggggcgcgtaggaggcgttcgcgaaaaatttgtggagggaagagagaaatcggttttttattttttcgttatttattattagtaagtatttgttgtggaatttcg

SEQ ID NO: 5218 - DNA, 748 bp, Artificial Sequence
  chemically treated genomic DNA (Homo sapiens) CpG-island No: 5218
cgaaattccacaacaaatacttactaataataaataacgaaaaaataaaaaaccgatttctctcttccctccacaaatttttcgcgaacgcctcctacgcgccccgaaaaaatcgaaacgcaaaataaaatcccgaacgacgcgcccaaccgataactaccattacctaaaccccgaacgacgaaaccccgatccgccccgcacccccgccgcgaccaacccttcccgacactcacccgtcacgcgaataaactccaacatcgtcgccccgaaacccgaaacgacgaactccgcgaactcaaaaaaaaaaaccgcgcaaaaacgaacgacctctaacctctaacccgaacctcgataacgaaaacgcgacgaaaaacgactctccgctacctaaaacaaaataaaaaaaataaaaacgaacgaaaacgtaccgacactaactataaacaacgcttccaccaacccgtaactactaaaaaatacacacgacgaccttacgatacccaacaacgcttaaaacctaccaccgtaacgtaaccgctccgccgattactaaaaaactacccccgaaatccgcgcgcgctacgcttcacgaaacctacgcgccgctaaaaacgctcgtacgacgaaaacccgcgaacgacgaaaaaaaataaaaaaaactacaactcccgacgtacacaacgcgaaccaatacctccgaaacttataactatacccgcgaacgactaaaatctccaaccaataa

SEQ ID NO: 5219 - DNA, 748 bp, Artificial Sequence
  chemically treated genomic DNA (Homo sapiens) CpG-island No: 5219
cgagattttatagtaggtatttattgataataagtgacgaaaggataaggggtcgattttttttttttttttataggtttttcgcgagcgttttttgcgcgtttcgaaggggtcggggcgtagggtggagtttcgagcggcgcgtttagtcggtggttattattatttgagtttcgggcggcgggatttcggttcgtttcgtattttcgtcgcggttagtttttttcggtatttattcgttacgcgaatggattttagtatcgtcgtttcgaggttcggggcggcgggtttcgcgggtttaggggaaagggtcgcgtaggggcgggcggtttttagtttttgattcgggtttcggtggcgggggcgcggcgggaggcggtttttcgttatttggagtaggataaggagggtaagggcggacgaagacgtatcgatattgattgtgagtagcgtttttattagttcgtagttattggaaggtatatacggcggttttacggtgtttagtagcgtttagaatttgttatcgtgacgtagtcgtttcgtcggttgttaggaaattgttttcggggttcgcgcgcgttgcgttttacggagtttgcgcgtcgttgggggcgttcgtgcgacgaaggttcgcgggcggcgagagagagtgggaggaattataattttcggcgtgtatagcgcgggttagtgttttcggggtttgtggttgtgttcgcgagcggttggggtttttagttagtgg

SEQ ID NO: 5220 - DNA, 748 bp, Artificial Sequence
  chemically treated genomic DNA (Homo sapiens) CpG-island No: 5220
ccactaactaaaaaccccaaccgctcgcgaacacaaccacaaaccccgaaaacactaacccgcgctatacacgccgaaaattataattcctcccactctctctcgccgcccgcgaaccttcgtcgcacgaacgcccccaacgacgcgcaaactccgtaaaacgcaacgcgcgcgaaccccgaaaacaatttcctaacaaccgacgaaacgactacgtcacgataacaaattctaaacgctactaaacaccgtaaaaccgccgtatataccttccaataactacgaactaataaaaacgctactcacaatcaatatcgatacgtcttcgtccgcccttaccctccttatcctactccaaataacgaaaaaccgcctcccgccgcgcccccgccaccgaaacccgaatcaaaaactaaaaaccgcccgcccctacgcgaccctttcccctaaacccgcgaaacccgccgccccgaacctcgaaacgacgatactaaaatccattcgcgtaacgaataaataccgaaaaaaactaaccgcgacgaaaatacgaaacgaaccgaaatcccgccgcccgaaactcaaataataataaccaccgactaaacgcgccgctcgaaactccaccctacgccccgaccccttcgaaacgcgcaaaaaacgctcgcgaaaaacctataaaaaaaaaaaaaaaatcgaccccttatcctttcgtcacttattatcaataaatacctactataaaatctcg

SEQ ID NO: 5221 - DNA, 989 bp, Artificial Sequence
  chemically treated genomic DNA (Homo sapiens) CpG-island No: 5221
ttcggttgcgttttttttatataatgatcgcggaattcggggaggttcggttacgttttttttacgaaaggaacgcgggattcgggaaggttcggaaggttggattgcgttttttttacgtaaggaacgcgggattcgggaaggttcggaaggtttggttgcgttttttttacgtaaggaacgcgggcgtttgggaggttcggttgcgttttttttacggaaggaacgcgggatttcggaaggttcggaaggtttggttgcgttttttttacggaaggaacgcgggcgtttgggaggttcggttgcgttcgttttacggaaggaacgcgggattcgggaaggttcggaaggtttggttgcgttttttttaaggaaggaacgcggacgtttgggaggttcggttgcgttcgttttatagaaggaacgcgggatttgggaaggtcggaaggttcggttgcgttttttttacgtaggaacgcgggcgtttgggaggttcggttgcgttttttttatagaaggaacgcgggattcgggaaggtcggaagttcggaaggttcggttgcgttttttttacgtaaggaacgcgggcgtttgggaggttcggttgcgttcgttttacgtaaggaacgcgggattcgggaaggttcggaaggttcggttgcgttttttttacgtaaggaacgcgggcgtttgggaggttcggttgcgttcgttttatagaaggaacgcgggattcgggaaggttcggaaggtttggttgcgttttttttacggaaggaacgcgggattcgaggaggttcggttgcgttcgttttatagaaggaacgcgggattcgggaaggttcggaaggtttggttgcgttttttttatagaaggaacgcgggattcgaggaggttcggttgcgttttttttacgtgtggaggttaattaggtgaatatattagtttgtacgttatataatttgtggtgagttatttatatttgaat

SEQ ID NO: 5222 - DNA, 989 bp, Artificial Sequence
  chemically treated genomic DNA (Homo sapiens) CpG-island No: 5222
attcaaatataaataactcaccacaaattatataacgtacaaactaatatattcacctaattaacctccacacgtaaaaaaaacgcaaccgaacctcctcgaatcccgcgttccttctataaaaaaaacgcaaccaaaccttccgaaccttcccgaatcccgcgttccttctataaaacgaacgcaaccgaacctcctcgaatcccgcgttccttccgtaaaaaaaacgcaaccaaaccttccgaaccttcccgaatcccgcgttccttctataaaacgaacgcaaccgaacctcccaaacgcccgcgttccttacgtaaaaaaaacgcaaccgaaccttccgaaccttcccgaatcccgcgttccttacgtaaaacgaacgcaaccgaacctcccaaacgcccgcgttccttacgtaaaaaaaacgcaaccgaaccttccgaacttccgaccttcccgaatcccgcgttccttctataaaaaaaacgcaaccgaacctcccaaacgcccgcgttcctacgtaaaaaaaacgcaaccgaaccttccgaccttcccaaatcccgcgttccttctataaaacgaacgcaaccgaacctcccaaacgtccgcgttccttccttaaaaaaaacgcaaccaaaccttccgaaccttcccgaatcccgcgttccttccgtaaaacgaacgcaaccgaacctcccaaacgcccgcgttccttccgtaaaaaaaacgcaaccaaaccttccgaaccttccgaaatcccgcgttccttccgtaaaaaaaacgcaaccgaacctcccaaacgcccgcgttccttacgtaaaaaaaacgcaaccaaaccttccgaaccttcccgaatcccgcgttccttacgtaaaaaaaacgcaatccaaccttccgaaccttcccgaatcccgcgttcctttcgtaaaaaaaacgtaaccgaacctccccgaattccgcgatcattatataaaaaaaacgcaaccgaa

SEQ ID NO: 5223 - DNA, 989 bp, Artificial Sequence
  chemically treated genomic DNA (Homo sapiens) CpG-island No: 5223
gtttaaatatgagtaatttattataaattgtgtggcgtgtaaattaatatatttatttgattggtttttatacgtgagggggacgtagtcgggttttttcgagtttcgcgttttttttgtgagggggacgtagttaggtttttcgggttttttcgagtttcgcgttttttttgtgaggcggacgtagtcgggttttttcgagtttcgcgtttttttcgtgagggggacgtagttaggtttttcgggttttttcgagtttcgcgttttttttgtgaggcggacgtagtcgggttttttagacgttcgcgttttttacgtgagggggacgtagtcgggtttttcgggttttttcgagtttcgcgttttttacgtgaggcggacgtagtcgggttttttagacgttcgcgttttttacgtgagggggacgtagtcgggtttttcgggttttcggttttttcgagtttcgcgttttttttgtgagggggacgtagtcgggttttttagacgttcgcgtttttacgtgagggggacgtagtcgggtttttcggtttttttaagtttcgcgttttttttgtgaggcggacgtagtcgggttttttagacgttcgcgttttttttttgagggggacgtagttaggtttttcgggttttttcgagtttcgcgtttttttcgtgaggcggacgtagtcgggttttttagacgttcgcgtttttttcgtgagggggacgtagttaggtttttcgggtttttcggagtttcgcgtttttttcgtgagggggacgtagtcgggttttttagacgttcgcgttttttacgtgagggggacgtagttaggtttttcgggttttttcgagtttcgcgttttttacgtgagggggacgtagtttagtttttcgggttttttcgagtttcgcgtttttttcgtgagggggacgtagtcgggttttttcgagtttcgcggttattatgtgagggggacgtagtcggg

SEQ ID NO: 5224 - DNA, 989 bp, Artificial Sequence
  chemically treated genomic DNA (Homo sapiens) CpG-island No: 5224
cccgactacgtccccctcacataataaccgcgaaactcgaaaaaacccgactacgtccccctcacgaaaaaaacgcgaaactcgaaaaaacccgaaaaactaaactacgtccccctcacgtaaaaaacgcgaaactcgaaaaaacccgaaaaacctaactacgtccccctcacgtaaaaaacgcgaacgtctaaaaaacccgactacgtccccctcacgaaaaaaacgcgaaactccgaaaaacccgaaaaacctaactacgtccccctcacgaaaaaaacgcgaacgtctaaaaaacccgactacgtccgcctcacgaaaaaaacgcgaaactcgaaaaaacccgaaaaacctaactacgtccccctcaaaaaaaaaacgcgaacgtctaaaaaacccgactacgtccgcctcacaaaaaaaacgcgaaacttaaaaaaaccgaaaaacccgactacgtccccctcacgtaaaaacgcgaacgtctaaaaaacccgactacgtccccctcacaaaaaaaacgcgaaactcgaaaaaaccgaaaacccgaaaaacccgactacgtccccctcacgtaaaaaacgcgaacgtctaaaaaacccgactacgtccgcctcacgtaaaaaacgcgaaactcgaaaaaacccgaaaaacccgactacgtccccctcacgtaaaaaacgcgaacgtctaaaaaacccgactacgtccgcctcacaaaaaaaacgcgaaactcgaaaaaacccgaaaaacctaactacgtccccctcacgaaaaaaacgcgaaactcgaaaaaacccgactacgtccgcctcacaaaaaaaacgcgaaactcgaaaaaacccgaaaaacctaactacgtccccctcacaaaaaaaacgcgaaactcgaaaaaacccgactacgtccccctcacgtataaaaaccaatcaaataaatatattaatttacacgccacacaatttataataaattactcatatttaaac

SEQ ID NO: 5225 - DNA, 604 bp, Artificial Sequence
  chemically treated genomic DNA (Homo sapiens) CpG-island No: 5225
tttgattttaggagttagaagttggggaggaattcgtagttcgggcggaagagcgcgtatgcgtcgttttaggggtcggtttcgggggcggggtttgtttttttcgttttgggtttttataggttttcgcggggcggggtttatttttttcgttttgggttatagcgggcgttcggggggcggggtttgtttttttcgttttgggttttcgcgggcgttcgggggcggggtttgttttttttgttttgggttttcgtcggcgttcgtttcgttagttttatttgcgcggtacgtgattcgtatcgttcgtgggtattttgaaggcggatttcgcgcgttttcgtttttgtaggtgagagcggtcgcgtttacgggtcggtttagcggcggtggcggtaggtggggaagcgcggttgggtttgttcgcgcggggcgtttgagttttttatttttcggttttaatcgcgtagtagggtttaatcgggattttgagtgcggcgaggcgtggttcgtgtatttttggttcggggttagggcgggcgtgtcggcgtcgggtggaaggaagttttttgcgggtgagttttttgttttttaggtttttttt

SEQ ID NO: 5226 - DNA, 604 bp, Artificial Sequence
  chemically treated genomic DNA (Homo sapiens) CpG-island No: 5226
aaaaaaaacctaaaaaacaaaaaactcacccgcaaaaaacttccttccacccgacgccgacacgcccgccctaaccccgaaccaaaaatacacgaaccacgcctcgccgcactcaaaatcccgattaaaccctactacgcgattaaaaccgaaaaataaaaaactcaaacgccccgcgcgaacaaacccaaccgcgcttccccacctaccgccaccgccgctaaaccgacccgtaaacgcgaccgctctcacctacaaaaacgaaaacgcgcgaaatccgccttcaaaatacccacgaacgatacgaatcacgtaccgcgcaaataaaactaacgaaacgaacgccgacgaaaacccaaaacaaaaaaaacaaaccccgcccccgaacgcccgcgaaaacccaaaacgaaaaaaacaaaccccgccccccgaacgcccgctataacccaaaacgaaaaaaataaaccccgccccgcgaaaacctataaaaacccaaaacgaaaaaaacaaaccccgcccccgaaaccgacccctaaaacgacgcatacgcgctcttccgcccgaactacgaattcctccccaacttctaactcctaaaatcaaa

SEQ ID NO: 5227 - DNA, 604 bp, Artificial Sequence
  chemically treated genomic DNA (Homo sapiens) CpG-island No: 5227
gagggaggtttgggaggtagggagtttattcgtaaggggtttttttttattcgacgtcgatacgttcgttttagtttcgggttaagggtgtacgaattacgtttcgtcgtatttaaggtttcggttgggttttgttgcgcggttagaatcgggaaatggagggtttagacgtttcgcgcgagtaggtttagtcgcgtttttttatttgtcgttatcgtcgttgagtcggttcgtgggcgcggtcgtttttatttgtaggagcgggggcgcgcgggattcgtttttaaggtgtttacgggcggtgcgggttacgtgtcgcgtaggtgaggttggcggggcgggcgtcggcggagatttagagtagagggaataggtttcgttttcgaacgttcgcggggatttagagcggagggaataggtttcgtttttcgaacgttcgttgtgatttagagcggagggagtaggtttcgtttcgcgaaagtttgtggagatttagggcggagggaataggtttcgttttcgggatcggtttttgaggcggcgtatgcgcgttttttcgttcggattgcgagtttttttttagtttttggtttttagggttaag

SEQ ID NO: 5228 - DNA, 604 bp, Artificial Sequence
  chemically treated genomic DNA (Homo sapiens) CpG-island No: 5228
cttaaccctaaaaaccaaaaactaaaaaaaaactcgcaatccgaacgaaaaaacgcgcatacgccgcctcaaaaaccgatcccgaaaacgaaacctattccctccgccctaaatctccacaaactttcgcgaaacgaaacctactccctccgctctaaatcacaacgaacgttcgaaaaacgaaacctattccctccgctctaaatccccgcgaacgttcgaaaacgaaacctattccctctactctaaatctccgccgacgcccgccccgccaacctcacctacgcgacacgtaacccgcaccgcccgtaaacaccttaaaaacgaatcccgcgcgcccccgctcctacaaataaaaacgaccgcgcccacgaaccgactcaacgacgataacgacaaataaaaaaacgcgactaaacctactcgcgcgaaacgtctaaaccctccatttcccgattctaaccgcgcaacaaaacccaaccgaaaccttaaatacgacgaaacgtaattcgtacacccttaacccgaaactaaaacgaacgtatcgacgtcgaataaaaaaaaaccccttacgaataaactccctacctcccaaacctccctc

SEQ ID NO: 5229 - DNA, 521 bp, Artificial Sequence
  chemically treated genomic DNA (Homo sapiens) CpG-island No: 5229
gaaggcggcgtttagaagttttaggttttagaggttcgtttagcggtaggcgtataaggcggggtcggcgcgggtttttttttttatcggaatcgttttttcggggttgagtttttgttcggatttcgaacgtcgaagattaggggtcggaagcgcgcgtcgttattgttacgtcgtgttagtcgggagggagggagcgagtaggcgaagtcgcggaggacggggtgaagatggcggtttttttcggtgcgtttgtggaaattttgggggtggtggggcggtttgttgtacgttttagttttggggtcgttcgcggagagttaaaggggcgggagcggataggggttagggagatagaagggcgttgttcgttgtagtttttgatggattcgcgttgcgggattaggggcggtcgcggttcgggttcggaggacgattttttttaggagcgggtcggaacgtttttttttttgtttttttttttttattagtttttatttggtttttttgttagtgtattt

SEQ ID NO: 5230 - DNA, 521 bp, Artificial Sequence
  chemically treated genomic DNA (Homo sapiens) CpG-island No: 5230
aaatacactaacaaaaaaaccaaataaaaactaataaaaaaaaaaaaacaaaaaaaaaaacgttccgacccgctcctaaaaaaaatcgtcctccgaacccgaaccgcgaccgcccctaatcccgcaacgcgaatccatcaaaaactacaacgaacaacgcccttctatctccctaacccctatccgctcccgcccctttaactctccgcgaacgaccccaaaactaaaacgtacaacaaaccgccccaccacccccaaaatttccacaaacgcaccgaaaaaaaccgccatcttcaccccgtcctccgcgacttcgcctactcgctccctccctcccgactaacacgacgtaacaataacgacgcgcgcttccgacccctaatcttcgacgttcgaaatccgaacaaaaactcaaccccgaaaaaacgattccgataaaaaaaaaaacccgcgccgaccccgccttatacgcctaccgctaaacgaacctctaaaacctaaaacttctaaacgccgccttc

SEQ ID NO: 5231 - DNA, 521 bp, Artificial Sequence
  chemically treated genomic DNA (Homo sapiens) CpG-island No: 5231
aggtgtattggtaggaaagttaagtggagattggtagaagggaaagggtagggggagggacgtttcggttcgtttttgggaagaatcgtttttcgaattcgagtcgcggtcgtttttgatttcgtaacgcgggtttattagggattgtagcggatagcgtttttttgtttttttgatttttgttcgttttcgtttttttagtttttcgcgggcggttttagggttgaggcgtgtaataagtcgttttattatttttagagtttttataaacgtatcggagaaggtcgttatttttatttcgtttttcgcggtttcgtttgttcgttttttttttttcgattgatacggcgtggtagtggcggcgcgcgttttcggtttttggttttcggcgttcggagttcgggtagggatttagtttcgggagaacggtttcgatggaaggaaaggttcgcgtcggtttcgttttatgcgtttgtcgttgagcggatttttgggatttagggtttttggacgtcgttttt

SEQ ID NO: 5232 - DNA, 521 bp, Artificial Sequence
  chemically treated genomic DNA (Homo sapiens) CpG-island No: 5232
aaaaacgacgtccaaaaaccctaaatcccaaaaatccgctcaacgacaaacgcataaaacgaaaccgacgcgaacctttccttccatcgaaaccgttctcccgaaactaaatccctacccgaactccgaacgccgaaaaccaaaaaccgaaaacgcgcgccgccactaccacgccgtatcaatcgaaaaaaaaaaaacgaacaaacgaaaccgcgaaaaacgaaataaaaataacgaccttctccgatacgtttataaaaactctaaaaataataaaacgacttattacacgcctcaaccctaaaaccgcccgcgaaaaactaaaaaaacgaaaacgaacaaaaatcaaaaaaacaaaaaaacgctatccgctacaatccctaataaacccgcgttacgaaatcaaaaacgaccgcgactcgaattcgaaaaacgattcttcccaaaaacgaaccgaaacgtccctccccctaccctttcccttctaccaatctccacttaactttcctaccaatacacct

SEQ ID NO: 5233 - DNA, 575 bp, Artificial Sequence
  chemically treated genomic DNA (Homo sapiens) CpG-island No: 5233
  unsure (445)
ttgttagtagcgtcgcgttacgggcgatattaaaattttgttttagcgtttgttgtatataattttagtaaatatcgtcgagggtcgtcgtttttagcgtcgggttacgcgttagtaggttacgtattaaatgagcggagagattttttgtacgtacgttacgaaaagtatcgtttttcgaacggtttatcggggtgcgaattgtatcgataatgataatttgttttattgtgattttttaagtcgtttttaggtcgttaatcggacgggttggtttaatcggaggatagtacggttcgttatgacgcgttttattacgtagatttttcggtattttatatagcgggtcgaggtgttgatattgttgtgttatatcgaggtattttgcgttatcgagggtgtttagttagcggaacgcgtcgtcgtggaacggagggaagtttangtcgtaaattagcgttatattcgttttcggcggagtggcgataatgtttttttttaaatagcgtattatttcgttgattaatcggattattatgcgttattttgtaggttttagtttttcgttgagtata

SEQ ID NO: 5234 - DNA, 575 bp, Artificial Sequence
  chemically treated genomic DNA (Homo sapiens) CpG-island No: 5234
  unsure (131)
tatactcaacgaaaaactaaaacctacaaaataacgcataataatccgattaatcaacgaaataatacgctatttaaaaaaaaacattatcgccactccgccgaaaacgaatataacgctaatttacgacntaaacttccctccgttccacgacgacgcgttccgctaactaaacaccctcgataacgcaaaatacctcgatataacacaacaatatcaacacctcgacccgctatataaaataccgaaaaatctacgtaataaaacgcgtcataacgaaccgtactatcctccgattaaaccaacccgtccgattaacgacctaaaaacgacttaaaaaatcacaataaaacaaattatcattatcgatacaattcgcaccccgataaaccgttcgaaaaacgatacttttcgtaacgtacgtacaaaaaatctctccgctcatttaatacgtaacctactaacgcgtaacccgacgctaaaaacgacgaccctcgacgatatttactaaaattatatacaacaaacgctaaaacaaaattttaatatcgcccgtaacgcgacgctactaacaa

SEQ ID NO: 5235 - DNA, 575 bp, Artificial Sequence
  chemically treated genomic DNA (Homo sapiens) CpG-island No: 5235
  unsure (131)
tatgtttaacgaagaattgagatttgtaggatagcgtatgatgattcgattggttaacgaagtggtgcgttgtttggagaaaggtattatcgttatttcgtcggaagcggatatggcgttggtttacggtntgggttttttttcgttttacggcggcgcgtttcgttggttggatattttcggtagcgtaaaatatttcgatatggtatagtaatattagtatttcggttcgttgtatgaagtgtcggaaggtttgcgtaataaagcgcgttataacgaatcgtattatttttcggttgagttagttcgttcggttggcgatttgaaaacggtttaaggagttataatggaataggttgttattgtcgatgtaattcgtatttcgatgggtcgttcgaagggcggtgtttttcgtaacgtgcgtgtagaagattttttcgtttatttaatgcgtagtttgttggcgcgtaattcggcgttggaagcggcggttttcgacgatatttattggggttgtgtgtagtagacgttggagtagggttttaatatcgttcgtaacgcggcgttgttggtag

SEQ ID NO: 5236 - DNA, 575 bp, Artificial Sequence
  chemically treated genomic DNA (Homo sapiens) CpG-island No: 5236
  unsure (445)
ctaccaacaacgccgcgttacgaacgatattaaaaccctactccaacgtctactacacacaaccccaataaatatcgtcgaaaaccgccgcttccaacgccgaattacgcgccaacaaactacgcattaaataaacgaaaaaatcttctacacgcacgttacgaaaaacaccgcccttcgaacgacccatcgaaatacgaattacatcgacaataacaacctattccattataactccttaaaccgttttcaaatcgccaaccgaacgaactaactcaaccgaaaaataatacgattcgttataacgcgctttattacgcaaaccttccgacacttcatacaacgaaccgaaatactaatattactataccatatcgaaatattttacgctaccgaaaatatccaaccaacgaaacgcgccgccgtaaaacgaaaaaaaacccanaccgtaaaccaacgccatatccgcttccgacgaaataacgataatacctttctccaaacaacgcaccacttcgttaaccaatcgaatcatcatacgctatcctacaaatctcaattcttcgttaaacata

SEQ ID NO: 5237 - DNA, 513 bp, Artificial Sequence
  chemically treated genomic DNA (Homo sapiens) CpG-island No: 5237
tcgcgattatttttgaggttaatttcggaacgattgttaatggcgttttgcgttgggtcgttagttggcgtagcgtttgatttacgtcgtcgttatacgtttttattaatttatcggtgttaagtaatatgtcgtcgtagtatcgtattattatagcggtaattttttcgacgtcgttgtttattagttgggcgagtatcggtttatttgtcgttttcgtcggtttttcgtcgttagagaaatttagttgttgagaattattcggcgtattcgcgatttacgttacgtaatggtgtcgggtatcggggtgttttgttcgtatcgatttaataaacgttttcgtcgttttaacgttatcggtatgcgttaatatcgttatgaagcggttttttttgatttttttaacgatcgtgatcggtgtcgtaggaattaattagttttttattacgttagttttagatttcgggttatgttttttacgttgttttcgtggattattacgttgttttcgat

SEQ ID NO: 5238 - DNA, 513 bp, Artificial Sequence
  chemically treated genomic DNA (Homo sapiens) CpG-island No: 5238
atcgaaaacaacgtaataatccacgaaaacaacgtaaaaaacataacccgaaatctaaaactaacgtaataaaaaactaattaattcctacgacaccgatcacgatcgttaaaaaaatcaaaaaaaaccgcttcataacgatattaacgcataccgataacgttaaaacgacgaaaacgtttattaaatcgatacgaacaaaacaccccgatacccgacaccattacgtaacgtaaatcgcgaatacgccgaataattctcaacaactaaatttctctaacgacgaaaaaccgacgaaaacgacaaataaaccgatactcgcccaactaataaacaacgacgtcgaaaaaattaccgctataataatacgatactacgacgacatattacttaacaccgataaattaataaaaacgtataacgacgacgtaaatcaaacgctacgccaactaacgacccaacgcaaaacgccattaacaatcgttccgaaattaacctcaaaaataatcgcga

SEQ ID NO: 5239 - DNA, 513 bp, Artificial Sequence
  chemically treated genomic DNA (Homo sapiens) CpG-island No: 5239
atcgaagataacgtggtgatttacgaaaataacgtggaaaatatgattcgggatttgaaattggcgtgatggaaagttggttaatttttgcggtatcggttacggtcgttgaagagattaaaaagagtcgttttataacgatgttggcgtatatcgatggcgttgaggcggcgaaagcgtttgttgaatcggtgcgggtagaatatttcgatgttcggtattattgcgtggcgtgggtcgcgggtgcgtcggatgatttttaatagttgggtttttttgacgacggggagtcggcgggaacggtaggtaaatcgatgttcgtttagttaatgggtagcggcgtcggggaaattatcgttgtggtagtgcgatattacggcggtatattgtttggtatcggtgggttagtgaaagcgtatggcggcggcgtgaattaggcgttgcgttagttaacgatttaacgtaagacgttattaatagtcgtttcgagattagttttaaagatagtcgcga

SEQ ID NO: 5240 - DNA, 513 bp, Artificial Sequence
  chemically treated genomic DNA (Homo sapiens) CpG-island No: 5240
tcgcgactatctttaaaactaatctcgaaacgactattaataacgtcttacgttaaatcgttaactaacgcaacgcctaattcacgccgccgccatacgctttcactaacccaccgataccaaacaatataccgccgtaatatcgcactaccacaacgataatttccccgacgccgctacccattaactaaacgaacatcgatttacctaccgttcccgccgactccccgtcgtcaaaaaaacccaactattaaaaatcatccgacgcacccgcgacccacgccacgcaataataccgaacatcgaaatattctacccgcaccgattcaacaaacgctttcgccgcctcaacgccatcgatatacgccaacatcgttataaaacgactctttttaatctcttcaacgaccgtaaccgataccgcaaaaattaaccaactttccatcacgccaatttcaaatcccgaatcatattttccacgttattttcgtaaatcaccacgttatcttcgat

SEQ ID NO: 5241 - DNA, 554 bp, Artificial Sequence
  chemically treated genomic DNA (Homo sapiens) CpG-island No: 5241
atcggttcgttcgttagcgttttcggcgatacgtggtcgaagtaggcgttcgtcgatacgttcgagaagcgcgtatcggtgatgagcgatatcgttttgttttacgagatatgttttagcgcggaggtgagttggtaggttttttttatgtcggtgtcggacggttcgtcgtcgattattattatgatatcgttttgtataattttttttcgtttgatcgttttgatcgtttgcgtttcgagataaatattcgtattcggtcggtgtggtggtatacgttattttcgtttattatcgacgggtcgatcgtcgtggttttgattatcgaatttttcggcgcgatgttgttcgtcgggaagtagattcgttaggttaggtttttcgtttttgtttttttcggcgggaggattacgtaattcgggtttacgtcgttttggtcgcgtaagtatttgcgggagcgcgtttcgcgtttggatattttgtttattttaaggtttttgttttcgtttgggtcggtatagggttttggagagttatttggttttttttttggg

SEQ ID NO: 5242 - DNA, 554 bp, Artificial Sequence
  chemically treated genomic DNA (Homo sapiens) CpG-island No: 5242
cccaaaaaaaaaaccaaataactctccaaaaccctataccgacccaaacgaaaacaaaaaccttaaaataaacaaaatatccaaacgcgaaacgcgctcccgcaaatacttacgcgaccaaaacgacgtaaacccgaattacgtaatcctcccgccgaaaaaaacaaaaacgaaaaacctaacctaacgaatctacttcccgacgaacaacatcgcgccgaaaaattcgataatcaaaaccacgacgatcgacccgtcgataataaacgaaaataacgtataccaccacaccgaccgaatacgaatatttatctcgaaacgcaaacgatcaaaacgatcaaacgaaaaaaaattatacaaaacgatatcataataataatcgacgacgaaccgtccgacaccgacataaaaaaaacctaccaactcacctccgcgctaaaacatatctcgtaaaacaaaacgatatcgctcatcaccgatacgcgcttctcgaacgtatcgacgaacgcctacttcgaccacgtatcgccgaaaacgctaacgaacgaaccgat

SEQ ID NO: 5243 - DNA, 554 bp, Artificial Sequence
  chemically treated genomic DNA (Homo sapiens) CpG-island No: 5243
tttaaaaaagaaattaagtaattttttaaagttttgtgtcggtttagacgggggtaaagattttgaaatgggtaaggtgtttaagcgcggggcgcgttttcgtaagtgtttgcgcgattaggacggcgtagattcggattacgtgattttttcgtcggagaaggtaaaagcgaaaggtttgatttgacgggtttgtttttcgacgggtaatatcgcgtcggaaggttcggtgattaaggttacggcgatcgattcgtcggtggtgggcgaagatggcgtatattattatatcggtcgggtgcgggtgtttgtttcgaagcgtaggcgattaaggcgattaagcgggaagagattgtgtagggcgatattatggtggtgatcggcggcgggtcgttcggtatcggtatggaagagatttattagtttattttcgcgttaaagtatatttcgtggggtaagacggtgtcgtttattatcgatgcgcgtttttcgggcgtgtcgacgggcgtttgtttcggttacgtgtcgtcggaggcgttggcgggcgggtcgat

SEQ ID NO: 5244 - DNA, 554 bp, Artificial Sequence
  chemically treated genomic DNA (Homo sapiens) CpG-island No: 5244
atcgacccgcccgccaacgcctccgacgacacgtaaccgaaacaaacgcccgtcgacacgcccgaaaaacgcgcatcgataataaacgacaccgtcttaccccacgaaatatactttaacgcgaaaataaactaataaatctcttccataccgataccgaacgacccgccgccgatcaccaccataatatcgccctacacaatctcttcccgcttaatcgccttaatcgcctacgcttcgaaacaaacacccgcacccgaccgatataataatatacgccatcttcgcccaccaccgacgaatcgatcgccgtaaccttaatcaccgaaccttccgacgcgatattacccgtcgaaaaacaaacccgtcaaatcaaacctttcgcttttaccttctccgacgaaaaaatcacgtaatccgaatctacgccgtcctaatcgcgcaaacacttacgaaaacgcgccccgcgcttaaacaccttacccatttcaaaatctttacccccgtctaaaccgacacaaaactttaaaaaattacttaatttcttttttaaa

SEQ ID NO: 5245 - DNA, 656 bp, Artificial Sequence
  chemically treated genomic DNA (Homo sapiens) CpG-island No: 5245
cggcggaattcgggtgttttaattaaatatgggtattaaggtaagtcggcgcgattacgtgatatgtatcgcgcgttcgcgttcgcgtttttttttacgtttcggttttcgaggtttttatggcgttcgcgttttttttttagtcgagttttagtatttatttcggggggtagagtcgtagtttttcgattttttttaggaaggaaaaaagcgttcgtatttgttcgttggttatcgtcgacgatagattcgttatttgaattatcgacgtgggggtgaggtcgaagtttaagtttaaatcgaagtcgtcgtcgttgtttatttcgatttcgttgtcgttgttttttcgttttttaacgtttacgacgcgttagcgacggagtcgggaaagcggagaacgcgcggtcgcgagcgcgttttcgttggcgaatttatagcgtcgggtagatttagtcgtttattttataatttttttgttttcggggttgcgcgcgttagtcggaagcgtcgtttcggtaattcggcggttttcgcgcggttgcggtttttagttttcgggtttttggggttgttgttgttcgttttatcgtttggatttttatcggtgtttttgttttttttaaaagtcgatgagagttttgtgtttatgtttattt

SEQ ID NO: 5246 - DNA, 656 bp, Artificial Sequence
  chemically treated genomic DNA (Homo sapiens) CpG-island No: 5246
aaataaacataaacacaaaactctcatcgacttttaaaaaaaacaaaaacaccgataaaaatccaaacgataaaacgaacaacaacaaccccaaaaacccgaaaactaaaaaccgcaaccgcgcgaaaaccgccgaattaccgaaacgacgcttccgactaacgcgcgcaaccccgaaaacaaaaaaattataaaataaacgactaaatctacccgacgctataaattcgccaacgaaaacgcgctcgcgaccgcgcgttctccgctttcccgactccgtcgctaacgcgtcgtaaacgttaaaaaacgaaaaaacaacgacaacgaaatcgaaataaacaacgacgacgacttcgatttaaacttaaacttcgacctcacccccacgtcgataattcaaataacgaatctatcgtcgacgataaccaacgaacaaatacgaacgcttttttccttcctaaaaaaaatcgaaaaactacgactctaccccccgaaataaatactaaaactcgactaaaaaaaaaacgcgaacgccataaaaacctcgaaaaccgaaacgtaaaaaaaaacgcgaacgcgaacgcgcgatacatatcacgtaatcgcgccgacttaccttaatacccatatttaattaaaacacccgaattccgccg

SEQ ID NO: 5247 - DNA, 656 bp, Artificial Sequence
  chemically treated genomic DNA (Homo sapiens) CpG-island No: 5247
gggtagatatgagtataagatttttatcgatttttggggaaaataaaaatatcgataaaaatttaggcggtgaaacgagtagtaatagttttagggattcgggagttggaggtcgtagtcgcgcgagaatcgtcgggttgtcggggcgacgttttcggttggcgcgcgtagtttcgggagtaggggagttgtgaaatgggcggttagatttgttcggcgttgtgaattcgttagcgggagcgcgttcgcggtcgcgcgtttttcgttttttcggtttcgtcgttgacgcgtcgtagacgttggggagcgggaaggtaacggtagcgggatcgggatgaatagcggcggcggtttcggtttgggtttaagtttcggttttatttttacgtcggtgatttaggtgacgaatttgtcgtcggcggtgattagcgagtagatgcggacgttttttttttttttaggagaaatcgaggagttgcggttttatttttcggagtaagtgttggagttcggttgggggaggggcgcgggcgttatagagatttcgggagtcgaggcgtggaggagagcgcggacgcgggcgcgcggtgtatgttacgtgatcgcgtcggtttattttggtgtttatatttgattagggtattcgggtttcgtcg

SEQ ID NO: 5248 - DNA, 656 bp, Artificial Sequence
  chemically treated genomic DNA (Homo sapiens) CpG-island No: 5248
cgacgaaacccgaataccctaatcaaatataaacaccaaaataaaccgacgcgatcacgtaacatacaccgcgcgcccgcgtccgcgctctcctccacgcctcgactcccgaaatctctataacgcccgcgcccctcccccaaccgaactccaacacttactccgaaaaataaaaccgcaactcctcgatttctcctaaaaaaaaaaaaaacgtccgcatctactcgctaatcaccgccgacgacaaattcgtcacctaaatcaccgacgtaaaaataaaaccgaaacttaaacccaaaccgaaaccgccgccgctattcatcccgatcccgctaccgttaccttcccgctccccaacgtctacgacgcgtcaacgacgaaaccgaaaaaacgaaaaacgcgcgaccgcgaacgcgctcccgctaacgaattcacaacgccgaacaaatctaaccgcccatttcacaactcccctactcccgaaactacgcgcgccaaccgaaaacgtcgccccgacaacccgacgattctcgcgcgactacgacctccaactcccgaatccctaaaactattactactcgtttcaccgcctaaatttttatcgatatttttattttccccaaaaatcgataaaaatcttatactcatatctaccc

SEQ ID NO: 5249 - DNA, 863 bp, Artificial Sequence
  chemically treated genomic DNA (Homo sapiens) CpG-island No: 5249
gtgttcggcgtaagaggcgatacgtttttggagtagtcgggatttttcgttcgagttcggtacgtttcgttttacgcggagtttcggaggtcggacgggaagatttcggggtagtttttcgggtttttttttgttttttttcgttcgtttagggtataggatttttcggacggttgagcgtcgcggggttagttcgagcgatttattcgggttttacgttcggtcgcggagttgggagcgtatttaggtaggttttttacgtttggatttttggttcggtttttcgatttgataattttcgcgttgcgttcggtttcgtttatttggttcgtatagtattgagttgatatcgcggcggttaatgtcgaaggcgcgttcgttggtttttcgcgtcgtacgggtttttttggttgtttcgcgtttcgagcgttgggtttagtcgtagtttatatttgaacgaagattagtttcggcgaagcgtttaggcgtcgaggtttgggtaaaaataattgcggttaagtttcgtttcgtcgtcggtttcgtttcgttcgtttttagtttcgtttcgtgttcgttttttttcgggcgttcggcggcggagtaggttcgattcgggttcgtattttcgttggcgttaggcgggtgggttgttgcgattatttttcggttggggcgtcgagtttcggagtcggtcgttagtttttgggttttacgtttcgggtttggtgcgcggtttggtcgcgttcgggttttcgttaaatgagagcgtagcgttttttcgttttcggatttagagaaagagtttgttgttgtttttaaaaggttggagttttagtaagcggtttttgttttttttgtataga

SEQ ID NO: 5250 - DNA, 863 bp, Artificial Sequence
  chemically treated genomic DNA (Homo sapiens) CpG-island No: 5250
tctatacaaaaaaaacaaaaaccgcttactaaaactccaaccttttaaaaacaacaacaaactctttctctaaatccgaaaacgaaaaaacgctacgctctcatttaacgaaaacccgaacgcgaccaaaccgcgcaccaaacccgaaacgtaaaacccaaaaactaacgaccgactccgaaactcgacgccccaaccgaaaaataatcgcaacaacccacccgcctaacgccaacgaaaatacgaacccgaatcgaacctactccgccgccgaacgcccgaaaaaaaacgaacacgaaacgaaactaaaaacgaacgaaacgaaaccgacgacgaaacgaaacttaaccgcaattatttttacccaaacctcgacgcctaaacgcttcgccgaaactaatcttcgttcaaatataaactacgactaaacccaacgctcgaaacgcgaaacaaccaaaaaaacccgtacgacgcgaaaaaccaacgaacgcgccttcgacattaaccgccgcgatatcaactcaatactatacgaaccaaataaacgaaaccgaacgcaacgcgaaaattatcaaatcgaaaaaccgaaccaaaaatccaaacgtaaaaaacctacctaaatacgctcccaactccgcgaccgaacgtaaaacccgaataaatcgctcgaactaaccccgcgacgctcaaccgtccgaaaaatcctataccctaaacgaacgaaaaaaaacaaaaaaaaacccgaaaaactaccccgaaatcttcccgtccgacctccgaaactccgcgtaaaacgaaacgtaccgaactcgaacgaaaaatcccgactactccaaaaacgtatcgcctcttacgccgaacac

SEQ ID NO: 5251 - DNA, 863 bp, Artificial Sequence
  chemically treated genomic DNA (Homo sapiens) CpG-island No: 5251
tttgtgtaggaaaggtaggaatcgtttattaaggttttaattttttagaggtagtaataagttttttttttggattcgaaggcggagaggcgttgcgtttttatttggcgagggttcgagcgcggttagatcgcgtattagattcggagcgtggggtttaaaggttggcggtcgatttcggagttcggcgttttaatcgggaagtgatcgtagtagtttattcgtttgacgttagcggaagtgcgagttcgggtcgagtttgtttcgtcgtcgggcgttcgggaaggggcgggtacggggcggggttgggggcgggcgaggcggggtcggcggcggggcggggtttggtcgtagttgtttttatttaggtttcggcgtttaggcgtttcgtcgaggttgattttcgtttaagtgtgagttgcggttgagtttagcgttcgaggcgcgaggtagttaggagggttcgtgcggcgcggggagttagcgagcgcgttttcggtattggtcgtcgcgatgttagtttagtgttgtgcgggttaggtgagcgaggtcgggcgtagcgcgggggttgttagatcggagaatcgggttaggagtttaggcgtggaggatttgtttgggtgcgtttttagtttcgcggtcgaacgtagggttcgggtgggtcgttcgggttggtttcgcggcgtttagtcgttcgggaaattttgtgttttgggcgggcgggaaggggtagggggaagttcgagaggttatttcggggttttttcgttcggttttcgggatttcgcgtggagcggggcgtgtcgggttcgggcggaggatttcgattgttttaggggcgtgtcgttttttgcgtcgagtat

SEQ ID NO: 5252 - DNA, 863 bp, Artificial Sequence
  chemically treated genomic DNA (Homo sapiens) CpG-island No: 5252
atactcgacgcaaaaaacgacacgcccctaaaacaatcgaaatcctccgcccgaacccgacacgccccgctccacgcgaaatcccgaaaaccgaacgaaaaaaccccgaaataacctctcgaacttccccctaccccttcccgcccgcccaaaacacaaaatttcccgaacgactaaacgccgcgaaaccaacccgaacgacccacccgaaccctacgttcgaccgcgaaactaaaaacgcacccaaacaaatcctccacgcctaaactcctaacccgattctccgatctaacaacccccgcgctacgcccgacctcgctcacctaacccgcacaacactaaactaacatcgcgacgaccaataccgaaaacgcgctcgctaactccccgcgccgcacgaaccctcctaactacctcgcgcctcgaacgctaaactcaaccgcaactcacacttaaacgaaaatcaacctcgacgaaacgcctaaacgccgaaacctaaataaaaacaactacgaccaaaccccgccccgccgccgaccccgcctcgcccgcccccaaccccgccccgtacccgccccttcccgaacgcccgacgacgaaacaaactcgacccgaactcgcacttccgctaacgtcaaacgaataaactactacgatcacttcccgattaaaacgccgaactccgaaatcgaccgccaacctttaaaccccacgctccgaatctaatacgcgatctaaccgcgctcgaaccctcgccaaataaaaacgcaacgcctctccgccttcgaatccaaaaaaaaaacttattactacctctaaaaaattaaaaccttaataaacgattcctacctttcctacacaaa

SEQ ID NO: 5253 - DNA, 662 bp, Artificial Sequence
  chemically treated genomic DNA (Homo sapiens) CpG-island No: 5253
ggaagcgggggaggcgggggggtagcgtgttgtaaaattagtttgaagtaaataaaaagttatgtttttcgaggggttagtagcgcggagagtaggtttagttcgttgtcgggaaggcgggtttgtttagtagagatcggaacgtcgcgtaggtttagtaaagggttaaggttggggtcggggaagttgtttttaggttagcgaagggtaaaggaagttagatattgacgcgagtggtttttcgatttcgtagtcgagtggagaatcgagtttcgatttaaggtcgaattattaggcgttttcgttatttaataatttatttaggtattttcggtaagaaatttagtgtttttggttcggaatttgcgtcgtagtgcgtaagcgtttcgggtttggagacggtcgcggatgtcgagggagggggcgtgtgagtcgaagaggaaagcgttttttgcgtttgcgttttttgcgttgttcggtggggcggggaaagaagttttgagtcgggatttggtatttttaggattttcggtcggggtagttttttattttttagcgcgacgtcgtgtcgagtttttaaaaagtttcgtaggggttgtagggaggtaagagtttttcgtgatcggtcgtttcggtttttttttagttttgttgtttttata

SEQ ID NO: 5254 - DNA, 662 bp, Artificial Sequence
  chemically treated genomic DNA (Homo sapiens) CpG-island No: 5254
tataaaaacaacaaaactaaaaaaaaaccgaaacgaccgatcacgaaaaactcttacctccctacaacccctacgaaactttttaaaaactcgacacgacgtcgcgctaaaaaataaaaaactaccccgaccgaaaatcctaaaaataccaaatcccgactcaaaacttctttccccgccccaccgaacaacgcaaaaaacgcaaacgcaaaaaacgctttcctcttcgactcacacgccccctccctcgacatccgcgaccgtctccaaacccgaaacgcttacgcactacgacgcaaattccgaaccaaaaacactaaatttcttaccgaaaatacctaaataaattattaaataacgaaaacgcctaataattcgaccttaaatcgaaactcgattctccactcgactacgaaatcgaaaaaccactcgcgtcaatatctaacttcctttacccttcgctaacctaaaaacaacttccccgaccccaaccttaaccctttactaaacctacgcgacgttccgatctctactaaacaaacccgccttcccgacaacgaactaaacctactctccgcgctactaacccctcgaaaaacataactttttatttacttcaaactaattttacaacacgctacccccccgcctcccccgcttcc

SEQ ID NO: 5255 - DNA, 662 bp, Artificial Sequence
  chemically treated genomic DNA (Homo sapiens) CpG-island No: 5255
tgtgggaatagtagggttgaggggaggtcgagacgatcggttacggggggtttttatttttttatagtttttgcggagttttttgggaattcgatacgacgtcgcgttgaggagtgaagagttatttcggtcgggagttttgggagtgttagatttcggtttagggttttttttttcgttttatcgggtagcgtagagagcgtaggcgtagaggacgttttttttttcggtttatacgttttttttttcggtattcgcggtcgtttttaggttcggggcgtttgcgtattacgacgtaggtttcgagttaagggtattagattttttatcggaagtgtttgagtgggttgttgggtgacggggacgtttgatgattcgattttaggtcgggattcggttttttattcgattgcgggatcgggaggttattcgcgttagtgtttgattttttttatttttcgttaatttagaggtagttttttcggttttagttttagttttttgttgagtttgcgcggcgtttcggtttttattggatagattcgttttttcggtagcgggttaggtttgtttttcgcgttgttggtttttcggaaaatataattttttgtttattttaaattgattttataatacgttgttttttcgtttttttcgttttt

SEQ ID NO: 5256 - DNA, 662 bp, Artificial Sequence
  chemically treated genomic DNA (Homo sapiens) CpG-island No: 5256
aaaaacgaaaaaaacgaaaaaacaacgtattataaaatcaatttaaaataaacaaaaaattatattttccgaaaaaccaacaacgcgaaaaacaaacctaacccgctaccgaaaaaacgaatctatccaataaaaaccgaaacgccgcgcaaactcaacaaaaaactaaaactaaaaccgaaaaaactacctctaaattaacgaaaaataaaaaaaatcaaacactaacgcgaataacctcccgatcccgcaatcgaataaaaaaccgaatcccgacctaaaatcgaatcatcaaacgtccccgtcacccaacaacccactcaaacacttccgataaaaaatctaatacccttaactcgaaacctacgtcgtaatacgcaaacgccccgaacctaaaaacgaccgcgaataccgaaaaaaaaaacgtataaaccgaaaaaaaaaacgtcctctacgcctacgctctctacgctacccgataaaacgaaaaaaaaaaccctaaaccgaaatctaacactcccaaaactcccgaccgaaataactcttcactcctcaacgcgacgtcgtatcgaattcccaaaaaactccgcaaaaactataaaaaaataaaaaccccccgtaaccgatcgtctcgacctcccctcaaccctactattcccaca

SEQ ID NO: 5257 - DNA, 943 bp, Artificial Sequence
  chemically treated genomic DNA (Homo sapiens) CpG-island No: 5257
  unsure (239, 335)
tgttgcgtcgtaggtatgttatttagacgttggtttacgtaggttagttgtcggattagtgtcggatcgttcggaagttttttatgcgtcggttcgagtatttttcgcgattgtgcgatattatcgttattttataaggcgtaattaagcgttgtttgggtgttgttattattcggttttagttttagcgcggcgcgtaaattatttatcgcggtcgggatattatgacgttggcgatnaattgtcgttcgcgtaacgtaagcgttggtagaaggcgtaatattgattgagcgcgtgagatcgtttagtgcgagtttcggttgattaggaatgtnacgttgcgtatgtagttattagtagagggtattgttttttagtttacgtttttttgtttgttgtagttagcgatcgcgagtcgtattattttttgtcgtttgggcggttattggtagtagtaagtagatttttatggtttatgtcgtgaagattgattttttgttaggtcgttagtgcggtggcgtagtttttaatttgatacgtttgataggttatcgtacgatgttgttaggcgttcggttgtcgttgttcggtttgaagttatgtatataacgttatatcgggtagcgtgtttcgataatattttgttagacggttttaggcggcggtatcgtaggaaggcgatatatcgtttagtaagcgaattattgtcgggtaattatttgtaatattcggtaattgattttgttattgacgttgtttcgttagcggtaagggtttcgataaaatcgttattttcgtcggcgttgttaggtaaggatgattttttagtagagacgttagtcgcgttattaaagtttggttgatacgcgtatcgtttggaaaggatagcgttgtagtaataaatcggtagtttcgcgtgattgttcgttttgtattagttgtt

SEQ ID NO: 5258 - DNA, 943 bp, Artificial Sequence
  chemically treated genomic DNA (Homo sapiens) CpG-island No: 5258
  unsure (609, 705)
aacaactaatacaaaacgaacaatcacgcgaaactaccgatttattactacaacgctatcctttccaaacgatacgcgtatcaaccaaactttaataacgcgactaacgtctctactaaaaaatcatccttacctaacaacgccgacgaaaataacgattttatcgaaacccttaccgctaacgaaacaacgtcaataacaaaatcaattaccgaatattacaaataattacccgacaataattcgcttactaaacgatatatcgccttcctacgataccgccgcctaaaaccgtctaacaaaatattatcgaaacacgctacccgatataacgttatatacataacttcaaaccgaacaacgacaaccgaacgcctaacaacatcgtacgataacctatcaaacgtatcaaattaaaaactacgccaccgcactaacgacctaacaaaaaatcaatcttcacgacataaaccataaaaatctacttactactaccaataaccgcccaaacgacaaaaaataatacgactcgcgatcgctaactacaacaaacaaaaaaacgtaaactaaaaaacaataccctctactaataactacatacgcaacgtnacattcctaatcaaccgaaactcgcactaaacgatctcacgcgctcaatcaatattacgccttctaccaacgcttacgttacgcgaacgacaattnatcgccaacgtcataatatcccgaccgcgataaataatttacgcgccgcgctaaaactaaaaccgaataataacaacacccaaacaacgcttaattacgccttataaaataacgataatatcgcacaatcgcgaaaaatactcgaaccgacgcataaaaaacttccgaacgatccgacactaatccgacaactaacctacgtaaaccaacgtctaaataacatacctacgacgcaaca

SEQ ID NO: 5259 - DNA, 943 bp, Artificial Sequence
  chemically treated genomic DNA (Homo sapiens) CpG-island No: 5259
  unsure (609, 705)
ggtaattgatgtagaacgagtagttacgcgaagttgtcgatttattgttgtaacgttattttttttaggcgatgcgcgtgttagttagattttaatggcgcgattggcgtttttgttggaaagttatttttatttggtaacgtcggcgaaggtggcgattttatcgaaatttttatcgttggcggagtaacgttagtggtaaagttagttgtcgggtattgtagataattgttcggtaatagttcgtttgttgggcgatatgtcgtttttttacgatgtcgtcgtttggaatcgtttggtaaagtgttatcgggatacgttattcggtgtggcgttgtatgtatggttttaggtcgaataacgataatcgagcgtttggtaatatcgtgcggtagtttattaggcgtattaggttgaggattacgttatcgtattggcggtttggtagaaaattagtttttacgatatgagttatgaggatttgtttgttgttgttaataatcgtttaggcggtaggaaatggtgcggttcgcgatcgttggttataataggtagaaaaacgtggattgggaagtaatgttttttattggtggttgtatgcgtaacgtnatatttttggttagtcggaattcgtattgaacgattttacgcgtttaattaatattgcgttttttgttaacgtttacgttgcgcgggcgataattnatcgttaacgttataatgtttcggtcgcggtgagtgatttgcgcgtcgcgttggaattggaatcgaataatagtaatatttaggtagcgtttggttacgttttgtgggatagcggtgatatcgtatagtcgcgggaaatgttcgaatcggcgtataaagggttttcggacgattcggtattgattcgataattggtttacgtgaattagcgtttggatgatatgtttgcgacgtagta

SEQ ID NO: 5260 - DNA, 943 bp, Artificial Sequence
  chemically treated genomic DNA (Homo sapiens) CpG-island No: 5260
  unsure (239, 335)
tactacgtcgcaaacatatcatccaaacgctaattcacgtaaaccaattatcgaatcaataccgaatcgtccgaaaaccctttatacgccgattcgaacatttcccgcgactatacgatatcaccgctatcccacaaaacgtaaccaaacgctacctaaatattactattattcgattccaattccaacgcgacgcgcaaatcactcaccgcgaccgaaacattataacgttaacgatnaattatcgcccgcgcaacgtaaacgttaacaaaaaacgcaatattaattaaacgcgtaaaatcgttcaatacgaattccgactaaccaaaaatatnacgttacgcatacaaccaccaataaaaaacattacttcccaatccacgtttttctacctattataaccaacgatcgcgaaccgcaccatttcctaccgcctaaacgattattaacaacaacaaacaaatcctcataactcatatcgtaaaaactaattttctaccaaaccgccaatacgataacgtaatcctcaacctaatacgcctaataaactaccgcacgatattaccaaacgctcgattatcgttattcgacctaaaaccatacatacaacgccacaccgaataacgtatcccgataacactttaccaaacgattccaaacgacgacatcgtaaaaaaacgacatatcgcccaacaaacgaactattaccgaacaattatctacaatacccgacaactaactttaccactaacgttactccgccaacgataaaaatttcgataaaatcgccaccttcgccgacgttaccaaataaaaataactttccaacaaaaacgccaatcgcgccattaaaatctaactaacacgcgcatcgcctaaaaaaaataacgttacaacaataaatcgacaacttcgcgtaactactcgttctacatcaattacc

SEQ ID NO: 5261 - DNA, 975 bp, Artificial Sequence
  chemically treated genomic DNA (Homo sapiens) CpG-island No: 5261
tcggtttagttatgttttattgttggaagttgttagtttaagttcgtcgtagtttcgtcgttttgtttataacgatgttatttatttggcgcgattgtttgtttttttttgttcggggtagtaaatggtggtgatagaaggcgtgtttagtatggacggcgatagtgcgttattggcggaaatttagtaggtaacgtaatagtataatggttggttgatggtcgatgatgtttacggtacgggcgttatcggggagtaggggcgcggtagttgttggttgtaaaaggtaaaattagaattgttggtagtgatttttggtaaaggatttggcgttagcggggtagcggtgttttgttttagtacggtggcggattatttgttgtaattcgttcgttattttatttatagtattagtatgtcgttcgtttaggcgtaggtattacgtgcgtcgttggcggttattcgtagtgatgagggtgatgtacggcgcgaaaaattggcggtatttattacgcgttttcgtgtcggagtataggatttgtcgtttacgtttgttgatttatgtagcgttatttagttattgattgtcggtgataatagtcgtgcgttatagttggtagaaaaattgcgttagtaaggttgttgggttacggcgattcgttcgttattcgtattcgttggtattgcgcgattgcgtttaacgttaatcgttgcgtatgaaatgtaggatatcgttcgtttgttggaggtgttgtatggtaacggttaataaataagttattgtagcggtatttggtcgggtagtcgtatattatgagtaatatgtagatttatagcgttagagtgttgacgttttattggtaatgtttttatagcgtaaatatatttacgtattggacgcgggttgtggatttggttggatgagtcgttattggcgggaacgttacgcgtaggtgacggttttagatttttcgt

SEQ ID NO: 5262 - DNA, 975 bp, Artificial Sequence
  chemically treated genomic DNA (Homo sapiens) CpG-island No: 5262
acgaaaaatctaaaaccgtcacctacgcgtaacgttcccgccaataacgactcatccaaccaaatccacaacccgcgtccaatacgtaaatatatttacgctataaaaacattaccaataaaacgtcaacactctaacgctataaatctacatattactcataatatacgactacccgaccaaataccgctacaataacttatttattaaccgttaccatacaacacctccaacaaacgaacgatatcctacatttcatacgcaacgattaacgttaaacgcaatcgcgcaataccaacgaatacgaataacgaacgaatcgccgtaacccaacaaccttactaacgcaatttttctaccaactataacgcacgactattatcaccgacaatcaataactaaataacgctacataaatcaacaaacgtaaacgacaaatcctatactccgacacgaaaacgcgtaataaataccgccaatttttcgcgccgtacatcaccctcatcactacgaataaccgccaacgacgcacgtaatacctacgcctaaacgaacgacatactaatactataaataaaataacgaacgaattacaacaaataatccgccaccgtactaaaacaaaacaccgctaccccgctaacgccaaatcctttaccaaaaatcactaccaacaattctaattttaccttttacaaccaacaactaccgcgcccctactccccgataacgcccgtaccgtaaacatcatcgaccatcaaccaaccattatactattacgttacctactaaatttccgccaataacgcactatcgccgtccatactaaacacgccttctatcaccaccatttactaccccgaacaaaaaaaaacaaacaatcgcgccaaataaataacatcgttataaacaaaacgacgaaactacgacgaacttaaactaacaacttccaacaataaaacataactaaaccga

SEQ ID NO: 5263 - DNA, 975 bp, Artificial Sequence
  chemically treated genomic DNA (Homo sapiens) CpG-island No: 5263
gcgagagatttaaggtcgttatttgcgcgtgacgttttcgttagtggcggtttatttagttaggtttataattcgcgtttagtacgtgggtgtatttacgttgtggaagtattgttagtaaggcgttagtattttggcgttgtagatttgtatgttgtttatagtgtgcggttgttcgattaaatgtcgttgtaatggtttgtttattaatcgttgttatgtagtatttttagtagacggacgatattttgtattttatgcgtagcggttagcgttaagcgtagtcgcgtagtattagcgggtacggatggcgggcgaatcgtcgtgatttagtagttttgttgacgtagtttttttgttagttgtaacgtacggttgttattatcgataattaatggttggatggcgttgtatgaattagtaggcgtggacggtaaattttgtatttcggtacgaaaacgcgtaatgagtgtcgttagtttttcgcgtcgtgtattatttttattattgcgaatgatcgttagcgacgtacgtaatgtttgcgtttgagcgggcggtatattggtgttgtagataaggtggcgggcgaattgtagtagataattcgttatcgtattggagtaaagtatcgttgtttcgttgacgttaaattttttgttaaaagttattattagtaattttggttttattttttgtagttagtagttgtcgcgtttttgtttttcgataacgttcgtgtcgtgggtattatcgattattaattagttattgtgttgttgcgttatttgttggattttcgttagtggcgtattatcgtcgtttatgttgaatacgttttttgttattattatttgttgtttcggatagggggaagtaagtaatcgcgttaaatgagtgatatcgttatgagtaaaacggcgaagttgcgacgggtttaaattggtagtttttagtaatgaggtatggttaagtcgg

SEQ ID NO: 5264 - DNA, 975 bp, Artificial Sequence
  chemically treated genomic DNA (Homo sapiens) CpG-island No: 5264
ccgacttaaccatacctcattactaaaaactaccaatttaaacccgtcgcaacttcgccgttttactcataacgatatcactcatttaacgcgattacttacttccccctatccgaaacaacaaataataataacaaaaaacgtattcaacataaacgacgataatacgccactaacgaaaatccaacaaataacgcaacaacacaataactaattaataatcgataatacccacgacacgaacgttatcgaaaaacaaaaacgcgacaactactaactacaaaaaataaaaccaaaattactaataataacttttaacaaaaaatttaacgtcaacgaaacaacgatactttactccaatacgataacgaattatctactacaattcgcccgccaccttatctacaacaccaatataccgcccgctcaaacgcaaacattacgtacgtcgctaacgatcattcgcaataataaaaataatacacgacgcgaaaaactaacgacactcattacgcgttttcgtaccgaaatacaaaatttaccgtccacgcctactaattcatacaacgccatccaaccattaattatcgataataacaaccgtacgttacaactaacaaaaaaactacgtcaacaaaactactaaatcacgacgattcgcccgccatccgtacccgctaatactacgcgactacgcttaacgctaaccgctacgcataaaatacaaaatatcgtccgtctactaaaaatactacataacaacgattaataaacaaaccattacaacgacatttaatcgaacaaccgcacactataaacaacatacaaatctacaacgccaaaatactaacgccttactaacaatacttccacaacgtaaatacacccacgtactaaacgcgaattataaacctaactaaataaaccgccactaacgaaaacgtcacgcgcaaataacgaccttaaatctctcgc

SEQ ID NO: 5265 - DNA, 579 bp, Artificial Sequence
  chemically treated genomic DNA (Homo sapiens) CpG-island No: 5265
gatcgaggtttgcggtaaaggtcgcggttttggcgatacgcgttagtttttgcgtttgttcggcgttagttttggtattagtatagtaatcggtgtggatttcgaataacggtgcgttaatttttgtcgtagttttgatttgttttttatcggcgttaataaatagagaaatttgaatttcggtatttgttagacgtttgtaggtatcgcgtattttgttacgttgttttgcgatatttaggtcgttttcggttgttattttttgacgttttttcggtattaggtagtaaaaatgtggtttcgttttaacggcgatcgttagtattttttcggttatcgttatttttagatttatgcgggtatttagcgtttgacgtaggatgcgtacgtcgcggttagtaatgtgacggcgatttttacgtaaatgtacggtaatgtcgttcgttttcgtttgttcggtaataaacgcggtttgtatcggattcgggtaagcggtatcgcgcgcgttgcgtagcgtagcgatatggttaatgttgacgtttaatagtaatttagttatgataatttttattatttata

SEQ ID NO: 5266 - DNA, 579 bp, Artificial Sequence
  chemically treated genomic DNA (Homo sapiens) CpG-island No: 5266
tataaataataaaaattatcataactaaattactattaaacgtcaacattaaccatatcgctacgctacgcaacgcgcgcgataccgcttacccgaatccgatacaaaccgcgtttattaccgaacaaacgaaaacgaacgacattaccgtacatttacgtaaaaatcgccgtcacattactaaccgcgacgtacgcatcctacgtcaaacgctaaatacccgcataaatctaaaaataacgataaccgaaaaaatactaacgatcgccgttaaaacgaaaccacatttttactacctaataccgaaaaaacgtcaaaaaataacaaccgaaaacgacctaaatatcgcaaaacaacgtaacaaaatacgcgatacctacaaacgtctaacaaataccgaaattcaaatttctctatttattaacgccgataaaaaacaaatcaaaactacgacaaaaattaacgcaccgttattcgaaatccacaccgattactatactaataccaaaactaacgccgaacaaacgcaaaaactaacgcgtatcgccaaaaccgcgacctttaccgcaaacctcgatc

SEQ ID NO: 5267 - DNA, 579 bp, Artificial Sequence
  chemically treated genomic DNA (Homo sapiens) CpG-island No: 5267
tatgaatgatgaggattgttatggttgaattattgttaggcgttaatattgattatatcgttacgttgcgtaacgcgcgcggtatcgtttattcggattcggtgtaggtcgcgtttattgtcgagtaggcgggagcggacggtattatcgtgtatttacgtgaagatcgtcgttatattattgatcgcgacgtgcgtattttgcgttagacgttggatattcgtatgaatttggagatggcggtgatcgaagagatgttggcgatcgtcgttgagacgaagttatatttttgttgtttggtatcggaaaagcgttaggaagtaataatcgaaggcggtttggatgtcgtagggtagcgtgataaaatgcgcgatgtttgtaaacgtttggtagatgtcgggatttaggtttttttgtttattgacgtcgatgaagagtagattaaagttgcggtagaggttggcgtatcgttattcgagatttatatcggttgttatgttgatgttaaaattgacgtcgaataggcgtaagagttggcgcgtatcgttaaagtcgcgatttttgtcgtaagtttcggtt

SEQ ID NO: 5268 - DNA, 579 bp, Artificial Sequence
  chemically treated genomic DNA (Homo sapiens) CpG-island No: 5268
aaccgaaacttacgacaaaaatcgcgactttaacgatacgcgccaactcttacgcctattcgacgtcaattttaacatcaacataacaaccgatataaatctcgaataacgatacgccaacctctaccgcaactttaatctactcttcatcgacgtcaataaacaaaaaaacctaaatcccgacatctaccaaacgtttacaaacatcgcgcattttatcacgctaccctacgacatccaaaccgccttcgattattacttcctaacgcttttccgataccaaacaacaaaaatataacttcgtctcaacgacgatcgccaacatctcttcgatcaccgccatctccaaattcatacgaatatccaacgtctaacgcaaaatacgcacgtcgcgatcaataatataacgacgatcttcacgtaaatacacgataataccgtccgctcccgcctactcgacaataaacgcgacctacaccgaatccgaataaacgataccgcgcgcgttacgcaacgtaacgatataatcaatattaacgcctaacaataattcaaccataacaatcctcatcattcata

SEQ ID NO: 5269 - DNA, 681 bp, Artificial Sequence
  chemically treated genomic DNA (Homo sapiens) CpG-island No: 5269
ggaatatcgttacgggggaatggaatttgagtacggcggattgatggtataaaaggtggagcggatggatggttgcggcggaagtaagttaaggggagtttataaacggggagtatgcgcgttgttggcggggggggttcgagggggaggacggttgtgttagtgtcgatagcggggagttttatgggggttaggataggtaagaattttaaggggcgtcggtagcgcgggcgcgagttttacgggatatgaatggggtcgaggagcgcggtaattagggttagcgcgggtagatggagattggtagtggcggtaaagagcggtgttgtttgcgaaaggtagggtggcgtagttaaggtttgaaaggaggatgggtatatgggcgatggagagggtcgattaggggttgttggcgcgcgggggtgggtgggggtgttgtcgttattggagatatatttgttggcgtaaattgtatcgggttaagagtttgtcgcgcgtatttgacgtgagaacgggtattacggtcggggtgtaaagtttagtggagtagagatattacggggagagtaatgggtgacggtcgcggagggcgtaaatttgcgtgggtgggggaacggtcgaaaagatggtgttggttatattagtatatatttcggtaattatttaataattatatgtacg

SEQ ID NO: 5270 - DNA, 681 bp, Artificial Sequence
  chemically treated genomic DNA (Homo sapiens) CpG-island No: 5270
cgtacatataattattaaataattaccgaaatatatactaatataaccaacaccatcttttcgaccgttcccccacccacgcaaatttacgccctccgcgaccgtcacccattactctccccgtaatatctctactccactaaactttacaccccgaccgtaatacccgttctcacgtcaaatacgcgcgacaaactcttaacccgatacaatttacgccaacaaatatatctccaataacgacaacacccccacccacccccgcgcgccaacaacccctaatcgaccctctccatcgcccatatacccatcctcctttcaaaccttaactacgccaccctacctttcgcaaacaacaccgctctttaccgccactaccaatctccatctacccgcgctaaccctaattaccgcgctcctcgaccccattcatatcccgtaaaactcgcgcccgcgctaccgacgccccttaaaattcttacctatcctaacccccataaaactccccgctatcgacactaacacaaccgtcctccccctcgaaccccccccgccaacaacgcgcatactccccgtttataaactccccttaacttacttccgccgcaaccatccatccgctccaccttttataccatcaatccgccgtactcaaattccattcccccgtaacgatattcc

SEQ ID NO: 5271 - DNA, 681 bp, Artificial Sequence
  chemically treated genomic DNA (Homo sapiens) CpG-island No: 5271
cgtatatatggttattgggtggttgtcggaatgtgtattaatgtaattaatattattttttcggtcgtttttttatttacgtaaatttacgtttttcgcgatcgttatttattatttttttcgtggtatttttgttttattaaattttatatttcggtcgtagtgttcgtttttacgttaggtgcgcgcggtaagtttttaattcggtgtagtttacgttagtaggtatgtttttaatagcggtaatatttttatttattttcgcgcgttagtagtttttaatcggttttttttatcgtttatatatttattttttttttaggttttaattacgttattttatttttcgtagataatatcgttttttgtcgttattgttaatttttatttgttcgcgttaattttaattatcgcgtttttcggttttatttatgtttcgtggggttcgcgttcgcgttgtcggcgttttttaaggtttttgtttattttggtttttatagagtttttcgttatcggtattaatatagtcgttttttttttcgggtttttttcgttaataacgcgtatgtttttcgtttgtaggttttttttagtttgttttcgtcgtaattatttattcgttttattttttatgttattagttcgtcgtatttaagttttattttttcgtagcggtatttt

SEQ ID NO: 5272 - DNA, 681 bp, Artificial Sequence
  chemically treated genomic DNA (Homo sapiens) CpG-island No: 5272
aaaataccgctacgaaaaaataaaacttaaatacgacgaactaataacataaaaaataaaacgaataaataattacgacgaaaacaaactaaaaaaaacctacaaacgaaaaacatacgcgttattaacgaaaaaaacccgaaaaaaaaaacgactatattaataccgataacgaaaaactctataaaaaccaaaataaacaaaaaccttaaaaaacgccgacaacgcgaacgcgaaccccacgaaacataaataaaaccgaaaaacgcgataattaaaattaacgcgaacaaataaaaattaacaataacgacaaaaaacgatattatctacgaaaaataaaataacgtaattaaaacctaaaaaaaaaataaatatataaacgataaaaaaaaccgattaaaaactactaacgcgcgaaaataaataaaaatattaccgctattaaaaacatacctactaacgtaaactacaccgaattaaaaacttaccgcgcgcacctaacgtaaaaacgaacactacgaccgaaatataaaatttaataaaacaaaaataccacgaaaaaaataataaataacgatcgcgaaaaacgtaaatttacgtaaataaaaaaacgaccgaaaaaataatattaattacattaatacacattccgacaaccacccaataaccatatatacg

SEQ ID NO: 5273 - DNA, 694 bp, Artificial Sequence
  chemically treated genomic DNA (Homo sapiens) CpG-island No: 5273
tttaatgttttaagtattcgggcgaacgtggcgtgttttattagttcggtagtatgaattattattcgttaggtattttattggagacgacggaaatcgtagtcgaagcggcgttttagcgtttttagtatgacgttttgtattttttattggtgaagtcgtcggtagtgatcgtttagtgtagtgttttattattatagtagtttagcgcgaacgtgatacgtaagttttttttcgattatatagtagaattcgaattcgttagagtattatcgttgattgtttttttttcggttattttgtttgtatgtgttcggtgtcgatggcggtatagtaggtttcgtttaagtaatagcgtattttggcgtatgattcggtaaatacgtttgtattgatcgtaggtatattattaagttttgtttgtttgcgaagtagcgttatattcgacgataattatacgttggtagtttttcgataatatggtgtaacggagaagtatattcgtattattagtgtgacgattgcggcggttattttttagttatcggttcgtttgagaatgacgtgtaattgcgtacgcgatatcggagataacggttgattaagtttattttttattttcgggtaataaggggcgtgcgttatttatttttttgttcgtttatatttaacggtttttttgagagtttatttt

SEQ ID NO: 5274 - DNA, 694 bp, Artificial Sequence
  chemically treated genomic DNA (Homo sapiens) CpG-island No: 5274
aaaataaactctcaaaaaaaccgttaaatataaacgaacaaaaaaataaataacgcacgccccttattacccgaaaataaaaaataaacttaatcaaccgttatctccgatatcgcgtacgcaattacacgtcattctcaaacgaaccgataactaaaaaataaccgccgcaatcgtcacactaataatacgaatatacttctccgttacaccatattatcgaaaaactaccaacgtataattatcgtcgaatataacgctacttcgcaaacaaacaaaacttaataatatacctacgatcaatacaaacgtatttaccgaatcatacgccaaaatacgctattacttaaacgaaacctactataccgccatcgacaccgaacacatacaaacaaaataaccgaaaaaaaaacaatcaacgataatactctaacgaattcgaattctactatataatcgaaaaaaaacttacgtatcacgttcgcgctaaactactataataataaaacactacactaaacgatcactaccgacgacttcaccaataaaaaatacaaaacgtcatactaaaaacgctaaaacgccgcttcgactacgatttccgtcgtctccaataaaatacctaacgaataataattcatactaccgaactaataaaacacgccacgttcgcccgaatacttaaaacattaaa

SEQ ID NO: 5275 - DNA, 694 bp, Artificial Sequence
  chemically treated genomic DNA (Homo sapiens) CpG-island No: 5275
aaaatgaatttttaaagaagtcgttgaatatggacgggtaaaaaagtggatagcgtacgttttttattgttcggggatggggagtaagtttagttagtcgttgttttcggtgtcgcgtgcgtagttgtacgttatttttagacgaatcgatgattggaggatggtcgtcgtagtcgttatattgatgatacggatgtgttttttcgttatattatgttatcggagagttgttaacgtatggttatcgtcgggtatggcgttgtttcgtagataggtagaatttgatggtatgtttgcgattaatgtaaacgtgtttatcggattatgcgttagaatgcgttgttgtttgagcgaaatttgttgtatcgttatcgatatcgggtatatataggtagagtggtcggaaagaaaataattagcgatggtgttttgacgggttcgagttttgttgtataatcggagagagatttgcgtgttacgttcgcgttggattgttgtgatagtgaggtattgtattgggcggttattatcgacggttttattagtgaaaagtataggacgttatgttgggaacgttggaacgtcgtttcggttacgattttcgtcgtttttagtggagtgtttgacggataatggtttatgttatcgggttaatgaaatacgttacgttcgttcggatgtttgggatattgaa

SEQ ID NO: 5276 - DNA, 694 bp, Artificial Sequence
  chemically treated genomic DNA (Homo sapiens) CpG-island No: 5276
ttcaatatcccaaacatccgaacgaacgtaacgtatttcattaacccgataacataaaccattatccgtcaaacactccactaaaaacgacgaaaatcgtaaccgaaacgacgttccaacgttcccaacataacgtcctatacttttcactaataaaaccgtcgataataaccgcccaatacaatacctcactatcacaacaatccaacgcgaacgtaacacgcaaatctctctccgattatacaacaaaactcgaacccgtcaaaacaccatcgctaattattttctttccgaccactctacctatatatacccgatatcgataacgatacaacaaatttcgctcaaacaacaacgcattctaacgcataatccgataaacacgtttacattaatcgcaaacataccatcaaattctacctatctacgaaacaacgccatacccgacgataaccatacgttaacaactctccgataacataatataacgaaaaaacacatccgtatcatcaatataacgactacgacgaccatcctccaatcatcgattcgtctaaaaataacgtacaactacgcacgcgacaccgaaaacaacgactaactaaacttactccccatccccgaacaataaaaaacgtacgctatccacttttttacccgtccatattcaacgacttctttaaaaattcatttt

SEQ ID NO: 5277 - DNA, 683 bp, Artificial Sequence
  chemically treated genomic DNA (Homo sapiens) CpG-island No: 5277
tcgcgtaggtatttcggtaggtgattcgaatcgattattcggtttttttttttagtatttataggcgtaaattttgacgggcgtcggtttttagtagtcggtagttagtaggtttttaaaattcgtttggttaagttgtggttgtacgtgcgattaaacgtcgaatcgcgatgacgcgttaatttttttagattatatcgttcggttgtagttgtattaatagcgtgttatcgttgtcggtatatcgttaattagtattatcggttttgtgttagtttaatagtcgtttgaacgcggtttggcgtagtgttttataatcgttttttattagcggataattattttcgttgtatgtaattagttttgtataatatgtgagcgttgatcgttcgggcgtagtagagaatattttgcggattttgtaggtacgttgttcgtcggcgtttatgcgttgttgacgaattttattcgttattagtttatgtttcgcgttagcgttgcgtttgagttttgttgtttatagtaggtgttaacggcgcgcgtttatcgttatttattaacggtagattgatagcggcgggtattggtcgtgtttaaattcgataggggcgcgaatattaataatgggcgtattataattagtagggtacgatagttttgtttcgtgtgttttttttgtatag

SEQ ID NO: 5278 - DNA, 683 bp, Artificial Sequence
  chemically treated genomic DNA (Homo sapiens) CpG-island No: 5278
ctatacaaaaaaaacacacgaaacaaaactatcgtaccctactaattataatacgcccattattaatattcgcgcccctatcgaatttaaacacgaccaatacccgccgctatcaatctaccgttaataaataacgataaacgcgcgccgttaacacctactataaacaacaaaactcaaacgcaacgctaacgcgaaacataaactaataacgaataaaattcgtcaacaacgcataaacgccgacgaacaacgtacctacaaaatccgcaaaatattctctactacgcccgaacgatcaacgctcacatattatacaaaactaattacatacaacgaaaataattatccgctaataaaaaacgattataaaacactacgccaaaccgcgttcaaacgactattaaactaacacaaaaccgataatactaattaacgatataccgacaacgataacacgctattaatacaactacaaccgaacgatataatctaaaaaaattaacgcgtcatcgcgattcgacgtttaatcgcacgtacaaccacaacttaaccaaacgaattttaaaaacctactaactaccgactactaaaaaccgacgcccgtcaaaatttacgcctataaatactaaaaaaaaaaaccgaataatcgattcgaatcacctaccgaaatacctacgcga

SEQ ID NO: 5279 - DNA, 683 bp, Artificial Sequence
  chemically treated genomic DNA (Homo sapiens) CpG-island No: 5279
ttatgtaagagagatatacggaataggattatcgtgttttgttgattgtgatacgtttattattgatgttcgcgtttttatcgagtttgagtacggttaatgttcgtcgttattaatttgtcgttaatgaataacgatgaacgcgcgtcgttggtatttgttataaatagtaaggtttagacgtagcgttggcgcgggatataaattggtggcgggtgaaattcgttagtagcgtatggacgtcggcgggtagcgtgtttgtaaaattcgtaaggtattttttgttgcgttcgggcggttagcgtttatatattgtgtaaagttggttgtatgtagcggggatgattattcgttggtggaaggcggttataaggtattgcgttagatcgcgtttaggcgattattgaattggtataaaatcgatagtgttgattggcggtgtatcggtagcggtaatacgttgttagtgtagttatagtcgaacggtgtgatttggaagggttggcgcgttatcgcggttcggcgtttggtcgtacgtataattataatttagttaggcgagttttgaaaatttgttggttgtcgattgttaaaaatcgacgttcgttagaatttgcgtttgtgggtgttggaagagaaagtcggatgatcggttcgaattatttgtcggaatgtttgcgcga

SEQ ID NO: 5280 - DNA, 683 bp, Artificial Sequence
  chemically treated genomic DNA (Homo sapiens) CpG-island No: 5280
tcgcgcaaacattccgacaaataattcgaaccgatcatccgactttctcttccaacacccacaaacgcaaattctaacgaacgtcgatttttaacaatcgacaaccaacaaattttcaaaactcgcctaactaaattataattatacgtacgaccaaacgccgaaccgcgataacgcgccaacccttccaaatcacaccgttcgactataactacactaacaacgtattaccgctaccgatacaccgccaatcaacactatcgattttataccaattcaataatcgcctaaacgcgatctaacgcaataccttataaccgccttccaccaacgaataatcatccccgctacatacaaccaactttacacaatatataaacgctaaccgcccgaacgcaacaaaaaataccttacgaattttacaaacacgctacccgccgacgtccatacgctactaacgaatttcacccgccaccaatttatatcccgcgccaacgctacgtctaaaccttactatttataacaaataccaacgacgcgcgttcatcgttattcattaacgacaaattaataacgacgaacattaaccgtactcaaactcgataaaaacgcgaacatcaataataaacgtatcacaatcaacaaaacacgataatcctattccgtatatctctcttacataa

SEQ ID NO: 5281 - DNA, 512 bp, Artificial Sequence
  chemically treated genomic DNA (Homo sapiens) CpG-island No: 5281
agcggcgattcgttgtttttattttcggcggttgatacgtgcgtagtcgattattgttataggttttattaataacgttaaatttgtcgaagttgtcgttttgttcgacgcgttatacgcgcgtatcgaataggaaagttggaataagggcgatcgttgttggcgatgggttgtggcgtagtgttatgaaaggtggttatttggatgatgagtaaagttcggattggttgtttatcgcgagggtgaataacggtttatcgtatcgcgtattatgattaaaaatattacggtattggttgtatattttttgcggcgttggttgtattacgttcggttatataaattgggttgatatcgtataggaggtaaaaagttggttttttcggcgttagtttaggtcgatacgttggaagttggttacggtattggtcggtttattatttttacgtttggtggtgagtatcgtattatagttgttttgttattgttagtttttggtattgatatttagg

SEQ ID NO: 5282 - DNA, 512 bp, Artificial Sequence
  chemically treated genomic DNA (Homo sapiens) CpG-island No: 5282
cctaaatatcaataccaaaaactaacaataacaaaacaactataatacgatactcaccaccaaacgtaaaaataataaaccgaccaataccgtaaccaacttccaacgtatcgacctaaactaacgccgaaaaaaccaactttttacctcctatacgatatcaacccaatttatataaccgaacgtaatacaaccaacgccgcaaaaaatatacaaccaataccgtaatatttttaatcataatacgcgatacgataaaccgttattcaccctcgcgataaacaaccaatccgaactttactcatcatccaaataaccacctttcataacactacgccacaacccatcgccaacaacgatcgcccttattccaactttcctattcgatacgcgcgtataacgcgtcgaacaaaacgacaacttcgacaaatttaacgttattaataaaacctataacaataatcgactacgcacgtatcaaccgccgaaaataaaaacaacgaatcgccgct

SEQ ID NO: 5283 - DNA, 512 bp, Artificial Sequence
  chemically treated genomic DNA (Homo sapiens) CpG-island No: 5283
tttgaatgttagtgttaaaggttgataataataaagtagttatagtacggtgtttattattaggcgtggaagtggtgaatcgattaatatcgtgattaatttttagcgtgtcggtttgggttaacgtcgagaaagttagttttttgttttttgtacggtgttagtttagtttgtatggtcgggcgtagtgtagttaacgtcgtagagagtgtataattagtgtcgtggtgtttttggttataatgcgcggtgcggtaaatcgttgtttattttcgcggtaaatagttagttcgggttttgtttattatttagatgattattttttatagtattgcgttatagtttatcgttaatagcgatcgtttttgttttagtttttttgttcggtgcgcgcgtgtggcgcgtcgagtaaggcggtagtttcggtaagtttggcgttattaatgaaatttgtggtaataatcgattgcgtacgtattaatcgtcgaaggtgaaagtagcgggtcgtcgtt

SEQ ID NO: 5284 - DNA, 512 bp, Artificial Sequence
  chemically treated genomic DNA (Homo sapiens) CpG-island No: 5284
aacgacgacccgctactttcaccttcgacgattaatacgtacgcaatcgattattaccacaaatttcattaataacgccaaacttaccgaaactaccgccttactcgacgcgccacacgcgcgcaccgaacaaaaaaactaaaacaaaaacgatcgctattaacgataaactataacgcaatactataaaaaataatcatctaaataataaacaaaacccgaactaactatttaccgcgaaaataaacaacgatttaccgcaccgcgcattataaccaaaaacaccacgacactaattatacactctctacgacgttaactacactacgcccgaccatacaaactaaactaacaccgtacaaaaaacaaaaaactaactttctcgacgttaacccaaaccgacacgctaaaaattaatcacgatattaatcgattcaccacttccacgcctaataataaacaccgtactataactactttattattatcaacctttaacactaacattcaaa

SEQ ID NO: 5285 - DNA, 507 bp, Artificial Sequence
  chemically treated genomic DNA (Homo sapiens) CpG-island No: 5285
tttatgattcgcgatatcgtcgaatgtttggcggaggtggagtttgagtgaaaggtgaagcgtatcgtgtattttggagttagaatcgggcgcgtattaattcgacggtaatttgtaggtgttacgcgtagagttggcgcgttggtcgacggtaaaattttcgtcgataaagtgaaagataagttggaattgaagcgacgttaatcgggttggattacgggcgttttattcgttcgatgttgtttcgtaggggtaatttgttgtttttttgaatgttaaatttaaagaacggcggaattgttcgaggagttaatcggtattgaaatttacgggtaaatttggcgatggtttttgagtagtataaatcggttcgtatagagttggagaagtgtaagcgtaggttagcggcgttacgttgtttacgtcggaataagtgtatcgttgatagcgagtttgtaggtatttattgacgaagaaaaatagttaatatcgcgtagtagtaagaat

SEQ ID NO: 5286 - DNA, 507 bp, Artificial Sequence
  chemically treated genomic DNA (Homo sapiens) CpG-island No: 5286
attcttactactacgcgatattaactatttttcttcgtcaataaatacctacaaactcgctatcaacgatacacttattccgacgtaaacaacgtaacgccgctaacctacgcttacacttctccaactctatacgaaccgatttatactactcaaaaaccatcgccaaatttacccgtaaatttcaataccgattaactcctcgaacaattccgccgttctttaaatttaacattcaaaaaaacaacaaattacccctacgaaacaacatcgaacgaataaaacgcccgtaatccaacccgattaacgtcgcttcaattccaacttatctttcactttatcgacgaaaattttaccgtcgaccaacgcgccaactctacgcgtaacacctacaaattaccgtcgaattaatacgcgcccgattctaactccaaaatacacgatacgcttcacctttcactcaaactccacctccgccaaacattcgacgatatcgcgaatcataaa

SEQ ID NO: 5287 - DNA, 507 bp, Artificial Sequence
  chemically treated genomic DNA (Homo sapiens) CpG-island No: 5287
gtttttgttgttgcgcggtattaattgttttttttcgttagtaagtatttgtaaattcgttgttagcgatgtatttgtttcggcgtgagtaacgtgacgtcgttggtttgcgtttgtatttttttagttttgtgcgggtcgatttgtgttgtttaaaaattatcgttagatttgttcgtagattttagtgtcggttaatttttcgagtaatttcgtcgttttttgggtttggtatttaggaaggtagtaaattgtttttgcgaaatagtatcgaacgggtgaagcgttcgtaatttagttcggttaacgtcgttttagttttagtttattttttattttgtcggcgagaattttgtcgtcggttagcgcgttagttttacgcgtggtatttgtaaattatcgtcgggttggtacgcgttcgattttggttttagaatgtacggtacgttttattttttatttaaattttattttcgttagatattcggcggtatcgcgggttatgag

SEQ ID NO: 5288 - DNA, 507 bp, Artificial Sequence
  chemically treated genomic DNA (Homo sapiens) CpG-island No: 5288
ctcataacccgcgataccgccgaatatctaacgaaaataaaatttaaataaaaaataaaacgtaccgtacattctaaaaccaaaatcgaacgcgtaccaacccgacgataatttacaaataccacgcgtaaaactaacgcgctaaccgacgacaaaattctcgccgacaaaataaaaaataaactaaaactaaaacgacgttaaccgaactaaattacgaacgcttcacccgttcgatactatttcgcaaaaacaatttactaccttcctaaataccaaacccaaaaaacgacgaaattactcgaaaaattaaccgacactaaaatctacgaacaaatctaacgataatttttaaacaacacaaatcgacccgcacaaaactaaaaaaatacaaacgcaaaccaacgacgtcacgttactcacgccgaaacaaatacatcgctaacaacgaatttacaaatacttactaacgaaaaaaaacaattaataccgcgcaacaacaaaaac

SEQ ID NO: 5289 - DNA, 771 bp, Artificial Sequence
  chemically treated genomic DNA (Homo sapiens) CpG-island No: 5289
gcgtttcgtatggtatggtcgcggttattcgtttatttttgaggacgtttattaattttttgcgtagcgagtatattaacggtacggcgttgtatttcgacgttttttcggcggtggtcggtagttcggtcgtgtttcgcgggggtttcgtgttcgtggtttatagtgatttcgagatttttaagagtaagaagaaggggttgtttcggcgttcgttgttgagtgggttgaagttgcgtaagtcggagtttaagagtagtttggttagttaacgtagtaagtagagtttttttcgtagcgaggcgggtatgagtatcgttagttttacggttagcgatatttattttattattagtttgggcgaggttgaggtcgagttggcggttatcgaggacgatatcgacgttattattatcgagatttacgtgggcgagtggaagaacgataaacgtttcggtttcggcgtgagttagcgttcggacgggtttaagtacgagggcgagtgggttagtaatcggcgttatggttacggttgtatgattttttcggacggtattaaggaggagggtaagtataagtagaatattttcgtcggcggtaagcgtaagaattttatttttttgcgggttagtaagattcgcgagaaggtggatcgcgtcgttgaggtcgttgagcgggtcgttattatcgttaagtagaaggttgagatcgcggtttttaggtaggagggcgagggggcggggggttttttttggtgtttagaaggtgttt

SEQ ID NO: 5290 - DNA, 771 bp, Artificial Sequence
  chemically treated genomic DNA (Homo sapiens) CpG-island No: 5290
aaacaccttctaaacaccaaaaaaaaccccccgccccctcgccctcctacctaaaaaccgcgatctcaaccttctacttaacgataataacgacccgctcaacgacctcaacgacgcgatccaccttctcgcgaatcttactaacccgcaaaaaaataaaattcttacgcttaccgccgacgaaaatattctacttatacttaccctcctccttaataccgtccgaaaaaatcatacaaccgtaaccataacgccgattactaacccactcgccctcgtacttaaacccgtccgaacgctaactcacgccgaaaccgaaacgtttatcgttcttccactcgcccacgtaaatctcgataataataacgtcgatatcgtcctcgataaccgccaactcgacctcaacctcgcccaaactaataataaaataaatatcgctaaccgtaaaactaacgatactcatacccgcctcgctacgaaaaaaactctacttactacgttaactaaccaaactactcttaaactccgacttacgcaacttcaacccactcaacaacgaacgccgaaacaaccccttcttcttactcttaaaaatctcgaaatcactataaaccacgaacacgaaacccccgcgaaacacgaccgaactaccgaccaccgccgaaaaaacgtcgaaatacaacgccgtaccgttaatatactcgctacgcaaaaaattaataaacgtcctcaaaaataaacgaataaccgcgaccataccatacgaaacgc

SEQ ID NO: 5291 - DNA, 771 bp, Artificial Sequence
  chemically treated genomic DNA (Homo sapiens) CpG-island No: 5291
aaatattttttgggtattaagaagggtttttcgttttttcgtttttttatttggaagtcgcgattttagttttttgtttggcgatggtggcggttcgtttagcggttttaacggcgcggtttattttttcgcggattttgttggttcgtagggggatgaggtttttgcgtttgtcgtcgacgaggatgttttgtttgtatttgtttttttttttggtgtcgttcgggaaggttatgtagtcgtagttatggcgtcggttgttggtttattcgttttcgtatttgagttcgttcgagcgttggtttacgtcgaagtcggagcgtttgtcgtttttttattcgtttacgtaggtttcggtggtggtggcgtcgatgtcgttttcgatgatcgttagttcggttttagtttcgtttaggttgatggtggagtggatgtcgttggtcgtggagttgacggtgtttatgttcgtttcgttgcgaaaggagttttgtttgttgcgttggttggttaggttgtttttggatttcgatttgcgtagttttagtttatttagtagcgagcgtcgaaatagttttttttttttgtttttgaggatttcggagttattgtgggttacgagtacgaagttttcgcgggatacggtcgggttgtcggttatcgtcggagaggcgtcgggatgtagcgtcgtgtcgttggtgtgttcgttgcgtagggagttgatggacgtttttaggggtgagcggatgatcgcggttatgttatacgggacgt

SEQ ID NO: 5292 - DNA, 771 bp, Artificial Sequence
  chemically treated genomic DNA (Homo sapiens) CpG-island No: 5292
acgtcccgtataacataaccgcgatcatccgctcacccctaaaaacgtccatcaactccctacgcaacgaacacaccaacgacacgacgctacatcccgacgcctctccgacgataaccgacaacccgaccgtatcccgcgaaaacttcgtactcgtaacccacaataactccgaaatcctcaaaaacaaaaaaaaaaaactatttcgacgctcgctactaaataaactaaaactacgcaaatcgaaatccaaaaacaacctaaccaaccaacgcaacaaacaaaactcctttcgcaacgaaacgaacataaacaccgtcaactccacgaccaacgacatccactccaccatcaacctaaacgaaactaaaaccgaactaacgatcatcgaaaacgacatcgacgccaccaccaccgaaacctacgtaaacgaataaaaaaacgacaaacgctccgacttcgacgtaaaccaacgctcgaacgaactcaaatacgaaaacgaataaaccaacaaccgacgccataactacgactacataaccttcccgaacgacaccaaaaaaaaaaacaaatacaaacaaaacatcctcgtcgacgacaaacgcaaaaacctcatccccctacgaaccaacaaaatccgcgaaaaaataaaccgcgccgttaaaaccgctaaacgaaccgccaccatcgccaaacaaaaaactaaaatcgcgacttccaaataaaaaaacgaaaaaacgaaaaacccttcttaatacccaaaaaatattt

SEQ ID NO: 5293 - DNA, 587 bp, Artificial Sequence
  chemically treated genomic DNA (Homo sapiens) CpG-island No: 5293
cgcgttgcgtgtgttgtttgggtttgtgtttggtgtgcggtttcgggggtgtggcgtatttgttttttcgtttgttcgtttcgtgtttgttcgtgtcgttgttcgttggcggtttttcgcgggtcggtattggttcgtgtcggtgttttttgttgtcgttatgtgtgttgggcggttttttttggtattcggtgcggttcgtcgggtggtcggtggtttgcgcgcgcgtgttcgttttgttttgtttttcgttcgtcgtttgggttttttttgtgtggtttttttttggtgttgtcgttttttttttcgtttgcgtgcgtttgttgttttcgtgtgttgcgtttgacgtatttgtcgttgttgttttgttttgcgtggtgtttggtgggttttgtttcgttcgttcgttgcgttcgtttttttggggttttgttgcgttttcgcgttttttgtttgtgtttgtttgggggttgtttcgttcgttcgttgttttttttttcgtgtggcggttcgtcgtcggttttcgtgtgtgtgtgttttttttgtttgtggtttttgtggttgtggtgttttgtgtttattttgtg

SEQ ID NO: 5294 - DNA, 587 bp, Artificial Sequence
  chemically treated genomic DNA (Homo sapiens) CpG-island No: 5294
cacaaaataaacacaaaacaccacaaccacaaaaaccacaaacaaaaaaaacacacacacacgaaaaccgacgacgaaccgccacacgaaaaaaaaaacaacgaacgaacgaaacaacccccaaacaaacacaaacaaaaaacgcgaaaacgcaacaaaaccccaaaaaaacgaacgcaacgaacgaacgaaacaaaacccaccaaacaccacgcaaaacaaaacaacaacgacaaatacgtcaaacgcaacacacgaaaacaacaaacgcacgcaaacgaaaaaaaaaacgacaacaccaaaaaaaaaccacacaaaaaaaacccaaacgacgaacgaaaaacaaaacaaaacgaacacgcgcgcgcaaaccaccgaccacccgacgaaccgcaccgaataccaaaaaaaaccgcccaacacacataacgacaacaaaaaacaccgacacgaaccaataccgacccgcgaaaaaccgccaacgaacaacgacacgaacaaacacgaaacgaacaaacgaaaaaacaaatacgccacacccccgaaaccgcacaccaaacacaaacccaaacaacacacgcaacgcg

SEQ ID NO: 5295 - DNA, 587 bp, Artificial Sequence
  chemically treated genomic DNA (Homo sapiens) CpG-island No: 5295
tataaaatagatataaaatattataattataaaaattatagataaaagaagtatatatatacgaaagtcggcgacggatcgttatacgagaggggaaatagcggacgaacgaggtagtttttagataagtataaatagaagacgcgaaaacgtaatagagttttaagaaaacgaacgtagcgaacgagcggaatagggtttattaaatattacgtagagtagaatagtaacgatagatgcgttaaacgtagtatacggagataataagcgtacgtagacgagaaagaaaacgataatattagggaaaagttatataaaggaaatttaagcgacgagcggaaggtaggataagacggatacgcgcgcgtaaattatcgattattcgacgaatcgtatcggatgttaaggaaaatcgtttagtatatatgacggtaatagaaagtatcgatacggattaatgtcgattcgcgaagagtcgttagcggatagcggtacgaataaatacgggacggataggcggagaggtagatacgttatattttcggagtcgtatattagatatagatttagatagtatacgtagcgcg

SEQ ID NO: 5296 - DNA, 587 bp, Artificial Sequence
  chemically treated genomic DNA (Homo sapiens) CpG-island No: 5296
cgcgctacgtatactatctaaatctatatctaatatacgactccgaaaatataacgtatctacctctccgcctatccgtcccgtatttattcgtaccgctatccgctaacgactcttcgcgaatcgacattaatccgtatcgatactttctattaccgtcatatatactaaacgattttccttaacatccgatacgattcgtcgaataatcgataatttacgcgcgcgtatccgtcttatcctaccttccgctcgtcgcttaaatttcctttatataacttttccctaatattatcgttttctttctcgtctacgtacgcttattatctccgtatactacgtttaacgcatctatcgttactattctactctacgtaatatttaataaaccctattccgctcgttcgctacgttcgttttcttaaaactctattacgttttcgcgtcttctatttatacttatctaaaaactacctcgttcgtccgctatttcccctctcgtataacgatccgtcgccgactttcgtatatatatacttcttttatctataatttttataattataatattttatatctattttata

SEQ ID NO: 5297 - DNA, 724 bp, Artificial Sequence
  chemically treated genomic DNA (Homo sapiens) CpG-island No: 5297
ttattatcgcgcgtatttgatttttcggtattgttacgatcgcgcgtatttgatttttcggtattgttattatcgcgcgtatttgatttttcggaattgttattattaggcgtatttgatttttcggtattgttacgatcgcgcgtatttgatttttcggtattgttattatcgcgcgtatttgatttttcggtattgttattatcgcgcgtatttgatttttcggtattgttattatcgcgcgtatttgatttttcggtattgttacgatcgcgcgtatttgatttttcggaattgttattatcgcgcgtatttgatttttcggaattgttacgatcgcgcgtatttgatttttcggaattgttattatcgtgcgtatttgattttttggaattgttacgatcgcgcgtacgtgattttttggaattgttattatcgcgcgtatttgatttttcggaattgttattatcgcgtgtatttgatttttcggaattgttattatcgcgtgtatttgatttttcggaattgttattatcgcgcgtatttgatttttcggaattattattattgtgtgtatttgatttttgcgatgggtaatatttcgttaatgttttttttattttcgtaagttttcggagaggacggggttttttattttttcggttgtttagatttcgattataatgttttttattatatatagtacgagggattaaatgggaaa

SEQ ID NO: 5298 - DNA, 724 bp, Artificial Sequence
  chemically treated genomic DNA (Homo sapiens) CpG-island No: 5298
tttcccatttaatccctcgtactatatataataaaaaacattataatcgaaatctaaacaaccgaaaaaataaaaaaccccgtcctctccgaaaacttacgaaaataaaaaaaacattaacgaaatattacccatcgcaaaaatcaaatacacacaataataataattccgaaaaatcaaatacgcgcgataataacaattccgaaaaatcaaatacacgcgataataacaattccgaaaaatcaaatacacgcgataataacaattccgaaaaatcaaatacgcgcgataataacaattccaaaaaatcacgtacgcgcgatcgtaacaattccaaaaaatcaaatacgcacgataataacaattccgaaaaatcaaatacgcgcgatcgtaacaattccgaaaaatcaaatacgcgcgataataacaattccgaaaaatcaaatacgcgcgatcgtaacaataccgaaaaatcaaatacgcgcgataataacaataccgaaaaatcaaatacgcgcgataataacaataccgaaaaatcaaatacgcgcgataataacaataccgaaaaatcaaatacgcgcgatcgtaacaataccgaaaaatcaaatacgcctaataataacaattccgaaaaatcaaatacgcgcgataataacaataccgaaaaatcaaatacgcgcgatcgtaacaataccgaaaaatcaaatacgcgcgataataa

SEQ ID NO: 5299 - DNA, 724 bp, Artificial Sequence
  chemically treated genomic DNA (Homo sapiens) CpG-island No: 5299
ttttttatttggtttttcgtgttgtgtgtggtggggggtattgtggtcgaggtttgaatagtcggggaagtgaaagatttcgtttttttcgggagtttacgggagtgggagagatattgacgaaatattatttatcgtaggagttaggtgtatatagtgatgatagtttcgggaggttaggtgcgcgcggtgatgatagtttcggaaggttaggtgtacgcggtgatgatagtttcgggaggttaggtgtacgcggtgatgatagtttcgggaggttaggtgcgcgcggtgatgatagttttagaaggttacgtgcgcgcggtcgtgatagttttagaaggttaggtgcgtacggtgatgatagtttcgggaggttaggtgcgcgcggtcgtgatagtttcgggaggttaggtgcgcgcggtggtgatagtttcgggaggttaggtgcgcgcggtcgtgatagtgtcgggaggttaggtgcgcgcggtggtgatagtgtcgggaggttaggtgcgcgcggtggtgatagtgtcgggaggttaggtgcgcgcggtggtgatagtgtcgggaggttaggtgcgcgcggtcgtgatagtgtcgggaggttaggtgcgtttggtgatgatagtttcgggaggttaggtgcgcgcggtgatgatagtgtcgggaggttaggtgcgcgcggtcgtgatagtgtcgggaggttaggtgcgcgcggtggtga

SEQ ID NO: 5300 - DNA, 724 bp, Artificial Sequence
  chemically treated genomic DNA (Homo sapiens) CpG-island No: 5300
tcaccaccgcgcgcacctaacctcccgacactatcacgaccgcgcgcacctaacctcccgacactatcatcaccgcgcgcacctaacctcccgaaactatcatcaccaaacgcacctaacctcccgacactatcacgaccgcgcgcacctaacctcccgacactatcaccaccgcgcgcacctaacctcccgacactatcaccaccgcgcgcacctaacctcccgacactatcaccaccgcgcgcacctaacctcccgacactatcacgaccgcgcgcacctaacctcccgaaactatcaccaccgcgcgcacctaacctcccgaaactatcacgaccgcgcgcacctaacctcccgaaactatcatcaccgtacgcacctaaccttctaaaactatcacgaccgcgcgcacgtaaccttctaaaactatcatcaccgcgcgcacctaacctcccgaaactatcatcaccgcgtacacctaacctcccgaaactatcatcaccgcgtacacctaaccttccgaaactatcatcaccgcgcgcacctaacctcccgaaactatcatcactatatacacctaactcctacgataaataatatttcgtcaatatctctcccactcccgtaaactcccgaaaaaaacgaaatctttcacttccccgactattcaaacctcgaccacaataccccccaccacacacaacacgaaaaaccaaataaaaaa

SEQ ID NO: 5301 - DNA, 704 bp, Artificial Sequence
  chemically treated genomic DNA (Homo sapiens) CpG-island No: 5301
tagcggagagcgtggagagattttcgtcgtagttattttttgttttttgtgtgatagtcgttgcggcgaaggggcgggcgttgggtgggggcggagtcgcggcgggcggagtagcggggtcggggcggggtcgagcgcggcgtagcggagcggggtagagtattttgcgtttcggcgcggggtttttgcggtagttttaggttttttttttggattcgtcgtagagttaggtaagcggttttcgtaggtttcgggtcgggtacggggattaggatgtcgtcggggacggggatgaggtcgtgaggatgcgcgaagggtcgttttttttttcggttcgcggggggcgttcggcgttgtgttcgggttagttcgaggttcggttttaggttttacgcggtttttttttttttcggatttatcgtgcgtttcgcggtacggattttttgttcgggaggcgcgggtatatcgcggagtttcggcgcggcggcgggggagtcgtagtagtaggtgcgcggtttgggtcggagtcgttagttcgggaggaggcggtgttaattttagggatcggagatatttgtagcggtcgggagttcggtagcggcgatattttcgagtttaggtattgtagagcgttggtttttgtttttgtcgtcgtgattatcgttattttttttagggttagcgagagtcgtttgggttcgttt

SEQ ID NO: 5302 - DNA, 704 bp, Artificial Sequence
  chemically treated genomic DNA (Homo sapiens) CpG-island No: 5302
aaacgaacccaaacgactctcgctaaccctaaaaaaaataacgataatcacgacgacaaaaacaaaaaccaacgctctacaatacctaaactcgaaaatatcgccgctaccgaactcccgaccgctacaaatatctccgatccctaaaattaacaccgcctcctcccgaactaacgactccgacccaaaccgcgcacctactactacgactcccccgccgccgcgccgaaactccgcgatatacccgcgcctcccgaacaaaaaatccgtaccgcgaaacgcacgataaatccgaaaaaaaaaaaaaccgcgtaaaacctaaaaccgaacctcgaactaacccgaacacaacgccgaacgccccccgcgaaccgaaaaaaaaaacgacccttcgcgcatcctcacgacctcatccccgtccccgacgacatcctaatccccgtacccgacccgaaacctacgaaaaccgcttacctaactctacgacgaatccaaaaaaaaaacctaaaactaccgcaaaaaccccgcgccgaaacgcaaaatactctaccccgctccgctacgccgcgctcgaccccgccccgaccccgctactccgcccgccgcgactccgcccccacccaacgcccgccccttcgccgcaacgactatcacacaaaaaacaaaaaataactacgacgaaaatctctccacgctctccgcta

SEQ ID NO: 5303 - DNA, 704 bp, Artificial Sequence
  chemically treated genomic DNA (Homo sapiens) CpG-island No: 5303
aggcgggtttaggcggttttcgttggttttgggggaggtgacggtggttacggcggtagaggtaggggttagcgttttgtagtatttggattcgaggatgtcgtcgttgtcgggttttcggtcgttgtaggtgttttcggtttttgagattagtatcgttttttttcgggttggcggtttcggtttaggtcgcgtatttgttgttgcggttttttcgtcgtcgcgtcggagtttcgcgatgtgttcgcgtttttcgggtagagggttcgtgtcgcgggacgtacggtgggttcgagggggaaaggggtcgcgtggggtttgaggtcgggtttcgggttagttcgggtatagcgtcgagcgtttttcgcgggtcgggagagggggcggtttttcgcgtatttttacggttttattttcgttttcggcggtattttagttttcgtgttcggttcgaggtttgcgagggtcgtttatttggttttgcggcgggtttaggggaggggtttgaggttatcgtaggggtttcgcgtcggggcgtaggatgttttgtttcgtttcgttgcgtcgcgttcggtttcgtttcggtttcgttgtttcgttcgtcgcggtttcgtttttatttagcgttcgttttttcgtcgtagcggttgttatataaagggtaggaaatggttgcggcgagggtttttttacgtttttcgttg

SEQ ID NO: 5304 - DNA, 704 bp, Artificial Sequence
  chemically treated genomic DNA (Homo sapiens) CpG-island No: 5304
caacgaaaaacgtaaaaaaaccctcgccgcaaccatttcctaccctttatataacaaccgctacgacgaaaaaacgaacgctaaataaaaacgaaaccgcgacgaacgaaacaacgaaaccgaaacgaaaccgaacgcgacgcaacgaaacgaaacaaaacatcctacgccccgacgcgaaacccctacgataacctcaaacccctcccctaaacccgccgcaaaaccaaataaacgaccctcgcaaacctcgaaccgaacacgaaaactaaaataccgccgaaaacgaaaataaaaccgtaaaaatacgcgaaaaaccgccccctctcccgacccgcgaaaaacgctcgacgctatacccgaactaacccgaaacccgacctcaaaccccacgcgacccctttccccctcgaacccaccgtacgtcccgcgacacgaaccctctacccgaaaaacgcgaacacatcgcgaaactccgacgcgacgacgaaaaaaccgcaacaacaaatacgcgacctaaaccgaaaccgccaacccgaaaaaaaacgatactaatctcaaaaaccgaaaacacctacaacgaccgaaaacccgacaacgacgacatcctcgaatccaaatactacaaaacgctaacccctacctctaccgccgtaaccaccgtcacctcccccaaaaccaacgaaaaccgcctaaacccgcct

SEQ ID NO: 5305 - DNA, 609 bp, Artificial Sequence
  chemically treated genomic DNA (Homo sapiens) CpG-island No: 5305
  unsure (76)
tagttaaatttttcgcgacgtggcggatcgttgttaggcgattttgattttattgggcgattttagcgattcgtgntgttggttacgtatcgtggaaacggatcgtttatttcggtagcggtggtttatagggcgtagtacgcgagtcggcgttgaaagtgttggaattgacggcgggtaaattggcggttttttatgattttttaatcggatttcgttatggattaaaatcgttggtcgatgacgaaacgttggtggtggtatttgtttttagttatttttatattcgttagtatgattttgatttgttggttgaatttcgtcgtgataattaggtaatgcgtgtaatcgttatcgtcgcggaaagtagcgatatcgtcgttgtcggtttatatattattttgttatcgttacgttattttatcgacgttgagtaggtattttgttttttgatgtacgtttagacgtttgtattgatgtagtcgttgtatatgggtaatacgtcggatattttattagttagtggtatcgttaatcgcgtggtgtaaggcgtaattatttattcgtggtaggtataagaggatcgtattatgagtattatttttatta

SEQ ID NO: 5306 - DNA, 609 bp, Artificial Sequence
  chemically treated genomic DNA (Homo sapiens) CpG-island No: 5306
  unsure (534)
taataaaaataatactcataatacgatcctcttatacctaccacgaataaataattacgccttacaccacgcgattaacgataccactaactaataaaatatccgacgtattacccatatacaacgactacatcaatacaaacgtctaaacgtacatcaaaaaacaaaatacctactcaacgtcgataaaataacgtaacgataacaaaataatatataaaccgacaacgacgatatcgctactttccgcgacgataacgattacacgcattacctaattatcacgacgaaattcaaccaacaaatcaaaatcatactaacgaatataaaaataactaaaaacaaataccaccaccaacgtttcgtcatcgaccaacgattttaatccataacgaaatccgattaaaaaatcataaaaaaccgccaatttacccgccgtcaattccaacactttcaacgccgactcgcgtactacgccctataaaccaccgctaccgaaataaacgatccgtttccacgatacgtaaccaacancacgaatcgctaaaatcgcccaataaaatcaaaatcgcctaacaacgatccgccacgtcgcgaaaaatttaacta

SEQ ID NO: 5307 - DNA, 609 bp, Artificial Sequence
  chemically treated genomic DNA (Homo sapiens) CpG-island No: 5307
  unsure (534)
tagtggagataatgtttataatgcgatttttttatgtttgttacggatgaatgattacgttttgtattacgcggttaacggtgttattggttgatggggtattcggcgtattgtttatgtgtagcgattgtattagtgtaaacgtttgggcgtatattaggaagtaaaatgtttgtttaacgtcgataaagtgacgtgacggtggtaggatgatatgtggatcggtagcgacgatgtcgttgtttttcgcggcgatggcgattatacgtattgtttggttgttacggcgaagtttagttagtagattaagattatattgacgggtgtaagggtggttggagataaatattattattagcgtttcgttatcgattagcgattttggtttatgacggaattcggttggagaattataaaaggtcgttagtttattcgtcgttagttttagtatttttagcgtcgattcgcgtgttgcgttttgtaagttatcgttatcgagataaacgattcgtttttacggtgcgtaattaatantacgggtcgttgaaatcgtttagtgaggttaggatcgtttggtaacgattcgttacgtcgcggaaggtttggttg

SEQ ID NO: 5308 - DNA, 609 bp, Artificial Sequence
  chemically treated genomic DNA (Homo sapiens) CpG-island No: 5308
  unsure (76)
caaccaaaccttccgcgacgtaacgaatcgttaccaaacgatcctaacctcactaaacgatttcaacgacccgtantattaattacgcaccgtaaaaacgaatcgtttatctcgataacgataacttacaaaacgcaacacgcgaatcgacgctaaaaatactaaaactaacgacgaataaactaacgaccttttataattctccaaccgaattccgtcataaaccaaaatcgctaatcgataacgaaacgctaataataatatttatctccaaccacccttacacccgtcaatataatcttaatctactaactaaacttcgccgtaacaaccaaacaatacgtataatcgccatcgccgcgaaaaacaacgacatcgtcgctaccgatccacatatcatcctaccaccgtcacgtcactttatcgacgttaaacaaacattttacttcctaatatacgcccaaacgtttacactaatacaatcgctacacataaacaatacgccgaataccccatcaaccaataacaccgttaaccgcgtaatacaaaacgtaatcattcatccgtaacaaacataaaaaaatcgcattataaacattatctccacta

SEQ ID NO: 5309 - DNA, 1084 bp, Artificial Sequence
  chemically treated genomic DNA (Homo sapiens) CpG-island No: 5309
  unsure (238)
gtgtggataatatgttcggcgttattttaagtttgtatggttggcgtttgcggggcgattttattttttattttggcggttgtaagtttcgtcgataaggcgatttcgacgttagtgtcgttattcgttggtaagaattttgtcgtttggtagtattaggagtggtgtaatgattacgcgtttgattcgttggttaattacgttggatattttgaagttaaaatggcgtagttgtttngcggtacgtcgttacgggcgattaattcgcgttatcgggttggtgttggaagttatcggattataattgtcgttcggcgtaatttgtgttattgagcgttagaacggtagcgaaacgtacgaagtagaaagcgaagtcgttggttttaacggttaacggttgtttttaatgtcgttggaggaagtcgaaggtgttttgttcggcgcgcgtgtttatgttaaaaatatttcggtagaagggttgtaaagcggtaagtagttgtcgttcggttcggcgttattaggtcgcgttttggacggtagcggtaaatcgttcgatggtttgttttttttcgatacgacggaaatcggtgcgttgattatttcgttatttaattcgttgtaacgtatatcgattgaatatgtgttggatatcggcgtgcgtttaattaatgttttgtttatcgttgggcgtgggtagcgtatggggttgtttgtcgggttcggcgttggtaaaagtgtgttgttggggatgatggtacgttatattcgcgtcgatgttattgtcgtgggtttgattggtgaacgtgggcgcgaagtaaaagattttattgagaatattttcggcgtcgaagggcgtgtacgtttagtggtgattgtcgtttcggcggatgttttttcgtttttgcgaatgtagggtgtcgtttatgttacgcgtattgtcgaagattttcgcgatcgtggttagtatgtgttgttgattatggatttttttattcgttacgcgatggtttagcgtgaaattgcgttggcgattggcgaattttcgttattaaaggttatttatcgttggcgtttgatcgatgat

SEQ ID NO: 5310 - DNA, 1084 bp, Artificial Sequence
  chemically treated genomic DNA (Homo sapiens) CpG-island No: 5310
  unsure (847)
atcatcgatcaaacgccaacgataaataacctttaataacgaaaattcgccaatcgccaacgcaatttcacgctaaaccatcgcgtaacgaataaaaaaatccataatcaacaacacatactaaccacgatcgcgaaaatcttcgacaatacgcgtaacataaacgacaccctacattcgcaaaaacgaaaaaacatccgccgaaacgacaatcaccactaaacgtacacgcccttcgacgccgaaaatattctcaataaaatcttttacttcgcgcccacgttcaccaatcaaacccacgacaataacatcgacgcgaatataacgtaccatcatccccaacaacacacttttaccaacgccgaacccgacaaacaaccccatacgctacccacgcccaacgataaacaaaacattaattaaacgcacgccgatatccaacacatattcaatcgatatacgttacaacgaattaaataacgaaataatcaacgcaccgatttccgtcgtatcgaaaaaaaacaaaccatcgaacgatttaccgctaccgtccaaaacgcgacctaataacgccgaaccgaacgacaactacttaccgctttacaacccttctaccgaaatatttttaacataaacacgcgcgccgaacaaaacaccttcgacttcctccaacgacattaaaaacaaccgttaaccgttaaaaccaacgacttcgctttctacttcgtacgtttcgctaccgttctaacgctcaataacacaaattacgccgaacgacaattataatccgataacttccaacaccaacccgataacgcgaattaatcgcccgtaacgacgtaccgcnaaacaactacgccattttaacttcaaaatatccaacgtaattaaccaacgaatcaaacgcgtaatcattacaccactcctaatactaccaaacgacaaaattcttaccaacgaataacgacactaacgtcgaaatcgccttatcgacgaaacttacaaccgccaaaataaaaaataaaatcgccccgcaaacgccaaccatacaaacttaaaataacgccgaacatattatccacac

SEQ ID NO: 5311 - DNA, 1084 bp, Artificial Sequence
  chemically treated genomic DNA (Homo sapiens) CpG-island No: 5311
  unsure (847)
gttatcggttagacgttaacggtggataatttttggtggcgggggttcgttaatcgttagcgtaattttacgttgggttatcgcgtagcgggtgagggagtttataattagtaatatatgttgattacgatcgcgaaaattttcggtaatgcgcgtggtataggcggtattttgtattcgtaggagcggagaaatattcgtcggagcggtaattattattgagcgtgtacgtttttcggcgtcgaggatgtttttaataaaattttttatttcgcgtttacgtttattaattaaatttacgataatgatatcggcgcgggtgtaacgtgttattatttttagtagtatatttttattaacgtcggattcggtaaatagttttatacgttgtttacgtttaacggtaagtagggtattgattgggcgtacgtcggtgtttagtatatgtttaatcggtgtacgttgtaacgggttaaatggcggggtaattagcgtatcggttttcgtcgtatcgggggagggtaggttatcgagcggtttatcgttgtcgtttagaacgcgatttaataacgtcggatcgagcggtaattgtttgtcgttttgtagtttttttgtcgaaatgtttttggtataaatacgcgcgtcgggtaggatattttcgattttttttagcggtattaaaaatagtcgttgatcgttaaagttaacgatttcgttttttatttcgtgcgtttcgttgtcgttttggcgtttaatgatataggttgcgtcgagcggtaattgtaattcggtggtttttagtattagttcggtagcgcgggttaatcgttcgtagcgacgtatcgtnaggtaattgcgttattttggttttaaagtatttagcgtggttagttagcgagttaggcgcgtggttattatattatttttggtgttgttagacggtagagtttttgttagcgagtggcgatattggcgtcgagatcgttttatcggcgggatttatagtcgttaggatggagggtgggatcgtttcgtaagcgttagttatgtaaatttaaggtagcgtcgagtatattatttatat

SEQ ID NO: 5312 - DNA, 1084 bp, Artificial Sequence
  chemically treated genomic DNA (Homo sapiens) CpG-island No: 5312
  unsure (238)
atataaataatatactcgacgctaccttaaatttacataactaacgcttacgaaacgatcccaccctccatcctaacgactataaatcccgccgataaaacgatctcgacgccaatatcgccactcgctaacaaaaactctaccgtctaacaacaccaaaaataatataataaccacgcgcctaactcgctaactaaccacgctaaatactttaaaaccaaaataacgcaattacctnacgatacgtcgctacgaacgattaacccgcgctaccgaactaatactaaaaaccaccgaattacaattaccgctcgacgcaacctatatcattaaacgccaaaacgacaacgaaacgcacgaaataaaaaacgaaatcgttaactttaacgatcaacgactatttttaataccgctaaaaaaaatcgaaaatatcctacccgacgcgcgtatttataccaaaaacatttcgacaaaaaaactacaaaacgacaaacaattaccgctcgatccgacgttattaaatcgcgttctaaacgacaacgataaaccgctcgataacctaccctcccccgatacgacgaaaaccgatacgctaattaccccgccatttaacccgttacaacgtacaccgattaaacatatactaaacaccgacgtacgcccaatcaataccctacttaccgttaaacgtaaacaacgtataaaactatttaccgaatccgacgttaataaaaatatactactaaaaataataacacgttacacccgcgccgatatcattatcgtaaatttaattaataaacgtaaacgcgaaataaaaaattttattaaaaacatcctcgacgccgaaaaacgtacacgctcaataataattaccgctccgacgaatatttctccgctcctacgaatacaaaataccgcctataccacgcgcattaccgaaaattttcgcgatcgtaatcaacatatattactaattataaactccctcacccgctacgcgataacccaacgtaaaattacgctaacgattaacgaacccccgccaccaaaaattatccaccgttaacgtctaaccgataac

SEQ ID NO: 5313 - DNA, 664 bp, Artificial Sequence
  chemically treated genomic DNA (Homo sapiens) CpG-island No: 5313
gtgaggttaaaacgttaacgggcgtagagtatttaatcgatttggtaggttaatcgcggttggtaaatagttggtggttcggtgcggtgattagcgaagagttggtaacggcggtagtattgcgttagtagtaggcgttgttgatacggttggtagaatagggcgtagattttagcgtcgacgattgtcgttgcgattaacggttttacgttagtaaatttaggcgttgaaagtgacgggtaggtaaaaaattaattttgatttcgatatcgttcgcgttgtcgaacgcggtaattcgtcgttgtagggtaattatacgttgtgggtcggattatcgtcgtttacggttacgttgttcgggtttattagtcgttttggataagatagttatttattttaggtcgcgacgtggcgagttatttttttgattagagtttgtttagcggtgcggatcgtagttacgcgtgggtggtttattcggacggacgtacgtaaaaagcgtcggtggtttattggaataagcgttacgtagagtcgatgttcggtagtattatttatgttggtttcgcggatttcgtttggagtgagacgtttgatgtttttaacgtcgatattttttagattttgacgtagcggatattttaataatgaaaaaaagatattt

SEQ ID NO: 5314 - DNA, 664 bp, Artificial Sequence
  chemically treated genomic DNA (Homo sapiens) CpG-island No: 5314
aaatatctttttttcattattaaaatatccgctacgtcaaaatctaaaaaatatcgacgttaaaaacatcaaacgtctcactccaaacgaaatccgcgaaaccaacataaataatactaccgaacatcgactctacgtaacgcttattccaataaaccaccgacgctttttacgtacgtccgtccgaataaaccacccacgcgtaactacgatccgcaccgctaaacaaactctaatcaaaaaaataactcgccacgtcgcgacctaaaataaataactatcttatccaaaacgactaataaacccgaacaacgtaaccgtaaacgacgataatccgacccacaacgtataattaccctacaacgacgaattaccgcgttcgacaacgcgaacgatatcgaaatcaaaattaattttttacctacccgtcactttcaacgcctaaatttactaacgtaaaaccgttaatcgcaacgacaatcgtcgacgctaaaatctacgccctattctaccaaccgtatcaacaacgcctactactaacgcaatactaccgccgttaccaactcttcgctaatcaccgcaccgaaccaccaactatttaccaaccgcgattaacctaccaaatcgattaaatactctacgcccgttaacgttttaacctcac

SEQ ID NO: 5315 - DNA, 664 bp, Artificial Sequence
  chemically treated genomic DNA (Homo sapiens) CpG-island No: 5315
agatgttttttttttattattgaggtattcgttgcgttagagtttgaagaatgtcggcgttaagggtattaggcgttttattttagacggagttcgcgaggttaatataaataatgttgtcgggtatcggttttacgtgacgtttgttttagtaagttatcggcgttttttgcgtgcgttcgttcgggtaaattatttacgcgtagttgcgattcgtatcgttgagtaggttttggttagagagatagttcgttacgtcgcgatttggagtgaatggttgttttgtttaggacggttgataagttcgaataacgtgatcgtggacggcggtggttcgatttatagcgtgtagttgttttgtaacggcgggttatcgcgttcggtaacgcggacgatatcgggattaagattgattttttgtttgttcgttatttttaacgtttgaatttgttggcgtaaggtcgttaatcgtagcggtagtcgtcggcgttggaatttgcgttttgttttgttagtcgtgttagtaacgtttgttgttgacgtaatgttgtcgtcgttgttagtttttcgttaattatcgtatcgggttattagttgtttgttagtcgcggttggtttattagatcgattaaatgttttgcgttcgttagcgttttggttttat

SEQ ID NO: 5316 - DNA, 664 bp, Artificial Sequence
  chemically treated genomic DNA (Homo sapiens) CpG-island No: 5316
ataaaaccaaaacgctaacgaacgcaaaacatttaatcgatctaataaaccaaccgcgactaacaaacaactaataacccgatacgataattaacgaaaaactaacaacgacgacaacattacgtcaacaacaaacgttactaacacgactaacaaaacaaaacgcaaattccaacgccgacgactaccgctacgattaacgaccttacgccaacaaattcaaacgttaaaaataacgaacaaacaaaaaatcaatcttaatcccgatatcgtccgcgttaccgaacgcgataacccgccgttacaaaacaactacacgctataaatcgaaccaccgccgtccacgatcacgttattcgaacttatcaaccgtcctaaacaaaacaaccattcactccaaatcgcgacgtaacgaactatctctctaaccaaaacctactcaacgatacgaatcgcaactacgcgtaaataatttacccgaacgaacgcacgcaaaaaacgccgataacttactaaaacaaacgtcacgtaaaaccgatacccgacaacattatttatattaacctcgcgaactccgtctaaaataaaacgcctaatacccttaacgccgacattcttcaaactctaacgcaacgaatacctcaataataaaaaaaaaacatct

SEQ ID NO: 5317 - DNA, 744 bp, Artificial Sequence
  chemically treated genomic DNA (Homo sapiens) CpG-island No: 5317
gtcgtcgtcgcggagggggcgtgttttatagagcgagtgggtgtaattagagggggcgtggttagaaatcggggggcggtatggagtgttcgaggttttatttattttcgttttttagcgcgcggacgtggtaggcggttaagcgtttttggttgtttttcgggaagtcgttggtcgcgtttgcgtagtgaatcgttgaggttgtgttgagcgtttttttttcgcgtaattttcggtttcgatatcgtttttttttttatgaatttttaatttaacgtggttatagttagtttaagatcggtatttttcgggtttcgttttgtaggatttcggtttggtttcgagggtttttatataggttatcgtaggtttttttaattttcgtcgtttttaggttcgcggtattagtgagattttagtttcgatttttttaggattatttcgatttttcgtaggtttttaaggtttgagcgtttttcgattagttcgttttttatcgtttttttatcgggtttttcgtaaggttttttaaacgcgattttcgaagttcgttttttacggggaagttttttcgttcgttgtttgcgaagtttcgttttgtattggtgttcgtgttttttttttcgtcggtttcgaagtttcgtttttcgaagttttttttatttattttttttataggttttagtttcgtttattatagttttttacggtacgttttttttaggttttatagtcgtgtatttt

SEQ ID NO: 5318 - DNA, 744 bp, Artificial Sequence
  chemically treated genomic DNA (Homo sapiens) CpG-island No: 5318
aaaatacacgactataaaacctaaaaaaaacgtaccgtaaaaaactataataaacgaaactaaaacctataaaaaaaataaataaaaaaaacttcgaaaaacgaaacttcgaaaccgacgaaaaaaaaaacacgaacaccaatacaaaacgaaacttcgcaaacaacgaacgaaaaaacttccccgtaaaaaacgaacttcgaaaatcgcgtttaaaaaaccttacgaaaaacccgataaaaaaacgataaaaaacgaactaatcgaaaaacgctcaaaccttaaaaacctacgaaaaatcgaaataatcctaaaaaaatcgaaactaaaatctcactaataccgcgaacctaaaaacgacgaaaattaaaaaaacctacgataacctatataaaaaccctcgaaaccaaaccgaaatcctacaaaacgaaacccgaaaaataccgatcttaaactaactataaccacgttaaattaaaaattcataaaaaaaaaaacgatatcgaaaccgaaaattacgcgaaaaaaaaacgctcaacacaacctcaacgattcactacgcaaacgcgaccaacgacttcccgaaaaacaaccaaaaacgcttaaccgcctaccacgtccgcgcgctaaaaaacgaaaataaataaaacctcgaacactccataccgccccccgatttctaaccacgccccctctaattacacccactcgctctataaaacacgccccctccgcgacgacgac

SEQ ID NO: 5319 - DNA, 744 bp, Artificial Sequence
  chemically treated genomic DNA (Homo sapiens) CpG-island No: 5319
gaggtgtacggttgtgaggtttgagaggggcgtgtcgtagggagttgtgatgggcggggttgagatttgtgaggagagtgagtgggaagaatttcgaggggcggggtttcggggtcggcgaggggaggggtacggatattagtataggacggggtttcgtagatagcgagcggaggggttttttcgtaaggggcgggtttcgagggtcgcgtttggaaggttttacgaggggttcggtggaagggcggtgaagggcgggttaatcgggaggcgtttaggttttgaaggtttgcgggaggtcgaaatggttttggggaggtcgaggttgaggttttattagtatcgcgggtttggaagcggcgggagttgaaagagtttgcggtgatttgtatggaagttttcgaagttaggtcgaggttttataagacggagttcgagaggtgtcggttttaagttgattgtgattacgttaaattaaggatttataggaaggaaggcggtgtcgaagtcgggagttgcgcggagaaggagcgtttaatatagttttagcggtttattacgtaagcgcgattaacggtttttcgggaagtagttaaaaacgtttggtcgtttattacgttcgcgcgttggagggcggaagtgggtgagatttcgggtattttatatcgtttttcggtttttggttacgttttttttggttatatttattcgttttgtaaggtacgtttttttcgcggcggcggt

SEQ ID NO: 5320 - DNA, 744 bp, Artificial Sequence
  chemically treated genomic DNA (Homo sapiens) CpG-island No: 5320
accgccgccgcgaaaaaaacgtaccttacaaaacgaataaatataaccaaaaaaaacgtaaccaaaaaccgaaaaacgatataaaatacccgaaatctcacccacttccgccctccaacgcgcgaacgtaataaacgaccaaacgtttttaactacttcccgaaaaaccgttaatcgcgcttacgtaataaaccgctaaaactatattaaacgctccttctccgcgcaactcccgacttcgacaccgccttccttcctataaatccttaatttaacgtaatcacaatcaacttaaaaccgacacctctcgaactccgtcttataaaacctcgacctaacttcgaaaacttccatacaaatcaccgcaaactctttcaactcccgccgcttccaaacccgcgatactaataaaacctcaacctcgacctccccaaaaccatttcgacctcccgcaaaccttcaaaacctaaacgcctcccgattaacccgcccttcaccgcccttccaccgaacccctcgtaaaaccttccaaacgcgaccctcgaaacccgccccttacgaaaaaacccctccgctcgctatctacgaaaccccgtcctatactaatatccgtacccctcccctcgccgaccccgaaaccccgcccctcgaaattcttcccactcactctcctcacaaatctcaaccccgcccatcacaactccctacgacacgcccctctcaaacctcacaaccgtacacctc

SEQ ID NO: 5321 - DNA, 593 bp, Artificial Sequence
  chemically treated genomic DNA (Homo sapiens) CpG-island No: 5321
gataacgcggtagttcgttaaattgtcgtgaagtgcggtatttcgtaggttagataaggcggttacgtcgtattcgatatttaacgttcgagtcggttgtttgatgcgacgttggcgcgttttattaggtttataaaaggtgttagaatcgtaggtcggataaggcgtttacgtcgtattcggtaataagtgtttcgatgtttgatgcgacgtttgtcgcgttttattaggtttgtaaaatgtgttagaatcgcgtagggcggataaggcgtttacgtcgtattcggtaataagtaatgagtatcgagattataatttattttagtggtttcgttagtatcggagtattcgtcgtttgttggcgtattatagcgattatatagtagtaacgacgatatcgtagttaaacgaaagtagggcggtaggtagcgttacgtaattatatgttagttttagcgttagtattatattttcgtaatatgcgtcgacggcgttatcgaggttaaacgttatttgtttatttgcggtatttaataatttttcgttttaggcgtaatgtaggtaataagtattcgtagtaggtgttgatacgg

SEQ ID NO: 5322 - DNA, 593 bp, Artificial Sequence
  chemically treated genomic DNA (Homo sapiens) CpG-island No: 5322
ccgtatcaacacctactacgaatacttattacctacattacgcctaaaacgaaaaattattaaataccgcaaataaacaaataacgtttaacctcgataacgccgtcgacgcatattacgaaaatataatactaacgctaaaactaacatataattacgtaacgctacctaccgccctactttcgtttaactacgatatcgtcgttactactatataatcgctataatacgccaacaaacgacgaatactccgatactaacgaaaccactaaaataaattataatctcgatactcattacttattaccgaatacgacgtaaacgccttatccgccctacgcgattctaacacattttacaaacctaataaaacgcgacaaacgtcgcatcaaacatcgaaacacttattaccgaatacgacgtaaacgccttatccgacctacgattctaacaccttttataaacctaataaaacgcgccaacgtcgcatcaaacaaccgactcgaacgttaaatatcgaatacgacgtaaccgccttatctaacctacgaaataccgcacttcacgacaatttaacgaactaccgcgttatc

SEQ ID NO: 5323 - DNA, 593 bp, Artificial Sequence
  chemically treated genomic DNA (Homo sapiens) CpG-island No: 5323
tcgtgttagtatttgttacgaatatttgttatttatattacgtttaaggcggagagttattaggtgtcgtaggtgggtaaatagcgtttaatttcggtagcgtcgtcggcgtatattgcggaggtatgatgttgacgttggggttggtatataattacgtggcgttgtttgtcgttttgttttcgtttggttgcgatgtcgtcgttgttgttgtatggtcgttataatgcgttagtaagcggcggatatttcggtgttggcgaaattattggggtaggttatagtttcggtgtttattatttattgtcggatgcggcgtgaacgttttattcgttttacgcggttttggtatattttgtaggtttgataagacgcggtaagcgtcgtattaggtatcggagtatttattgtcggatgcggcgtgaacgttttattcggtttacggttttggtattttttgtaggtttgataagacgcgttagcgtcgtattaggtaatcggttcgggcgttggatgtcggatgcggcgtgatcgttttgtttgatttacggggtgtcgtattttacggtagtttagcgaattatcgcgttgtt

SEQ ID NO: 5324 - DNA, 593 bp, Artificial Sequence
  chemically treated genomic DNA (Homo sapiens) CpG-island No: 5324
aacaacgcgataattcgctaaactaccgtaaaatacgacaccccgtaaatcaaacaaaacgatcacgccgcatccgacatccaacgcccgaaccgattacctaatacgacgctaacgcgtcttatcaaacctacaaaaaataccaaaaccgtaaaccgaataaaacgttcacgccgcatccgacaataaatactccgatacctaatacgacgcttaccgcgtcttatcaaacctacaaaatataccaaaaccgcgtaaaacgaataaaacgttcacgccgcatccgacaataaataataaacaccgaaactataacctaccccaataatttcgccaacaccgaaatatccgccgcttactaacgcattataacgaccatacaacaacaacgacgacatcgcaaccaaacgaaaacaaaacgacaaacaacgccacgtaattatataccaaccccaacgtcaacatcatacctccgcaatatacgccgacgacgctaccgaaattaaacgctatttacccacctacgacacctaataactctccgccttaaacgtaatataaataacaaatattcgtaacaaatactaacacga

SEQ ID NO: 5325 - DNA, 563 bp, Artificial Sequence
  chemically treated genomic DNA (Homo sapiens) CpG-island No: 5325
gtggtttggatgattttatttgatggtaaatatcgtatcgttgtttggttaggaatgggaatacggtgaagatatggcgttggcgatttgttgcgcggtaattgattttcgtgggttggtcgaattgtcgattatgttaattattatgatggaattacggggtcgtgatttgcgtcgttgaataaattggcgtgggattacgtatgggtgatttttattcggaaaaattattaagagcgattggggttttcgggaagttgcggttatggttgaggcgttaattaattgttcggtcgaataaatggtagtttggtcgttagatttttttgtatcgtattaatcgatgcgaaaaggattgtaaggtggtcgaatagacggcgcgcgtgtatgatacgtaaatttcgtcgttacgttttttttgtgttcgtgcgtacggttcggaagtggggttttcgtagagtttgggggaggtttacgatatgttgtacgataaattttttgagagggataattgtggtttcggtttgatcgtttatatagaaggcgaatttagttataaggta

SEQ ID NO: 5326 - DNA, 563 bp, Artificial Sequence
  chemically treated genomic DNA (Homo sapiens) CpG-island No: 5326
taccttataactaaattcgccttctatataaacgatcaaaccgaaaccacaattatccctctcaaaaaatttatcgtacaacatatcgtaaacctcccccaaactctacgaaaaccccacttccgaaccgtacgcacgaacacaaaaaaaacgtaacgacgaaatttacgtatcatacacgcgcgccgtctattcgaccaccttacaatccttttcgcatcgattaatacgatacaaaaaaatctaacgaccaaactaccatttattcgaccgaacaattaattaacgcctcaaccataaccgcaacttcccgaaaaccccaatcgctcttaataatttttccgaataaaaatcacccatacgtaatcccacgccaatttattcaacgacgcaaatcacgaccccgtaattccatcataataattaacataatcgacaattcgaccaacccacgaaaatcaattaccgcgcaacaaatcgccaacgccatatcttcaccgtattcccattcctaaccaaacaacgatacgatatttaccatcaaataaaatcatccaaaccac

SEQ ID NO: 5327 - DNA, 563 bp, Artificial Sequence
  chemically treated genomic DNA (Homo sapiens) CpG-island No: 5327
tattttgtggttaggttcgttttttatgtgggcgattaggtcgaaattatagttattttttttaagggatttatcgtataatatatcgtgaattttttttaggttttgcgggaattttattttcgaatcgtgcgtacgggtatagaaagagcgtggcgacggggtttgcgtgttatatacgcgcgtcgtttgttcgattattttgtagtttttttcgtatcggttaatacggtgtagagggatttgacggttaggttattatttattcggtcgaatagttgattggcgttttaattatggtcgtaatttttcggggattttagtcgtttttagtggttttttcgagtaggggttatttatacgtagttttacgttagtttgtttagcggcgtaggttacgatttcgtagttttattatgatggttaatataatcggtagttcgattagtttacgggaattaattgtcgcgtaataaatcgttagcgttatgtttttatcgtatttttatttttggttaaataacgatgcgatatttgttattaggtgaggttatttaggttat

SEQ ID NO: 5328 - DNA, 563 bp, Artificial Sequence
  chemically treated genomic DNA (Homo sapiens) CpG-island No: 5328
ataacctaaataacctcacctaataacaaatatcgcatcgttatttaaccaaaaataaaaatacgataaaaacataacgctaacgatttattacgcgacaattaattcccgtaaactaatcgaactaccgattatattaaccatcataataaaactacgaaatcgtaacctacgccgctaaacaaactaacgtaaaactacgtataaataacccctactcgaaaaaaccactaaaaacgactaaaatccccgaaaaattacgaccataattaaaacgccaatcaactattcgaccgaataaataataacctaaccgtcaaatccctctacaccgtattaaccgatacgaaaaaaactacaaaataatcgaacaaacgacgcgcgtatataacacgcaaaccccgtcgccacgctctttctatacccgtacgcacgattcgaaaataaaattcccgcaaaacctaaaaaaaattcacgatatattatacgataaatcccttaaaaaaaataactataatttcgacctaatcgcccacataaaaaacgaacctaaccacaaaata

SEQ ID NO: 5329 - DNA, 630 bp, Artificial Sequence
  chemically treated genomic DNA (Homo sapiens) CpG-island No: 5329
  unsure (581)
tgatattagtagttgtgtatacggatgatgcgggtcgtcgagtacgcggtcggttaaggtattttttattatttgtttttgttttattattagtaaacggttcgttagtagggacgatacgttaatattatgggtgataattattatcgcgagttttagttttattattaggtcgcgtagtaggtcgagtaggcgggtttgtatcgatatatttagttcgtcggtcggtttatttataaatattagtttcggatgcgttattaggttgcgggtaatttgtaaacgttgttgtatatcgtcggaaaaggtggtcggtaggtcgtcgattcggttggcgggaatttttattttttttagttatttttgcgcggtggtacgaatattttcgtaatgacgtgtttcggtcgttattaatcgttcgcgatatttgcggtttgtcgatagtttggcgggtaagcgttcgagtggatgttgatgtattacgttttattttggtagtagtagggacgggcgtcggtttcgtaattgtataaagcgaacggtttttttaatgaattttttttgtttgggtttttaggggncggaaatttattttcgggcgagtatgtaggtttgtaggtttagtttttt

SEQ ID NO: 5330 - DNA, 630 bp, Artificial Sequence
  chemically treated genomic DNA (Homo sapiens) CpG-island No: 5330
  unsure (50)
aaaaaactaaacctacaaacctacatactcgcccgaaaataaatttccgncccctaaaaacccaaacaaaaaaaattcattaaaaaaaccgttcgctttatacaattacgaaaccgacgcccgtccctactactaccaaaataaaacgtaatacatcaacatccactcgaacgcttacccgccaaactatcgacaaaccgcaaatatcgcgaacgattaataacgaccgaaacacgtcattacgaaaatattcgtaccaccgcgcaaaaataactaaaaaaaataaaaattcccgccaaccgaatcgacgacctaccgaccaccttttccgacgatatacaacaacgtttacaaattacccgcaacctaataacgcatccgaaactaatatttataaataaaccgaccgacgaactaaatatatcgatacaaacccgcctactcgacctactacgcgacctaataataaaactaaaactcgcgataataattatcacccataatattaacgtatcgtccctactaacgaaccgtttactaataataaaacaaaaacaaataataaaaaataccttaaccgaccgcgtactcgacgacccgcatcatccgtatacacaactactaatatca

SEQ ID NO: 5331 - DNA, 630 bp, Artificial Sequence
  chemically treated genomic DNA (Homo sapiens) CpG-island No: 5331
  unsure (50)
ggaaggttggatttgtaggtttgtatgttcgttcgggagtaaattttcgntttttgaaagtttaagtaggggaaatttattaagagaatcgttcgttttatgtaattacgaagtcgacgttcgtttttgttgttattagaatggggcgtggtgtattagtatttattcgaacgtttgttcgttaagttgtcggtaggtcgtaaatatcgcgagcggttgatggcgatcggggtacgttattacgggaatattcgtgttatcgcgtagaagtggttggaagaggtggagattttcgttaatcggatcgacgatttgtcgattatttttttcggcggtatgtagtagcgtttgtagattgttcgtaatttggtgacgtattcgaagttggtgtttatggatgaatcgatcggcgggttggatgtgtcggtgtaggttcgtttgttcgatttgttgcgcggtttggtggtggagttgaaattcgcggtggtgattgttatttatgatgttagcgtatcgtttttgttggcggatcgtttgttggtgatgaagtaggggtaagtggtggagagtgttttaatcgatcgcgtgttcgacgattcgtattattcgtatatatagttgttggtgtta

SEQ ID NO: 5332 - DNA, 630 bp, Artificial Sequence
  chemically treated genomic DNA (Homo sapiens) CpG-island No: 5332
  unsure (581)
taacaccaacaactatatatacgaataatacgaatcgtcgaacacgcgatcgattaaaacactctccaccacttacccctacttcatcaccaacaaacgatccgccaacaaaaacgatacgctaacatcataaataacaatcaccaccgcgaatttcaactccaccaccaaaccgcgcaacaaatcgaacaaacgaacctacaccgacacatccaacccgccgatcgattcatccataaacaccaacttcgaatacgtcaccaaattacgaacaatctacaaacgctactacataccgccgaaaaaaataatcgacaaatcgtcgatccgattaacgaaaatctccacctcttccaaccacttctacgcgataacacgaatattcccgtaataacgtaccccgatcgccatcaaccgctcgcgatatttacgacctaccgacaacttaacgaacaaacgttcgaataaatactaatacaccacgccccattctaataacaacaaaaacgaacgtcgacttcgtaattacataaaacgaacgattctcttaataaatttcccctacttaaactttcaaaaancgaaaatttactcccgaacgaacatacaaacctacaaatccaaccttcc

SEQ ID NO: 5333 - DNA, 602 bp, Artificial Sequence
  chemically treated genomic DNA (Homo sapiens) CpG-island No: 5333
gtgcggtagagtgcgtcgtgtgtcgggttagcgtggcgtgagagtgaggcggagaggaggggtcggcggcgatcgggagtggggttcgtgtggcgtagacgaggtgtagtagcgacgcgtggagagtggggcggagagtgggcggcgtgggaatgacggggtgagtgttgtcgtggcggtgtgacggcgatggtggtggggggtgagttgtgtagtacggggcgatgatggggtggtagcgtgtgcgagtgagtaggtttggttggtgggtggtcggcgataggttggagtcgagtcgtcgacgggcgcggtagatatcgcgcgttttgtaggtttattatggttgacggagtagttttgtgcgttttaggcggtttttgtttagcgaggtgggattacgattttgacggtcgaaatcgtattcggtagtaaaatcgtgattttgattcggtgtttaggtaaattcgatattgtcgtcgcggttggagaattttttaatacgcggcgttttttcggtatcggtggtcgttgagttttgcgggttattttttttacgttttgttaggttgtcgtaagtttttatttttagtatattattaatt

SEQ ID NO: 5334 - DNA, 602 bp, Artificial Sequence
  chemically treated genomic DNA (Homo sapiens) CpG-island No: 5334
aattaataatatactaaaaataaaaacttacgacaacctaacaaaacgtaaaaaaaataacccgcaaaactcaacgaccaccgataccgaaaaaacgccgcgtattaaaaaattctccaaccgcgacgacaatatcgaatttacctaaacaccgaatcaaaatcacgattttactaccgaatacgatttcgaccgtcaaaatcgtaatcccacctcgctaaacaaaaaccgcctaaaacgcacaaaactactccgtcaaccataataaacctacaaaacgcgcgatatctaccgcgcccgtcgacgactcgactccaacctatcgccgaccacccaccaaccaaacctactcactcgcacacgctaccaccccatcatcgccccgtactacacaactcaccccccaccaccatcgccgtcacaccgccacgacaacactcaccccgtcattcccacgccgcccactctccgccccactctccacgcgtcgctactacacctcgtctacgccacacgaaccccactcccgatcgccgccgacccctcctctccgcctcactctcacgccacgctaacccgacacacgacgcactctaccgcac

SEQ ID NO: 5335 - DNA, 602 bp, Artificial Sequence
  chemically treated genomic DNA (Homo sapiens) CpG-island No: 5335
aattgatggtgtgttgggaatgaaagtttacggtagtttggtaaaacgtgaaaaggatgattcgtaaaatttaacgattatcgatatcggagaaacgtcgcgtattgaaggattttttagtcgcgacggtaatgtcgaatttgtttggatatcgaattaaaattacgattttattgtcggatacggtttcgatcgttaggatcgtgattttatttcgttggataaaaatcgtttggaacgtatagaattatttcgttagttataatggatttgtaggacgcgcggtgtttgtcgcgttcgtcggcggttcggttttaatttatcgtcggttatttattagttagatttgtttattcgtatacgttgttattttattatcgtttcgtgttgtataatttattttttattattatcgtcgttatatcgttacgataatatttatttcgttatttttacgtcgtttatttttcgttttattttttacgcgtcgttgttatatttcgtttgcgttatacgggttttattttcggtcgtcgtcggtttttttttttcgttttatttttacgttacgttggttcgatatacggcgtattttgtcgtat

SEQ ID NO: 5336 - DNA, 602 bp, Artificial Sequence
  chemically treated genomic DNA (Homo sapiens) CpG-island No: 5336
atacgacaaaatacgccgtatatcgaaccaacgtaacgtaaaaataaaacgaaaaaaaaaaaccgacgacgaccgaaaataaaacccgtataacgcaaacgaaatataacaacgacgcgtaaaaaataaaacgaaaaataaacgacgtaaaaataacgaaataaatattatcgtaacgatataacgacgataataataaaaaataaattatacaacacgaaacgataataaaataacaacgtatacgaataaacaaatctaactaataaataaccgacgataaattaaaaccgaaccgccgacgaacgcgacaaacaccgcgcgtcctacaaatccattataactaacgaaataattctatacgttccaaacgatttttatccaacgaaataaaatcacgatcctaacgatcgaaaccgtatccgacaataaaatcgtaattttaattcgatatccaaacaaattcgacattaccgtcgcgactaaaaaatccttcaatacgcgacgtttctccgatatcgataatcgttaaattttacgaatcatccttttcacgttttaccaaactaccgtaaactttcattcccaacacaccatcaatt

SEQ ID NO: 5337 - DNA, 618 bp, Artificial Sequence
  chemically treated genomic DNA (Homo sapiens) CpG-island No: 5337
gcgatcgttttttagtgttattacggttttagggattcgtagttcgtacgttcggttgcggttacgcgtacggtatcgtaggattatcggagtagcgttgatattcgtcggcggtttagttttcgtagatagtcgtcgcggttttatttcgggatcgtgcgcgattaggaattacgtcgagcgaaacgttcgcgtttttatcgagttcgcgtagacgtacgcggatacggtaagggcgcgtagcggtttcggtagtttagtttgtatattggattttttagacgagagttcgtcgtagcgcggggttagaacggcggattacgagatttaaacgttgtcggggagaatatcggacggtttagatattagttatagattaaaagttagagtacgcgtcgtgtttatattaaagcgtcggcgaacggcgtttatttaattcgatgtcgcgtcgtggttatttagtcggacgaattttaaaattttaggttagattattcgagttttttattattatcgttattacgatttacgttagggtataacgttaaattcggaggcgttatcgtatatttatttttgggaatttggttaggtttaggaggtattgggttttatttt

SEQ ID NO: 5338 - DNA, 618 bp, Artificial Sequence
  chemically treated genomic DNA (Homo sapiens) CpG-island No: 5338
aaaataaaacccaatacctcctaaacctaaccaaattcccaaaaataaatatacgataacgcctccgaatttaacgttataccctaacgtaaatcgtaataacgataataataaaaaactcgaataatctaacctaaaattttaaaattcgtccgactaaataaccacgacgcgacatcgaattaaataaacgccgttcgccgacgctttaatataaacacgacgcgtactctaacttttaatctataactaatatctaaaccgtccgatattctccccgacaacgtttaaatctcgtaatccgccgttctaaccccgcgctacgacgaactctcgtctaaaaaatccaatatacaaactaaactaccgaaaccgctacgcgcccttaccgtatccgcgtacgtctacgcgaactcgataaaaacgcgaacgtttcgctcgacgtaattcctaatcgcgcacgatcccgaaataaaaccgcgacgactatctacgaaaactaaaccgccgacgaatatcaacgctactccgataatcctacgataccgtacgcgtaaccgcaaccgaacgtacgaactacgaatccctaaaaccgtaataacactaaaaaacgatcgc

SEQ ID NO: 5339 - DNA, 618 bp, Artificial Sequence
  chemically treated genomic DNA (Homo sapiens) CpG-island No: 5339
gggatggagtttagtgttttttggatttggttaagtttttagggataagtatgcggtggcgttttcggatttggcgttgtattttgacgtaagtcgtgatggcggtagtggtggagggttcgagtgatttggtttgaagttttgggattcgttcgattggatggttacggcgcgatatcgagttaagtggacgtcgttcgtcggcgttttagtgtgggtacggcgcgtgttttggtttttggtttgtggttggtgtttgggtcgttcggtgtttttttcggtagcgtttgggtttcgtggttcgtcgttttgatttcgcgttgcggcgggttttcgtttgggaagtttaatgtgtagattgggttgtcgaggtcgttgcgcgtttttgtcgtgttcgcgtgcgtttacgcgagttcggtgaaggcgcgggcgtttcgttcggcgtggtttttggtcgcgtacgatttcgaaataggatcgcggcggttgtttgcgggggttgagtcgtcggcgggtattagcgttgtttcggtggttttgcggtgtcgtgcgcgtggtcgtagtcgagcgtacgggttgcggatttttgggatcgtagtagtattagaaggcgatcgt

SEQ ID NO: 5340 - DNA, 618 bp, Artificial Sequence
  chemically treated genomic DNA (Homo sapiens) CpG-island No: 5340
acgatcgccttctaatactactacgatcccaaaaatccgcaacccgtacgctcgactacgaccacgcgcacgacaccgcaaaaccaccgaaacaacgctaatacccgccgacgactcaacccccgcaaacaaccgccgcgatcctatttcgaaatcgtacgcgaccaaaaaccacgccgaacgaaacgcccgcgccttcaccgaactcgcgtaaacgcacgcgaacacgacaaaaacgcgcaacgacctcgacaacccaatctacacattaaacttcccaaacgaaaacccgccgcaacgcgaaatcaaaacgacgaaccacgaaacccaaacgctaccgaaaaaaacaccgaacgacccaaacaccaaccacaaaccaaaaaccaaaacacgcgccgtacccacactaaaacgccgacgaacgacgtccacttaactcgatatcgcgccgtaaccatccaatcgaacgaatcccaaaacttcaaaccaaatcactcgaaccctccaccactaccgccatcacgacttacgtcaaaatacaacgccaaatccgaaaacgccaccgcatacttatccctaaaaacttaaccaaatccaaaaaacactaaactccatccc

SEQ ID NO: 5341 - DNA, 590 bp, Artificial Sequence
  chemically treated genomic DNA (Homo sapiens) CpG-island No: 5341
  unsure (53, 65, 327)
aggtggttcgaagggttatcggtcggttttaagtcggggaaaagtcgtaattnggggattatcgnttatcggaatttcgttatttcggggcgggatttaggggaagtataaatttaaacgcggtcggggcggagcggttcggatcgcgggagtcgttcgatagaggtatatagcgggtagagttttggcgattcgtaaaacgtaaaaggcggcggggtcgatttaggattcgacggataggtaggcggggtatagaaggtcgtaggagagtagtagcgtcgttagagaggcggaagaggtacgttaagtcggagtttaagaattagnggtacgggagagaaaattaagagtaggcgggagtcgaggttttagtaaggaatcggtaggggcggagtcgaggttttggcggacgggtaggtagtagagacgagtttagaatcgagttttaggtcgggtacgacgtagaggcgggagatcgtttcggggagttacgatcgggggcgtaaggtacgaacgtagggtataggaatttcgattttttaggataagtaagttttcgggacgttttttaaggcggttttaggataagt

SEQ ID NO: 5342 - DNA, 590 bp, Artificial Sequence
  chemically treated genomic DNA (Homo sapiens) CpG-island No: 5342
  unsure (264, 526, 538)
acttatcctaaaaccgccttaaaaaacgtcccgaaaacttacttatcctaaaaaatcgaaattcctataccctacgttcgtaccttacgcccccgatcgtaactccccgaaacgatctcccgcctctacgtcgtacccgacctaaaactcgattctaaactcgtctctactacctacccgtccgccaaaacctcgactccgcccctaccgattccttactaaaacctcgactcccgcctactcttaattttctctcccgtaccnctaattcttaaactccgacttaacgtacctcttccgcctctctaacgacgctactactctcctacgaccttctataccccgcctacctatccgtcgaatcctaaatcgaccccgccgccttttacgttttacgaatcgccaaaactctacccgctatatacctctatcgaacgactcccgcgatccgaaccgctccgccccgaccgcgtttaaatttatacttcccctaaatcccgccccgaaataacgaaattccgataancgataatccccnaattacgacttttccccgacttaaaaccgaccgataacccttcgaaccacct

SEQ ID NO: 5343 - DNA, 590 bp, Artificial Sequence
  chemically treated genomic DNA (Homo sapiens) CpG-island No: 5343
  unsure (264, 526, 538)
gtttgttttggggtcgttttggggggcgtttcgggggtttgtttgttttggggggtcggggtttttgtgttttgcgttcgtgttttgcgttttcggtcgtggtttttcggggcggtttttcgtttttgcgtcgtgttcggtttggggttcggttttgggttcgtttttgttgtttgttcgttcgttagggtttcggtttcgtttttgtcggttttttgttggggtttcggttttcgtttgtttttggttttttttttcgtgttnttggtttttgggtttcggtttggcgtgtttttttcgtttttttggcggcgttgttgtttttttgcggttttttgtgtttcgtttgtttgttcgtcgggttttgggtcggtttcgtcgttttttgcgttttgcgggtcgttagggttttgttcgttgtgtgtttttgtcgggcggttttcgcggttcgggtcgtttcgtttcggtcgcgtttgggtttgtgttttttttgggtttcgtttcggggtggcggggtttcggtggncggtggtttttnggttgcggttttttttcggtttggggtcggtcggtggtttttcgggttattt

SEQ ID NO: 5344 - DNA, 590 bp, Artificial Sequence
  chemically treated genomic DNA (Homo sapiens) CpG-island No: 5344
  unsure (53, 65, 327)
aaataacccgaaaaaccaccgaccgaccccaaaccgaaaaaaaaccgcaaccnaaaaaccaccgnccaccgaaaccccgccaccccgaaacgaaacccaaaaaaaacacaaacccaaacgcgaccgaaacgaaacgacccgaaccgcgaaaaccgcccgacaaaaacacacaacgaacaaaaccctaacgacccgcaaaacgcaaaaaacgacgaaaccgacccaaaacccgacgaacaaacaaacgaaacacaaaaaaccgcaaaaaaacaacaacgccgccaaaaaaacgaaaaaaacacgccaaaccgaaacccaaaaaccaanaacacgaaaaaaaaaaccaaaaacaaacgaaaaccgaaaccccaacaaaaaaccgacaaaaacgaaaccgaaaccctaacgaacgaacaaacaacaaaaacgaacccaaaaccgaaccccaaaccgaacacgacgcaaaaacgaaaaaccgccccgaaaaaccacgaccgaaaacgcaaaacacgaacgcaaaacacaaaaaccccgaccccccaaaacaaacaaacccccgaaacgccccccaaaacgaccccaaaacaaac

SEQ ID NO: 5345 - DNA, 521 bp, Artificial Sequence
  chemically treated genomic DNA (Homo sapiens) CpG-island No: 5345
tatgtttcgcgttatagcgcgtattttatcggaattattttagtagtatttgacggggtatatcggtttgtcgggcgtacgtgggtgcgggtgaatgaagaattttcgtggtttgacgatttcgtggtgaggttgtcgtaatgacgtatttggaattggttttcgtttcgtttgtcgcgtaattggcgggcgtgatagtatttatggaaaaatcgttgcgttgaataatattattttcgatatttcggttcgttgtatggtcgggttgattggtcggacggcgtcgggaagtcgagtttgttgtcgttgattttcggtgttcgcgttattgaatagggtaatgtgatggtgttgggcggcgatatgcgcgattcgaagtatcgtcgcgacgtttgttcgcgtatcgtttggatgtcgtagggttgggtaaaaatttttattatattttgtcggtgtatgaaaacgtcgattttttcgttcgtttgttcggttacgataaagcggagtggatagtgcgaatt

SEQ ID NO: 5346 - DNA, 521 bp, Artificial Sequence
  chemically treated genomic DNA (Homo sapiens) CpG-island No: 5346
aattcgcactatccactccgctttatcgtaaccgaacaaacgaacgaaaaaatcgacgttttcatacaccgacaaaatataataaaaatttttacccaaccctacgacatccaaacgatacgcgaacaaacgtcgcgacgatacttcgaatcgcgcatatcgccgcccaacaccatcacattaccctattcaataacgcgaacaccgaaaatcaacgacaacaaactcgacttcccgacgccgtccgaccaatcaacccgaccatacaacgaaccgaaatatcgaaaataatattattcaacgcaacgatttttccataaatactatcacgcccgccaattacgcgacaaacgaaacgaaaaccaattccaaatacgtcattacgacaacctcaccacgaaatcgtcaaaccacgaaaattcttcattcacccgcacccacgtacgcccgacaaaccgatataccccgtcaaatactactaaaataattccgataaaatacgcgctataacgcgaaacata

SEQ ID NO: 5347 - DNA, 521 bp, Artificial Sequence
  chemically treated genomic DNA (Homo sapiens) CpG-island No: 5347
gattcgtattgtttatttcgttttgtcgtgatcgaataggcgagcgaaaaaatcgacgtttttatatatcgataaggtgtggtagaggtttttgtttagttttgcggtatttaggcgatgcgcgggtagacgtcgcggcgatgtttcgggtcgcgtatatcgtcgtttagtattattatattgttttgtttaatgacgcgggtatcggaaattaacgataataagttcgatttttcgacgtcgttcggttaattagttcgattatatagcgggtcggaatatcgagagtgatattgtttagcgtaacggtttttttataagtgttgttacgttcgttagttgcgcgataggcgggacgggaattagttttagatgcgttattgcggtaattttattacgaggtcgttaggttacggaagttttttatttattcgtatttacgtacgttcggtaaatcggtatatttcgttagatgttgttggagtaatttcggtgagatacgcgttatgacgcggaatatg

SEQ ID NO: 5348 - DNA, 521 bp, Artificial Sequence
  chemically treated genomic DNA (Homo sapiens) CpG-island No: 5348
catattccgcgtcataacgcgtatctcaccgaaattactccaacaacatctaacgaaatataccgatttaccgaacgtacgtaaatacgaataaataaaaaacttccgtaacctaacgacctcgtaataaaattaccgcaataacgcatctaaaactaattcccgtcccgcctatcgcgcaactaacgaacgtaacaacacttataaaaaaaccgttacgctaaacaatatcactctcgatattccgacccgctatataatcgaactaattaaccgaacgacgtcgaaaaatcgaacttattatcgttaatttccgatacccgcgtcattaaacaaaacaatataataatactaaacgacgatatacgcgacccgaaacatcgccgcgacgtctacccgcgcatcgcctaaataccgcaaaactaaacaaaaacctctaccacaccttatcgatatataaaaacgtcgattttttcgctcgcctattcgatcacgacaaaacgaaataaacaatacgaatc

SEQ ID NO: 5349 - DNA, 688 bp, Artificial Sequence
  chemically treated genomic DNA (Homo sapiens) CpG-island No: 5349
  unsure (640, 642, 650)
cgattacgcggtgggcgatagcgtatgcggttacggttcgtttttcgagacggttattattaacgtagtgaataattataagttgcgtaaaatgtcgtaaggtagtttttggaaaaacgtcgtttgttacgattcggcgtagtttgttatgagcggcgtgcgcgatgttaacgtgcgcgtaggggattttgtggtggtggtagggtttggcgtaatcggttaaattgttatttaattggttaagacgcgttggcgtttttgtggtgattggcgtcgattttatcgtttatcgttgtgatattgttcgtcgttacggcgcggatttttgttttaattttatcggtattgatgtaggtaaagagattaaaacgttgatcggtaagtagggtgtcgatgtgattatcgaaattagcggttacgtcgacgcgttgtaagtcggcgtttcgcggtttggtttatggcggtattattttttatgtcgcgtttgttaagtcgtttgtcgaaggttttaatttcgggatcggaagcgtatttgattcgagagatttttgcggtatcgaggtcggatttatttaggttgagaggttgtaacgtatggagtgttttttagtcgtagtagatgcgtagtggttttgggcgngngagttttnattttaacgtttgggatttttggatttaggagtgttcg

SEQ ID NO: 5350 - DNA, 688 bp, Artificial Sequence
  chemically treated genomic DNA (Homo sapiens) CpG-island No: 5350
  unsure (39, 47, 49)
cgaacactcctaaatccaaaaatcccaaacgttaaaatnaaaactcncncgcccaaaaccactacgcatctactacgactaaaaaacactccatacgttacaacctctcaacctaaataaatccgacctcgataccgcaaaaatctctcgaatcaaatacgcttccgatcccgaaattaaaaccttcgacaaacgacttaacaaacgcgacataaaaaataataccgccataaaccaaaccgcgaaacgccgacttacaacgcgtcgacgtaaccgctaatttcgataatcacatcgacaccctacttaccgatcaacgttttaatctctttacctacatcaataccgataaaattaaaacaaaaatccgcgccgtaacgacgaacaatatcacaacgataaacgataaaatcgacgccaatcaccacaaaaacgccaacgcgtcttaaccaattaaataacaatttaaccgattacgccaaaccctaccaccaccacaaaatcccctacgcgcacgttaacatcgcgcacgccgctcataacaaactacgccgaatcgtaacaaacgacgtttttccaaaaactaccttacgacattttacgcaacttataattattcactacgttaataataaccgtctcgaaaaacgaaccgtaaccgcatacgctatcgcccaccgcgtaatcg

SEQ ID NO: 5351 - DNA, 688 bp, Artificial Sequence
  chemically treated genomic DNA (Homo sapiens) CpG-island No: 5351
  unsure (39, 47, 49)
cgggtatttttgggtttaggagttttagacgttggggtngagatttntncgtttaaaattattgcgtatttattgcggttgaagaatattttatacgttgtaattttttagtttggatgaattcgatttcggtatcgtaggagtttttcgagttaaatgcgttttcggtttcgaggttaaaattttcggtaaacggtttggtaaacgcgatataggagatggtgtcgttataagttagatcgcggagcgtcgatttgtagcgcgtcggcgtagtcgttggtttcgataattatatcggtattttgtttgtcggttagcgttttgatttttttatttatattagtgtcgatggggttaaggtagaaattcgcgtcgtggcgacgggtaatattatagcgatgggcgataggatcgacgttaattattatagaagcgttagcgcgttttagttagttggatggtaatttgatcgattgcgttaagttttattattattataaaattttttacgcgtacgttggtatcgcgtacgtcgtttatggtaaattgcgtcgggtcgtagtagacggcgtttttttaggagttgttttgcggtattttgcgtagtttgtagttatttattgcgttaatgatgatcgtttcggagagcgggtcgtagtcgtatacgttgtcgtttatcgcgtagtcg

SEQ ID NO: 5352 - DNA, 688 bp, Artificial Sequence
  chemically treated genomic DNA (Homo sapiens) CpG-island No: 5352
  unsure (640, 642, 650)
cgactacgcgataaacgacaacgtatacgactacgacccgctctccgaaacgatcatcattaacgcaataaataactacaaactacgcaaaataccgcaaaacaactcctaaaaaaacgccgtctactacgacccgacgcaatttaccataaacgacgtacgcgataccaacgtacgcgtaaaaaattttataataataataaaacttaacgcaatcgatcaaattaccatccaactaactaaaacgcgctaacgcttctataataattaacgtcgatcctatcgcccatcgctataatattacccgtcgccacgacgcgaatttctaccttaaccccatcgacactaatataaataaaaaaatcaaaacgctaaccgacaaacaaaataccgatataattatcgaaaccaacgactacgccgacgcgctacaaatcgacgctccgcgatctaacttataacgacaccatctcctatatcgcgtttaccaaaccgtttaccgaaaattttaacctcgaaaccgaaaacgcatttaactcgaaaaactcctacgataccgaaatcgaattcatccaaactaaaaaattacaacgtataaaatattcttcaaccgcaataaatacgcaataattttaaacgnanaaatctcnaccccaacgtctaaaactcctaaacccaaaaatacccg

SEQ ID NO: 5353 - DNA, 520 bp, Artificial Sequence
  chemically treated genomic DNA (Homo sapiens) CpG-island No: 5353
gtaggtcggttttttaatggcgcgtgatagtatagttatacggtttcgtattggtagtatttatagattcgttagtttcggtagtcgtacggtgttatttagttttttaatgattttgtttatcgttatgtttggtcgttattgtttttgcggtttaagttggatggtcgtttttattatttttagcggagtagaatcggtggcggttttcgttttttcggttttgttaaatattcgcgttattttaggtacgtttataattagtttgtcggttttttgtagtatattcgtcgtttttgttgcggaaattttcggtagcgtcgatggtatatataataagtcgtttttattgatttgcggtaaaaatttttcgttaattttattgagcggttagagaatcgttagtatcgaaagcgtcgttattagtagcgtggttttcggttagtgtagtatttttagtaatagcggatgataaatacgaattaaaaagcgattgagcgggttattgtttttcggcgga

SEQ ID NO: 5354 - DNA, 520 bp, Artificial Sequence
  chemically treated genomic DNA (Homo sapiens) CpG-island No: 5354
tccgccgaaaaacaataacccgctcaatcgctttttaattcgtatttatcatccgctattactaaaaatactacactaaccgaaaaccacgctactaataacgacgctttcgatactaacgattctctaaccgctcaataaaattaacgaaaaatttttaccgcaaatcaataaaaacgacttattatatataccatcgacgctaccgaaaatttccgcaacaaaaacgacgaatatactacaaaaaaccgacaaactaattataaacgtacctaaaataacgcgaatatttaacaaaaccgaaaaaacgaaaaccgccaccgattctactccgctaaaaataataaaaacgaccatccaacttaaaccgcaaaaacaataacgaccaaacataacgataaacaaaatcattaaaaaactaaataacaccgtacgactaccgaaactaacgaatctataaatactaccaatacgaaaccgtataactatactatcacgcgccattaaaaaaccgacctac

SEQ ID NO: 5355 - DNA, 520 bp, Artificial Sequence
  chemically treated genomic DNA (Homo sapiens) CpG-island No: 5355
ttcgtcggaaagtagtaattcgtttaatcgttttttgattcgtgtttattattcgttgttgttgaaagtattgtattggtcgaaaattacgttgttggtggcggcgttttcggtgttgacggttttttggtcgtttaataaagttggcggggaatttttatcgtagattaatgaaggcgatttgttgtatatgttatcgacgttgtcggggattttcgtagtagaggcggcgagtatgttgtaaaaaatcgataagttaattatgagcgtatttgaagtggcgcgggtatttggtaaaatcgggaaagcggaaatcgttatcgattttgtttcgttggagatggtagaaacgattatttagtttaagtcgtaggagtagtggcggttaggtatgacgatggataaaattattgaggaattggataatatcgtgcggttgtcggggttggcgaatttgtgggtgttgttaatacggagtcgtgtagttatgttgttacgcgttattaaaaggtcgatttgt

SEQ ID NO: 5356 - DNA, 520 bp, Artificial Sequence
  chemically treated genomic DNA (Homo sapiens) CpG-island No: 5356
acaaatcgaccttttaataacgcgtaacaacataactacacgactccgtattaacaacacccacaaattcgccaaccccgacaaccgcacgatattatccaattcctcaataattttatccatcgtcatacctaaccgccactactcctacgacttaaactaaataatcgtttctaccatctccaacgaaacaaaatcgataacgatttccgctttcccgattttaccaaatacccgcgccacttcaaatacgctcataattaacttatcgattttttacaacatactcgccgcctctactacgaaaatccccgacaacgtcgataacatatacaacaaatcgccttcattaatctacgataaaaattccccgccaactttattaaacgaccaaaaaaccgtcaacaccgaaaacgccgccaccaacaacgtaattttcgaccaatacaatactttcaacaacaacgaataataaacacgaatcaaaaaacgattaaacgaattactactttccgacgaa

SEQ ID NO: 5357 - DNA, 522 bp, Artificial Sequence
  chemically treated genomic DNA (Homo sapiens) CpG-island No: 5357
  unsure (417, 424)
ttacgtttacgttattttcggggtcgggttcgcggcggttttcgtgggagggcgcggacgtcggggcggttggcggggaggtcggcggggcgggagcgtcggggtcggcggaggaggacggggaggacgaggacgaggacgaggaggaggacgaggaggcggcggcgtcgggcgcggcggcggggtcgcggggtttcgggagggcgcgagtagtttcggtgttcgtcgtggtgagtagcgtcgacgcggacgcggttcgttcgttgcggggttgtttaagttttcgcgcggggtcgacgagttagatgatagcgagttggagaggaagcgtaagatggtttttttttacggggacgtgatcgtttattttttcgattaggtgcggaattcgagagggcgcggtttcgggttatagtntatattnaagtttcgaaaataacgtttatttcgttattatatatatatttaaatatttatcgagtttttgttataggagtatagggttgggggtttggattttcg

SEQ ID NO: 5358 - DNA, 522 bp, Artificial Sequence
  chemically treated genomic DNA (Homo sapiens) CpG-island No: 5358
  unsure (99, 106)
cgaaaatccaaacccccaaccctatactcctataacaaaaactcgataaatatttaaatatatatataataacgaaataaacgttattttcgaaacttnaatatanactataacccgaaaccgcgccctctcgaattccgcacctaatcgaaaaaataaacgatcacgtccccgtaaaaaaaaaccatcttacgcttcctctccaactcgctatcatctaactcgtcgaccccgcgcgaaaacttaaacaaccccgcaacgaacgaaccgcgtccgcgtcgacgctactcaccacgacgaacaccgaaactactcgcgccctcccgaaaccccgcgaccccgccgccgcgcccgacgccgccgcctcctcgtcctcctcctcgtcctcgtcctcgtcctccccgtcctcctccgccgaccccgacgctcccgccccgccgacctccccgccaaccgccccgacgtccgcgccctcccacgaaaaccgccgcgaacccgaccccgaaaataacgtaaacgtaa

SEQ ID NO: 5359 - DNA, 522 bp, Artificial Sequence
  chemically treated genomic DNA (Homo sapiens) CpG-island No: 5359
  unsure (99, 106)
cgggagtttagatttttagttttgtgtttttgtagtaaaaattcggtgaatgtttggatgtgtgtgtggtgacgagatgggcgttgttttcggggtttnggtatanattgtggttcgaaatcgcgttttttcgggtttcgtatttggtcgaagaggtagacggttacgttttcgtggaaggagattattttgcgttttttttttagttcgttgttatttggttcgtcggtttcgcgcggagatttgagtagtttcgtagcgggcgggtcgcgttcgcgtcggcgttgtttattacgacgggtatcggggttgttcgcgttttttcggggtttcgcggtttcgtcgtcgcgttcggcgtcgtcgttttttcgttttttttttcgttttcgttttcgtttttttcgttttttttcgtcggtttcggcgttttcgtttcgtcggttttttcgttagtcgtttcggcgttcgcgtttttttacgggggtcgtcgcgggttcggtttcgggaatggcgtgagcgtga

SEQ ID NO: 5360 - DNA, 522 bp, Artificial Sequence
  chemically treated genomic DNA (Homo sapiens) CpG-island No: 5360
  unsure (417, 424)
tcacgctcacgccattcccgaaaccgaacccgcgacgacccccgtaaaaaaacgcgaacgccgaaacgactaacgaaaaaaccgacgaaacgaaaacgccgaaaccgacgaaaaaaaacgaaaaaaacgaaaacgaaaacgaaaaaaaaaacgaaaaaacgacgacgccgaacgcgacgacgaaaccgcgaaaccccgaaaaaacgcgaacaaccccgatacccgtcgtaataaacaacgccgacgcgaacgcgacccgcccgctacgaaactactcaaatctccgcgcgaaaccgacgaaccaaataacaacgaactaaaaaaaaaacgcaaaataatctccttccacgaaaacgtaaccgtctacctcttcgaccaaatacgaaacccgaaaaaacgcgatttcgaaccacaatntataccnaaaccccgaaaacaacgcccatctcgtcaccacacacacatccaaacattcaccgaatttttactacaaaaacacaaaactaaaaatctaaactcccg

SEQ ID NO: 5361 - DNA, 1502 bp, Artificial Sequence
  chemically treated genomic DNA (Homo sapiens) CpG-island No: 5361
  unsure (703)
gtagcgttgaggtcgttttatcgttcgttaagttttcgtcgtcgttatagtttttgtttagtttcgcgtatttcgcgtcgcggtcggttttcgggttcgtatttttcgtgtttcgcgagcgcgttttagtggatcgttggcgtcggattaagggcgcgggcgtcgtcggggggcgcgggtttggtcgattgtttttatcgttattacggttttatcgagtcgtagggtttaggtttcggttgggcgaagtgtcgcgcggtattttcgggcgtattcgggcgtcgtttggttttcgtcggtcgtttagttttcgtagaagtcgtcgtttttttatttcgttatcgtacgcgataaggagttagtcgagtttttcgtcggcgtttttttcggtttttcgtcgtcgttcgcgtttttcgtcgtcgcggttatcgtcgtcgggtcgttattttgtcgtttggttttcgaggacgagagttcgtcggcgttcgcgcggtggtcgcgttcggatttcgagagttaatttttgttggggttaggcgcgggcggcgcggggggtacggggggcgtaggcggaggagtttcggtcgtttcgttttcgtgtcgcgtcgcgtcgttttcgtgtttttatttcgatttcgagtcgtcgtcgtcggattcggatgattcggagagtttgggcggcgcgtcgttgggcggtttgganttttggtggttcgtcgattttttttattcgtatgtcgagcgtttcgggtcgtcgttcggtcgttattggtcggtcgataagttcgggggttggcgcgtcgggagttgggattatttgttttcgcgtagcggttcggtcgtttggtattgtcggtattgcgttagtttggagttgttgtcgtcgtcgcgttattttagttgttcgtacgatggtttggacggcggttggtgggcgttatcgtttttattttgggtcgtcgggtttttgtttcgacgtcgggttcgttgcgggtgttcgcggtcgtattcgtatcgttcgcgggtttcgtatcgtacgttcgtcgtcgtcgcgttttattattataggtatcggcgcgtcgttgggggttgggatttttcgtcgttcgcgtttatttcgcgttcgttcgaggattttagttcgtgttttcgcgtcgtttttgcgcgtaggtttatcgggttttttcgttacgttcgtaggtgttcgtacgtcgcgtattgggggtcgtcgttgtttatagttttttatcggagatatcggggcggggatttgggtattcgtaggggttcggcgtatttttttagtttcgagttcgaggtatgacgcggtttcgggggttttatcgtttttttggttagcgtaggttacggttcgagggggcgttcgtagtggataggattcgcgtgggttgggaaggaaagtagtggaattggtcggatttcgtttggagtagcgttttgcgttttttggttttggaggaatcgtaagtcggagaggattt

SEQ ID NO: 5362 - DNA, 1502 bp, Artificial Sequence
  chemically treated genomic DNA (Homo sapiens) CpG-island No: 5362
  unsure (800)
aaatcctctccgacttacgattcctccaaaaccaaaaaacgcaaaacgctactccaaacgaaatccgaccaattccactactttccttcccaacccacgcgaatcctatccactacgaacgccccctcgaaccgtaacctacgctaaccaaaaaaacgataaaacccccgaaaccgcgtcatacctcgaactcgaaactaaaaaaatacgccgaacccctacgaatacccaaatccccgccccgatatctccgataaaaaactataaacaacgacgacccccaatacgcgacgtacgaacacctacgaacgtaacgaaaaaacccgataaacctacgcgcaaaaacgacgcgaaaacacgaactaaaatcctcgaacgaacgcgaaataaacgcgaacgacgaaaaatcccaacccccaacgacgcgccgatacctataataataaaacgcgacgacgacgaacgtacgatacgaaacccgcgaacgatacgaatacgaccgcgaacacccgcaacgaacccgacgtcgaaacaaaaacccgacgacccaaaataaaaacgataacgcccaccaaccgccgtccaaaccatcgtacgaacaactaaaataacgcgacgacgacaacaactccaaactaacgcaataccgacaataccaaacgaccgaaccgctacgcgaaaacaaataatcccaactcccgacgcgccaacccccgaacttatcgaccgaccaataacgaccgaacgacgacccgaaacgctcgacatacgaataaaaaaaatcgacgaaccaccaaaantccaaaccgcccaacgacgcgccgcccaaactctccgaatcatccgaatccgacgacgacgactcgaaatcgaaataaaaacacgaaaacgacgcgacgcgacacgaaaacgaaacgaccgaaactcctccgcctacgccccccgtaccccccgcgccgcccgcgcctaaccccaacaaaaattaactctcgaaatccgaacgcgaccaccgcgcgaacgccgacgaactctcgtcctcgaaaaccaaacgacaaaataacgacccgacgacgataaccgcgacgacgaaaaacgcgaacgacgacgaaaaaccgaaaaaaacgccgacgaaaaactcgactaactccttatcgcgtacgataacgaaataaaaaaacgacgacttctacgaaaactaaacgaccgacgaaaaccaaacgacgcccgaatacgcccgaaaataccgcgcgacacttcgcccaaccgaaacctaaaccctacgactcgataaaaccgtaataacgataaaaacaatcgaccaaacccgcgccccccgacgacgcccgcgcccttaatccgacgccaacgatccactaaaacgcgctcgcgaaacacgaaaaatacgaacccgaaaaccgaccgcgacgcgaaatacgcgaaactaaacaaaaactataacgacgacgaaaacttaacgaacgataaaacgacctcaacgctac

SEQ ID NO: 5363 - DNA, 1502 bp, Artificial Sequence
  chemically treated genomic DNA (Homo sapiens) CpG-island No: 5363
  unsure (800)
aaatttttttcggtttgcggtttttttagaattagggggcgtaggacgttgttttaggcggggttcggttagttttattgtttttttttttaatttacgcgggttttgtttattgcgggcgttttttcgggtcgtggtttgcgttgattaagggggcggtggggttttcggggtcgcgttatatttcggattcgaggttagagaagtgcgtcgagtttttgcgggtgtttaggttttcgtttcggtgttttcggtgggaagttgtgggtagcggcggtttttagtgcgcggcgtgcggatatttgcgagcgtggcgggagggttcggtaagtttgcgcgtaggggcggcgcgagggtacgagttgaggttttcgagcgagcgcgaggtgggcgcgggcggcgggaggttttagtttttagcggcgcgtcggtgtttgtggtggtggggcgcggcggcggcgggcgtgcggtgcgaggttcgcgggcggtgcgggtgcgatcgcgggtattcgtagcgggttcggcgtcggggtaggggttcggcggtttagggtggaggcggtggcgtttattagtcgtcgtttaggttatcgtgcgagtagttgagatggcgcggcggcggtagtagttttaggttggcgtagtgtcgatagtgttaggcggtcggatcgttgcgcgggggtaggtagttttagttttcggcgcgttagttttcgagtttgtcgatcgattagtagcggtcgggcggcggttcgaggcgttcggtatacgggtaagggaagtcggcgaattattagggntttaggtcgtttagcgacgcgtcgtttaggtttttcgagttattcgagttcgacggcgacggttcgagatcgaggtaagggtacgggggcggcgcggcgcggtacgggggcggagcggtcggggttttttcgtttgcgtttttcgtgtttttcgcgtcgttcgcgtttggttttagtaggggttggttttcggggttcgagcgcggttatcgcgcgggcgtcggcgggttttcgttttcgaaggttaagcggtagagtggcggttcgacggcggtggtcgcggcggcggggggcgcgggcggcgacgggaagtcggggaaggcgtcggcggggggttcggttggttttttgtcgcgtacgatggcgaaataggagggcggcggtttttgcgggggttgagcggtcggcggggattaagcggcgttcggatgcgttcgggggtgtcgcgcggtatttcgtttagtcgaggtttaggttttgcggttcgatggggtcgtagtagcggtggaagtagtcggttaggttcgcgtttttcggcggcgttcgcgtttttggttcggcgttagcggtttattgaggcgcgttcgcggggtacgaaaggtgcgggttcgggagtcggtcgcggcgcggggtacgcggggttgggtaggggttgtggcggcggcgggggtttggcgggcggtggggcggttttagcgttgt

SEQ ID NO: 5364 - DNA, 1502 bp, Artificial Sequence
  chemically treated genomic DNA (Homo sapiens) CpG-island No: 5364
  unsure (703)
acaacgctaaaaccgccccaccgcccgccaaacccccgccgccgccacaacccctacccaaccccgcgtaccccgcgccgcgaccgactcccgaacccgcacctttcgtaccccgcgaacgcgcctcaataaaccgctaacgccgaaccaaaaacgcgaacgccgccgaaaaacgcgaacctaaccgactacttccaccgctactacgaccccatcgaaccgcaaaacctaaacctcgactaaacgaaataccgcgcgacacccccgaacgcatccgaacgccgcttaatccccgccgaccgctcaacccccgcaaaaaccgccgccctcctatttcgccatcgtacgcgacaaaaaaccaaccgaaccccccgccgacgccttccccgacttcccgtcgccgcccgcgccccccgccgccgcgaccaccgccgtcgaaccgccactctaccgcttaaccttcgaaaacgaaaacccgccgacgcccgcgcgataaccgcgctcgaaccccgaaaaccaacccctactaaaaccaaacgcgaacgacgcgaaaaacacgaaaaacgcaaacgaaaaaaccccgaccgctccgcccccgtaccgcgccgcgccgcccccgtacccttacctcgatctcgaaccgtcgccgtcgaactcgaataactcgaaaaacctaaacgacgcgtcgctaaacgacctaaanccctaataattcgccgacttcccttacccgtataccgaacgcctcgaaccgccgcccgaccgctactaatcgatcgacaaactcgaaaactaacgcgccgaaaactaaaactacctacccccgcgcaacgatccgaccgcctaacactatcgacactacgccaacctaaaactactaccgccgccgcgccatctcaactactcgcacgataacctaaacgacgactaataaacgccaccgcctccaccctaaaccgccgaacccctaccccgacgccgaacccgctacgaatacccgcgatcgcacccgcaccgcccgcgaacctcgcaccgcacgcccgccgccgccgcgccccaccaccacaaacaccgacgcgccgctaaaaactaaaacctcccgccgcccgcgcccacctcgcgctcgctcgaaaacctcaactcgtaccctcgcgccgcccctacgcgcaaacttaccgaaccctcccgccacgctcgcaaatatccgcacgccgcgcactaaaaaccgccgctacccacaacttcccaccgaaaacaccgaaacgaaaacctaaacacccgcaaaaactcgacgcacttctctaacctcgaatccgaaatataacgcgaccccgaaaaccccaccgcccccttaatcaacgcaaaccacgacccgaaaaaacgcccgcaataaacaaaacccgcgtaaattaaaaaaaaaaacaataaaactaaccgaaccccgcctaaaacaacgtcctacgccccctaattctaaaaaaaccgcaaaccgaaaaaaattt

SEQ ID NO: 5365 - DNA, 927 bp, Artificial Sequence
  chemically treated genomic DNA (Homo sapiens) CpG-island No: 5365
cgttgggttcgttcgtttttttagcgggaatggtttcgtttcggtttcgtttttattattttatttcgtttttttcgtcgttatcggaaataggtttagtttaaataatggtttggaacgttcggttttcgggtttcgtcggaagttcgtttagcgtttaataaaagcggcgcgataagtttacgattgagtcgaacgtttttgggcgtcgcgcgttagggggaaacgttcgcggcggaacgtttaggagaaaacgttttagtaatttttagtcgatttcgttttttttcgatttattatagacgtcgttttttatggcggttaggaaggttcgcggggaattcggggcggtttcgttagtcgggtttggattcgcgttgtgttcggcgtcgggtgagttcgtttaaacgtttcgggagttatcgtcgtttttttagcgttagtttttagcgttgaaaagattttttttttcgtcgtttaatcgtttttttagtagggatcgtttttttttttgatattgtttaatttatagtgggcgttttcgtttttttcgttttcgttattaaaggatcgttttttagggttaatagtcgtataaaaagtcggtgtaggtatgttcggttagaggtagtacggttcgcggttaatcggagtgtaggtagggtagtaggtttcgttttcgaaataatagaaagtatttgataggtttgttttttaatgagaagtttcggaaaagtgtcgcgcggagcggagttacgcggtatagttatttttgcgtttgtttaaaggttttggatatttggagtttaggtaaatcgagtttcgttttcgataatacgttgttagggggcggtattttgttagttttgttgttaggaggcggggttagaattggtttgttttcgtaagttatattttttagtaggt

SEQ ID NO: 5366 - DNA, 927 bp, Artificial Sequence
  chemically treated genomic DNA (Homo sapiens) CpG-island No: 5366
acctactaaaaaatataacttacgaaaacaaaccaattctaaccccgcctcctaacaacaaaactaacaaaataccgccccctaacaacgtattatcgaaaacgaaactcgatttacctaaactccaaatatccaaaacctttaaacaaacgcaaaaataactataccgcgtaactccgctccgcgcgacacttttccgaaacttctcattaaaaaacaaacctatcaaatactttctattatttcgaaaacgaaacctactaccctacctacactccgattaaccgcgaaccgtactacctctaaccgaacatacctacaccgactttttatacgactattaaccctaaaaaacgatcctttaataacgaaaacgaaaaaaacgaaaacgcccactataaattaaacaatatcaaaaaaaaaaacgatccctactaaaaaaacgattaaacgacgaaaaaaaaaatcttttcaacgctaaaaactaacgctaaaaaaacgacgataactcccgaaacgtttaaacgaactcacccgacgccgaacacaacgcgaatccaaacccgactaacgaaaccgccccgaattccccgcgaaccttcctaaccgccataaaaaacgacgtctataataaatcgaaaaaaaacgaaatcgactaaaaattactaaaacgttttctcctaaacgttccgccgcgaacgtttccccctaacgcgcgacgcccaaaaacgttcgactcaatcgtaaacttatcgcgccgcttttattaaacgctaaacgaacttccgacgaaacccgaaaaccgaacgttccaaaccattatttaaactaaacctatttccgataacgacgaaaaaaacgaaataaaataataaaaacgaaaccgaaacgaaaccattcccgctaaaaaaacgaacgaacccaacg

SEQ ID NO: 5367 - DNA, 927 bp, Artificial Sequence
  chemically treated genomic DNA (Homo sapiens) CpG-island No: 5367
gtttgttaggaggtgtggtttacggaaataagttagttttagtttcgttttttagtaataagattaataaagtatcgttttttagtaacgtattatcggaggcggggttcggtttatttagattttaagtgtttagggtttttgagtaggcgtagaggtggttgtatcgcgtggtttcgtttcgcgcgatattttttcggggttttttattggagagtaagtttgttaagtgttttttgttgtttcggaggcggggtttgttgttttgtttgtatttcgattggtcgcgggtcgtgttatttttggtcggatatatttatatcggttttttgtacgattgttggttttggagaacgattttttggtggcgagggcggggaggacgaaagcgtttattgtggattggatagtgttaaaaagaggggcggtttttattgaaggggcggttgggcgacgaagggaagagtttttttagcgttgaggattggcgttgaggaggcggcggtggttttcggggcgtttgagcgggtttattcgacgtcgaatataacgcgagtttaggttcgattggcgggatcgtttcggatttttcgcgggtttttttagtcgttatggaggacggcgtttatggtaggtcggggaggggcggggtcggttgggagttgttggagcgtttttttttgaacgtttcgtcgcgaacgtttttttttggcgcgcggcgtttagaagcgttcggtttagtcgtagatttgtcgcgtcgtttttgttgggcgttggacgggttttcggcggggttcgaaagtcgggcgttttaggttattgtttgggttgagtttgttttcggtggcggcgggaggggcgggatggagtggtggaggcgaggtcggggcggaattattttcgttggaggggcgggcgagtttagcg

SEQ ID NO: 5368 - DNA, 927 bp, Artificial Sequence
  chemically treated genomic DNA (Homo sapiens) CpG-island No: 5368
cgctaaactcgcccgcccctccaacgaaaataattccgccccgacctcgcctccaccactccatcccgcccctcccgccgccaccgaaaacaaactcaacccaaacaataacctaaaacgcccgactttcgaaccccgccgaaaacccgtccaacgcccaacaaaaacgacgcgacaaatctacgactaaaccgaacgcttctaaacgccgcgcgccaaaaaaaaacgttcgcgacgaaacgttcaaaaaaaaacgctccaacaactcccaaccgaccccgcccctccccgacctaccataaacgccgtcctccataacgactaaaaaaacccgcgaaaaatccgaaacgatcccgccaatcgaacctaaactcgcgttatattcgacgtcgaataaacccgctcaaacgccccgaaaaccaccgccgcctcctcaacgccaatcctcaacgctaaaaaaactcttcccttcgtcgcccaaccgccccttcaataaaaaccgcccctctttttaacactatccaatccacaataaacgctttcgtcctccccgccctcgccaccaaaaaatcgttctccaaaaccaacaatcgtacaaaaaaccgatataaatatatccgaccaaaaataacacgacccgcgaccaatcgaaatacaaacaaaacaacaaaccccgcctccgaaacaacaaaaaacacttaacaaacttactctccaataaaaaaccccgaaaaaatatcgcgcgaaacgaaaccacgcgatacaaccacctctacgcctactcaaaaaccctaaacacttaaaatctaaataaaccgaaccccgcctccgataatacgttactaaaaaacgatactttattaatcttattactaaaaaacgaaactaaaactaacttatttccgtaaaccacacctcctaacaaac

SEQ ID NO: 5369 - DNA, 603 bp, Artificial Sequence
  chemically treated genomic DNA (Homo sapiens) CpG-island No: 5369
tcgtttggcggcgttgtttaacgaagaattgggtgcggtgatttaggttcgtgtcgttgatcgtgaagcggtcgagttcgtattggtatagtatgggtttgttgattgtgtttattatgtagggtaggcggttttcggtgatcgttttgtgattatcgttaacgggtagattgtatttagcgaaagtcgtattacgttgcgtgtttggtgggtagaaattatttggtagatgtagcgtttgcgtgataattcggagtgtgtcgattaggagtattaggcgaaatttaacgacgtcgattcgggtttgaatgtaaaattgtcgttcgatattaacgaagatgtggtagtatcgtatattgttattggcgtacgttcgaaagttgtcgtattgcgtgagtagggcgtgaatttttatgttgaaatggcggtagttttttatcgtgtaggttttgatgttatcgacgtgtatatgagtgatttgttgatcggacgtacgggtttggaagatttttacgttttggtcgcgtgcggtggttttttttacggtgatgtgtttggtgttcggtgaacgttgggcgaaattttaaaaaaaaaaagaaaaaa

SEQ ID NO: 5370 - DNA, 603 bp, Artificial Sequence
  chemically treated genomic DNA (Homo sapiens) CpG-island No: 5370
ttttttctttttttttttaaaatttcgcccaacgttcaccgaacaccaaacacatcaccgtaaaaaaaaccaccgcacgcgaccaaaacgtaaaaatcttccaaacccgtacgtccgatcaacaaatcactcatatacacgtcgataacatcaaaacctacacgataaaaaactaccgccatttcaacataaaaattcacgccctactcacgcaatacgacaactttcgaacgtacgccaataacaatatacgatactaccacatcttcgttaatatcgaacgacaattttacattcaaacccgaatcgacgtcgttaaatttcgcctaatactcctaatcgacacactccgaattatcacgcaaacgctacatctaccaaataatttctacccaccaaacacgcaacgtaatacgactttcgctaaatacaatctacccgttaacgataatcacaaaacgatcaccgaaaaccgcctaccctacataataaacacaatcaacaaacccatactataccaatacgaactcgaccgcttcacgatcaacgacacgaacctaaatcaccgcacccaattcttcgttaaacaacgccgccaaacga

SEQ ID NO: 5371 - DNA, 603 bp, Artificial Sequence
  chemically treated genomic DNA (Homo sapiens) CpG-island No: 5371
ttttttttttttttttttgggatttcgtttaacgtttatcgggtattaggtatattatcgtaggagaaattatcgtacgcgattagggcgtggaaattttttaggttcgtgcgttcggttagtaggttatttatatgtacgtcgatagtattaaagtttgtacggtggaaagttgtcgttattttaatatgagagtttacgttttgtttacgtagtacggtaattttcggacgtgcgttagtggtaatatacggtgttgttatattttcgttgatatcgaacgatagttttatatttaggttcggatcggcgtcgttagatttcgtttgatgtttttgatcggtatatttcgggttgttacgtaggcgttgtatttgttaggtagtttttgtttattagatacgtaacgtggtgcggttttcgttgaatatagtttgttcgttggcggtaattataaaacggttatcggaaatcgtttgttttatataatggatataattagtaagtttatgttgtgttagtacggattcgatcgttttacggttagcggtacgaatttgaattatcgtatttagtttttcgttaaataacgtcgttaggcga

SEQ ID NO: 5372 - DNA, 603 bp, Artificial Sequence
  chemically treated genomic DNA (Homo sapiens) CpG-island No: 5372
tcgcctaacgacgttatttaacgaaaaactaaatacgataattcaaattcgtaccgctaaccgtaaaacgatcgaatccgtactaacacaacataaacttactaattatatccattatataaaacaaacgatttccgataaccgttttataattaccgccaacgaacaaactatattcaacgaaaaccgcaccacgttacgtatctaataaacaaaaactacctaacaaatacaacgcctacgtaacaacccgaaatataccgatcaaaaacatcaaacgaaatctaacgacgccgatccgaacctaaatataaaactatcgttcgatatcaacgaaaatataacaacaccgtatattaccactaacgcacgtccgaaaattaccgtactacgtaaacaaaacgtaaactctcatattaaaataacgacaactttccaccgtacaaactttaatactatcgacgtacatataaataacctactaaccgaacgcacgaacctaaaaaatttccacgccctaatcgcgtacgataatttctcctacgataatatacctaatacccgataaacgttaaacgaaatcccaaaaaaaaaaaaaaaaaa

SEQ ID NO: 5373 - DNA, 570 bp, Artificial Sequence
  chemically treated genomic DNA (Homo sapiens) CpG-island No: 5373
  unsure (103, 434, 445, 470)
attgtcgcgtaattatttatgaaagcgtttatgtttcgtcgtgcgatagtattttcggaataaatttgtttttttgcgcgattcggaatttcgaggtcgtttntacgcgtcgtcgttcgtttttttatatcggattgggttttacgtaaggatgaggcggggtttcgtcgtggcgcgtatgcgtgtagtaaagaatggaggagtcggaattcgaacggaaggtaggagagaggcgagatttcgcgcgtgtgggagcgggcgtgaagaggggagtaggtcgtgtttgattggcgtgtgtttgtagcgggttcgtatcgacgaggtgtttgtcggaggaagtcgtttcgaggcggaagatgaggacgacgaggattacgtgttttatgtgtcgttacggtagcgtcggtagttattggtgaggggtacgcgttcgnggagggtaagnggttagttagtggtcgattaatttnttacgcgcgttcgttacgtattttatatttatagggtttggttttttttcgagtttggagatttatcggggatggtaggaggatttttaagagagttgtt

SEQ ID NO: 5374 - DNA, 570 bp, Artificial Sequence
  chemically treated genomic DNA (Homo sapiens) CpG-island No: 5374
  unsure (101, 126, 137, 468)
aacaactctcttaaaaatcctcctaccatccccgataaatctccaaactcgaaaaaaaaccaaaccctataaatataaaatacgtaacgaacgcgcgtaanaaattaatcgaccactaactaaccncttaccctccncgaacgcgtacccctcaccaataactaccgacgctaccgtaacgacacataaaacacgtaatcctcgtcgtcctcatcttccgcctcgaaacgacttcctccgacaaacacctcgtcgatacgaacccgctacaaacacacgccaatcaaacacgacctactcccctcttcacgcccgctcccacacgcgcgaaatctcgcctctctcctaccttccgttcgaattccgactcctccattctttactacacgcatacgcgccacgacgaaaccccgcctcatccttacgtaaaacccaatccgatataaaaaaacgaacgacgacgcgtanaaacgacctcgaaattccgaatcgcgcaaaaaaacaaatttattccgaaaatactatcgcacgacgaaacataaacgctttcataaataattacgcgacaat

SEQ ID NO: 5375 - DNA, 570 bp, Artificial Sequence
  chemically treated genomic DNA (Homo sapiens) CpG-island No: 5375
  unsure (101, 126, 137, 468)
ggtagtttttttgggagtttttttattattttcggtgagtttttaggttcgggagagagttaggttttataaatgtggggtacgtagcgagcgcgcgtaanaaattgatcgattattgattggttntttgttttttncggacgcgtgttttttattagtagttgtcggcgttgtcgtaacggtatatagggtacgtagttttcgtcgtttttatttttcgtttcggagcggtttttttcggtaggtatttcgtcggtgcgagttcgttgtaagtatacgttagttaggtacggtttgtttttttttttacgttcgtttttatacgcgcggggtttcgttttttttttatttttcgttcgggtttcgatttttttattttttgttgtacgtatgcgcgttacggcgaaatttcgttttatttttgcgtgagatttaattcgatgtgaagaggcgaacgacggcgcgtangaacgatttcggagtttcggatcgcgtagagggataaatttgtttcggagatattatcgtacggcgaggtatggacgtttttatgggtggttacgcgatagt

SEQ ID NO: 5376 - DNA, 570 bp, Artificial Sequence
  chemically treated genomic DNA (Homo sapiens) CpG-island No: 5376
  unsure (103, 434, 445, 470)
actatcgcgtaaccacccataaaaacgtccatacctcgccgtacgataatatctccgaaacaaatttatccctctacgcgatccgaaactccgaaatcgttcntacgcgccgtcgttcgcctcttcacatcgaattaaatctcacgcaaaaataaaacgaaatttcgccgtaacgcgcatacgtacaacaaaaaataaaaaaatcgaaacccgaacgaaaaataaaaaaaaaacgaaaccccgcgcgtataaaaacgaacgtaaaaaaaaaaacaaaccgtacctaactaacgtatacttacaacgaactcgcaccgacgaaatacctaccgaaaaaaaccgctccgaaacgaaaaataaaaacgacgaaaactacgtaccctatataccgttacgacaacgccgacaactactaataaaaaacacgcgtccgnaaaaaacaaanaaccaatcaataatcgatcaatttnttacgcgcgctcgctacgtaccccacatttataaaacctaactctctcccgaacctaaaaactcaccgaaaataataaaaaaactcccaaaaaaactacc

SEQ ID NO: 5377 - DNA, 760 bp, Artificial Sequence
  chemically treated genomic DNA (Homo sapiens) CpG-island No: 5377
atcgcgagtcggagtcggagtcggagtcggggtcggtcgggttgttgaggttcgagcggtaggagcgtagcgcggagcgttgagttaggcgtttagtcgcgagaagttgtcgtcgtttttgttcgttcggcgtcgtagtttcgggcggtttatggggcgggtacggcgtcgttgtaggcgtcggtagttttggagggtagtcgtttaggcgttgcgtttttgttttcgtaggtcgtagttagggcggcggggcgcgtttagtttcggtttttggagcgttcgtcgcggtttttatttttatggacgtttttaaggggggtatgagtttggagcggttgtcggaggggtttcggtcgtcgtcgtcgttattttatgatatggggttcgttttttatttggttcggttcgtcgattttcgcgagtcgttcgagaatttcgttagcgagtcgtttgatacggagttgttaggtaagcgtcgtttttcgcgcggcgcgtatagagtttattcgggcgcggagtacggggagttgggagtagggtttgacgttcgcgtcgcgtaattaagtttttttttcgttttagaagcgttaggagttttttttttttcgttttcgatttgacggtgaacgcggaaatttacgtatacgcgaaggtatttttacgcggtttttacgcgttaagagattggtagatgtacgagtttatagttggagggttggattgatagttttttttgattaggagtaaatagaacgggaaa

SEQ ID NO: 5378 - DNA, 760 bp, Artificial Sequence
  chemically treated genomic DNA (Homo sapiens) CpG-island No: 5378
tttcccgttctatttactcctaatcaaaaaaaactatcaatccaaccctccaactataaactcgtacatctaccaatctcttaacgcgtaaaaaccgcgtaaaaataccttcgcgtatacgtaaatttccgcgttcaccgtcaaatcgaaaacgaaaaaaaaaaaactcctaacgcttctaaaacgaaaaaaaaacttaattacgcgacgcgaacgtcaaaccctactcccaactccccgtactccgcgcccgaataaactctatacgcgccgcgcgaaaaacgacgcttacctaacaactccgtatcaaacgactcgctaacgaaattctcgaacgactcgcgaaaatcgacgaaccgaaccaaataaaaaacgaaccccatatcataaaataacgacgacgacgaccgaaacccctccgacaaccgctccaaactcataccccccttaaaaacgtccataaaaataaaaaccgcgacgaacgctccaaaaaccgaaactaaacgcgccccgccgccctaactacgacctacgaaaacaaaaacgcaacgcctaaacgactaccctccaaaactaccgacgcctacaacgacgccgtacccgccccataaaccgcccgaaactacgacgccgaacgaacaaaaacgacgacaacttctcgcgactaaacgcctaactcaacgctccgcgctacgctcctaccgctcgaacctcaacaacccgaccgaccccgactccgactccgactccgactcgcgat

SEQ ID NO: 5379 - DNA, 760 bp, Artificial Sequence
  chemically treated genomic DNA (Homo sapiens) CpG-island No: 5379
tttttcgttttatttatttttgattaagaggggttgttagtttaattttttagttgtaggttcgtgtatttgttagttttttggcgcgtggggatcgcgtggaagtgttttcgcgtgtgcgtaagttttcgcgtttatcgttaggtcgagaacgggaaaaagaaagtttttgacgtttttggggcggagagggagtttggttgcgcggcgcgggcgttaggttttgtttttagtttttcgtgtttcgcgttcgggtaggttttgtgcgcgtcgcgcggggaacggcgtttatttggtagtttcgtgttagacgattcgttggcggagttttcgagcggttcgcgggggtcggcgggtcgggttaggtggaaggcgggttttatgttatggggtggcggcggcggcggtcggagttttttcggtagtcgttttaggtttatgttttttttgaaggcgtttatggaggtggggatcgcggcgggcgttttaggggtcggggttgggcgcgtttcgtcgttttggttgcgatttgcggggataagagcgtagcgtttaagcggttgttttttagggttgtcggcgtttgtagcgacgtcgtgttcgttttatggatcgttcggggttgcggcgtcgggcgggtagaggcggcggtagtttttcgcgattgggcgtttggtttagcgtttcgcgttgcgtttttgtcgttcgggttttagtagttcggtcggtttcggtttcggtttcggtttcggttcgcgat

SEQ ID NO: 5380 - DNA, 760 bp, Artificial Sequence
  chemically treated genomic DNA (Homo sapiens) CpG-island No: 5380
atcgcgaaccgaaaccgaaaccgaaaccgaaaccgaccgaactactaaaacccgaacgacaaaaacgcaacgcgaaacgctaaaccaaacgcccaatcgcgaaaaactaccgccgcctctacccgcccgacgccgcaaccccgaacgatccataaaacgaacacgacgtcgctacaaacgccgacaaccctaaaaaacaaccgcttaaacgctacgctcttatccccgcaaatcgcaaccaaaacgacgaaacgcgcccaaccccgacccctaaaacgcccgccgcgatccccacctccataaacgccttcaaaaaaaacataaacctaaaacgactaccgaaaaaactccgaccgccgccgccgccaccccataacataaaacccgccttccacctaacccgacccgccgacccccgcgaaccgctcgaaaactccgccaacgaatcgtctaacacgaaactaccaaataaacgccgttccccgcgcgacgcgcacaaaacctacccgaacgcgaaacacgaaaaactaaaaacaaaacctaacgcccgcgccgcgcaaccaaactccctctccgccccaaaaacgtcaaaaactttctttttcccgttctcgacctaacgataaacgcgaaaacttacgcacacgcgaaaacacttccacgcgatccccacgcgccaaaaaactaacaaatacacgaacctacaactaaaaaattaaactaacaacccctcttaatcaaaaataaataaaacgaaaaa

SEQ ID NO: 5381 - DNA, 565 bp, Artificial Sequence
  chemically treated genomic DNA (Homo sapiens) CpG-island No: 5381
cgttaaggagcggttcggacgaagggagaggaggagatcgagaaaggaagaggggtgacgggcgagagaacgtatttagagagatagagagggaggttaatatcgtgatagtaggcgatagaatgaaagagattaaagagaaggggcgggcgggaagggtaaacggggggagaggggttattaagtagaagggagatatagaggacggtgagggcgagcgggttaataggcgcggtcggatttttagtaaggttagtcggaacgtcgattaagggattcggtttacgtgcgcggtcgaagttcggagtagttcggttttggttttcgtttcggtttttgcgcgttttttttcgcgttgtttttttttgttcgagttggagtttttttttagtagcgaattgggttcgcgggtggtcggcgcgggtagtggggtagcgaattcgttgtttagcgtagtcggtcgggtttcggaggggtttcgagtttttcggtgtgggcgttttttttgcgtttattttttaatatatagttgaatgtttttttttatttttttagtatttgtttt

SEQ ID NO: 5382 - DNA, 565 bp, Artificial Sequence
  chemically treated genomic DNA (Homo sapiens) CpG-island No: 5382
aaaacaaatactaaaaaaataaaaaaaaacattcaactatatattaaaaaataaacgcaaaaaaaacgcccacaccgaaaaactcgaaacccctccgaaacccgaccgactacgctaaacaacgaattcgctaccccactacccgcgccgaccacccgcgaacccaattcgctactaaaaaaaaactccaactcgaacaaaaaaaaacaacgcgaaaaaaaacgcgcaaaaaccgaaacgaaaaccaaaaccgaactactccgaacttcgaccgcgcacgtaaaccgaatcccttaatcgacgttccgactaaccttactaaaaatccgaccgcgcctattaacccgctcgccctcaccgtcctctatatctcccttctacttaataacccctctccccccgtttacccttcccgcccgccccttctctttaatctctttcattctatcgcctactatcacgatattaacctccctctctatctctctaaatacgttctctcgcccgtcacccctcttcctttctcgatctcctcctctcccttcgtccgaaccgctccttaacg

SEQ ID NO: 5383 - DNA, 565 bp, Artificial Sequence
  chemically treated genomic DNA (Homo sapiens) CpG-island No: 5383
gaaatagatattaagaaagtggagagaaatatttagttgtgtattaagaaatgaacgtagaagaggcgtttatatcggggagttcggagttttttcggaattcggtcggttgcgttgggtagcggattcgttgttttattgttcgcgtcggttattcgcgggtttagttcgttgttggaaaaaagttttagttcggataaaaaaaggtagcgcggagggagacgcgtaggagtcggggcgggggttagagtcgggttgtttcgggtttcggtcgcgtacgtgggtcggattttttgatcggcgtttcggttggttttgttgggagttcggtcgcgtttgttggttcgttcgtttttatcgttttttgtgttttttttttatttgatgattttttttttttcgtttatttttttcgttcgttttttttttttggttttttttattttgtcgtttattgttacggtgttaatttttttttttgtttttttgagtgcgttttttcgttcgttatttttttttttttttcggttttttttttttttttcgttcgagtcgttttttagcg

SEQ ID NO: 5384 - DNA, 565 bp, Artificial Sequence
  chemically treated genomic DNA (Homo sapiens) CpG-island No: 5384
cgctaaaaaacgactcgaacgaaaaaaaaaaaaaaaaccgaaaaaaaaaaaaaaataacgaacgaaaaaacgcactcaaaaaaacaaaaaaaaaaattaacaccgtaacaataaacgacaaaataaaaaaaaccaaaaaaaaaaaacgaacgaaaaaaataaacgaaaaaaaaaaaatcatcaaataaaaaaaaaacacaaaaaacgataaaaacgaacgaaccaacaaacgcgaccgaactcccaacaaaaccaaccgaaacgccgatcaaaaaatccgacccacgtacgcgaccgaaacccgaaacaacccgactctaacccccgccccgactcctacgcgtctccctccgcgctacctttttttatccgaactaaaacttttttccaacaacgaactaaacccgcgaataaccgacgcgaacaataaaacaacgaatccgctacccaacgcaaccgaccgaattccgaaaaaactccgaactccccgatataaacgcctcttctacgttcatttcttaatacacaactaaatatttctctccactttcttaatatctatttc

SEQ ID NO: 5385 - DNA, 782 bp, Artificial Sequence
  chemically treated genomic DNA (Homo sapiens) CpG-island No: 5385
ttcggatattatgtagcgtggatattttcgagttgttttgcggaatttcggggttttgaatcgtatttaagttttcgacgtcgaagtttacgaagttgttgttggcggcggtagtggtcggttgcgttggggaaggttcggcggggtaagcggtagtgtagttgtagttagggttgtaggtcgcgtcgtcgtaattcggataggcggggtaggcgttataatcgtagggattgaggtttacgtcgtaggtaggcgcgtagggcgtcgagttttttaggtatggtttgttatcgcgtattagtattggtatcgcgattttgcgggtaggcggcggcggcggcgggggtagttttattagttttagagtttggttttgtcgttgtcgtttgtatttgtagcgtcggttttggaattagattttgatttgcgtggacgtgagttttagtacgttggttagttggtcgcgttcgggggtcgataggtatcgttgttgtttgaagcgtcgttttagtttatagatttgcgtttgcgagaagagtacgcgcggtttttttcgtcgtcgcgttcggggtcgtttcgcgttgttcgtttttgttttttttagttttatcgttttttgtagcgcgtatagttttgagggggaatagagaggtagagagacgtttggtaagagcggtttgatttacggagcgcggtcgtatagtaatggtaagggattttcgtggaggttattgtgttttgtttggagcgtttagttggttgcggtttattttgttaagtgt

SEQ ID NO: 5386 - DNA, 782 bp, Artificial Sequence
  chemically treated genomic DNA (Homo sapiens) CpG-island No: 5386
acacttaacaaaataaaccgcaaccaactaaacgctccaaacaaaacacaataacctccacgaaaatcccttaccattactatacgaccgcgctccgtaaatcaaaccgctcttaccaaacgtctctctacctctctattccccctcaaaactatacgcgctacaaaaaacgataaaactaaaaaaaacaaaaacgaacaacgcgaaacgaccccgaacgcgacgacgaaaaaaaccgcgcgtactcttctcgcaaacgcaaatctataaactaaaacgacgcttcaaacaacaacgatacctatcgacccccgaacgcgaccaactaaccaacgtactaaaactcacgtccacgcaaatcaaaatctaattccaaaaccgacgctacaaatacaaacgacaacgacaaaaccaaactctaaaactaataaaactacccccgccgccgccgccgcctacccgcaaaatcgcgataccaatactaatacgcgataacaaaccatacctaaaaaactcgacgccctacgcgcctacctacgacgtaaacctcaatccctacgattataacgcctaccccgcctatccgaattacgacgacgcgacctacaaccctaactacaactacactaccgcttaccccgccgaaccttccccaacgcaaccgaccactaccgccgccaacaacaacttcgtaaacttcgacgtcgaaaacttaaatacgattcaaaaccccgaaattccgcaaaacaactcgaaaatatccacgctacataatatccgaa

SEQ ID NO: 5387 - DNA, 782 bp, Artificial Sequence
  chemically treated genomic DNA (Homo sapiens) CpG-island No: 5387
gtatttggtagagtgagtcgtagttagttgggcgttttaggtaggatatagtggtttttacgaggattttttattattattgtgcggtcgcgtttcgtaggttaagtcgtttttattaagcgtttttttgtttttttgtttttttttagagttgtgcgcgttgtagaaggcggtggagttggagaagatagaggcggataacgcggagcggtttcgggcgcgacggcggaggaagtcgcgcgtgtttttttcgtaggcgtaggtttatgagttggagcggcgttttaagtagtagcggtatttgtcggttttcgaacgcgattagttggttagcgtgttgaaatttacgtttacgtaggttaagatttggttttagaatcggcgttataagtgtaagcggtagcggtaggattagattttggagttggtggggttgttttcgtcgtcgtcgtcgtttgttcgtaggatcgcggtgttagtgttggtgcgcgatggtaagttatgtttaggggattcggcgttttacgcgtttgtttacggcgtgggttttaatttttacggttataacgtttatttcgtttattcgggttacggcggcgcggtttgtagttttggttatagttgtattgtcgtttatttcgtcgggttttttttagcgtagtcggttattgtcgtcgttaataataatttcgtgaatttcggcgtcggggatttgaatgcggtttagagtttcgggatttcgtagagtaattcgggagtgtttacgttgtatggtattcgag

SEQ ID NO: 5388 - DNA, 782 bp, Artificial Sequence
  chemically treated genomic DNA (Homo sapiens) CpG-island No: 5388
ctcgaataccatacaacgtaaacactcccgaattactctacgaaatcccgaaactctaaaccgcattcaaatccccgacgccgaaattcacgaaattattattaacgacgacaataaccgactacgctaaaaaaaacccgacgaaataaacgacaatacaactataaccaaaactacaaaccgcgccgccgtaacccgaataaacgaaataaacgttataaccgtaaaaattaaaacccacgccgtaaacaaacgcgtaaaacgccgaatcccctaaacataacttaccatcgcgcaccaacactaacaccgcgatcctacgaacaaacgacgacgacgacgaaaacaaccccaccaactccaaaatctaatcctaccgctaccgcttacacttataacgccgattctaaaaccaaatcttaacctacgtaaacgtaaatttcaacacgctaaccaactaatcgcgttcgaaaaccgacaaataccgctactacttaaaacgccgctccaactcataaacctacgcctacgaaaaaaacacgcgcgacttcctccgccgtcgcgcccgaaaccgctccgcgttatccgcctctatcttctccaactccaccgccttctacaacgcgcacaactctaaaaaaaaacaaaaaaacaaaaaaacgcttaataaaaacgacttaacctacgaaacgcgaccgcacaataataataaaaaatcctcgtaaaaaccactatatcctacctaaaacgcccaactaactacgactcactctaccaaatac

SEQ ID NO: 5389 - DNA, 509 bp, Artificial Sequence
  chemically treated genomic DNA (Homo sapiens) CpG-island No: 5389
ttagatacgtataaggaaaagattaagcgataataacgacggttaaaataaataaagcggagatacgagaagataggaaggacggatacgaaagaagagattatcgattataacgatacgggaagacggggggtagggcgaaatagatgcgagaagagagattcgacggtataaaagagtaaggagaggagtaagagagcggggtacgagatagtcgggcgagcgaggagaaaaagacgtaagagggacggaggtagaaagagagaaaacgaggtaaaaggagaagtgggggtttagattaggaagaagagagaaagagagaaaaagaggggagagcgcgagagaagagtagagaacgaagggagaggggaggagtcgcggagagaaaaataggaagaaggagagaggaggggcgggagagagcgaaacggaattggataggcggaaggtagaagtacgagggggaggggtaagggtagcgaggagggggaagagggggataagcgaga

SEQ ID NO: 5390 - DNA, 509 bp, Artificial Sequence
  chemically treated genomic DNA (Homo sapiens) CpG-island No: 5390
tctcgcttatccccctcttccccctcctcgctacccttacccctccccctcgtacttctaccttccgcctatccaattccgtttcgctctctcccgcccctcctctctccttcttcctatttttctctccgcgactcctcccctctcccttcgttctctactcttctctcgcgctctcccctctttttctctctttctctcttcttcctaatctaaacccccacttctccttttacctcgttttctctctttctacctccgtccctcttacgtctttttctcctcgctcgcccgactatctcgtaccccgctctcttactcctctccttactcttttataccgtcgaatctctcttctcgcatctatttcgccctaccccccgtcttcccgtatcgttataatcgataatctcttctttcgtatccgtccttcctatcttctcgtatctccgctttatttattttaaccgtcgttattatcgcttaatcttttccttatacgtatctaa

SEQ ID NO: 5391 - DNA, 509 bp, Artificial Sequence
  chemically treated genomic DNA (Homo sapiens) CpG-island No: 5391
tttcgtttgtttttttttttttttttttcgttgtttttgtttttttttttcgtgtttttgtttttcgtttgtttagtttcgtttcgttttttttcgttttttttttttttttttttttgttttttttttcgcggtttttttttttttttttcgttttttgtttttttttcgcgttttttttttttttttttttttttttttttttttttggtttgggtttttatttttttttttgtttcgttttttttttttttgttttcgttttttttgcgttttttttttttcgttcgttcggttgtttcgtgtttcgtttttttgtttttttttttgtttttttgtgtcgtcgggttttttttttcgtatttgtttcgttttgtttttcgttttttcgtgtcgttgtggtcggtggttttttttttcgtgttcgttttttttgttttttcgtgttttcgttttgtttgttttggtcgtcgttgttgtcgtttggttttttttttgtgcgtgtttgg

SEQ ID NO: 5392 - DNA, 509 bp, Artificial Sequence
  chemically treated genomic DNA (Homo sapiens) CpG-island No: 5392
ccaaacacgcacaaaaaaaaaaccaaacgacaacaacgacgaccaaaacaaacaaaacgaaaacacgaaaaaacaaaaaaaacgaacacgaaaaaaaaaaccaccgaccacaacgacacgaaaaaacgaaaaacaaaacgaaacaaatacgaaaaaaaaaacccgacgacacaaaaaaacaaaaaaaaaaacaaaaaaacgaaacacgaaacaaccgaacgaacgaaaaaaaaaaaacgcaaaaaaaacgaaaacaaaaaaaaaaaaaacgaaacaaaaaaaaaaataaaaacccaaaccaaaaaaaaaaaaaaaaaaaaaaaaaaaaaaaaaaaacgcgaaaaaaaaacaaaaaacgaaaaaaaaaaaaaaaaaccgcgaaaaaaaaaacaaaaaaaaaaaaaaaaaaaaaacgaaaaaaaacgaaacgaaactaaacaaacgaaaaacaaaaacacgaaaaaaaaaaacaaaaacaacgaaaaaaaaaaaaaaaaaaacaaacgaaa

SEQ ID NO: 5393 - DNA, 578 bp, Artificial Sequence
  chemically treated genomic DNA (Homo sapiens) CpG-island No: 5393
  unsure (99, 307, 317, 327, 344, 403, 447, 452, 469, 480, 506)
aagacgacgacgacgatgaagacgaaaacgacgaggaagaagaggacgacgagacgacgacgggaagaagacgataagacgacgagacgacgagtatgngacggagaggaggacgttatgacgaagaagaatacgagacgatgacgatgacgatatgacgacggataagacgaagacgacgacgacgacgacgacgacgacgacgacgaggacgaagagtacgacgacgacgaggcgacgacgaggcgacgacgacgaggacgacgacgaggacgaagatgatagagatgacgaacgacgaggtganggaggacgangaatgacgangaggacgcgacgagtangagatgacgacgacgacgaggagacgaggaagagcgacgtgacgagacgatgcgatggngacgacgggagaaggagttacgacgaggagaggagagatgagangagancgagacgaagacgcgangatgacgaggngagtacgacgaggacgtgacgacgantacgagaggacgacgagacgacgaggagatgaggcgatgacgaacgggagtaggagaacgcgaggcgatgat

SEQ ID NO: 5394 - DNA, 578 bp, Artificial Sequence
  chemically treated genomic DNA (Homo sapiens) CpG-island No: 5394
  unsure (73, 99, 110, 127, 132, 176, 235, 252, 262, 272, 480)
atcatcgcctcgcgttctcctactcccgttcgtcatcgcctcatctcctcgtcgtctcgtcgtcctctcgtantcgtcgtcacgtcctcgtcgtactcncctcgtcatcntcgcgtcttcgtctcgntctcntctcatctctcctctcctcgtcgtaactccttctcccgtcgtcnccatcgcatcgtctcgtcacgtcgctcttcctcgtctcctcgtcgtcgtcgtcatctcntactcgtcgcgtcctcntcgtcattcntcgtcctccntcacctcgtcgttcgtcatctctatcatcttcgtcctcgtcgtcgtcctcgtcgtcgtcgcctcgtcgtcgcctcgtcgtcgtcgtactcttcgtcctcgtcgtcgtcgtcgtcgtcgtcgtcgtcgtcgtcttcgtcttatccgtcgtcatatcgtcatcgtcatcgtctcgtattcttcttcgtcataacgtcctcctctccgtcncatactcgtcgtctcgtcgtcttatcgtcttcttcccgtcgtcgtctcgtcgtcctcttcttcctcgtcgttttcgtcttcatcgtcgtcgtcgtctt

SEQ ID NO: 5395 - DNA, 578 bp, Artificial Sequence
  chemically treated genomic DNA (Homo sapiens) CpG-island No: 5395
  unsure (73, 99, 110, 127, 132, 176, 235, 252, 262, 272, 480)
gttatcgtttcgcgtttttttattttcgttcgttatcgttttattttttcgtcgtttcgtcgttttttcgtgntcgtcgttacgttttcgtcgtgtttntttcgttattntcgcgttttcgtttcgnttttnttttatttttttttttttcgtcgtggttttttttttcgtcgttnttatcgtatcgtttcgttacgtcgttttttttcgttttttcgtcgtcgtcgttattttntgttcgtcgcgtttttntcgttatttntcgttttttnttatttcgtcgttcgttatttttgttattttcgttttcgtcgtcgttttcgtcgtcgtcgtttcgtcgtcgtttcgtcgtcgtcgtgtttttcgttttcgtcgtcgtcgtcgtcgtcgtcgtcgtcgtcgttttcgttttgttcgtcgttatgtcgttatcgttatcgtttcgtattttttttcgttatgacgttttttttttcgttntatgttcgtcgtttcgtcgttttgtcgtttttttttcgtcgtcgtttcgtcgtttttttttttttcgtcgttttcgtttttatcgtcgtcgtcgtttt

SEQ ID NO: 5396 - DNA, 578 bp, Artificial Sequence
  chemically treated genomic DNA (Homo sapiens) CpG-island No: 5396
  unsure (99, 307, 317, 327, 344, 403, 447, 452, 469, 480, 506)
aaaacgacgacgacgataaaaacgaaaacgacgaaaaaaaaaaaaacgacgaaacgacgacgaaaaaaaaacgacaaaacgacgaaacgacgaacatanaacgaaaaaaaaaacgtcataacgaaaaaaaatacgaaacgataacgataacgacataacgacgaacaaaacgaaaacgacgacgacgacgacgacgacgacgacgacgaaaacgaaaaacacgacgacgacgaaacgacgacgaaacgacgacgacgaaaacgacgacgaaaacgaaaataacaaaaataacgaacgacgaaataanaaaaaacganaaataacganaaaaacgcgacgaacanaaaataacgacgacgacgaaaaaacgaaaaaaaacgacgtaacgaaacgatacgataanaacgacgaaaaaaaaaaccacgacgaaaaaaaaaaaaataaaanaaaancgaaacgaaaacgcganaataacgaaanaaacacgacgaaaacgtaacgacgancacgaaaaaacgacgaaacgacgaaaaaataaaacgataacgaacgaaaataaaaaaacgcgaaacgataac

SEQ ID NO: 5397 - DNA, 659 bp, Artificial Sequence
  chemically treated genomic DNA (Homo sapiens) CpG-island No: 5397
tttattacggtcgttttagtgatggttatcgttgcggggaattaataattcggttttttagtatttagttcggattaaggtaggagtaagttatcgtttttcgcgcgttaagatttttaagggattttcgttgtcggaggtagtacgtgggattattagtattgaaagtagttttaggtagtagttattttcgttgtagtagcggcggtgagacgtcgagtttgagggcgcgacggggtttttcggtgttttagcggtcgagggggagttcgaggaggaggacgggggcgcggttgggtagcggagagacggtcggtcggggagtagttataacggtagcggggacgggggcgttgtcgtttcgagcgttcgatttcgggattttttgtacgtgggggtgatgatcgcgtagaagtatttgggtagtcgcgcgttggtcgcgtagcggatttgggcgcgttttatttcgggtcgcgtggagtttttttttagttagtagttttttaacgtcggttagttttcgttatttttgtttgttatcgcgttatcgggtgtggacgatttttattttttttagaaaaagttttttatgatgattaagtatatgtacgattattatttggataagtatgagtggtttatgcgcgtcgacgacgatg

SEQ ID NO: 5398 - DNA, 659 bp, Artificial Sequence
  chemically treated genomic DNA (Homo sapiens) CpG-island No: 5398
catcgtcgtcgacgcgcataaaccactcatacttatccaaataataatcgtacatatacttaatcatcataaaaaactttttctaaaaaaaataaaaatcgtccacacccgataacgcgataacaaacaaaaataacgaaaactaaccgacgttaaaaaactactaactaaaaaaaaactccacgcgacccgaaataaaacgcgcccaaatccgctacgcgaccaacgcgcgactacccaaatacttctacgcgatcatcacccccacgtacaaaaaatcccgaaatcgaacgctcgaaacgacaacgcccccgtccccgctaccgttataactactccccgaccgaccgtctctccgctacccaaccgcgcccccgtcctcctcctcgaactccccctcgaccgctaaaacaccgaaaaaccccgtcgcgccctcaaactcgacgtctcaccgccgctactacaacgaaaataactactacctaaaactactttcaatactaataatcccacgtactacctccgacaacgaaaatcccttaaaaatcttaacgcgcgaaaaacgataacttactcctaccttaatccgaactaaatactaaaaaaccgaattattaattccccgcaacgataaccatcactaaaacgaccgtaataaa

SEQ ID NO: 5399 - DNA, 659 bp, Artificial Sequence
  chemically treated genomic DNA (Homo sapiens) CpG-island No: 5399
tatcgtcgtcggcgcgtatgaattatttatatttgtttaggtagtggtcgtgtatgtatttgattattatgaaggattttttttggggaggataggagtcgtttatattcggtagcgcgatgataggtaggggtggcgggggttggtcggcgttggggggttgttggttggaaaagaattttacgcggttcgggatgaaacgcgtttaggttcgttgcgcggttagcgcgcggttgtttaggtatttttgcgcggttattatttttacgtataggaagtttcggggtcgggcgttcggggcggtagcgttttcgttttcgttgtcgttgtggttatttttcggtcggtcgttttttcgttgtttagtcgcgttttcgttttttttttcgggttttttttcggtcgttggagtatcgggaagtttcgtcgcgtttttaagttcggcgttttatcgtcgttgttgtagcggaagtggttgttgtttggggttgtttttaatattggtgattttacgtgttgttttcggtagcggaggttttttgaaaattttggcgcgcggggggcggtaatttgtttttgttttggttcggattaggtgttggaggatcgggttgttgatttttcgtagcggtggttattattaaaacgatcgtaatagg

SEQ ID NO: 5400 - DNA, 659 bp, Artificial Sequence
  chemically treated genomic DNA (Homo sapiens) CpG-island No: 5400
cctattacgatcgttttaataataaccaccgctacgaaaaatcaacaacccgatcctccaacacctaatccgaaccaaaacaaaaacaaattaccgccccccgcgcgccaaaattttcaaaaaacctccgctaccgaaaacaacacgtaaaatcaccaatattaaaaacaaccccaaacaacaaccacttccgctacaacaacgacgataaaacgccgaacttaaaaacgcgacgaaacttcccgatactccaacgaccgaaaaaaaacccgaaaaaaaaaacgaaaacgcgactaaacaacgaaaaaacgaccgaccgaaaaataaccacaacgacaacgaaaacgaaaacgctaccgccccgaacgcccgaccccgaaacttcctatacgtaaaaataataaccgcgcaaaaatacctaaacaaccgcgcgctaaccgcgcaacgaacctaaacgcgtttcatcccgaaccgcgtaaaattcttttccaaccaacaaccccccaacgccgaccaacccccgccacccctacctatcatcgcgctaccgaatataaacgactcctatcctccccaaaaaaaatccttcataataatcaaatacatacacgaccactacctaaacaaatataaataattcatacgcgccgacgacgata

SEQ ID NO: 5401 - DNA, 893 bp, Artificial Sequence
  chemically treated genomic DNA (Homo sapiens) CpG-island No: 5401
  unsure (319, 610, 620, 640, 846..847, 850, 852, 854..)
gaaggcgcggagtggtagcggtaataataacgtggaaaggacggaaaacgcgaagagtggcgttttggcggatttggggcggggtagagtggtaagggttacgttaggacgtattcgtttgtgggtcggggagaagagcgcggtgggatagtaacgaattggttgggggttttaggattcgagtttcgtcgatgaggttagcggagttagggcgtcgggaggaggttagtagagtttttagatacgagtgtcgggaggttagcggaggggcgggacgggacgggaaatggggcgaagagtaagagttgggggagggggnaagagggggcgtcggcgttgtaagtcggaggcggttcgatagggatcgttttttttcggagaggaggtcggatttggattgaggcgcggacggggggcgtttaagggcgggtgacggggaaatatcgcggttcgcgtttttttttcgtatgtacgggtcgtcgttgtaggttttattatcgggttagttcggagttcgtcggcgggggacgcggacggcggtagttagggcgggggttcgggaaggaggatggagggagggtttaggcgcgtttttgatagggtggtagtntaggagcggncgcgttgtcgtcgtcgtgtnttttttttttttttttgtagtttttttagttgtcgttgttgtcgtcgttgtcgttatcgtcgtcgtcgggagaagttttattttcgatttttgttcggagtttcggtttagagttgagcgggagttcggtaggtagttgtagttcgcggtagtcgaggcgttcgcggcgtttcgatttttatttagagtatagtgggatgagtttnnngnantnnggcggtcggcggataaaaaaagtgatattaatgattat

SEQ ID NO: 5402 - DNA, 893 bp, Artificial Sequence
  chemically treated genomic DNA (Homo sapiens) CpG-island No: 5402
  unsure (39..40, 42, 44, 46..47, 254, 274, 284, 575)
ataatcattaatatcactttttttatccgccgaccgccnnantncnnnaaactcatcccactatactctaaataaaaatcgaaacgccgcgaacgcctcgactaccgcgaactacaactacctaccgaactcccgctcaactctaaaccgaaactccgaacaaaaatcgaaaataaaacttctcccgacgacgacgataacgacaacgacgacaacaacgacaactaaaaaaactacaaaaaaaaaaaaaaaanacacgacgacgacaacgcgnccgctcctanactaccaccctatcaaaaacgcgcctaaaccctccctccatcctccttcccgaacccccgccctaactaccgccgtccgcgtcccccgccgacgaactccgaactaacccgataataaaacctacaacgacgacccgtacatacgaaaaaaaaacgcgaaccgcgatatttccccgtcacccgcccttaaacgccccccgtccgcgcctcaatccaaatccgacctcctctccgaaaaaaaacgatccctatcgaaccgcctccgacttacaacgccgacgccccctcttnccccctcccccaactcttactcttcgccccatttcccgtcccgtcccgcccctccgctaacctcccgacactcgtatctaaaaactctactaacctcctcccgacgccctaactccgctaacctcatcgacgaaactcgaatcctaaaacccccaaccaattcgttactatcccaccgcgctcttctccccgacccacaaacgaatacgtcctaacgtaacccttaccactctaccccgccccaaatccgccaaaacgccactcttcgcgttttccgtcctttccacgttattattaccgctaccactccgcgccttc

SEQ ID NO: 5403 - DNA, 893 bp, Artificial Sequence
  chemically treated genomic DNA (Homo sapiens) CpG-island No: 5403
  unsure (39..40, 42, 44, 46..47, 254, 274, 284, 575)
atgattattgatattattttttttattcgtcggtcgttnngntntnnnggatttattttattgtgttttaagtggaggtcgaagcgtcgcggacgtttcgattgtcgcgggttgtagttgtttgtcgggttttcgtttagttttgggtcggggtttcgagtaagggtcgggagtgaaatttttttcggcggcggcggtggcggtagcggcggtagtagcggtagttagaggagttgtaggaggaggaggaggangtacggcggcggtaacgcgntcgtttttangttgttattttgttaggggcgcgtttgggttttttttttattttttttttcgagttttcgttttaattgtcgtcgttcgcgtttttcgtcgacgggtttcgagttggttcggtagtagagtttgtagcggcgattcgtgtatgcgggagagaagcgcgggtcgcggtattttttcgttattcgtttttggacgtttttcgttcgcgttttagtttagattcggtttttttttcggaaggaaacgatttttgtcgggtcgttttcggtttgtagcgtcgacgtttttttttntttttttttttagtttttgtttttcgttttatttttcgtttcgtttcgttttttcgttggtttttcgatattcgtgtttgggggttttattggttttttttcggcgttttagtttcgttgattttatcggcggagttcgggttttggagtttttagttagttcgttgttgttttatcgcgttttttttttcggtttatagacgggtacgttttgacgtgatttttattattttgtttcgttttaggttcgttagggcgttatttttcgcgtttttcgttttttttacgttgttgttatcgttgttatttcgcgttttt

SEQ ID NO: 5404 - DNA, 893 bp, Artificial Sequence
  chemically treated genomic DNA (Homo sapiens) CpG-island No: 5404
  unsure (319, 610, 620, 640, 846..847, 850, 852, 854..)
aaaaacgcgaaataacaacgataacaacaacgtaaaaaaaacgaaaaacgcgaaaaataacgccctaacgaacctaaaacgaaacaaaataataaaaatcacgtcaaaacgtacccgtctataaaccgaaaaaaaaaacgcgataaaacaacaacgaactaactaaaaactccaaaacccgaactccgccgataaaatcaacgaaactaaaacgccgaaaaaaaaccaataaaacccccaaacacgaatatcgaaaaaccaacgaaaaaacgaaacgaaacgaaaaataaaacgaaaaacaaaaactaaaaaaaaaaanaaaaaaaaacgtcgacgctacaaaccgaaaacgacccgacaaaaatcgtttccttccgaaaaaaaaaccgaatctaaactaaaacgcgaacgaaaaacgtccaaaaacgaataacgaaaaaataccgcgacccgcgcttctctcccgcatacacgaatcgccgctacaaactctactaccgaaccaactcgaaacccgtcgacgaaaaacgcgaacgacgacaattaaaacgaaaactcgaaaaaaaaaataaaaaaaaaacccaaacgcgcccctaacaaaataacaacntaaaaacgancgcgttaccgccgccgtacntcctcctcctcctcctacaactcctctaactaccgctactaccgccgctaccgccaccgccgccgccgaaaaaaatttcactcccgacccttactcgaaaccccgacccaaaactaaacgaaaacccgacaaacaactacaacccgcgacaatcgaaacgtccgcgacgcttcgacctccacttaaaacacaataaaataaatccnnnanancnnaacgaccgacgaataaaaaaaataatatcaataatcat

SEQ ID NO: 5405 - DNA, 567 bp, Artificial Sequence
  chemically treated genomic DNA (Homo sapiens) CpG-island No: 5405
cgatagtcggtggttaaaaaagtcggatacgttgatttatttgttaggcggaaaaaatggtcgttaaaagcgattcgcgtttgggttttcgcgcggttttcgatagtattattgcgttggtagtgtggttgtaaattgaattggcggaatcgtggtagtcgtggttggcggatattcgttcgcgttttggtaatattatgcgcgtcgatgcgttgggggaatcgttgggttgttaggcgattgtcgggttttttgacgaagatttgtatcggtttttttattagtcgttgcgttatttcgattacgattatttggtgtcggaagttagttacgggcgcgatgttgcgttgtttaatttgttacgtattaaagtgcgggaaatcgaaatcgtagcggcgtaggtttttattattcgtagttttgaagtattacgttcggatattttgtaggcgttgaatcgtttttcgagtacggtttacgtgatgatgattttgagcgtaacgaagtagtcgttaacggtgaagtagatttaataacgattgggggaaacgtaatgattattgaacg

SEQ ID NO: 5406 - DNA, 567 bp, Artificial Sequence
  chemically treated genomic DNA (Homo sapiens) CpG-island No: 5406
cgttcaataatcattacgtttcccccaatcgttattaaatctacttcaccgttaacgactacttcgttacgctcaaaatcatcatcacgtaaaccgtactcgaaaaacgattcaacgcctacaaaatatccgaacgtaatacttcaaaactacgaataataaaaacctacgccgctacgatttcgatttcccgcactttaatacgtaacaaattaaacaacgcaacatcgcgcccgtaactaacttccgacaccaaataatcgtaatcgaaataacgcaacgactaataaaaaaaccgatacaaatcttcgtcaaaaaacccgacaatcgcctaacaacccaacgattcccccaacgcatcgacgcgcataatattaccaaaacgcgaacgaatatccgccaaccacgactaccacgattccgccaattcaatttacaaccacactaccaacgcaataatactatcgaaaaccgcgcgaaaacccaaacgcgaatcgcttttaacgaccattttttccgcctaacaaataaatcaacgtatccgacttttttaaccaccgactatcg

SEQ ID NO: 5407 - DNA, 567 bp, Artificial Sequence
  chemically treated genomic DNA (Homo sapiens) CpG-island No: 5407
cgtttaataattattgcgttttttttagtcgttgttggatttgttttatcgttagcggttgtttcgttacgtttaggattattattacgtagatcgtgttcgaaaggcggtttagcgtttgtaaaatgttcgggcgtaatattttaaagttgcgggtgataaagatttgcgtcgttacggtttcggtttttcgtattttggtgcgtagtagattgagtaacgtagtatcgcgttcgtggttggttttcggtattagatgatcgtggtcgagatagcgtagcggttgatgagaaagtcgatgtagattttcgttagaaagttcgataatcgtttggtagtttagcggtttttttagcgtatcggcgcgtataatgttgttaagacgcgaacggatattcgttagttacggttgttacggtttcgttagtttaatttgtagttatattgttagcgtaatggtgttgtcgagaatcgcgcgaaaatttagacgcggatcgtttttggcgattatttttttcgtttgataggtgagttagcgtattcggtttttttagttatcggttgtcg

SEQ ID NO: 5408 - DNA, 567 bp, Artificial Sequence
  chemically treated genomic DNA (Homo sapiens) CpG-island No: 5408
cgacaaccgataactaaaaaaaccgaatacgctaactcacctatcaaacgaaaaaaataatcgccaaaaacgatccgcgtctaaattttcgcgcgattctcgacaacaccattacgctaacaatataactacaaattaaactaacgaaaccgtaacaaccgtaactaacgaatatccgttcgcgtcttaacaacattatacgcgccgatacgctaaaaaaaccgctaaactaccaaacgattatcgaactttctaacgaaaatctacatcgactttctcatcaaccgctacgctatctcgaccacgatcatctaataccgaaaaccaaccacgaacgcgatactacgttactcaatctactacgcaccaaaatacgaaaaaccgaaaccgtaacgacgcaaatctttatcacccgcaactttaaaatattacgcccgaacattttacaaacgctaaaccgcctttcgaacacgatctacgtaataataatcctaaacgtaacgaaacaaccgctaacgataaaacaaatccaacaacgactaaaaaaaacgcaataattattaaacg

SEQ ID NO: 5409 - DNA, 888 bp, Artificial Sequence
  chemically treated genomic DNA (Homo sapiens) CpG-island No: 5409
  unsure (706)
tcgttacgtagcgcgttttgtttttttggcgtaatgtcgatacggtagtaattggtcgcgcgtagaattcgtggaaagagtgtaatattcggcggatggaagaagataacgttcgtttggcgcggcgtagtagcggtggcggcgcggtgttttacgatttcggtaatatttgttttatttttatggttggtaagtcggagtacgataaaattatttttacgtcgattgtgtttaatgcgttgaacgcgttcggcgttagcgtcgaagcgttcggacgtaacgatttggtggtgaaaatcgtcgaaggcgatcgtaaagttttaggttcggtttatcgcgaaattaaagatcgcggtttttattacggtattttgttatttaatgtcgattttagtcgtttggtaaattattttaattcggataaaaagaaattggcggcgaaaggtattacgtcggtacgttttcgcgtgattaattttatcgagttgttgtcggggattatttatgagtaggtttgcgaggttataatcgaggtttttttcgtttattatggcgagcgcgtggaagcggaaattattttttcgaataaaacgttagatttgttaaatttcgtcgaaatttttgttcgttagagtagttgggaatggaatttcggttaggtttcggtattttcgtatttgttggatgaacgttttatttggggttncgtggaattgtatttcgacgttgaaaaaggttatattattcgcgtttaggtgtttatcgatagttttaatttcgcgtcgttggaagttttcgtcggacgattgtaaggttgtttgtatcgcgtagatatgttgtaataggagtgcgaagcgttgttggttgatttttcggaataggaaaaag

SEQ ID NO: 5410 - DNA, 888 bp, Artificial Sequence
  chemically treated genomic DNA (Homo sapiens) CpG-island No: 5410
  unsure (183)
ctttttcctattccgaaaaatcaaccaacaacgcttcgcactcctattacaacatatctacgcgatacaaacaaccttacaatcgtccgacgaaaacttccaacgacgcgaaattaaaactatcgataaacacctaaacgcgaataatataacctttttcaacgtcgaaatacaattccacgnaaccccaaataaaacgttcatccaacaaatacgaaaataccgaaacctaaccgaaattccattcccaactactctaacgaacaaaaatttcgacgaaatttaacaaatctaacgttttattcgaaaaaataatttccgcttccacgcgctcgccataataaacgaaaaaaacctcgattataacctcgcaaacctactcataaataatccccgacaacaactcgataaaattaatcacgcgaaaacgtaccgacgtaatacctttcgccgccaatttctttttatccgaattaaaataatttaccaaacgactaaaatcgacattaaataacaaaataccgtaataaaaaccgcgatctttaatttcgcgataaaccgaacctaaaactttacgatcgccttcgacgattttcaccaccaaatcgttacgtccgaacgcttcgacgctaacgccgaacgcgttcaacgcattaaacacaatcgacgtaaaaataattttatcgtactccgacttaccaaccataaaaataaaacaaatattaccgaaatcgtaaaacaccgcgccgccaccgctactacgccgcgccaaacgaacgttatcttcttccatccgccgaatattacactctttccacgaattctacgcgcgaccaattactaccgtatcgacattacgccaaaaaaacaaaacgcgctacgtaacga

SEQ ID NO: 5411 - DNA, 888 bp, Artificial Sequence
  chemically treated genomic DNA (Homo sapiens) CpG-island No: 5411
  unsure (183)
tttttttttgtttcgggaagttaattaatagcgtttcgtatttttgttgtagtatatttgcgcggtataggtagttttgtagtcgttcggcgagggtttttagcggcgcggggttgaggttgtcggtaaatatttgggcgcgggtgatatggttttttttaacgtcgaaatgtagttttacgngattttaggtaaagcgtttatttagtagatgcgagaatgtcggagtttgatcgaagttttatttttagttattttggcgggtaaaggtttcggcgaagtttggtaagtttggcgttttgttcggggagatgattttcgtttttacgcgttcgttataatgggcgaaaaaggtttcggttatggtttcgtaaatttgtttatgggtgattttcggtaatagttcggtgaggttggttacgcgggaacgtatcgacgtaatgtttttcgtcgttagtttttttttattcggattgagatagtttgttaggcggttgaggtcggtattgagtagtaaggtgtcgtggtggaagtcgcgatttttggtttcgcgataggtcgagtttgagattttgcggtcgttttcgacggtttttattattagatcgttacgttcggacgtttcggcgttgacgtcgagcgcgtttagcgtattgagtataatcgacgtggagatagttttatcgtatttcggtttgttagttataaaggtaaagtaggtattgtcgagatcgtggaatatcgcgtcgttatcgttattgcgtcgcgttaggcggacgttatttttttttattcgtcgggtattatattttttttacgggttttgcgcgcgattaattattatcgtgtcggtattgcgttagagaaatagaacgcgttgcgtggcgg

SEQ ID NO: 5412 - DNA, 888 bp, Artificial Sequence
  chemically treated genomic DNA (Homo sapiens) CpG-island No: 5412
  unsure (706)
ccgccacgcaacgcgttctatttctctaacgcaataccgacacgataataattaatcgcgcgcaaaacccgtaaaaaaaatataatacccgacgaataaaaaaaaataacgtccgcctaacgcgacgcaataacgataacgacgcgatattccacgatctcgacaatacctactttacctttataactaacaaaccgaaatacgataaaactatctccacgtcgattatactcaatacgctaaacgcgctcgacgtcaacgccgaaacgtccgaacgtaacgatctaataataaaaaccgtcgaaaacgaccgcaaaatctcaaactcgacctatcgcgaaaccaaaaatcgcgacttccaccacgacaccttactactcaataccgacctcaaccgcctaacaaactatctcaatccgaataaaaaaaaactaacgacgaaaaacattacgtcgatacgttcccgcgtaaccaacctcaccgaactattaccgaaaatcacccataaacaaatttacgaaaccataaccgaaacctttttcgcccattataacgaacgcgtaaaaacgaaaatcatctccccgaacaaaacgccaaacttaccaaacttcgccgaaacctttacccgccaaaataactaaaaataaaacttcgatcaaactccgacattctcgcatctactaaataaacgctttacctaaaatcncgtaaaactacatttcgacgttaaaaaaaaccatatcacccgcgcccaaatatttaccgacaacctcaaccccgcgccgctaaaaaccctcgccgaacgactacaaaactacctataccgcgcaaatatactacaacaaaaatacgaaacgctattaattaacttcccgaaacaaaaaaaaa

SEQ ID NO: 5413 - DNA, 532 bp, Artificial Sequence
  chemically treated genomic DNA (Homo sapiens) CpG-island No: 5413
cgttagttagaaatttttgttttgtatcgtttatcggaaaaaaaacgtcgggtaatttttagcgttttacgtttggcgtaggaattgggcgcggagacggtaatattttttgatttagcggaagagaaagcggtagtgcgttatgttcgtgaatataatttcggtaagattattttcggtcgttcggtttcgcgtcgttggtggcgtcgggaaacgtttgttgatcgattggcgcgtatcgttttcgatttcgattaggtgttggtcgcgtttgatgaattattcgttcgtacgattaataacgcgtcggataatcgtttttttaaagataagtggcgtgtataaatttagggatgcgtggttgtcgtcgcgttatgcgtcgttattattttaattgttatgtagtggttgatggcgtttgatgtcgttaatttggtgaatgttgtatttgtttggcgtggtggtggtggcgttattttatggacgttggtttttagtggttgttatcgttattaatgtagtgagtttcgat

SEQ ID NO: 5414 - DNA, 532 bp, Artificial Sequence
  chemically treated genomic DNA (Homo sapiens) CpG-island No: 5414
atcgaaactcactacattaataacgataacaaccactaaaaaccaacgtccataaaataacgccaccaccaccacgccaaacaaatacaacattcaccaaattaacgacatcaaacgccatcaaccactacataacaattaaaataataacgacgcataacgcgacgacaaccacgcatccctaaatttatacacgccacttatctttaaaaaaacgattatccgacgcgttattaatcgtacgaacgaataattcatcaaacgcgaccaacacctaatcgaaatcgaaaacgatacgcgccaatcgatcaacaaacgtttcccgacgccaccaacgacgcgaaaccgaacgaccgaaaataatcttaccgaaattatattcacgaacataacgcactaccgctttctcttccgctaaatcaaaaaatattaccgtctccgcgcccaattcctacgccaaacgtaaaacgctaaaaattacccgacgttttttttccgataaacgatacaaaacaaaaatttctaactaacg

SEQ ID NO: 5415 - DNA, 532 bp, Artificial Sequence
  chemically treated genomic DNA (Homo sapiens) CpG-island No: 5415
atcgaaatttattatattaatgacggtggtaattattgaaggttagcgtttataaaatagcgttattattattacgttaagtagatatagtatttattaggttggcggtattaaacgttattagttattgtatggtaattaaggtgataacggcgtataacgcggcggtaattacgtatttttgaatttgtatacgttatttgtttttaaaagagcggttattcggcgcgttgttaatcgtgcgggcgggtggtttattaagcgcgattagtatttgatcgagatcgggggcgatgcgcgttagtcggttagtaaacgtttttcgacgttattagcggcgcgaggtcgggcgatcgagaataattttgtcgagattatgtttacgggtataacgtattatcgttttttttttcgttggattagaaagtgttgtcgttttcgcgtttagtttttgcgttagacgtaaggcgttgagaattgttcgacgtttttttttcggtaagcggtgtagggtaggggtttttaattggcg

SEQ ID NO: 5416 - DNA, 532 bp, Artificial Sequence
  chemically treated genomic DNA (Homo sapiens) CpG-island No: 5416
cgccaattaaaaacccctaccctacaccgcttaccgaaaaaaaaacgtcgaacaattctcaacgccttacgtctaacgcaaaaactaaacgcgaaaacgacaacactttctaatccaacgaaaaaaaaaacgataatacgttatacccgtaaacataatctcgacaaaattattctcgatcgcccgacctcgcgccgctaataacgtcgaaaaacgtttactaaccgactaacgcgcatcgcccccgatctcgatcaaatactaatcgcgcttaataaaccacccgcccgcacgattaacaacgcgccgaataaccgctcttttaaaaacaaataacgtatacaaattcaaaaatacgtaattaccgccgcgttatacgccgttatcaccttaattaccatacaataactaataacgtttaataccgccaacctaataaatactatatctacttaacgtaataataataacgctattttataaacgctaaccttcaataattaccaccgtcattaatataataaatttcgat

SEQ ID NO: 5417 - DNA, 695 bp, Artificial Sequence
  chemically treated genomic DNA (Homo sapiens) CpG-island No: 5417
cgcgagcgtgggatcgcgtgtcgatgttaaagaagttttgtgggcgcgtttatttacgtttgcggaaaatttgtgatttgtaaaagaggtatgtcgtttgtggtcgaagcgatgaggtgttgggcggtattggttattgcgaggagagtgagttgtcgcggtttatcgggagatgtcggtaaatagtatttgggacggtttcggtatttatggtttggttgtgttgcgcgtttttagttagtagcgggggtttcgatttattcggagttttgtggtcgttacgggtcggttcgtattggtcggcgggtcggttaagtcgcgcgggttgtcgttggaattggcgcggattttttcgatttttggtgggtttttgtgatttttttcgtatggcggtttgttcgcgttattcggggtgtgttgggtttagatttgggcgggggttttgatataggcgtttgaaaatttgagtttttattttgtagtttattttagagattttcgtcgcgatgtgatttcgttgatgttggggtcgatggtcgtagtttgcggcggtatatttcgatgatttttggtcgcggtttcggttatattggcggtacgtcgataaattggaatttatttttggtttcgatattttttcggatgataacgttttcgcgaaattattaaagacgtcggcgtggcgattatcggtt

SEQ ID NO: 5418 - DNA, 695 bp, Artificial Sequence
  chemically treated genomic DNA (Homo sapiens) CpG-island No: 5418
aaccgataatcgccacgccgacgtctttaataatttcgcgaaaacgttatcatccgaaaaaatatcgaaaccaaaaataaattccaatttatcgacgtaccgccaatataaccgaaaccgcgaccaaaaatcatcgaaatataccgccgcaaactacgaccatcgaccccaacatcaacgaaatcacatcgcgacgaaaatctctaaaataaactacaaaataaaaactcaaattttcaaacgcctatatcaaaacccccgcccaaatctaaacccaacacaccccgaataacgcgaacaaaccgccatacgaaaaaaatcacaaaaacccaccaaaaatcgaaaaaatccgcgccaattccaacgacaacccgcgcgacttaaccgacccgccgaccaatacgaaccgacccgtaacgaccacaaaactccgaataaatcgaaacccccgctactaactaaaaacgcgcaacacaaccaaaccataaataccgaaaccgtcccaaatactatttaccgacatctcccgataaaccgcgacaactcactctcctcgcaataaccaataccgcccaacacctcatcgcttcgaccacaaacgacatacctcttttacaaatcacaaattttccgcaaacgtaaataaacgcgcccacaaaacttctttaacatcgacacgcgatcccacgctcgcg

SEQ ID NO: 5419 - DNA, 695 bp, Artificial Sequence
  chemically treated genomic DNA (Homo sapiens) CpG-island No: 5419
gatcgataatcgttacgtcgacgtttttaataatttcgcggaaacgttgttattcgggaaaatgtcgaagttagggatggattttagtttgtcggcgtatcgttagtatgatcgaggtcgcgattagagattatcggaatatatcgtcgtaggttgcgattatcggttttaatattagcgaagttatatcgcgacggggatttttagagtggattgtaggatggaaatttaggtttttaaacgtttgtgttaaaattttcgtttaaatttggatttagtatatttcggataacgcggataagtcgttatgcggaaaaagttataggggtttattaagaatcgagggaattcgcgttagttttaacggtaattcgcgcggtttaatcgattcgtcgattaatgcggatcggttcgtaacggttataaggtttcgaataagtcgaaattttcgttgttaattgagaacgcgtaatatagttaggttataaatgtcggaatcgttttaaatattgtttatcggtatttttcggtaagtcgcggtagtttatttttttcgtaataattaatgtcgtttagtattttatcgtttcggttataaacggtatattttttttgtagattataaatttttcgtaggcgtaaataaacgcgtttatagggtttttttggtatcggtacgcggttttacgttcgcg

SEQ ID NO: 5420 - DNA, 695 bp, Artificial Sequence
  chemically treated genomic DNA (Homo sapiens) CpG-island No: 5420
cgcgaacgtaaaaccgcgtaccgataccaaaaaaaccctataaacgcgtttatttacgcctacgaaaaatttataatctacaaaaaaaatataccgtttataaccgaaacgataaaatactaaacgacattaattattacgaaaaaaataaactaccgcgacttaccgaaaaataccgataaacaatatttaaaacgattccgacatttataacctaactatattacgcgttctcaattaacaacgaaaatttcgacttattcgaaaccttataaccgttacgaaccgatccgcattaatcgacgaatcgattaaaccgcgcgaattaccgttaaaactaacgcgaattccctcgattcttaataaacccctataactttttccgcataacgacttatccgcgttatccgaaatatactaaatccaaatttaaacgaaaattttaacacaaacgtttaaaaacctaaatttccatcctacaatccactctaaaaatccccgtcgcgatataacttcgctaatattaaaaccgataatcgcaacctacgacgatatattccgataatctctaatcgcgacctcgatcatactaacgatacgccgacaaactaaaatccatccctaacttcgacattttcccgaataacaacgtttccgcgaaattattaaaaacgtcgacgtaacgattatcgatc

SEQ ID NO: 5421 - DNA, 797 bp, Artificial Sequence
  chemically treated genomic DNA (Homo sapiens) CpG-island No: 5421
acgtaatcgtggattttatttcgttgattatcgtttttattttggcgaagaatttgcggaaggtttggacgcgttggtgatggacgtgaaagtgggtagggcgcgtttatgtcgatttacgaattttttgaagtttttgtcgaagcgatgttggcgtggttaacggcgttggcgtgcgtattatcgcgttgtttattatatgaattaggtattggtttttagtgtaggtaacgcggttgaagttcggaagcggtgtagtttttgacgggtgaatatcgtaattcgcgttttgttgtgttacgatggcgttgtgcgtggagatgttgattttcggtaaattggcgaagatgacgtcgaagcgcgcgcgaaattgtaggcggtgttggataacggaaagcggtagaagtttttggtcgtatggtagcggtataaaaaggttcgacgatttcgttgagaattacgcgaagtatttgtcgatagcgatgttgacgaagtagtttatgttgatatcgaaggttttgttagtgaaatggatattcggcgttggggatggtagtggttgtaatgggcggcggacgtcgttaggtattgatattatcgattatagcgtcggttttattgatatggcgcgtttgggtattaggtagacggttagcgttcgttggcggttatttacgcgaaagacgaaataattggtaggaagcggcgaaagcggtgaaagcggtaattaaatttgcgataaagtatcggaaagtatattaattgttatcgtcgattagcgaatacggatattgatt

SEQ ID NO: 5422 - DNA, 797 bp, Artificial Sequence
  chemically treated genomic DNA (Homo sapiens) CpG-island No: 5422
aatcaatatccgtattcgctaatcgacgataacaattaatatactttccgatactttatcgcaaatttaattaccgctttcaccgctttcgccgcttcctaccaattatttcgtctttcgcgtaaataaccgccaacgaacgctaaccgtctacctaatacccaaacgcgccatatcaataaaaccgacgctataatcgataatatcaatacctaacgacgtccgccgcccattacaaccactaccatccccaacgccgaatatccatttcactaacaaaaccttcgatatcaacataaactacttcgtcaacatcgctatcgacaaatacttcgcgtaattctcaacgaaatcgtcgaacctttttataccgctaccatacgaccaaaaacttctaccgctttccgttatccaacaccgcctacaatttcgcgcgcgcttcgacgtcatcttcgccaatttaccgaaaatcaacatctccacgcacaacgccatcgtaacacaacaaaacgcgaattacgatattcacccgtcaaaaactacaccgcttccgaacttcaaccgcgttacctacactaaaaaccaatacctaattcatataataaacaacgcgataatacgcacgccaacgccgttaaccacgccaacatcgcttcgacaaaaacttcaaaaaattcgtaaatcgacataaacgcgccctacccactttcacgtccatcaccaacgcgtccaaaccttccgcaaattcttcgccaaaataaaaacgataatcaacgaaataaaatccacgattacgt

SEQ ID NO: 5423 - DNA, 797 bp, Artificial Sequence
  chemically treated genomic DNA (Homo sapiens) CpG-island No: 5423
gattagtattcgtattcgttgatcggcgatgatagttggtgtgtttttcggtgttttatcgtaagtttaattgtcgtttttatcgttttcgtcgttttttgttagttgtttcgtttttcgcgtggataatcgttagcggacgttgatcgtttatttggtgtttagacgcgttatattagtaaagtcgacgttgtaatcgatggtgttaatgtttgacggcgttcgtcgtttattgtaattattgttatttttagcgtcgggtatttattttattgataaaattttcggtattagtatagattgtttcgttagtatcgttgtcggtagatatttcgcgtagtttttaacgaagtcgtcgggtttttttgtgtcgttattatacgattaaagatttttgtcgtttttcgttgtttagtatcgtttgtaatttcgcgcgcgtttcggcgttattttcgttagtttgtcggagattagtatttttacgtatagcgttatcgtgatataataagacgcgggttacgatatttattcgttagaaattgtatcgttttcgaattttaatcgcgttatttgtattggaggttagtatttgatttatgtggtgagtagcgcggtggtgcgtacgttagcgtcgttagttacgttaatatcgtttcggtaagggttttagagagttcgtaggtcggtataaacgcgttttatttatttttacgtttattattagcgcgtttagatttttcgtaagtttttcgttagaatagaggcggtgattagcgggatggagtttacggttgcgt

SEQ ID NO: 5424 - DNA, 797 bp, Artificial Sequence
  chemically treated genomic DNA (Homo sapiens) CpG-island No: 5424
acgcaaccgtaaactccatcccgctaatcaccgcctctattctaacgaaaaacttacgaaaaatctaaacgcgctaataataaacgtaaaaataaataaaacgcgtttataccgacctacgaactctctaaaacccttaccgaaacgatattaacgtaactaacgacgctaacgtacgcaccaccgcgctactcaccacataaatcaaatactaacctccaatacaaataacgcgattaaaattcgaaaacgatacaatttctaacgaataaatatcgtaacccgcgtcttattatatcacgataacgctatacgtaaaaatactaatctccgacaaactaacgaaaataacgccgaaacgcgcgcgaaattacaaacgatactaaacaacgaaaaacgacaaaaatctttaatcgtataataacgacacaaaaaaacccgacgacttcgttaaaaactacgcgaaatatctaccgacaacgatactaacgaaacaatctatactaataccgaaaattttatcaataaaataaatacccgacgctaaaaataacaataattacaataaacgacgaacgccgtcaaacattaacaccatcgattacaacgtcgactttactaatataacgcgtctaaacaccaaataaacgatcaacgtccgctaacgattatccacgcgaaaaacgaaacaactaacaaaaaacgacgaaaacgataaaaacgacaattaaacttacgataaaacaccgaaaaacacaccaactatcatcgccgatcaacgaatacgaatactaatc

SEQ ID NO: 5425 - DNA, 936 bp, Artificial Sequence
  chemically treated genomic DNA (Homo sapiens) CpG-island No: 5425
acgtcggggttgatattttgggttaatcgtagaagtttgtgttaaaggcgaagcgtgataacggtcgtaaagtcgtatatttgtcggtattttatttgttgatcgtttaggaagttagtaaagagtaaatgtagatttcgatattttggcgcgttcggcgttttattttatcgtttcgtagtaacgcgggaagaatatttgaagaaagggttaattaattcggatgcgacgtcggatagacgcgcgtcgcggtgaaagcgatcgaaacgtttaacggtaattggttttatcgggcggtgcggtgaaatttaatatcgttatatcgtcggtgatcggcgttggtttttcggtaattagatttggtcgtgggatatttggaagtagcgtttgcgatggcgtattttaattcggatatcgttaaagagaatatttcgcggtttttttttggtagatttagtttggcgatagcgtgcgttcgtagatgtgggttttgttttcgatttgatagcgtggaattttagtttcgagcgggtggcgatggcggtaattggaacgaacgtaatattaaatttagttttgcgtttggtcggtgatggaagtgtataacgttatttaagataaaatttggtggtagagatgtattcgaaattggtggtttattacgattggtggttacgaatcgcgattataacggtaacggcgtgtcggaatatggcgcgattcgcgtaaagtttataatattgagagcggcgagatgttgtttacggtgaaaaaagcgataaagaagagacgtagtttgggttgaataattacgttcgcgtggtgagaaaggttagtacgatagtttggaaatttcggtataggttgttgtatgtgggaatcggggcgtgatgatgtcgtcgtttttgggtttatcgataaaaatagttggataat

SEQ ID NO: 5426 - DNA, 936 bp, Artificial Sequence
  chemically treated genomic DNA (Homo sapiens) CpG-island No: 5426
attatccaactatttttatcgataaacccaaaaacgacgacatcatcacgccccgattcccacatacaacaacctataccgaaatttccaaactatcgtactaacctttctcaccacgcgaacgtaattattcaacccaaactacgtctcttctttatcgcttttttcaccgtaaacaacatctcgccgctctcaatattataaactttacgcgaatcgcgccatattccgacacgccgttaccgttataatcgcgattcgtaaccaccaatcgtaataaaccaccaatttcgaatacatctctaccaccaaattttatcttaaataacgttatacacttccatcaccgaccaaacgcaaaactaaatttaatattacgttcgttccaattaccgccatcgccacccgctcgaaactaaaattccacgctatcaaatcgaaaacaaaacccacatctacgaacgcacgctatcgccaaactaaatctaccaaaaaaaaaccgcgaaatattctctttaacgatatccgaattaaaatacgccatcgcaaacgctacttccaaatatcccacgaccaaatctaattaccgaaaaaccaacgccgatcaccgacgatataacgatattaaatttcaccgcaccgcccgataaaaccaattaccgttaaacgtttcgatcgctttcaccgcgacgcgcgtctatccgacgtcgcatccgaattaattaaccctttcttcaaatattcttcccgcgttactacgaaacgataaaataaaacgccgaacgcgccaaaatatcgaaatctacatttactctttactaacttcctaaacgatcaacaaataaaataccgacaaatatacgactttacgaccgttatcacgcttcgcctttaacacaaacttctacgattaacccaaaatatcaaccccgacgt

SEQ ID NO: 5427 - DNA, 936 bp, Artificial Sequence
  chemically treated genomic DNA (Homo sapiens) CpG-island No: 5427
attatttaattgtttttgtcgataaatttaaagacggcggtattattacgtttcgatttttatatgtagtaatttgtgtcggaatttttagattgtcgtattggttttttttattacgcgggcgtagttgtttagtttagattgcgttttttttttatcgttttttttatcgtaaatagtatttcgtcgtttttagtgttgtgggttttgcgcgggtcgcgttatatttcggtacgtcgttgtcgttgtgatcgcggttcgtaattattagtcgtgataggttattagtttcgggtatatttttgttattaggttttattttgggtgacgttatatatttttattatcgattaggcgtaaggttgggtttggtattacgttcgttttagttgtcgttatcgttattcgttcggggttaaggttttacgttattaggtcggggataaagtttatatttgcggacgtacgttatcgttaggttggatttgttaggagaagatcgcgggatattttttttggcgatgttcggattgaaatgcgttatcgtaaacgttgtttttaggtattttacggttaggtttgattgtcggagaattagcgtcggttatcgacggtgtaacggtgttaaattttatcgtatcgttcggtgaggttagttatcgttgagcgtttcgatcgtttttatcgcgacgcgcgtttgttcggcgtcgtattcggattggttaattttttttttaggtatttttttcgcgttgttgcgaggcggtgagataaaacgtcggacgcgttagaatatcgggatttgtatttgttttttgttaattttttgagcggttagtagatgggatatcggtagatgtgcggttttacgatcgttattacgtttcgtttttggtataagtttttgcgattgatttagggtgttagtttcgacgt

SEQ ID NO: 5428 - DNA, 936 bp, Artificial Sequence
  chemically treated genomic DNA (Homo sapiens) CpG-island No: 5428
acgtcgaaactaacaccctaaatcaatcgcaaaaacttataccaaaaacgaaacgtaataacgatcgtaaaaccgcacatctaccgatatcccatctactaaccgctcaaaaaattaacaaaaaacaaatacaaatcccgatattctaacgcgtccgacgttttatctcaccgcctcgcaacaacgcgaaaaaaatacctaaaaaaaaaattaaccaatccgaatacgacgccgaacaaacgcgcgtcgcgataaaaacgatcgaaacgctcaacgataactaacctcaccgaacgatacgataaaatttaacaccgttacaccgtcgataaccgacgctaattctccgacaatcaaacctaaccgtaaaatacctaaaaacaacgtttacgataacgcatttcaatccgaacatcgccaaaaaaaatatcccgcgatcttctcctaacaaatccaacctaacgataacgtacgtccgcaaatataaactttatccccgacctaataacgtaaaaccttaaccccgaacgaataacgataacgacaactaaaacgaacgtaataccaaacccaaccttacgcctaatcgataataaaaatatataacgtcacccaaaataaaacctaataacaaaaatatacccgaaactaataacctatcacgactaataattacgaaccgcgatcacaacgacaacgacgtaccgaaatataacgcgacccgcgcaaaacccacaacactaaaaacgacgaaatactatttacgataaaaaaaacgataaaaaaaaaacgcaatctaaactaaacaactacgcccgcgtaataaaaaaaaccaatacgacaatctaaaaattccgacacaaattactacatataaaaatcgaaacgtaataataccgccgtctttaaatttatcgacaaaaacaattaaataat

SEQ ID NO: 5429 - DNA, 519 bp, Artificial Sequence
  chemically treated genomic DNA (Homo sapiens) CpG-island No: 5429
tcgtcgcgtttgatttcgggagaaggtttcggtattttgaataatttttttttgtcgttttttttttttttataatagttttagttttaaaatggcgtcgattcgattcgtaatgttttgggttagtttcgcgagatcgtgtatagtggcgaggcggggaaggaattagagggttgaggagggagggaaggcggggcgaggagaaggagggagaaagagtgtgaagaagcggtgcgaacgaatttattgggcgggatattaggaagagcgttttattagagaattttttggtttaagtaatcgtttacgtcgcggtttaaaagtttcggtttttacgtcgggcgtttggaggggaagggggagaaggcgtgtttaaggttgggggtcgggtttcgaggaaggttcgggaattagggcggcggggggcggtggttttacgcggtttttattgttaaatattttttttaggttcgttttataatttttaaagtttagggttatttttagtttttgaaatgt

SEQ ID NO: 5430 - DNA, 519 bp, Artificial Sequence
  chemically treated genomic DNA (Homo sapiens) CpG-island No: 5430
acatttcaaaaactaaaaataaccctaaactttaaaaattataaaacgaacctaaaaaaaatatttaacaataaaaaccgcgtaaaaccaccgccccccgccgccctaattcccgaaccttcctcgaaacccgacccccaaccttaaacacgccttctcccccttcccctccaaacgcccgacgtaaaaaccgaaacttttaaaccgcgacgtaaacgattacttaaaccaaaaaattctctaataaaacgctcttcctaatatcccgcccaataaattcgttcgcaccgcttcttcacactctttctccctccttctcctcgccccgccttccctccctcctcaaccctctaattccttccccgcctcgccactatacacgatctcgcgaaactaacccaaaacattacgaatcgaatcgacgccattttaaaactaaaactattataaaaaaaaaaaaaacgacaaaaaaaaattattcaaaataccgaaaccttctcccgaaatcaaacgcgacga

SEQ ID NO: 5431 - DNA, 519 bp, Artificial Sequence
  chemically treated genomic DNA (Homo sapiens) CpG-island No: 5431
atattttaagggttagagatgattttaggttttgaggattgtgaaacgagtttgggagaagtgtttgataatgaaaatcgcgtggagttatcgtttttcgtcgttttggttttcgggtttttttcgaagttcggtttttagttttaagtacgttttttttttttttttttttaggcgttcgacgtagaggtcggagtttttggatcgcggcgtgagcggttgtttgggttagaaggttttttggtggagcgttttttttggtgtttcgtttagtaggttcgttcgtatcgtttttttatatttttttttttttttttttttcgtttcgttttttttttttttttaattttttagtttttttttcgtttcgttattgtgtacgatttcgcgagattggtttagaatattgcggatcgggtcggcgttattttgggattgagattgttgtgggggagggaaaagcggtaaaaggggattatttaaagtatcgaaattttttttcgggattaggcgcggcgg

SEQ ID NO: 5432 - DNA, 519 bp, Artificial Sequence
  chemically treated genomic DNA (Homo sapiens) CpG-island No: 5432
ccgccgcgcctaatcccgaaaaaaaatttcgatactttaaataatccccttttaccgcttttccctcccccacaacaatctcaatcccaaaataacgccgacccgatccgcaatattctaaaccaatctcgcgaaatcgtacacaataacgaaacgaaaaaaaaactaaaaaattaaaaaaaaaaaaaaaacgaaacgaaaaaaaaaaaaaaaaaaaaatataaaaaaacgatacgaacgaacctactaaacgaaacaccaaaaaaaacgctccaccaaaaaaccttctaacccaaacaaccgctcacgccgcgatccaaaaactccgacctctacgtcgaacgcctaaaaaaaaaaaaaaaaaaaacgtacttaaaactaaaaaccgaacttcgaaaaaaacccgaaaaccaaaacgacgaaaaacgataactccacgcgattttcattatcaaacacttctcccaaactcgtttcacaatcctcaaaacctaaaatcatctctaacccttaaaatat

SEQ ID NO: 5433 - DNA, 507 bp, Artificial Sequence
  chemically treated genomic DNA (Homo sapiens) CpG-island No: 5433
ttgggacgggggaaaggagacgttttttttttttgttgtttttttcgttttcgagattagcggcggcggtgatcgcgagtgggtcggtatcgttttcggtttcgggtgcgaataatgttgattgatagcggaggcggcggtattttttttgaggaggatttggattttgtggtttcgcgattcgttttagttggggtttcggagtcgttttcgtcgggaggggtcggtttggggattcgtatcgtgaggttttttggggaggtcgggttagcgtcgggagtcggtagtagcggcggcggcggtagcggtagcggtacgggcggaggggacgcggcgttggattttaagttggcggttgtcgtgttgaggatcgggggtggaggtggtgtttttggtagtgacgaggacgaagtgttcgaggtaaggtttcgggattttcgttttttatatattgtgaggcgtgaattttttttgggtaggttttgggtcggggttattttttcgttt

SEQ ID NO: 5434 - DNA, 507 bp, Artificial Sequence
  chemically treated genomic DNA (Homo sapiens) CpG-island No: 5434
aaacgaaaaaataaccccgacccaaaacctacccaaaaaaaattcacgcctcacaatatataaaaaacgaaaatcccgaaaccttacctcgaacacttcgtcctcgtcactaccaaaaacaccacctccacccccgatcctcaacacgacaaccgccaacttaaaatccaacgccgcgtcccctccgcccgtaccgctaccgctaccgccgccgccgctactaccgactcccgacgctaacccgacctccccaaaaaacctcacgatacgaatccccaaaccgacccctcccgacgaaaacgactccgaaaccccaactaaaacgaatcgcgaaaccacaaaatccaaatcctcctcaaaaaaaataccgccgcctccgctatcaatcaacattattcgcacccgaaaccgaaaacgataccgacccactcgcgatcaccgccgccgctaatctcgaaaacgaaaaaaacaacaaaaaaaaaaaacgtctcctttcccccgtcccaa

SEQ ID NO: 5435 - DNA, 507 bp, Artificial Sequence
  chemically treated genomic DNA (Homo sapiens) CpG-island No: 5435
aagcgggaggatggtttcggtttagagtttatttaaagagaatttacgttttataatgtgtgggaggcgagggtttcggagttttatttcggatatttcgttttcgttattgttagaggtattatttttattttcggtttttagtacggtagtcgttaatttgaaatttagcgtcgcgtttttttcgttcgtatcgttgtcgttgtcgtcgtcgtcgttgttgtcgattttcgacgttggttcggtttttttaaagagttttacggtgcggatttttagatcgatttttttcggcggaggcggtttcgaggttttagttggggcggatcgcggagttatagagtttaggttttttttaaaggaggtgtcgtcgttttcgttattagttagtattgttcgtattcggagtcggagacggtgtcgatttattcgcggttatcgtcgtcgttgatttcgggaacgagaagagtagtaagaggaagaagcgttttttttttttcgttttag

SEQ ID NO: 5436 - DNA, 507 bp, Artificial Sequence
  chemically treated genomic DNA (Homo sapiens) CpG-island No: 5436
ctaaaacgaaaaaaaaaaaacgcttcttcctcttactactcttctcgttcccgaaatcaacgacgacgataaccgcgaataaatcgacaccgtctccgactccgaatacgaacaatactaactaataacgaaaacgacgacacctcctttaaaaaaaacctaaactctataactccgcgatccgccccaactaaaacctcgaaaccgcctccgccgaaaaaaatcgatctaaaaatccgcaccgtaaaactctttaaaaaaaccgaaccaacgtcgaaaatcgacaacaacgacgacgacgacaacgacaacgatacgaacgaaaaaaacgcgacgctaaatttcaaattaacgactaccgtactaaaaaccgaaaataaaaataatacctctaacaataacgaaaacgaaatatccgaaataaaactccgaaaccctcgcctcccacacattataaaacgtaaattctctttaaataaactctaaaccgaaaccatcctcccgctt

SEQ ID NO: 5437 - DNA, 535 bp, Artificial Sequence
  chemically treated genomic DNA (Homo sapiens) CpG-island No: 5437
ggttcgttattttgtatggtcgagcgggtattttcggtttcggcggggggttttttttttttttttttattgtaaggcggcggtaggagaggttgtggtgttagtttttttaagttatttagtgttattttcgtcgttgtagcgatatacgttttcgtcgtcgttatgattgagtagatgatttttcgtggtatttttaagggttataacggttgggtaatttagatcgttattatttcgtagttttcggatatgatttttttcgtttttcgaggtacggattaaggtagattttaggattcgagattgtagggttgggggatttcgcgtgtcgtgtagggaatttcgcgtgtggtgtggtaggtcggtggcgcgcgagttggcggggattgatagatttttttgttttattgtgaattggggcgtgcggattcgagtttaggttttaattcgggcgaattatattgtagatgagaatttacgtgtatattagttcgtagttgttaggagggttggagagttggaaatttttaaa

SEQ ID NO: 5438 - DNA, 535 bp, Artificial Sequence
  chemically treated genomic DNA (Homo sapiens) CpG-island No: 5438
tttaaaaatttccaactctccaaccctcctaacaactacgaactaatatacacgtaaattctcatctacaatataattcgcccgaattaaaacctaaactcgaatccgcacgccccaattcacaataaaacaaaaaaatctatcaatccccgccaactcgcgcgccaccgacctaccacaccacacgcgaaattccctacacgacacgcgaaatcccccaaccctacaatctcgaatcctaaaatctaccttaatccgtacctcgaaaaacgaaaaaaatcatatccgaaaactacgaaataataacgatctaaattacccaaccgttataacccttaaaaataccacgaaaaatcatctactcaatcataacgacgacgaaaacgtatatcgctacaacgacgaaaataacactaaataacttaaaaaaactaacaccacaacctctcctaccgccgccttacaataaaaaaaaaaaaaaaaaaccccccgccgaaaccgaaaatacccgctcgaccatacaaaataacgaacc

SEQ ID NO: 5439 - DNA, 535 bp, Artificial Sequence
  chemically treated genomic DNA (Homo sapiens) CpG-island No: 5439
tttaaaagtttttaattttttaatttttttagtagttgcgagttgatgtatacgtaggtttttatttgtaatgtggttcgttcgggttgaggtttaggttcgggttcgtacgttttaatttataatggggtagagaagtttgttagttttcgttaattcgcgcgttatcggtttgttatattatacgcggaattttttatacgatacgcggaattttttagttttgtaatttcgggttttgaaatttattttagttcgtatttcgagaggcggagaggattatgttcgggaattgcggggtagtagcgatttgggttatttagtcgttgtggtttttgagggtgttacgaagggttatttgtttagttatggcggcggcgagagcgtgtgtcgttgtagcgacgaggatggtattggatggtttagagaaattagtattataattttttttgtcgtcgttttgtagtgaaagagagagagaaaagtttttcgtcggaatcggaaatattcgttcgattatgtaaaatggcgagtt

SEQ ID NO: 5440 - DNA, 535 bp, Artificial Sequence
  chemically treated genomic DNA (Homo sapiens) CpG-island No: 5440
aactcgccattttacataatcgaacgaatatttccgattccgacgaaaaacttttctctctctctttcactacaaaacgacgacaaaaaaaattataatactaatttctctaaaccatccaataccatcctcgtcgctacaacgacacacgctctcgccgccgccataactaaacaaataacccttcgtaacaccctcaaaaaccacaacgactaaataacccaaatcgctactaccccgcaattcccgaacataatcctctccgcctctcgaaatacgaactaaaataaatttcaaaacccgaaattacaaaactaaaaaattccgcgtatcgtataaaaaattccgcgtataatataacaaaccgataacgcgcgaattaacgaaaactaacaaacttctctaccccattataaattaaaacgtacgaacccgaacctaaacctcaacccgaacgaaccacattacaaataaaaacctacgtatacatcaactcgcaactactaaaaaaattaaaaaattaaaaacttttaaa

SEQ ID NO: 5441 - DNA, 628 bp, Artificial Sequence
  chemically treated genomic DNA (Homo sapiens) CpG-island No: 5441
acgtcgattatagttggggaagggtggggcgtttgttgttttaattcgcgaagcgtttttttaggtttcgttttcggttcgattcggacgattttttgagttttttataacgaagtcgtttgtttagaagggtcggaagtattttagggcgcgtcgcggatttattttttcgttttcggtatcggttgtggggagtatcggttgtagtcggttgtgtcgggagggtaggatggcgtttggtcgatgcggtgatagtatcgaaagtagacggtcgttaggcgttttttttatttttcgaagtttttttttagcggcgggggatgggggtaggcggtttttttgttttttttgcgtttttcgcggttttttattatagagacgcgggtttttatcgttttagttttttcgttttgttttttagtgcggattagagcgttttttcgttattttttgtcgttttggggtttcgcggggaaaaagggggagtagtaggatagcggagggaagtcgcgagtttaggtggtgtgtagacgtcggaagtgttgggaaggaggtcggaagttaggggcggggttaggaagtgaggaggggcgggggtttatgaggagtttaagggagtatggggtag

SEQ ID NO: 5442 - DNA, 628 bp, Artificial Sequence
  chemically treated genomic DNA (Homo sapiens) CpG-island No: 5442
ctaccccatactcccttaaactcctcataaacccccgcccctcctcacttcctaaccccgcccctaacttccgacctccttcccaacacttccgacgtctacacaccacctaaactcgcgacttccctccgctatcctactactccccctttttccccgcgaaaccccaaaacgacaaaaaataacgaaaaaacgctctaatccgcactaaaaaacaaaacgaaaaaactaaaacgataaaaacccgcgtctctataataaaaaaccgcgaaaaacgcaaaaaaaacaaaaaaaccgcctacccccatcccccgccgctaaaaaaaaacttcgaaaaataaaaaaaacgcctaacgaccgtctactttcgatactatcaccgcatcgaccaaacgccatcctaccctcccgacacaaccgactacaaccgatactccccacaaccgataccgaaaacgaaaaaataaatccgcgacgcgccctaaaatacttccgacccttctaaacaaacgacttcgttataaaaaactcaaaaaatcgtccgaatcgaaccgaaaacgaaacctaaaaaaacgcttcgcgaattaaaacaacaaacgccccacccttccccaactataatcgacgt

SEQ ID NO: 5443 - DNA, 628 bp, Artificial Sequence
  chemically treated genomic DNA (Homo sapiens) CpG-island No: 5443
ttgttttatgtttttttggattttttataaattttcgtttttttttattttttggtttcgtttttagttttcggttttttttttaatattttcggcgtttatatattatttaagttcgcgattttttttcgttgttttgttatttttttttttttttcgcggggttttagggcgataggaaatggcgaggagacgttttagttcgtattagagaatagggcgggagggttaggacggtggaggttcgcgtttttgtggtaagaggtcgcggggaacgtagaaagaatagaggaatcgtttatttttatttttcgtcgttggggagaaatttcggggggtagggggagcgtttggcggtcgtttgttttcggtgttattatcgtatcggttagacgttattttattttttcggtatagtcgattgtagtcggtattttttatagtcgatgtcggaagcgagggggtgggttcgcggcgcgttttgaagtattttcggtttttttaggtagacgatttcgttgtggaggatttagagggtcgttcgggtcggatcgggggcggggtttgagaaagcgtttcgcgggttagggtagtagacgttttatttttttttaattgtagtcggcgt

SEQ ID NO: 5444 - DNA, 628 bp, Artificial Sequence
  chemically treated genomic DNA (Homo sapiens) CpG-island No: 5444
acgccgactacaattaaaaaaaaataaaacgtctactaccctaacccgcgaaacgctttctcaaaccccgcccccgatccgacccgaacgaccctctaaatcctccacaacgaaatcgtctacctaaaaaaaccgaaaatacttcaaaacgcgccgcgaacccaccccctcgcttccgacatcgactataaaaaataccgactacaatcgactataccgaaaaaataaaataacgtctaaccgatacgataataacaccgaaaacaaacgaccgccaaacgctccccctaccccccgaaatttctccccaacgacgaaaaataaaaataaacgattcctctattctttctacgttccccgcgacctcttaccacaaaaacgcgaacctccaccgtcctaaccctcccgccctattctctaatacgaactaaaacgtctcctcgccatttcctatcgccctaaaaccccgcgaaaaaaaaaaaaaaataacaaaacaacgaaaaaaaatcgcgaacttaaataatatataaacgccgaaaatattaaaaaaaaaaccgaaaactaaaaacgaaaccaaaaaataaaaaaaaacgaaaatttataaaaaatccaaaaaaacataaaacaa

SEQ ID NO: 5445 - DNA, 941 bp, Artificial Sequence
  chemically treated genomic DNA (Homo sapiens) CpG-island No: 5445
  unsure (40, 61, 64, 84, 152, 199, 202..)
tttatatcgttttgtattatgacgtatttattcggtttanttatttttaaggcgtatttantanttcggcggtattcggaattntttacgaatttaacgtaacggtcggtgatatatgagtgacggtttcgatttggattatggaaacgggntatagtggcgtgtcgtaagggaagtttttattttttttttacggcgntgnnnttattggcgtttagcggttgggtatgaaaacgttgtgtttcggtacgtaaggttaatatgttgaggttgtgcgttagtagtttttttagaattagacgacgttgcgtcggatgttgttcggtttttagatcgttaagttgtagcgtcggtggcgggcggtgtaaagtgcgtaacgttttcggtagcgttattattttttgtgatagtttcggcggtaggagttttttaatggcgtaggtgtcgagtagatttagcgtttggtcggttaatttacgtagcgtggtttgttttacgtttttcgttgttggataaatcggcgtgagcgttttttgtaattttggcgtgttgagatcgttttgtacgcggtatttcgggtggattattttcgtattatatttatcgcgttttgtttcgttataagttagtatacggcggatcgtcgttaggttattttttattgtcgcgttgaaattgaaaaagcgtatggtgaggatgtcggaatcgtcgttgatttggtaggttattattcgacgatcgtcgaaggagattttgtagtttagtatttcgttttttatcgtggtataaacgttcggtagtagttttcgatggggtagagatgggtgcgattttcgtacgtagggaaggtgtagagtagattttgacggtatgcggtgattacgtagttgtattagtgtggttaagtcgataggaatggtggaaggttacgggatttttga

SEQ ID NO: 5446 - DNA, 941 bp, Artificial Sequence
  chemically treated genomic DNA (Homo sapiens) CpG-island No: 5446
  unsure (738..739, 743, 790, 858, 878, 881, 902)
tcaaaaatcccgtaaccttccaccattcctatcgacttaaccacactaatacaactacgtaatcaccgcataccgtcaaaatctactctacaccttccctacgtacgaaaatcgcacccatctctaccccatcgaaaactactaccgaacgtttataccacgataaaaaacgaaatactaaactacaaaatctccttcgacgatcgtcgaataataacctaccaaatcaacgacgattccgacatcctcaccatacgctttttcaatttcaacgcgacaataaaaaataacctaacgacgatccgccgtatactaacttataacgaaacaaaacgcgataaatataatacgaaaataatccacccgaaataccgcgtacaaaacgatctcaacacgccaaaattacaaaaaacgctcacgccgatttatccaacaacgaaaaacgtaaaacaaaccacgctacgtaaattaaccgaccaaacgctaaatctactcgacacctacgccattaaaaaactcctaccgccgaaactatcacaaaaaataataacgctaccgaaaacgttacgcactttacaccgcccgccaccgacgctacaacttaacgatctaaaaaccgaacaacatccgacgcaacgtcgtctaattctaaaaaaactactaacgcacaacctcaacatattaaccttacgtaccgaaacacaacgttttcatacccaaccgctaaacgccaataannncancgccgtaaaaaaaaaataaaaacttcccttacgacacgccactatancccgtttccataatccaaatcgaaaccgtcactcatatatcaccgaccgttacgttaaattcgtaaanaattccgaataccgccgaantantaaatacgccttaaaaataantaaaccgaataaatacgtcataatacaaaacgatataaa

SEQ ID NO: 5447 - DNA, 941 bp, Artificial Sequence
  chemically treated genomic DNA (Homo sapiens) CpG-island No: 5447
  unsure (738..739, 743, 790, 858, 878, 881, 902)
ttagaagtttcgtaattttttattatttttatcggtttggttatattagtataattgcgtaattatcgtatatcgttaggatttattttatattttttttgcgtacgaagatcgtatttatttttattttatcgagaattattgtcgggcgtttatgttacggtggaaggcgaagtgttgaattgtaagatttttttcggcggtcgtcggatgatgatttgttagattagcgacggtttcggtatttttattatgcgtttttttaattttagcgcggtaatgaaaaatagtttggcggcggttcgtcgtgtattggtttatggcgaagtaaagcgcggtaaatatggtgcggagatgatttattcggaatatcgcgtgtagggcgattttagtacgttagaattataggaaacgtttacgtcggtttatttaataacggaaggcgtaaagtaggttacgttgcgtaaattaatcgattaggcgttggatttgttcgatatttgcgttattgaagaatttttgtcgtcggaattgttataaggaatgatgacgttatcggaagcgttgcgtattttgtatcgttcgttatcgacgttatagtttagcgatttggaaatcgggtagtattcggcgtaacgtcgtttgattttggaagaattgttggcgtataattttagtatgttagttttacgtgtcggagtatagcgtttttatgtttagtcgttgagcgttaatgannntancgtcgtgagaagagagtagaagttttttttacgatacgttattgtanttcgtttttatagtttaaatcggggtcgttatttatgtgttatcggtcgttacgttgggttcgtgaangatttcggatgtcgtcgaantantaggtacgttttgggaatagntagatcggatgaatgcgttatggtgtagggcgatgtagg

SEQ ID NO: 5448 - DNA, 941 bp, Artificial Sequence
  chemically treated genomic DNA (Homo sapiens) CpG-island No: 5448
  unsure (40, 61, 64, 84, 152, 199, 202..)
cctacatcgccctacaccataacgcattcatccgatctanctattcccaaaacgtacctantanttcgacgacatccgaaatcnttcacgaacccaacgtaacgaccgataacacataaataacgaccccgatttaaactataaaaacgaantacaataacgtatcgtaaaaaaaacttctactctcttctcacgacgntannntcattaacgctcaacgactaaacataaaaacgctatactccgacacgtaaaactaacatactaaaattatacgccaacaattcttccaaaatcaaacgacgttacgccgaatactacccgatttccaaatcgctaaactataacgtcgataacgaacgatacaaaatacgcaacgcttccgataacgtcatcattccttataacaattccgacgacaaaaattcttcaataacgcaaatatcgaacaaatccaacgcctaatcgattaatttacgcaacgtaacctactttacgccttccgttattaaataaaccgacgtaaacgtttcctataattctaacgtactaaaatcgccctacacgcgatattccgaataaatcatctccgcaccatatttaccgcgctttacttcgccataaaccaatacacgacgaaccgccgccaaactatttttcattaccgcgctaaaattaaaaaaacgcataataaaaataccgaaaccgtcgctaatctaacaaatcatcatccgacgaccgccgaaaaaaatcttacaattcaacacttcgccttccaccgtaacataaacgcccgacaataattctcgataaaataaaaataaatacgatcttcgtacgcaaaaaaaatataaaataaatcctaacgatatacgataattacgcaattatactaatataaccaaaccgataaaaataataaaaaattacgaaacttctaa

SEQ ID NO: 5449 - DNA, 634 bp, Artificial Sequence
  chemically treated genomic DNA (Homo sapiens) CpG-island No: 5449
ttacgcgcggttaggttagttagtacgtcgtgcgttgtcgtacgtaggttttcggtggtcgtagaatttagcggtagttcgagggtggtattttcgagtgaaattttttagatgcgaatttttattattatcgatcggcgtttttatggagattggttttttggcgatttttagtattttgcggattttgtttttcggtattagtatacgtttagtcgttttgaagtgttgcgtagttttttggacgattaatcggtaggtcggattaggcgttacgtcgtattcggtattaggttttttgtataaacgttattttttcggtggcgttattttatcgtttacgtattattagcgtttggtttagttcgcgatacgttttaattagtttttttagtgaaacgcgatttatatcgttgggattttggtagtatttaaatttgcgtcgaattaatggtgagcgtttgttttttttattgtgtatcgtagttggttgaatgcgttgtttatatgtttgtttgtttagaatcgttaacgtttggcggttgataatttttaatgtttttaattagtttacgttcgtttgcgtgtagtttttgcgtttgaaattttattggtttgttatcgttggacggtt

SEQ ID NO: 5450 - DNA, 634 bp, Artificial Sequence
  chemically treated genomic DNA (Homo sapiens) CpG-island No: 5450
aaccgtccaacgataacaaaccaataaaatttcaaacgcaaaaactacacgcaaacgaacgtaaactaattaaaaacattaaaaattatcaaccgccaaacgttaacgattctaaacaaacaaacatataaacaacgcattcaaccaactacgatacacaataaaaaaaacaaacgctcaccattaattcgacgcaaatttaaatactaccaaaatcccaacgatataaatcgcgtttcactaaaaaaactaattaaaacgtatcgcgaactaaaccaaacgctaataatacgtaaacgataaaataacgccaccgaaaaaataacgtttatacaaaaaacctaataccgaatacgacgtaacgcctaatccgacctaccgattaatcgtccaaaaaactacgcaacacttcaaaacgactaaacgtatactaataccgaaaaacaaaatccgcaaaatactaaaaatcgccaaaaaaccaatctccataaaaacgccgatcgataataataaaaattcgcatctaaaaaatttcactcgaaaataccaccctcgaactaccgctaaattctacgaccaccgaaaacctacgtacgacaacgcacgacgtactaactaacctaaccgcgcgtaa

SEQ ID NO: 5451 - DNA, 634 bp, Artificial Sequence
  chemically treated genomic DNA (Homo sapiens) CpG-island No: 5451
gatcgtttaacggtgataagttaatgaagttttaaacgtaggagttatacgtaggcgggcgtaagttgattgaaaatattgaagattattagtcgttaggcgttggcgattttgggtaaataagtatatgaatagcgtatttagttagttgcggtgtatagtgggggaaataaacgtttattattggttcgacgtagatttgggtgttgttaaaattttagcggtgtaagtcgcgttttattggagaaattggttgaagcgtatcgcgagttggattaggcgttggtagtgcgtgggcgataaaataacgttatcgaaaaggtggcgtttgtgtagagggtttagtgtcgggtgcggcgtaacgtttgattcggtttatcgattaatcgtttaggaagttacgtagtattttagaacggttgaacgtatgttgatgtcggaagataagattcgtaaagtgttgaagatcgttaaagagttaatttttatggaaacgtcgatcggtgatgatgaagattcgtatttgggggattttattcgaggatattattttcgagttgtcgttggattttgcgattatcgaaagtttgcgtgcggtaacgtacgacgtgttggttggtttgatcgcgcgtga

SEQ ID NO: 5452 - DNA, 634 bp, Artificial Sequence
  chemically treated genomic DNA (Homo sapiens) CpG-island No: 5452
tcacgcgcgatcaaaccaaccaacacgtcgtacgttaccgcacgcaaactttcgataatcgcaaaatccaacgacaactcgaaaataatatcctcgaataaaatcccccaaatacgaatcttcatcatcaccgatcgacgtttccataaaaattaactctttaacgatcttcaacactttacgaatcttatcttccgacatcaacatacgttcaaccgttctaaaatactacgtaacttcctaaacgattaatcgataaaccgaatcaaacgttacgccgcacccgacactaaaccctctacacaaacgccaccttttcgataacgttattttatcgcccacgcactaccaacgcctaatccaactcgcgatacgcttcaaccaatttctccaataaaacgcgacttacaccgctaaaattttaacaacacccaaatctacgtcgaaccaataataaacgtttatttcccccactatacaccgcaactaactaaatacgctattcatatacttatttacccaaaatcgccaacgcctaacgactaataatcttcaatattttcaatcaacttacgcccgcctacgtataactcctacgtttaaaacttcattaacttatcaccgttaaacgatc

SEQ ID NO: 5453 - DNA, 661 bp, Artificial Sequence
  chemically treated genomic DNA (Homo sapiens) CpG-island No: 5453
gaagtgttgggcgataatatgggtatcggtatggcggttgatatcgttttgcgtatttatgaaatttcgtatatttggtcgtaggttgttgagtaataggttgtcgggttgaaagaagaagtgtcggaagaagtaaaagcgggtcgtgttgatttgcgcgatttatcgttggttattattgatggcgaagacgttcgtgattttgacgatgtagtttattgcgagaaaaaacgcggcggcggttggcgtttatgggtcgcgattgtcgacgttagttattatgtgcgttcgttaacgtcgttggatagagaagcgcgtaatcgtggtacgtcggtgtattttttttcgtaggttatttcgatgttgtcggaagtgttttttaacggtttgtgttcgtttaattcgtaggtagatcgtttgtgtatggtgtgcgagatgacggtttcgtcgaaaggtcgtttgacgggttataaattttacgaagcggtgatgagtttttacgcgcgtttgatttatattaaagtttggtatattttgtagggcgattaggatttgcgcgagtagtacgtttcgttggttaagtatttcgaagagttgtataatttttataaagtgttggataaagttcgtgaagaacgcggtgggattttatttgagagcg

SEQ ID NO: 5454 - DNA, 661 bp, Artificial Sequence
  chemically treated genomic DNA (Homo sapiens) CpG-island No: 5454
cgctctcaaataaaatcccaccgcgttcttcacgaactttatccaacactttataaaaattatacaactcttcgaaatacttaaccaacgaaacgtactactcgcgcaaatcctaatcgccctacaaaatataccaaactttaatataaatcaaacgcgcgtaaaaactcatcaccgcttcgtaaaatttataacccgtcaaacgacctttcgacgaaaccgtcatctcgcacaccatacacaaacgatctacctacgaattaaacgaacacaaaccgttaaaaaacacttccgacaacatcgaaataacctacgaaaaaaaatacaccgacgtaccacgattacgcgcttctctatccaacgacgttaacgaacgcacataataactaacgtcgacaatcgcgacccataaacgccaaccgccgccgcgttttttctcgcaataaactacatcgtcaaaatcacgaacgtcttcgccatcaataataaccaacgataaatcgcgcaaatcaacacgacccgcttttacttcttccgacacttcttctttcaacccgacaacctattactcaacaacctacgaccaaatatacgaaatttcataaatacgcaaaacgatatcaaccgccataccgatacccatattatcgcccaacacttc

SEQ ID NO: 5455 - DNA, 661 bp, Artificial Sequence
  chemically treated genomic DNA (Homo sapiens) CpG-island No: 5455
cgtttttaaatgagattttatcgcgttttttacgggttttatttagtattttatagaggttatgtaatttttcgagatgtttaattagcggggcgtattgttcgcgtagattttgatcgttttgtagaatatgttagattttggtgtaggttagacgcgcgtgagagtttattatcgtttcgtagaatttgtagttcgttaggcggtttttcgacgaaatcgttatttcgtatattatatataggcggtttatttgcgggttgagcgaatataggtcgttagagagtattttcggtagtatcgggataatttgcgaagggaagtatatcgacgtgttacggttacgcgtttttttgtttagcggcgttgacggacgtatatagtagttgacgtcggtaatcgcgatttataaacgttagtcgtcgtcgcgttttttttcgtagtaaattgtatcgttaaagttacgggcgttttcgttattaatggtgattagcggtaaatcgcgtagattaatacggttcgtttttgtttttttcggtatttttttttttagttcggtaatttgttgtttaatagtttgcggttagatgtacggaattttatgggtacgtagagcgatattaatcgttatgtcggtgtttatattgtcgtttagtatttt

SEQ ID NO: 5456 - DNA, 661 bp, Artificial Sequence
  chemically treated genomic DNA (Homo sapiens) CpG-island No: 5456
aaaatactaaacgacaatataaacaccgacataacgattaatatcgctctacgtacccataaaattccgtacatctaaccgcaaactattaaacaacaaattaccgaactaaaaaaaaaaataccgaaaaaaacaaaaacgaaccgtattaatctacgcgatttaccgctaatcaccattaataacgaaaacgcccgtaactttaacgatacaatttactacgaaaaaaaacgcgacgacgactaacgtttataaatcgcgattaccgacgtcaactactatatacgtccgtcaacgccgctaaacaaaaaaacgcgtaaccgtaacacgtcgatatacttcccttcgcaaattatcccgatactaccgaaaatactctctaacgacctatattcgctcaacccgcaaataaaccgcctatatataatatacgaaataacgatttcgtcgaaaaaccgcctaacgaactacaaattctacgaaacgataataaactctcacgcgcgtctaacctacaccaaaatctaacatattctacaaaacgatcaaaatctacgcgaacaatacgccccgctaattaaacatctcgaaaaattacataacctctataaaatactaaataaaacccgtaaaaaacgcgataaaatctcatttaaaaacg

SEQ ID NO: 5457 - DNA, 585 bp, Artificial Sequence
  chemically treated genomic DNA (Homo sapiens) CpG-island No: 5457
gtttcggagttttcggagtcgagggatacgtcggagttcgtgggcgagcggcggtagaggaagggtttgggaggcgcgggtagcgggtttcggggattggtgtaggacgaaggatcggcgggtaacgggtttcgcgggatgggcgcgaaggttgttttcggtatagtagtcgagtcggggcgggcgggttgtggcgagcgtatgcgcgggggcgggggcgggggcgggggcgggggcggtggcgttttcggcggggagaagggtcgcgggttttcggcgttcgtcgatcgcggggaggcgtttttgcgtcgggtcgtattgatgatgtttcgcgttagaagcgtttgtagttggcggttggggggtcgcgtttcggttttaggtcgtagcggggatatcgagcgttcgttttacgagggagatatgggcggtggcggcggtagcggcggggggttgtttatgttgttttcgcgatttggtttttacgggttcgggtttatttagtcgtttaggttgttggggggtcgggacgcgttcggcgtttagggtggggaggtgggtaggttttttcggcggttttgggga

SEQ ID NO: 5458 - DNA, 585 bp, Artificial Sequence
  chemically treated genomic DNA (Homo sapiens) CpG-island No: 5458
tccccaaaaccgccgaaaaaacctacccacctccccaccctaaacgccgaacgcgtcccgaccccccaacaacctaaacgactaaataaacccgaacccgtaaaaaccaaatcgcgaaaacaacataaacaaccccccgccgctaccgccgccaccgcccatatctccctcgtaaaacgaacgctcgatatccccgctacgacctaaaaccgaaacgcgaccccccaaccgccaactacaaacgcttctaacgcgaaacatcatcaatacgacccgacgcaaaaacgcctccccgcgatcgacgaacgccgaaaacccgcgacccttctccccgccgaaaacgccaccgcccccgcccccgcccccgcccccgcccccgcgcatacgctcgccacaacccgcccgccccgactcgactactataccgaaaacaaccttcgcgcccatcccgcgaaacccgttacccgccgatccttcgtcctacaccaatccccgaaacccgctacccgcgcctcccaaacccttcctctaccgccgctcgcccacgaactccgacgtatccctcgactccgaaaactccgaaac

SEQ ID NO: 5459 - DNA, 585 bp, Artificial Sequence
  chemically treated genomic DNA (Homo sapiens) CpG-island No: 5459
tttttaggatcgtcgggagagtttgtttatttttttattttggacgtcgggcgcgtttcggttttttagtagtttagacggttgggtgagttcgggttcgtgggagttaggtcgcgggagtagtatgagtagtttttcgtcgttgtcgtcgttatcgtttatgtttttttcgtggagcgagcgttcggtgttttcgttgcgatttgagatcgaggcgcggttttttagtcgttagttgtaggcgtttttggcgcgaaatattattaatgcggttcggcgtaagagcgttttttcgcggtcggcgggcgtcgagaattcgcggttttttttttcgtcgagggcgttatcgttttcgttttcgttttcgttttcgttttcgcgtatgcgttcgttatagttcgttcgtttcggttcggttgttgtgtcgggggtagttttcgcgtttatttcgcggagttcgttgttcgtcggtttttcgttttgtattagttttcggagttcgttgttcgcgttttttaggttttttttttatcgtcgttcgtttacggatttcgacgtgtttttcgatttcgaggatttcggggt

SEQ ID NO: 5460 - DNA, 585 bp, Artificial Sequence
  chemically treated genomic DNA (Homo sapiens) CpG-island No: 5460
accccgaaatcctcgaaatcgaaaaacacgtcgaaatccgtaaacgaacgacgataaaaaaaaaacctaaaaaacgcgaacaacgaactccgaaaactaatacaaaacgaaaaaccgacgaacaacgaactccgcgaaataaacgcgaaaactacccccgacacaacaaccgaaccgaaacgaacgaactataacgaacgcatacgcgaaaacgaaaacgaaaacgaaaacgaaaacgataacgccctcgacgaaaaaaaaaaccgcgaattctcgacgcccgccgaccgcgaaaaaacgctcttacgccgaaccgcattaataatatttcgcgccaaaaacgcctacaactaacgactaaaaaaccgcgcctcgatctcaaatcgcaacgaaaacaccgaacgctcgctccacgaaaaaaacataaacgataacgacgacaacgacgaaaaactactcatactactcccgcgacctaactcccacgaacccgaactcacccaaccgtctaaactactaaaaaaccgaaacgcgcccgacgtccaaaataaaaaaataaacaaactctcccgacgatcctaaaaa

SEQ ID NO: 5461 - DNA, 673 bp, Artificial Sequence
  chemically treated genomic DNA (Homo sapiens) CpG-island No: 5461
gttcgtttgtgtacgttcggcgggtgttgcgttgcggtggttcgtggatggtcggttgcgcgtggcgtagttatatgattgaagtatgacgtttacgttagtcgcggatttaacggttgacgtttgggttattgtacgtttggcgaatatttgtattgtattgttattttggtgcggtggcgtattgaaatggggggggggggggatgatgggcggtgaaggggtgtaagacggggaagagtatagagggaatggtgaagttacgcgagatcggcgagagtggggagtttgggatgggtaatagcgcgagggaaagaggataaaggcgtcgggggagatataggcgaaggggttgcgacgttgatttgcgggggggcgacgtacggtaacggcgtgagcgggaagtttgagaagtgtgcggcggggggcgggggggagggggcgttgatggtggtatagtattggggaaaggaggtaaggaacgggaacgttggaagtaacggtcgtgggatagttggggtatgtgggggcgttggagcgtggatacgagttttataataaaggtggggaaaggttgcggaaggaggttaattggggtgcggggtgtgttattgttacgaaatgtattagggtatagttgtaaggtcggcgggatagtaggaatatagatgat

SEQ ID NO: 5462 - DNA, 673 bp, Artificial Sequence
  chemically treated genomic DNA (Homo sapiens) CpG-island No: 5462
atcatctatattcctactatcccgccgaccttacaactataccctaatacatttcgtaacaataacacaccccgcaccccaattaacctccttccgcaacctttccccacctttattataaaactcgtatccacgctccaacgcccccacataccccaactatcccacgaccgttacttccaacgttcccgttccttacctcctttccccaatactataccaccatcaacgccccctcccccccgccccccgccgcacacttctcaaacttcccgctcacgccgttaccgtacgtcgcccccccgcaaatcaacgtcgcaaccccttcgcctatatctcccccgacgcctttatcctctttccctcgcgctattacccatcccaaactccccactctcgccgatctcgcgtaacttcaccattccctctatactcttccccgtcttacaccccttcaccgcccatcatccccccccccccccatttcaatacgccaccgcaccaaaataacaatacaatacaaatattcgccaaacgtacaataacccaaacgtcaaccgttaaatccgcgactaacgtaaacgtcatacttcaatcatataactacgccacgcgcaaccgaccatccacgaaccaccgcaacgcaacacccgccgaacgtacacaaacgaac

SEQ ID NO: 5463 - DNA, 673 bp, Artificial Sequence
  chemically treated genomic DNA (Homo sapiens) CpG-island No: 5463
attatttatatttttattgtttcgtcggttttataattgtattttggtatatttcgtagtaatggtatatttcgtattttaattaattttttttcgtaatttttttttatttttattgtaaggttcgtatttacgttttagcgtttttatatattttaattattttacggtcgttatttttaacgttttcgttttttattttttttttttaatgttatattattattagcgttttttttttttcgtttttcgtcgtatattttttaaatttttcgtttacgtcgttatcgtgcgtcgttttttcgtagattagcgtcgtagttttttcgtttatgtttttttcggcgtttttgttttttttttttcgcgttattatttattttaaattttttattttcgtcggtttcgcgtggttttattattttttttatattttttttcgttttgtatttttttatcgtttattatttttttttttttttattttaatacgttatcgtattagggtagtaatatagtataagtgttcgttaagcgtgtagtggtttaggcgttaatcgttaggttcgcggttggcgtaggcgttatattttaattatgtaattgcgttacgcgtagtcgattatttacgagttatcgtaacgtagtattcgtcgaacgtgtatagacggat

SEQ ID NO: 5464 - DNA, 673 bp, Artificial Sequence
  chemically treated genomic DNA (Homo sapiens) CpG-island No: 5464
atccgtctatacacgttcgacgaatactacgttacgataactcgtaaataatcgactacgcgtaacgcaattacataattaaaatataacgcctacgccaaccgcgaacctaacgattaacgcctaaaccactacacgcttaacgaacacttatactatattactaccctaatacgataacgtattaaaataaaaaaaaaaaaaaataataaacgataaaaaaatacaaaacgaaaaaaaatataaaaaaaataataaaaccacgcgaaaccgacgaaaataaaaaatttaaaataaataataacgcgaaaaaaaaaaaacaaaaacgccgaaaaaaacataaacgaaaaaactacgacgctaatctacgaaaaaacgacgcacgataacgacgtaaacgaaaaatttaaaaaatatacgacgaaaaacgaaaaaaaaaaaacgctaataataatataacattaaaaaaaaaaaataaaaaacgaaaacgttaaaaataacgaccgtaaaataattaaaatatataaaaacgctaaaacgtaaatacgaaccttacaataaaaataaaaaaaaattacgaaaaaaaattaattaaaatacgaaatataccattactacgaaatataccaaaatacaattataaaaccgacgaaacaataaaaatataaataat

SEQ ID NO: 5465 - DNA, 590 bp, Artificial Sequence
  chemically treated genomic DNA (Homo sapiens) CpG-island No: 5465
gtcgcgcgtgcgcgtcgtgcgtgcgtgagcgacggacgtgcgcgtgggcgtgggacgggtgtacgcgcggtatgcgggagggaatgtttgaaagtgtatggtatgaaaaaggtggtttgttggcggtgtgttaaattcggtcgtggatataatgtagggtttgtcggggtgtggtgtttgtgttagtcgcggagggaaagcgataaagatagttgagagtgggggatagtatgggcgaacgtgatagcggttacgggtagcgggtagtagcgcggcggcgtgagtcgagggagtaatgatcggaattaatcgtggttcgaaaacgggtgcgtgatggggttgtggttggtggggtttgggagcgcgggattggaagtgaagggtaaggggttaatattgggttgcgcggttggatggagcggacggcgggtgggttgcgtggatcggtagaaattggtagagtgatgtttgggtttaaggagtgtggggtgagagggcggtacggtagtatggggttgggggagtgggaggatacgaaagggggatgcgggggtatagtatggggttaaatatttttgttgaagaaattt

SEQ ID NO: 5466 - DNA, 590 bp, Artificial Sequence
  chemically treated genomic DNA (Homo sapiens) CpG-island No: 5466
aaatttcttcaacaaaaatatttaaccccatactatacccccgcatccccctttcgtatcctcccactcccccaaccccatactaccgtaccgccctctcaccccacactccttaaacccaaacatcactctaccaatttctaccgatccacgcaacccacccgccgtccgctccatccaaccgcgcaacccaatattaaccccttacccttcacttccaatcccgcgctcccaaaccccaccaaccacaaccccatcacgcacccgttttcgaaccacgattaattccgatcattactccctcgactcacgccgccgcgctactacccgctacccgtaaccgctatcacgttcgcccatactatcccccactctcaactatctttatcgctttccctccgcgactaacacaaacaccacaccccgacaaaccctacattatatccacgaccgaatttaacacaccgccaacaaaccacctttttcataccatacactttcaaacattccctcccgcataccgcgcgtacacccgtcccacgcccacgcgcacgtccgtcgctcacgcacgcacgacgcgcacgcgcgac

SEQ ID NO: 5467 - DNA, 590 bp, Artificial Sequence
  chemically treated genomic DNA (Homo sapiens) CpG-island No: 5467
aaatttttttaataaaaatgtttaattttatattatgttttcgtatttttttttcgtatttttttatttttttagttttatattatcgtatcgtttttttattttatattttttaggtttaggtattattttattagtttttgtcggtttacgtaatttattcgtcgttcgttttatttagtcgcgtagtttagtattagttttttattttttatttttagtttcgcgtttttaagttttattagttatagttttattacgtattcgttttcgggttacggttggtttcggttattattttttcggtttacgtcgtcgcgttattattcgttattcgtaatcgttgttacgttcgtttatattattttttatttttaattatttttatcgtttttttttcgcgattgatataaatattatatttcggtagattttgtattatatttacggtcgggtttaatatatcgttaataggttattttttttatattatgtatttttagatattttttttcgtatatcgcgcgtgtattcgttttacgtttacgcgtacgttcgtcgtttacgtacgtacgacgcgtacgcgcggt

SEQ ID NO: 5468 - DNA, 590 bp, Artificial Sequence
  chemically treated genomic DNA (Homo sapiens) CpG-island No: 5468
accgcgcgtacgcgtcgtacgtacgtaaacgacgaacgtacgcgtaaacgtaaaacgaatacacgcgcgatatacgaaaaaaaatatctaaaaatacataatataaaaaaaataacctattaacgatatattaaacccgaccgtaaatataatacaaaatctaccgaaatataatatttatatcaatcgcgaaaaaaaaacgataaaaataattaaaaataaaaaataatataaacgaacgtaacaacgattacgaataacgaataataacgcgacgacgtaaaccgaaaaaataataaccgaaaccaaccgtaacccgaaaacgaatacgtaataaaactataactaataaaacttaaaaacgcgaaactaaaaataaaaaataaaaaactaatactaaactacgcgactaaataaaacgaacgacgaataaattacgtaaaccgacaaaaactaataaaataatacctaaacctaaaaaatataaaataaaaaaacgatacgataatataaaactaaaaaaataaaaaaatacgaaaaaaaaatacgaaaacataatataaaattaaacatttttattaaaaaaattt

SEQ ID NO: 5469 - DNA, 1123 bp, Artificial Sequence
  chemically treated genomic DNA (Homo sapiens) CpG-island No: 5469
tatacgttgtttttttgcgggtaaattatagtcgcgagatttttcgtttgggcggtatatttaatatgttttatcgtatagcgtcgatttaggtagaggatgcgggacgggtcgcgtgattattattaaaagtgcgggagggggtcgatgaggttagtaggatacgggttagagacgacgggggaagcgaggtagcgacgggacggaggggattaggggagtgtggatagttggcgtacggatatcgcgggtgcggggtatcggacgtagtggaaggaggtcgcgaacggatagagtttgggggttaaatggtgtggttgggggggggggtggggtttagcggtggcgattaaatgtagtaggaatagttgggtgaaagagcgggggaaggtgttggattattagggtataaggggcgtacggcgcgtcgtgttttttgtaagaatagaggcgttgttgaatttaggagaggggtttgggtgggagtgtagtggcggggcggggttgtgtcgttgtagatttattagggtgtacggtacggggattaaggtggggagtatttggtgcggaatggtggattaaaggggaagtagtgagttgtcgttggtttcgaaagaaatatcgtattggtcgacgaaaggtgagtggggggtggacgattttttgttattttatttatgatttataggatttggtttaaattcgtttggttatttttcgatgttacgttatgtcgtaaacgcgttgtttattttgtgattacgggtttatatatagtagggggtgtgggggaagtttttcgtagatttttttgttataggatttgttagtatcgcgtttacgtttgtcgcggtacggattgtcgcgatcgttaattgtacggaacgcgattttttgtattgattgtttacggatgtgcgtacgcgtatttgatatcggggtgtggggattaaatattgtgagggagcggaaagggtgtgggggtgtgacgatggatatgaacgaatgcgggtcggttaaacgtggggaatgggtgagaaaattatcgatgtggtaagttttgttggggtagcgggtaagtggcgtcggtaggttttgagaagtaagtggttttgagagaata

SEQ ID NO: 5470 - DNA, 1123 bp, Artificial Sequence
  chemically treated genomic DNA (Homo sapiens) CpG-island No: 5470
tattctctcaaaaccacttacttctcaaaacctaccgacgccacttacccgctaccccaacaaaacttaccacatcgataattttctcacccattccccacgtttaaccgacccgcattcgttcatatccatcgtcacacccccacaccctttccgctccctcacaatatttaatccccacaccccgatatcaaatacgcgtacgcacatccgtaaacaatcaatacaaaaaatcgcgttccgtacaattaacgatcgcgacaatccgtaccgcgacaaacgtaaacgcgatactaacaaatcctataacaaaaaaatctacgaaaaacttcccccacaccccctactatatataaacccgtaatcacaaaataaacaacgcgtttacgacataacgtaacatcgaaaaataaccaaacgaatttaaaccaaatcctataaatcataaataaaataacaaaaaatcgtccaccccccactcacctttcgtcgaccaatacgatatttctttcgaaaccaacgacaactcactacttcccctttaatccaccattccgcaccaaatactccccaccttaatccccgtaccgtacaccctaataaatctacaacgacacaaccccgccccgccactacactcccacccaaacccctctcctaaattcaacaacgcctctattcttacaaaaaacacgacgcgccgtacgccccttataccctaataatccaacaccttcccccgctctttcacccaactattcctactacatttaatcgccaccgctaaaccccacccccccccccaaccacaccatttaacccccaaactctatccgttcgcgacctccttccactacgtccgataccccgcacccgcgatatccgtacgccaactatccacactcccctaatcccctccgtcccgtcgctacctcgcttcccccgtcgtctctaacccgtatcctactaacctcatcgaccccctcccgcacttttaataataatcacgcgacccgtcccgcatcctctacctaaatcgacgctatacgataaaacatattaaatataccgcccaaacgaaaaatctcgcgactataatttacccgcaaaaaaacaacgtata

SEQ ID NO: 5471 - DNA, 1123 bp, Artificial Sequence
  chemically treated genomic DNA (Homo sapiens) CpG-island No: 5471
tgtttttttaaagttatttattttttaaaatttatcggcgttatttattcgttattttagtaaaatttgttatatcggtaatttttttatttattttttacgtttgatcggttcgtattcgtttatatttatcgttatatttttatatttttttcgtttttttataatatttggtttttatatttcgatattaaatacgcgtgcgtatattcgtaagtaattagtgtaagagatcgcgtttcgtgtagttggcggtcgcggtaattcgtatcgcggtaggcgtaggcgcgatattagtaaattttgtaatagggaggtttgcgggaagttttttttatattttttattatatgtaagttcgtggttataaggtaagtaacgcgtttgcggtatggcgtaatatcggagggtggttaagcgggtttagattaaattttgtaagttataggtggagtggtaaggagtcgtttattttttatttatttttcgtcggttagtgcggtatttttttcggggttaacgataatttattattttttttttagtttattatttcgtattaagtattttttattttaattttcgtgtcgtatattttggtaaatttgtaacgatataatttcgtttcgttattatatttttatttaagttttttttttaaatttagtaacgtttttatttttataaaaaatacggcgcgtcgtacgttttttgtattttaataatttagtattttttttcgtttttttatttaattatttttgttatatttggtcgttatcgttaaattttatttttttttttaattatattatttaatttttaagttttattcgttcgcggtttttttttattacgttcggtatttcgtattcgcggtattcgtgcgttaattatttatatttttttaatttttttcgtttcgtcgttatttcgtttttttcgtcgtttttaattcgtgttttgttagttttatcggttttttttcgtatttttagtagtagttacgcggttcgtttcgtattttttatttaaatcggcgttatacgatggaatatattaagtgtatcgtttaaacggggggtttcgcggttgtgatttgttcgtagaaaaatagcgtgtg

SEQ ID NO: 5472 - DNA, 1123 bp, Artificial Sequence
  chemically treated genomic DNA (Homo sapiens) CpG-island No: 5472
cacacgctatttttctacgaacaaatcacaaccgcgaaaccccccgtttaaacgatacacttaatatattccatcgtataacgccgatttaaataaaaaatacgaaacgaaccgcgtaactactactaaaaatacgaaaaaaaaccgataaaactaacaaaacacgaattaaaaacgacgaaaaaaacgaaataacgacgaaacgaaaaaaattaaaaaaatataaataattaacgcacgaataccgcgaatacgaaataccgaacgtaataaaaaaaaaccgcgaacgaataaaacttaaaaattaaataatataattaaaaaaaaaaataaaatttaacgataacgaccaaatataacaaaaataattaaataaaaaaacgaaaaaaaatactaaattattaaaatacaaaaaacgtacgacgcgccgtattttttataaaaataaaaacgttactaaatttaaaaaaaaaacttaaataaaaatataataacgaaacgaaattatatcgttacaaatttaccaaaatatacgacacgaaaattaaaataaaaaatacttaatacgaaataataaactaaaaaaaaaataataaattatcgttaaccccgaaaaaaataccgcactaaccgacgaaaaataaataaaaaataaacgactccttaccactccacctataacttacaaaatttaatctaaacccgcttaaccaccctccgatattacgccataccgcaaacgcgttacttaccttataaccacgaacttacatataataaaaaatataaaaaaaacttcccgcaaacctccctattacaaaatttactaatatcgcgcctacgcctaccgcgatacgaattaccgcgaccgccaactacacgaaacgcgatctcttacactaattacttacgaatatacgcacgcgtatttaatatcgaaatataaaaaccaaatattataaaaaaacgaaaaaaatataaaaatataacgataaatataaacgaatacgaaccgatcaaacgtaaaaaataaataaaaaaattaccgatataacaaattttactaaaataacgaataaataacgccgataaattttaaaaaataaataactttaaaaaaaca

SEQ ID NO: 5473 - DNA, 576 bp, Artificial Sequence
  chemically treated genomic DNA (Homo sapiens) CpG-island No: 5473
  unsure (539)
gtagtacgttatcgcgatgcgggaagttgacgtagcgggtcgaagttagtttgcggatcgaaaacgtcgttcgcgcgaatgcgtttaacgcgcgttagaattttttgtttaaatgcggttttgtatttcgtcggaacgaagacgcgggtgttattggtatatatttgatcggagttgaagaagtttgttattatggcgatatcggcggcgagatcgagattcgtattatcgaaaacgattagcggtgatttatcgtttagttttatggttattttttttagggaagaggtcgtcgagttagttattatttttttgtcgttggcgatatcgtcggtaaatgatattttggtaatgttcggatgttcggttagatattgttcggttttcgcgtttacgttcggtaatacgttaaatacgtcgttcggtaggttcgtttcgttgtaaattttagttagttttaacgcggtaagcggggtaatttcgttcggtttgaaaattattgcgttgtttgtcgttagcgtcggggcggattttgaatnatttttgttacgtatttatgaagttttattttttttt

SEQ ID NO: 5474 - DNA, 576 bp, Artificial Sequence
  chemically treated genomic DNA (Homo sapiens) CpG-island No: 5474
  unsure (38)
aaaaaaaaataaaacttcataaatacgtaacaaaaatnattcaaaatccgccccgacgctaacgacaaacaacgcaataattttcaaaccgaacgaaattaccccgcttaccgcgttaaaactaactaaaatttacaacgaaacgaacctaccgaacgacgtatttaacgtattaccgaacgtaaacgcgaaaaccgaacaatatctaaccgaacatccgaacattaccaaaatatcatttaccgacgatatcgccaacgacaaaaaaataataactaactcgacgacctcttccctaaaaaaaataaccataaaactaaacgataaatcaccgctaatcgttttcgataatacgaatctcgatctcgccgccgatatcgccataataacaaacttcttcaactccgatcaaatatataccaataacacccgcgtcttcgttccgacgaaatacaaaaccgcatttaaacaaaaaattctaacgcgcgttaaacgcattcgcgcgaacgacgttttcgatccgcaaactaacttcgacccgctacgtcaacttcccgcatcgcgataacgtactac

SEQ ID NO: 5475 - DNA, 576 bp, Artificial Sequence
  chemically treated genomic DNA (Homo sapiens) CpG-island No: 5475
  unsure (38)
aaaaaagaatgagattttatgggtacgtagtaagggtnatttaggattcgtttcggcgttggcggtaggtaacgtaatgatttttaaatcgagcgaagttatttcgtttatcgcgttaaagttggttgaaatttatagcgaagcgggtttgtcggacggcgtatttaacgtgttgtcgggcgtgggcgcggagatcgggtaatatttgatcgagtattcgggtattgttaaagtgttatttatcggcggtgtcgttagcggtaaaaaagtgatggttaattcggcggttttttttttgaaagaagtgattatggaattgggcggtaaattatcgttgatcgttttcgatgatgcggatttcgatttcgtcgtcgatatcgttatgatggtaaatttttttagtttcggttaggtgtgtattaatggtattcgcgttttcgtttcggcgaaatgtaaagtcgtatttgagtagaaaattttggcgcgcgttgagcgtattcgcgcgggcgacgttttcgattcgtaaattaatttcggttcgttgcgttagtttttcgtatcgcgataacgtgttgt

SEQ ID NO: 5476 - DNA, 576 bp, Artificial Sequence
  chemically treated genomic DNA (Homo sapiens) CpG-island No: 5476
  unsure (539)
acaacacgttatcgcgatacgaaaaactaacgcaacgaaccgaaattaatttacgaatcgaaaacgtcgcccgcgcgaatacgctcaacgcgcgccaaaattttctactcaaatacgactttacatttcgccgaaacgaaaacgcgaataccattaatacacacctaaccgaaactaaaaaaatttaccatcataacgatatcgacgacgaaatcgaaatccgcatcatcgaaaacgatcaacgataatttaccgcccaattccataatcacttctttcaaaaaaaaaaccgccgaattaaccatcacttttttaccgctaacgacaccgccgataaataacactttaacaatacccgaatactcgatcaaatattacccgatctccgcgcccacgcccgacaacacgttaaatacgccgtccgacaaacccgcttcgctataaatttcaaccaactttaacgcgataaacgaaataacttcgctcgatttaaaaatcattacgttacctaccgccaacgccgaaacgaatcctaaatnacccttactacgtacccataaaatctcattctttttt

SEQ ID NO: 5477 - DNA, 506 bp, Artificial Sequence
  chemically treated genomic DNA (Homo sapiens) CpG-island No: 5477
tcgcggtcgtcgttaggtaagtcgttaatagtagtagcgtaattcgcgtcggcgttagcgttatttttacggttcgggcggtattattatttagcggtaaaatggttagttagcggcggtatagcggggtaatcgttagtaaaattattattataatttcggtgcgttagagttgcgtatcggtcgcgtagtaggtcgaatcgggaaatttaggttagtatttgcgttattcgcgggttaatatttggttgtaaattattaaagtatggtggacgcggtggttaaagtaatttcggtcgttatatacgggtggggagaattacggggttgggggattatatgatatagggtacggcggttaaagtttgagtaaattttacggtatcgggtcgaaaagaatacggtaagcggcgaagaatataataataggggtatagatcgtaagaggaataagagtttaaggtagaggaattgggggggatataacgggatcgggtaggtattgt

SEQ ID NO: 5478 - DNA, 506 bp, Artificial Sequence
  chemically treated genomic DNA (Homo sapiens) CpG-island No: 5478
acaatacctacccgatcccgttatatcccccccaattcctctaccttaaactcttattcctcttacgatctatacccctattattatattcttcgccgcttaccgtattcttttcgacccgataccgtaaaatttactcaaactttaaccgccgtaccctatatcatataatcccccaaccccgtaattctccccacccgtatataacgaccgaaattactttaaccaccgcgtccaccatactttaataatttacaaccaaatattaacccgcgaataacgcaaatactaacctaaatttcccgattcgacctactacgcgaccgatacgcaactctaacgcaccgaaattataataataattttactaacgattaccccgctataccgccgctaactaaccattttaccgctaaataataataccgcccgaaccgtaaaaataacgctaacgccgacgcgaattacgctactactattaacgacttacctaacgacgaccgcga

SEQ ID NO: 5479 - DNA, 506 bp, Artificial Sequence
  chemically treated genomic DNA (Homo sapiens) CpG-island No: 5479
gtagtatttattcggtttcgttatattttttttagtttttttgttttgggtttttattttttttacgatttgtatttttgttgttgtatttttcgtcgtttgtcgtatttttttcgattcggtgtcgtggggtttatttagattttggtcgtcgtattttgtgttatatggttttttagtttcgtggttttttttattcgtatgtaacggtcgggattgttttaattatcgcgtttattatgttttgatgatttgtagttaagtgttgattcgcgaatggcgtaagtgttgatttggatttttcggttcgatttattacgcgatcgatgcgtagttttggcgtatcggaattgtgatggtgattttgttggcgattatttcgttgtgtcgtcgttggttgattattttatcgttgggtggtgatatcgttcgagtcgtaggaatggcgttgacgtcgacgcgaattgcgttgttgttgttagcggtttgtttgacggcgatcgcga

SEQ ID NO: 5480 - DNA, 506 bp, Artificial Sequence
  chemically treated genomic DNA (Homo sapiens) CpG-island No: 5480
tcgcgatcgccgtcaaacaaaccgctaacaacaacaacgcaattcgcgtcgacgtcaacgccattcctacgactcgaacgatatcaccacccaacgataaaataatcaaccaacgacgacacaacgaaataatcgccaacaaaatcaccatcacaattccgatacgccaaaactacgcatcgatcgcgtaataaatcgaaccgaaaaatccaaatcaacacttacgccattcgcgaatcaacacttaactacaaatcatcaaaacataataaacgcgataattaaaacaatcccgaccgttacatacgaataaaaaaaaccacgaaactaaaaaaccatataacacaaaatacgacgaccaaaatctaaataaaccccacgacaccgaatcgaaaaaaatacgacaaacgacgaaaaatacaacaacaaaaatacaaatcgtaaaaaaaataaaaacccaaaacaaaaaaactaaaaaaaatataacgaaaccgaataaatactac

SEQ ID NO: 5481 - DNA, 771 bp, Artificial Sequence
  chemically treated genomic DNA (Homo sapiens) CpG-island No: 5481
ggcgttgaaaagtttggcgttgagcgtcgggttggaattggcgggtagcggcgtgcgttgtaatgtggtttcgtttggttttatcgatatcgatatgtaacgtacgttgtgggtgagcgatgacgtcgaagaatagcgtattcgcggttttggcgagtagtttaaattcggtatttcgttggggaaaatcgttcgtttataagagatcgttaatacgattttgtttttcgtttttgatttcgttagttatattattttataggatattgtggtcgatggcggtttaacgttgggggtataagtatgatttggaaacgttatttaacgttcgacgaattgaacgttattagcgataatataatggtggcgtatttgggaattgtgtatattcgtttgggcgatgatgtgttggaagtcgaaatgtcggttgatattcgtatttattagtcgttcggtttattatatggcggcgcgtcggcggcgttggcggaaacgttgggatcgatggtcggatttatgatgattcgcgacggatagtgtgtggtaggtatagaattttatgtaatatagtatcggtcggtgtttgagggaaaggtattcggcgtttgttagtcgttgtattttggtcggtaaaattagagttgggaaatcgtcgttttcgatgaataggggcggcgttgttgtatttgtcggttgggtacggtagttttgggatgaattcgatagaattagatgagattgtaggaaaattcggttaacggagtgatcgag

SEQ ID NO: 5482 - DNA, 771 bp, Artificial Sequence
  chemically treated genomic DNA (Homo sapiens) CpG-island No: 5482
ctcgatcactccgttaaccgaattttcctacaatctcatctaattctatcgaattcatcccaaaactaccgtacccaaccgacaaatacaacaacgccgcccctattcatcgaaaacgacgatttcccaactctaattttaccgaccaaaatacaacgactaacaaacgccgaatacctttccctcaaacaccgaccgatactatattacataaaattctatacctaccacacactatccgtcgcgaatcatcataaatccgaccatcgatcccaacgtttccgccaacgccgccgacgcgccgccatataataaaccgaacgactaataaatacgaatatcaaccgacatttcgacttccaacacatcatcgcccaaacgaatatacacaattcccaaatacgccaccattatattatcgctaataacgttcaattcgtcgaacgttaaataacgtttccaaatcatacttatacccccaacgttaaaccgccatcgaccacaatatcctataaaataatataactaacgaaatcaaaaacgaaaaacaaaatcgtattaacgatctcttataaacgaacgattttccccaacgaaataccgaatttaaactactcgccaaaaccgcgaatacgctattcttcgacgtcatcgctcacccacaacgtacgttacatatcgatatcgataaaaccaaacgaaaccacattacaacgcacgccgctacccgccaattccaacccgacgctcaacgccaaacttttcaacgcc

SEQ ID NO: 5483 - DNA, 771 bp, Artificial Sequence
  chemically treated genomic DNA (Homo sapiens) CpG-island No: 5483
ttcgattatttcgttaatcgagtttttttgtaattttatttaattttgtcgggtttattttaaaattgtcgtatttagtcgataagtgtagtaacgtcgtttttgtttatcgaaaacgacgattttttagttttgattttgtcgattaagatgtagcggttggtagacgtcgggtattttttttttagatatcggtcgatgttgtgttgtataaagttttgtgtttattatatattgttcgtcgcgggttattataaattcggttatcgattttagcgttttcgttagcgtcgtcgacgcgtcgttatgtagtaaatcgaacggttgatgagtacgggtattaatcggtatttcggtttttagtatattatcgtttagacgggtatatataatttttagatgcgttattattgtgttatcgttggtggcgtttagttcgtcgagcgttaaatggcgtttttagattatgtttatgtttttagcgttgagtcgttatcgattataatattttgtagggtaatatggttggcgaggttagaggcgaggaataaaatcgtgttggcgattttttgtggacgggcgattttttttagcggaatgtcgagtttaaattgttcgttaaagtcgcgaatacgttgtttttcggcgttatcgtttatttatagcgtgcgttgtatatcggtgtcggtggagttaggcgaaattatattatagcgtacgtcgttattcgttagttttagttcgacgtttaacgttaggttttttagcgtt

SEQ ID NO: 5484 - DNA, 771 bp, Artificial Sequence
  chemically treated genomic DNA (Homo sapiens) CpG-island No: 5484
aacgctaaaaaacctaacgttaaacgtcgaactaaaactaacgaataacgacgtacgctataatataatttcgcctaactccaccgacaccgatatacaacgcacgctataaataaacgataacgccgaaaaacaacgtattcgcgactttaacgaacaatttaaactcgacattccgctaaaaaaaatcgcccgtccacaaaaaatcgccaacacgattttattcctcgcctctaacctcgccaaccatattaccctacaaaatattataatcgataacgactcaacgctaaaaacataaacataatctaaaaacgccatttaacgctcgacgaactaaacgccaccaacgataacacaataataacgcatctaaaaattatatatacccgtctaaacgataatatactaaaaaccgaaataccgattaatacccgtactcatcaaccgttcgatttactacataacgacgcgtcgacgacgctaacgaaaacgctaaaatcgataaccgaatttataataacccgcgacgaacaatatataataaacacaaaactttatacaacacaacatcgaccgatatctaaaaaaaaaatacccgacgtctaccaaccgctacatcttaatcgacaaaatcaaaactaaaaaatcgtcgttttcgataaacaaaaacgacgttactacacttatcgactaaatacgacaattttaaaataaacccgacaaaattaaataaaattacaaaaaaactcgattaacgaaataatcgaa

SEQ ID NO: 5485 - DNA, 1131 bp, Artificial Sequence
  chemically treated genomic DNA (Homo sapiens) CpG-island No: 5485
tttttcgtgttgataagcgttagcgataggtcgcgatggtcgtagtggtataggtggatttttcgcgtcggcgtgtatatcgggtttatttggttttgtatttgttttatcgttaggtcgtacgatgttagttagcggcggttttttttatttattcggttagttaggattttattttttagtcggtcgagtatttgtattagtatcggcgggaatattatattgttatcgttttcgtcgtcggattgttgaagcgtattcgttaggttgcggcgttgcgttttcgttagtttatcggtggcggttttaattttgatgagtggcgtgaagtttttcggttgataaatcgtttggatgcgggttttgtcgttttgtatcgtggttaggcggtcgtcgttttagtcgtattaggttatttgcggttttcgtgatagcgatatttagttcgttaggtttcgtttacgtcgttatattcgttttgttattttgcggtttagcgggtcgtaaagatagcggttttcgattagcggttttgtatattgtgttcgcgtgtagtgtattagtcggtgttgattgtcgtaatggtatcggtgggtgcgtttattattcgtgcggataatttttttcgggatgaggtcggttttttttgttagtttgtcgtgacggttatatcggtaaagatagtgcgcgttacgggcgatacggttattcggttatatgttgagggtgttgttcgggtgtagtttcgggtcgggtaggcggttatttgtcgggtttgtggtatacgggatgcggatatttagattcgttgcggtggtgtgaacgtcggttagtttggcggtggtgttgtagttgtgattttcggtttggcggcggttgttgatgtcgatgagttcgtcggtgtcgttttacgtgtgacgcggtcgatagtagcggttacgtgttggtcgtaattgtcgacggggtaaaaggggggattataaggagaaacgagtaagataatttgataagaggacgcggtgtattttaatcgagggttgtgtatatagttgtcgtaaaagaggcggggtataaaatatcgggagaggcgatatatataattatcgttatagttgtgttgttaagtacgtg

SEQ ID NO: 5486 - DNA, 1131 bp, Artificial Sequence
  chemically treated genomic DNA (Homo sapiens) CpG-island No: 5486
cacgtacttaacaacacaactataacgataattatatatatcgcctctcccgatattttataccccgcctcttttacgacaactatatacacaaccctcgattaaaatacaccgcgtcctcttatcaaattatcttactcgtttctccttataatccccccttttaccccgtcgacaattacgaccaacacgtaaccgctactatcgaccgcgtcacacgtaaaacgacaccgacgaactcatcgacatcaacaaccgccgccaaaccgaaaatcacaactacaacaccaccgccaaactaaccgacgttcacaccaccgcaacgaatctaaatatccgcatcccgtataccacaaacccgacaaataaccgcctacccgacccgaaactacacccgaacaacaccctcaacatataaccgaataaccgtatcgcccgtaacgcgcactatctttaccgatataaccgtcacgacaaactaacaaaaaaaaccgacctcatcccgaaaaaaattatccgcacgaataataaacgcacccaccgataccattacgacaatcaacaccgactaatacactacacgcgaacacaatatacaaaaccgctaatcgaaaaccgctatctttacgacccgctaaaccgcaaaataacaaaacgaatataacgacgtaaacgaaacctaacgaactaaatatcgctatcacgaaaaccgcaaataacctaatacgactaaaacgacgaccgcctaaccacgatacaaaacgacaaaacccgcatccaaacgatttatcaaccgaaaaacttcacgccactcatcaaaattaaaaccgccaccgataaactaacgaaaacgcaacgccgcaacctaacgaatacgcttcaacaatccgacgacgaaaacgataacaatataatattcccgccgatactaatacaaatactcgaccgactaaaaaataaaatcctaactaaccgaataaataaaaaaaaccgccgctaactaacatcgtacgacctaacgataaaacaaatacaaaaccaaataaacccgatatacacgccgacgcgaaaaatccacctataccactacgaccatcgcgacctatcgctaacgcttatcaacacgaaaaa

SEQ ID NO: 5487 - DNA, 1131 bp, Artificial Sequence
  chemically treated genomic DNA (Homo sapiens) CpG-island No: 5487
tacgtgtttgataatataattatagcggtggttatatatatcgtttttttcggtgttttgtatttcgttttttttgcggtagttatgtgtataattttcggttggaatatatcgcgtttttttgttaggttattttgttcgtttttttttatgatttttttttttatttcgtcggtagttacggttagtacgtaatcgttgttgtcgatcgcgttatacgtgggacgatatcggcgaatttatcggtattagtagtcgtcgttagatcgggagttatagttatagtattatcgttaggttgatcggcgtttatattatcgtagcgaatttgaatattcgtatttcgtatgttatagattcggtaggtaatcgtttgttcgattcggagttgtattcggatagtatttttagtatgtggtcggataatcgtatcgttcgtgacgcgtattatttttatcggtatgatcgttacggtaggttgatagagaaaatcgattttatttcggaaggggttattcgtacggatgatgagcgtatttatcggtattattacgatagttagtatcggttggtgtattatacgcggatataatatgtagagtcgttggtcgaaagtcgttatttttacgattcgttgggtcgtagggtggtaaaacgggtgtggcggcgtgaacgggatttgacgggttggatgtcgttgttacggaaatcgtaagtgatttggtacggttgggacggcgatcgtttgattacgatatagaacgatagaattcgtatttagacgatttattagtcggggagttttacgttatttattagagttgaaatcgttatcggtgagttggcgaaaacgtagcgtcgtagtttggcggatgcgttttagtagttcggcggcgaagacggtggtagtgtggtgttttcgtcggtgttggtgtagatgttcgatcggttggaaagtgaaattttggttgatcgggtgagtgaggaaagtcgtcgttggttggtatcgtgcggtttgacggtggagtagatgtaaaattagatggattcggtgtatacgtcggcgcgaaaaatttatttgtattattgcgattatcgcggtttgtcgttggcgtttgttagtacgggaag

SEQ ID NO: 5488 - DNA, 1131 bp, Artificial Sequence
  chemically treated genomic DNA (Homo sapiens) CpG-island No: 5488
cttcccgtactaacaaacgccaacgacaaaccgcgataatcgcaataatacaaataaatttttcgcgccgacgtatacaccgaatccatctaattttacatctactccaccgtcaaaccgcacgataccaaccaacgacgactttcctcactcacccgatcaaccaaaatttcactttccaaccgatcgaacatctacaccaacaccgacgaaaacaccacactaccaccgtcttcgccgccgaactactaaaacgcatccgccaaactacgacgctacgttttcgccaactcaccgataacgatttcaactctaataaataacgtaaaactccccgactaataaatcgtctaaatacgaattctatcgttctatatcgtaatcaaacgatcgccgtcccaaccgtaccaaatcacttacgatttccgtaacaacgacatccaacccgtcaaatcccgttcacgccgccacacccgttttaccaccctacgacccaacgaatcgtaaaaataacgactttcgaccaacgactctacatattatatccgcgtataatacaccaaccgatactaactatcgtaataataccgataaatacgctcatcatccgtacgaataaccccttccgaaataaaatcgattttctctatcaacctaccgtaacgatcataccgataaaaataatacgcgtcacgaacgatacgattatccgaccacatactaaaaatactatccgaatacaactccgaatcgaacaaacgattacctaccgaatctataacatacgaaatacgaatattcaaattcgctacgataatataaacgccgatcaacctaacgataatactataactataactcccgatctaacgacgactactaataccgataaattcgccgatatcgtcccacgtataacgcgatcgacaacaacgattacgtactaaccgtaactaccgacgaaataaaaaaaaaaatcataaaaaaaaacgaacaaaataacctaacaaaaaaacgcgatatattccaaccgaaaattatacacataactaccgcaaaaaaaacgaaatacaaaacaccgaaaaaaacgatatatataaccaccgctataattatattatcaaacacgta

SEQ ID NO: 5489 - DNA, 537 bp, Artificial Sequence
  chemically treated genomic DNA (Homo sapiens) CpG-island No: 5489
aagcgagtgttcggggtttttcgtggtgattatttttttttttcggatgatcggcgatttatatttttagaagggtgtttaagcgtattattgtgtcggttggtgcgggaaataaggtttaattcggtgcggcgtggggaatcgtatattatttaggttatagtgcggtgtacggaggtgacgaggtgcgggttattgtcgtttaggcgtgtatatcgcgggtgtggggtgggtaagtgagatttttttgggcgtagaggtgggagtcggatttgcgtttttcgcggtagttcgaatggtttttacgttgtggtcgtgtagagtatagattgcggacggtagaggcgttttgggtgtttatagtgggtgtaatttgcgcggtgtaaagtgttaattttgttttcgttttcgttggttataggtgtggttatagatgtgataagtcggttttttttacgaggttgcggcggagagtgtggtatagggttatttagattattttttataaatgtagttaaggtttgttaaataataaga

SEQ ID NO: 5490 - DNA, 537 bp, Artificial Sequence
  chemically treated genomic DNA (Homo sapiens) CpG-island No: 5490
tcttattatttaacaaaccttaactacatttataaaaaataatctaaataaccctataccacactctccgccgcaacctcgtaaaaaaaaccgacttatcacatctataaccacacctataaccaacgaaaacgaaaacaaaattaacactttacaccgcgcaaattacacccactataaacacccaaaacgcctctaccgtccgcaatctatactctacacgaccacaacgtaaaaaccattcgaactaccgcgaaaaacgcaaatccgactcccacctctacgcccaaaaaaatctcacttacccaccccacacccgcgatatacacgcctaaacgacaataacccgcacctcgtcacctccgtacaccgcactataacctaaataatatacgattccccacgccgcaccgaattaaaccttatttcccgcaccaaccgacacaataatacgcttaaacacccttctaaaaatataaatcgccgatcatccgaaaaaaaaaaataatcaccacgaaaaaccccgaacactcgctt

SEQ ID NO: 5491 - DNA, 537 bp, Artificial Sequence
  chemically treated genomic DNA (Homo sapiens) CpG-island No: 5491
ttttattgtttgatagattttagttgtatttgtaaaaggtggtttagatggttttatgttatatttttcgtcgtaatttcgtgaggagagtcggtttattatatttataattatatttgtaattagcgaaagcgggggtagggttgatattttgtatcgcgtaggttgtatttattataaatatttaaagcgtttttgtcgttcgtaatttatgttttatacggttatagcgtaagaattattcgaattgtcgcgaagggcgtagattcgatttttatttttgcgtttaggagggttttatttatttattttatattcgcggtgtatacgtttgagcgatagtggttcgtatttcgttattttcgtatatcgtattgtgatttgaataatatacggttttttacgtcgtatcgggttgagttttgtttttcgtattaatcggtataatgatgcgtttaagtatttttttaggaatataaatcgtcggttattcggggagagggggtagttattacgaagagtttcgggtattcgttt

SEQ ID NO: 5492 - DNA, 537 bp, Artificial Sequence
  chemically treated genomic DNA (Homo sapiens) CpG-island No: 5492
aaacgaatacccgaaactcttcgtaataactaccccctctccccgaataaccgacgatttatattcctaaaaaaatacttaaacgcatcattataccgattaatacgaaaaacaaaactcaacccgatacgacgtaaaaaaccgtatattattcaaatcacaatacgatatacgaaaataacgaaatacgaaccactatcgctcaaacgtatacaccgcgaatataaaataaataaataaaaccctcctaaacgcaaaaataaaaatcgaatctacgcccttcgcgacaattcgaataattcttacgctataaccgtataaaacataaattacgaacgacaaaaacgctttaaatatttataataaatacaacctacgcgatacaaaatatcaaccctacccccgctttcgctaattacaaatataattataaatataataaaccgactctcctcacgaaattacgacgaaaaatataacataaaaccatctaaaccaccttttacaaatacaactaaaatctatcaaacaataaaa

SEQ ID NO: 5493 - DNA, 572 bp, Artificial Sequence
  chemically treated genomic DNA (Homo sapiens) CpG-island No: 5493
atttacgagagatataaaatgtacgtttttacgttatattttttttatttcgtaatgggttaagattgttaataggtaggttatttcgtagcgttcgcggagttgtaggttcgttttcgttagggtgtggcgttgtttttttggcgttgggcgggggaggaggggcgcgcggcggtcgaggaggggcgcgcggcggtcgggcggggcgagcggaggcgagtggaggacgcgtagacgcgtcgcggttttcgtttgtcgttgtttcgtcgtagtcgtcgttttagtttattcggtattaggaatagtttcgagcggcgagacggttttcgttatgtttgcggttatgagggagaggttcgatcggtttttgtacgagaagaattgtatgattgattttttggttaagttcgaggttaaaatcggcgtgaataggagttttatcgtttttggtgggtggtcgggggtcgtcgtcgttggtagggttacgggagtcgtcgttgttttagttgttggggaaggaagtagggagaggattcgggaaaggtggagtcggagatagacgggataagtag

SEQ ID NO: 5494 - DNA, 572 bp, Artificial Sequence
  chemically treated genomic DNA (Homo sapiens) CpG-island No: 5494
ctacttatcccgtctatctccgactccacctttcccgaatcctctccctacttccttccccaacaactaaaacaacgacgactcccgtaaccctaccaacgacgacgacccccgaccacccaccaaaaacgataaaactcctattcacgccgattttaacctcgaacttaaccaaaaaatcaatcatacaattcttctcgtacaaaaaccgatcgaacctctccctcataaccgcaaacataacgaaaaccgtctcgccgctcgaaactattcctaataccgaataaactaaaacgacgactacgacgaaacaacgacaaacgaaaaccgcgacgcgtctacgcgtcctccactcgcctccgctcgccccgcccgaccgccgcgcgcccctcctcgaccgccgcgcgcccctcctcccccgcccaacgccaaaaaaacaacgccacaccctaacgaaaacgaacctacaactccgcgaacgctacgaaataacctacctattaacaatcttaacccattacgaaataaaaaaaatataacgtaaaaacgtacattttatatctctcgtaaat

SEQ ID NO: 5495 - DNA, 572 bp, Artificial Sequence
  chemically treated genomic DNA (Homo sapiens) CpG-island No: 5495
ttgtttgtttcgtttgttttcgattttatttttttcgagttttttttttgtttttttttttagtagttggggtagcggcggttttcgtggttttattagcggcggcgattttcggttatttattaagagcgatgaagtttttgtttacgtcggttttggtttcgagtttggttagaaggttagttatgtagtttttttcgtgtaggaatcggtcgaattttttttttatggtcgtagatatggcggggatcgtttcgtcgttcggggttgtttttagtgtcggatagattggagcggcgattgcggcggagtagcggtaggcggggatcgcggcgcgtttacgcgttttttattcgttttcgttcgtttcgttcggtcgtcgcgcgttttttttcggtcgtcgcgcgttttttttttttcgtttagcgttagggggatagcgttatattttggcgggggcgggtttgtaatttcgcggacgttgcgaggtggtttgtttgttgatagttttaatttattgcggggtaaaaaggatgtggcgtgggggcgtgtattttgtgtttttcgtgggt

SEQ ID NO: 5496 - DNA, 572 bp, Artificial Sequence
  chemically treated genomic DNA (Homo sapiens) CpG-island No: 5496
acccacgaaaaacacaaaatacacgcccccacgccacatcctttttaccccgcaataaattaaaactatcaacaaacaaaccacctcgcaacgtccgcgaaattacaaacccgcccccgccaaaatataacgctatccccctaacgctaaacgaaaaaaaaaaaacgcgcgacgaccgaaaaaaaacgcgcgacgaccgaacgaaacgaacgaaaacgaataaaaaacgcgtaaacgcgccgcgatccccgcctaccgctactccgccgcaatcgccgctccaatctatccgacactaaaaacaaccccgaacgacgaaacgatccccgccatatctacgaccataaaaaaaaaattcgaccgattcctacacgaaaaaaactacataactaaccttctaaccaaactcgaaaccaaaaccgacgtaaacaaaaacttcatcgctcttaataaataaccgaaaatcgccgccgctaataaaaccacgaaaaccgccgctaccccaactactaaaaaaaaaaacaaaaaaaaaactcgaaaaaaataaaatcgaaaacaaacgaaacaaacaa

SEQ ID NO: 5497 - DNA, 540 bp, Artificial Sequence
  chemically treated genomic DNA (Homo sapiens) CpG-island No: 5497
ggaggtcgcggagcggagaagcgcggtgtagtatttgtagtattatagtaagtttttttttttcggaggatttatcgttttagaatttatttgttttggtcggtcggggatcgcgcggtagcgtaagttatttttataagagttttaataatttaggagtcgtagggagaaattcggtagaaattcgggaggaattcggttttgagttttcgagatagttcgttttttcgtcggaagttttgtttaagaaatggtgtcgcgttcgcgattttttatcgtttgtttgtttcggtatttgtcgttcggcgttaggatttttagtttttgacgtggtatgaagattttttttttcgcgagagaattatgaaagttttttattttttttttaagtcgggaagattatgtggggcgtatgtatcgttattaaaaagggtttaatttcgattttttttcgtttttagttttttagcgagtatgggtggtattagttattttttgttaaggggcgaagattgtgttacgaggggaatttgtgtggtt

SEQ ID NO: 5498 - DNA, 540 bp, Artificial Sequence
  chemically treated genomic DNA (Homo sapiens) CpG-island No: 5498
aaccacacaaattcccctcgtaacacaatcttcgccccttaacaaaaaataactaataccacccatactcgctaaaaaactaaaaacgaaaaaaaatcgaaattaaaccctttttaataacgatacatacgccccacataatcttcccgacttaaaaaaaaaataaaaaactttcataattctctcgcgaaaaaaaaaatcttcataccacgtcaaaaactaaaaatcctaacgccgaacgacaaataccgaaacaaacaaacgataaaaaatcgcgaacgcgacaccatttcttaaacaaaacttccgacgaaaaaacgaactatctcgaaaactcaaaaccgaattcctcccgaatttctaccgaatttctccctacgactcctaaattattaaaactcttataaaaataacttacgctaccgcgcgatccccgaccgaccaaaacaaataaattctaaaacgataaatcctccgaaaaaaaaaaacttactataatactacaaatactacaccgcgcttctccgctccgcgacctcc

SEQ ID NO: 5499 - DNA, 540 bp, Artificial Sequence
  chemically treated genomic DNA (Homo sapiens) CpG-island No: 5499
aattatatagatttttttcgtggtatagttttcgttttttaatagagagtagttagtattatttatattcgttgagaaattggaaacgagggagggtcgaagttaaattttttttagtggcggtgtatgcgttttatatggttttttcggtttgggaaaggaatgagaagtttttatgattttttcgcgagaagggaagtttttatgttacgttagagattagagattttggcgtcgagcgataggtgtcggaataaataggcgatgagaaatcgcggacgcggtattattttttgggtaggattttcggcggaaaagcgggttgtttcggaaatttagagtcgggtttttttcgggtttttgtcgggtttttttttgcggtttttgggttgttgagatttttgtgaagatggtttgcgttgtcgcgcggttttcggtcgattaggataggtgggttttgaggcggtgggtttttcgaaaggaaggggtttgttgtggtgttgtaggtgttatatcgcgttttttcgtttcgcggttttt

SEQ ID NO: 5500 - DNA, 540 bp, Artificial Sequence
  chemically treated genomic DNA (Homo sapiens) CpG-island No: 5500
aaaaaccgcgaaacgaaaaaacgcgatataacacctacaacaccacaacaaaccccttcctttcgaaaaacccaccgcctcaaaacccacctatcctaatcgaccgaaaaccgcgcgacaacgcaaaccatcttcacaaaaatctcaacaacccaaaaaccgcaaaaaaaaacccgacaaaaacccgaaaaaaacccgactctaaatttccgaaacaacccgcttttccgccgaaaatcctacccaaaaaataataccgcgtccgcgatttctcatcgcctatttattccgacacctatcgctcgacgccaaaatctctaatctctaacgtaacataaaaacttcccttctcgcgaaaaaatcataaaaacttctcattcctttcccaaaccgaaaaaaccatataaaacgcatacaccgccactaaaaaaaatttaacttcgaccctccctcgtttccaatttctcaacgaatataaataatactaactactctctattaaaaaacgaaaactataccacgaaaaaaatctatataatt

SEQ ID NO: 5501 - DNA, 950 bp, Artificial Sequence
  chemically treated genomic DNA (Homo sapiens) CpG-island No: 5501
tcgtatcgtcgtgtttttcggtttaagttttaatattcgggcgaattggcgtgttttattagttcggtagtatgaattattattcgttagttattttattggagacgacggaagatcgttgtcgaagcggcgttttatcgtttttagtatgacgttttgtattgttttattgttgaagtcgtcggtagtgatcgtttagtgtagtgttttacgattatagtagtttagcgcgaacgtgatacgtagttttttttcgttattatagtagaattcgaattcgttagagtattatcgttgattgtttttttttacggttattttgtttgtatgtgttcgtttcgatggcggtatagtaggttttcgtttaagtaatagcgtattttggcgtatgattcggtaaatacgtttggtattgatcgtaggtatattattaagttttgtttgtttgcgaagtagcgtttatattcgacgataattatacgttggtagtttttcgataatatggtgtatacggagaagtatattcgtattattagtgtgacgattgcggcggttatttatttagttatcggttcgtttgagaatgacgtgtaattgcgtacgcgatattcggagataacggttgattaagtttatttcgtttatttttaggagggattttcgtagagattgatttgttaggcgatgcggagcgttggttattggatcggtcgtgatacgagagttagtgacgtgggtaaaatttatgtgcgttattttaagtttaattagtttttgttatgtatattttcgcgttgtcgttaagcgtaggtaggtaattagtagtaaggacggcgtcgtttattcgaattagtttcgttttacgaattagatatgcggcgaagatcgtgtatatggtagtatagtggtagtttttggattgttgtgtgattattttttcgtatgacgat

SEQ ID NO: 5502 - DNA, 950 bp, Artificial Sequence
  chemically treated genomic DNA (Homo sapiens) CpG-island No: 5502
atcgtcatacgaaaaaataatcacacaacaatccaaaaactaccactatactaccatatacacgatcttcgccgcatatctaattcgtaaaacgaaactaattcgaataaacgacgccgtccttactactaattacctacctacgcttaacgacaacgcgaaaatatacataacaaaaactaattaaacttaaaataacgcacataaattttacccacgtcactaactctcgtatcacgaccgatccaataaccaacgctccgcatcgcctaacaaatcaatctctacgaaaatccctcctaaaaataaacgaaataaacttaatcaaccgttatctccgaatatcgcgtacgcaattacacgtcattctcaaacgaaccgataactaaataaataaccgccgcaatcgtcacactaataatacgaatatacttctccgtatacaccatattatcgaaaaactaccaacgtataattatcgtcgaatataaacgctacttcgcaaacaaacaaaacttaataatatacctacgatcaataccaaacgtatttaccgaatcatacgccaaaatacgctattacttaaacgaaaacctactataccgccatcgaaacgaacacatacaaacaaaataaccgtaaaaaaaaacaatcaacgataatactctaacgaattcgaattctactataataacgaaaaaaaactacgtatcacgttcgcgctaaactactataatcgtaaaacactacactaaacgatcactaccgacgacttcaacaataaaacaatacaaaacgtcatactaaaaacgataaaacgccgcttcgacaacgatcttccgtcgtctccaataaaataactaacgaataataattcatactaccgaactaataaaacacgccaattcgcccgaatattaaaacttaaaccgaaaaacacgacgatacga

SEQ ID NO: 5503 - DNA, 950 bp, Artificial Sequence
  chemically treated genomic DNA (Homo sapiens) CpG-island No: 5503
gtcgttatacggaagaataattatatagtagtttaaggattgttattgtattgttatgtgtacgattttcgtcgtatatttagttcgtggaacggagttgattcgggtagacggcgtcgtttttgttgttagttatttgtttacgtttggcgataacgcggggatgtgtatagtaaggattgattaagtttagggtaacgtatatgggttttatttacgttattgattttcgtattacgatcggtttagtgattaacgtttcgtatcgtttagtaggttagtttttacgaggattttttttggggataggcggagtaagtttagttagtcgttgttttcgggtgtcgcgtgcgtagttgtacgttatttttagacgaatcgatgattggatggatggtcgtcgtagtcgttatattgatgatacggatgtgttttttcgtatatattatgttatcggagagttgttaacgtatggttatcgtcgggtatgggcgttgtttcgtagataggtagaatttgatggtatgtttgcgattaatgttaaacgtgtttatcggattatgcgttagaatgcgttgttgtttgagcgaaaatttgttgtatcgttatcgaaacgggtatatataggtagagtggtcgtgaaagaaagtaattagcgatggtgttttgacgggttcgagttttgttgtgataacggagagagattgcgtgttacgttcgcgttggattgttgtgatcgtgaggtattgtattgggcggttattatcggcggttttaatagtgaaatagtataggacgttatgttgggagcggtggaacgtcgtttcggtaacgatttttcgtcgtttttagtggagtggttgacggataatggtttatgttatcgggttaatgaaatacgttagttcgttcggatgttgggatttgaatcgaagaatacggcggtgcgg

SEQ ID NO: 5504 - DNA, 950 bp, Artificial Sequence
  chemically treated genomic DNA (Homo sapiens) CpG-island No: 5504
ccgcaccgccgtattcttcgattcaaatcccaacatccgaacgaactaacgtatttcattaacccgataacataaaccattatccgtcaaccactccactaaaaacgacgaaaaatcgttaccgaaacgacgttccaccgctcccaacataacgtcctatactatttcactattaaaaccgccgataataaccgcccaatacaatacctcacgatcacaacaatccaacgcgaacgtaacacgcaatctctctccgttatcacaacaaaactcgaacccgtcaaaacaccatcgctaattactttctttcacgaccactctacctatatatacccgtttcgataacgatacaacaaattttcgctcaaacaacaacgcattctaacgcataatccgataaacacgtttaacattaatcgcaaacataccatcaaattctacctatctacgaaacaacgcccatacccgacgataaccatacgttaacaactctccgataacataatatatacgaaaaaacacatccgtatcatcaatataacgactacgacgaccatccatccaatcatcgattcgtctaaaaataacgtacaactacgcacgcgacacccgaaaacaacgactaactaaacttactccgcctatccccaaaaaaaatcctcgtaaaaactaacctactaaacgatacgaaacgttaatcactaaaccgatcgtaatacgaaaatcaataacgtaaataaaacccatatacgttaccctaaacttaatcaatccttactatacacatccccgcgttatcgccaaacgtaaacaaataactaacaacaaaaacgacgccgtctacccgaatcaactccgttccacgaactaaatatacgacgaaaatcgtacacataacaatacaataacaatccttaaactactatataattattcttccgtataacgac

SEQ ID NO: 5505 - DNA, 519 bp, Artificial Sequence
  chemically treated genomic DNA (Homo sapiens) CpG-island No: 5505
gcggcggcggcggatgagttgggacgcgtgtttttcgtatttagttatattatgtaaaaattggaagaagagttggatgtggtgttgtttgatcgttcgggttatcgtattaaatttattaatgtcgggaggatgttgttggagcgaaggcgcgtttagttggaagtcgtagataaattgattattgatgcggaagttttcgcgcgcgggtgggaaacgtattttattttgtgatcgaagcgttggtatcgatatttgtttttttttcgttaatcgataaattggcggtaaaagttaatatttaattggtaattattatagaagtgttggcgggggcgtgggaacggttggagtaggggcgggcggaaattgtatcgcgtcggatatgtattttcgtttttcgtcggagattaattcgcgtaagttttatacgttaatgaacgtttacgttgtcgcgtttgattattcgatttattaggagtcggaatcgtaatttgaagtgacgcgtgtgaaatatcg

SEQ ID NO: 5506 - DNA, 519 bp, Artificial Sequence
  chemically treated genomic DNA (Homo sapiens) CpG-island No: 5506
cgatatttcacacgcgtcacttcaaattacgattccgactcctaataaatcgaataatcaaacgcgacaacgtaaacgttcattaacgtataaaacttacgcgaattaatctccgacgaaaaacgaaaatacatatccgacgcgatacaatttccgcccgcccctactccaaccgttcccacgcccccgccaacacttctataataattaccaattaaatattaacttttaccgccaatttatcgattaacgaaaaaaaaacaaatatcgataccaacgcttcgatcacaaaataaaatacgtttcccacccgcgcgcgaaaacttccgcatcaataatcaatttatctacgacttccaactaaacgcgccttcgctccaacaacatcctcccgacattaataaatttaatacgataacccgaacgatcaaacaacaccacatccaactcttcttccaatttttacataatataactaaatacgaaaaacacgcgtcccaactcatccgccgccgccgc

SEQ ID NO: 5507 - DNA, 519 bp, Artificial Sequence
  chemically treated genomic DNA (Homo sapiens) CpG-island No: 5507
cgatattttatacgcgttattttagattacggtttcggtttttgatgaatcgggtgattaggcgcggtaacgtagacgtttattaacgtatagagtttgcgcgagttgattttcgacgaggaacgaaaatgtatattcggcgcgatataattttcgttcgtttttgttttagtcgtttttacgttttcgttagtatttttgtgatgattgttagttgggtattggtttttgtcgttagtttgtcgattaacgggaaaaaggtaggtgtcggtattagcgtttcggttataaggtgaaatgcgttttttattcgcgcgcgagagttttcgtattagtagttagtttatttgcggtttttagttaaacgcgttttcgttttaataatattttttcgatattggtgaatttggtacgatggttcgagcggttaaatagtattatatttagttttttttttagtttttgtatggtgtagttaagtgcggaaggtacgcgttttagtttattcgtcgtcgtcgt

SEQ ID NO: 5508 - DNA, 519 bp, Artificial Sequence
  chemically treated genomic DNA (Homo sapiens) CpG-island No: 5508
acgacgacgacgaataaactaaaacgcgtaccttccgcacttaactacaccatacaaaaactaaaaaaaaaactaaatataatactatttaaccgctcgaaccatcgtaccaaattcaccaatatcgaaaaaatattattaaaacgaaaacgcgtttaactaaaaaccgcaaataaactaactactaatacgaaaactctcgcgcgcgaataaaaaacgcatttcaccttataaccgaaacgctaataccgacacctacctttttcccgttaatcgacaaactaacgacaaaaaccaatacccaactaacaatcatcacaaaaatactaacgaaaacgtaaaaacgactaaaacaaaaacgaacgaaaattatatcgcgccgaatatacattttcgttcctcgtcgaaaatcaactcgcgcaaactctatacgttaataaacgtctacgttaccgcgcctaatcacccgattcatcaaaaaccgaaaccgtaatctaaaataacgcgtataaaatatcg

SEQ ID NO: 5509 - DNA, 514 bp, Artificial Sequence
  chemically treated genomic DNA (Homo sapiens) CpG-island No: 5509
tcggagcgaatattgcgcgaaggattgcgttaggtagtgtcgcgttcggcggtttttcgtgcgttgacgtaggtagggttggtgttgcgatcgtttttatcggaataggttagagtaaaattgtttgttgaaacggtgaaagttaaatcgcgttcgtcgttgcgttataagcgtcgggttttaatgttggaaggttgcgtttagtttacgttttcgtttaatattacgcggtaattgcgcgagtgttggatcgtttggggattagcgttatgttagttaacgaagtaggttgttgtggcgcggtggattattattttaatgcgtaggagaaagggttggtacgggcgcgtaataatattgatgtttggtggttcgcgattgaagtaggtgtcgaggtaattttgtaaatcgttagcggttgcggcgcgtttgttaaagagtatgggtagatgttgaaaaacgatgcgttatatgtcgataaagtacgttaggttagtgaattggcggtcgattt

SEQ ID NO: 5510 - DNA, 514 bp, Artificial Sequence
  chemically treated genomic DNA (Homo sapiens) CpG-island No: 5510
aaatcgaccgccaattcactaacctaacgtactttatcgacatataacgcatcgtttttcaacatctacccatactctttaacaaacgcgccgcaaccgctaacgatttacaaaattacctcgacacctacttcaatcgcgaaccaccaaacatcaatattattacgcgcccgtaccaaccctttctcctacgcattaaaataataatccaccgcgccacaacaacctacttcgttaactaacataacgctaatccccaaacgatccaacactcgcgcaattaccgcgtaatattaaacgaaaacgtaaactaaacgcaaccttccaacattaaaacccgacgcttataacgcaacgacgaacgcgatttaactttcaccgtttcaacaaacaattttactctaacctattccgataaaaacgatcgcaacaccaaccctacctacgtcaacgcacgaaaaaccgccgaacgcgacactacctaacgcaatccttcgcgcaatattcgctccga

SEQ ID NO: 5511 - DNA, 514 bp, Artificial Sequence
  chemically treated genomic DNA (Homo sapiens) CpG-island No: 5511
aaatcgatcgttagtttattgatttgacgtgttttatcggtatataacgtatcgttttttagtatttgtttatattttttgataaacgcgtcgtagtcgttggcggtttgtaaaattgtttcggtatttgttttaatcgcgggttattaggtattaatattattgcgcgttcgtgttagtttttttttttgcgtattaagatgatagtttatcgcgttataatagtttgtttcgttagttggtatgacgttgatttttagacgatttagtattcgcgtagttgtcgcgtggtgttgggcgaaagcgtaggttgggcgtagttttttaatattaaaattcgacgtttatggcgtagcggcggacgcggtttagtttttatcgttttagtaggtagttttgttttgatttgtttcggtaaaaacggtcgtagtattagttttatttgcgttagcgtacggaagatcgtcggacgcggtattatttggcgtaatttttcgcgtagtattcgtttcgg

SEQ ID NO: 5512 - DNA, 514 bp, Artificial Sequence
  chemically treated genomic DNA (Homo sapiens) CpG-island No: 5512
ccgaaacgaatactacgcgaaaaattacgccaaataataccgcgtccgacgatcttccgtacgctaacgcaaataaaactaatactacgaccgtttttaccgaaacaaatcaaaacaaaactacctactaaaacgataaaaactaaaccgcgtccgccgctacgccataaacgtcgaattttaatattaaaaaactacgcccaacctacgctttcgcccaacaccacgcgacaactacgcgaatactaaatcgtctaaaaatcaacgtcataccaactaacgaaacaaactattataacgcgataaactatcatcttaatacgcaaaaaaaaaaactaacacgaacgcgcaataatattaatacctaataacccgcgattaaaacaaataccgaaacaattttacaaaccgccaacgactacgacgcgtttatcaaaaaatataaacaaatactaaaaaacgatacgttatataccgataaaacacgtcaaatcaataaactaacgatcgattt

SEQ ID NO: 5513 - DNA, 1316 bp, Artificial Sequence
  chemically treated genomic DNA (Homo sapiens) CpG-island No: 5513
  unsure (207..)
gtcgttagttcgcggtcggtaatgtcgttttcggttattacgcgatttatcgcgaggttaagttgttgtttaatttgggcgacgtttagttcgggtaaatcggtatcgtttcggcgtcggtttttttgtagggcgtgggcggcgtcgatcgttttttcgtttttttttacggtaacgtatattagtatatttttatatgagtggttnncgcggaatagttagtaggcgttcgttataggttaggattaggtcgatgtcgagcgggaacggatgcgggcgttcggtgagttcgtgtagaatgtatttcggtagttgcggagcgattattcgtttttcggtaatattcgtattagtaaggcgtaatatgcgttcgtcgtttaggttggcgatttgtaaaattagcgtcgtattcgttttcggcgtaacggcggtgtcggtggaaagggcgttgagttgttcgttggaaatcgttttattcgttatcgcgaaggtcgtttgtttcggttggttgattagcggcgcgttggtatgaaaacgtaggttttggttgacgatatcgttatttaatggggtagaaagttatatcggcgtgtcgttatcggttagcgttagtagtacgttggtggtggcgatatttagcggttgttagtcgcgtttgagttgatgtagggcgataattacgttcggttcgtttatggtttttaataggcgacgaaaattgtgttgggtattttgtacgggaagtataaaagcggtttttagggttatgcgttgttttcgcgaattatcgtaaagaagtcgattcggttggcgtttatttcggtttggcgtgcggtaatgcgtgttatacggttagcgtttagcggggtaataagggtttttgataagttttgaaagtggcgagattgttgtattagcgcgttaattagcgcgtagcgttcggcgtgttgtttattacgtttttgtatttagttgtagtcgagcgtgtcgttagttaggcgtacggcggcgcgggttagcgtggcgtcgtcggtaaaaaaacgttcgtcggtgtcgtttattcgcgtttgaatttgtattaggttagttttagcggcgcggattattttatagtcggcggtgatgtttagcgcgtttaggcgtgttgttagtttagtcggttggttgtgcgttagtacggatatttagtgttggcgggtcgcggtatttgcgtgtatttagtgttttatagtgaatttaattatgtcggcgcgcgtttaggttgacggagtatttcgtcggttggttttatcgtttcgcggttaggttgttacgtt

SEQ ID NO: 5514 - DNA, 1316 bp, Artificial Sequence
  chemically treated genomic DNA (Homo sapiens) CpG-island No: 5514
  unsure (1109..)
aacgtaacaacctaaccgcgaaacgataaaaccaaccgacgaaatactccgtcaacctaaacgcgcgccgacataattaaattcactataaaacactaaatacacgcaaataccgcgacccgccaacactaaatatccgtactaacgcacaaccaaccgactaaactaacaacacgcctaaacgcgctaaacatcaccgccgactataaaataatccgcgccgctaaaactaacctaatacaaattcaaacgcgaataaacgacaccgacgaacgtttttttaccgacgacgccacgctaacccgcgccgccgtacgcctaactaacgacacgctcgactacaactaaatacaaaaacgtaataaacaacacgccgaacgctacgcgctaattaacgcgctaatacaacaatctcgccactttcaaaacttatcaaaaacccttattaccccgctaaacgctaaccgtataacacgcattaccgcacgccaaaccgaaataaacgccaaccgaatcgacttctttacgataattcgcgaaaacaacgcataaccctaaaaaccgcttttatacttcccgtacaaaatacccaacacaattttcgtcgcctattaaaaaccataaacgaaccgaacgtaattatcgccctacatcaactcaaacgcgactaacaaccgctaaatatcgccaccaccaacgtactactaacgctaaccgataacgacacgccgatataactttctaccccattaaataacgatatcgtcaaccaaaacctacgttttcataccaacgcgccgctaatcaaccaaccgaaacaaacgaccttcgcgataacgaataaaacgatttccaacgaacaactcaacgccctttccaccgacaccgccgttacgccgaaaacgaatacgacgctaattttacaaatcgccaacctaaacgacgaacgcatattacgccttactaatacgaatattaccgaaaaacgaataatcgctccgcaactaccgaaatacattctacacgaactcaccgaacgcccgcatccgttcccgctcgacatcgacctaatcctaacctataacgaacgcctactaactattccgcgnnaaccactcatataaaaatatactaatatacgttaccgtaaaaaaaaacgaaaaaacgatcgacgccgcccacgccctacaaaaaaaccgacgccgaaacgataccgatttacccgaactaaacgtcgcccaaattaaacaacaacttaacctcgcgataaatcgcgtaataaccgaaaacgacattaccgaccgcgaactaacgac

SEQ ID NO: 5515 - DNA, 1316 bp, Artificial Sequence
  chemically treated genomic DNA (Homo sapiens) CpG-island No: 5515
  unsure (1109..)
ggcgtggtaatttaatcgcgggacggtgaaattagtcggcggagtatttcgttagtttagacgcgcgtcgatatgattgaatttattatggagtattgaatgtacgtagatatcgcgattcgttagtattggatgttcgtgttggcgtatagttaatcggttgaattggtagtacgtttgaacgcgttaaatattatcgtcgattatgaggtgattcgcgtcgttgaaattggtttggtatagatttaggcgcggatgggcggtatcggcgaacgtttttttgtcggcgacgttacgttgattcgcgtcgtcgtgcgtttgattgacggtacgttcggttatagttgggtgtaggggcgtgataaatagtacgtcgaacgttgcgcgttgattgacgcgttgatgtagtaatttcgttatttttaaaatttattagaaatttttattgtttcgttggacgttgatcgtatggtacgtattgtcgtacgttaggtcgaagtgaacgttagtcgggtcgatttttttacgatggttcgcggagataacgtatgattttggaaatcgtttttatgtttttcgtgtaggatgtttagtatagttttcgtcgtttgttaaaggttatgagcgagtcgggcgtgattgtcgttttgtattagtttaaacgcggttggtaatcgttgaatatcgttattattagcgtgttgttgacgttggtcgataacgatacgtcggtgtggttttttattttattaaataacgatatcgttaattagagtttgcgtttttatattaacgcgtcgttggttagttagtcggaataggcgattttcgcggtgacggatgaggcgatttttagcgaatagtttaacgttttttttatcggtatcgtcgttgcgtcggaagcgggtgcgacgttgattttataggtcgttagtttgagcggcggacgtatgttgcgttttattggtgcgggtattgtcgaagaacgaatgatcgtttcgtagttgtcggagtgtattttgtacgaatttatcgagcgttcgtattcgttttcgttcggtatcgatttgattttgatttgtggcgagcgtttgttggttatttcgcgnnaattatttatgtggaggtgtgttgatgtacgttgtcgtgaaagggggcgagaaggcgatcgacgtcgtttacgttttgtaagagagtcgacgtcgaggcgatatcgatttgttcgaattgagcgtcgtttagattgaatagtagtttaatttcgcggtagatcgcgtgatgatcgaaggcggtattgtcgatcgcgaattggcggt

SEQ ID NO: 5516 - DNA, 1316 bp, Artificial Sequence
  chemically treated genomic DNA (Homo sapiens) CpG-island No: 5516
  unsure (207..)
accgccaattcgcgatcgacaataccgccttcgatcatcacgcgatctaccgcgaaattaaactactattcaatctaaacgacgctcaattcgaacaaatcgatatcgcctcgacgtcgactctcttacaaaacgtaaacgacgtcgatcgccttctcgccccctttcacgacaacgtacatcaacacacctccacataaataattnncgcgaaataaccaacaaacgctcgccacaaatcaaaatcaaatcgataccgaacgaaaacgaatacgaacgctcgataaattcgtacaaaatacactccgacaactacgaaacgatcattcgttcttcgacaatacccgcaccaataaaacgcaacatacgtccgccgctcaaactaacgacctataaaatcaacgtcgcacccgcttccgacgcaacgacgataccgataaaaaaaacgttaaactattcgctaaaaatcgcctcatccgtcaccgcgaaaatcgcctattccgactaactaaccaacgacgcgttaatataaaaacgcaaactctaattaacgatatcgttatttaataaaataaaaaaccacaccgacgtatcgttatcgaccaacgtcaacaacacgctaataataacgatattcaacgattaccaaccgcgtttaaactaatacaaaacgacaatcacgcccgactcgctcataacctttaacaaacgacgaaaactatactaaacatcctacacgaaaaacataaaaacgatttccaaaatcatacgttatctccgcgaaccatcgtaaaaaaatcgacccgactaacgttcacttcgacctaacgtacgacaatacgtaccatacgatcaacgtccaacgaaacaataaaaatttctaataaattttaaaaataacgaaattactacatcaacgcgtcaatcaacgcgcaacgttcgacgtactatttatcacgcccctacacccaactataaccgaacgtaccgtcaatcaaacgcacgacgacgcgaatcaacgtaacgtcgccgacaaaaaaacgttcgccgataccgcccatccgcgcctaaatctataccaaaccaatttcaacgacgcgaatcacctcataatcgacgataatatttaacgcgttcaaacgtactaccaattcaaccgattaactatacgccaacacgaacatccaatactaacgaatcgcgatatctacgtacattcaatactccataataaattcaatcatatcgacgcgcgtctaaactaacgaaatactccgccgactaatttcaccgtcccgcgattaaattaccacgcc

SEQ ID NO: 5517 - DNA, 504 bp, Artificial Sequence
  chemically treated genomic DNA (Homo sapiens) CpG-island No: 5517
  unsure (401, 403..)
gttgaatgtttggcggttaattaattagtaggtgattatcgtagtgatgcgttggcggttgaagagatattgacgttggcgaattggtgtttgtagaattatttcgggttgaaaacgttaatcgggagtgtattatgagtattttgattcgaggttgtttattcgtcggttacgtacggtttatcggcgtaacgcgagtacgacgttagtgcgtcgtttaaagcgagttcgttgtttggatatttgacggaattatacgtgtatatagtcgaggtatcgcgaataaacgttcgattagtatcgcgataggatcgggtattatacgtggttgtcgatcgtaaattatcgggttggtaaggattagggagcgttaagttagattgtggttttttgttcgtttntnntggaacgatagtatagacgtatcgcgcgacggatgtataagtaagatataatcgtagtatatatagagtaaatataacgcgagtaagaaataagaagacg

SEQ ID NO: 5518 - DNA, 504 bp, Artificial Sequence
  chemically treated genomic DNA (Homo sapiens) CpG-island No: 5518
  unsure (101..102, 104)
cgtcttcttatttcttactcgcgttatatttactctatatatactacgattatatcttacttatacatccgtcgcgcgatacgtctatactatcgttccannanaaacgaacaaaaaaccacaatctaacttaacgctccctaatccttaccaacccgataatttacgatcgacaaccacgtataatacccgatcctatcgcgatactaatcgaacgtttattcgcgatacctcgactatatacacgtataattccgtcaaatatccaaacaacgaactcgctttaaacgacgcactaacgtcgtactcgcgttacgccgataaaccgtacgtaaccgacgaataaacaacctcgaatcaaaatactcataatacactcccgattaacgttttcaacccgaaataattctacaaacaccaattcgccaacgtcaatatctcttcaaccgccaacgcatcactacgataatcacctactaattaattaaccgccaaacattcaac

SEQ ID NO: 5519 - DNA, 504 bp, Artificial Sequence
  chemically treated genomic DNA (Homo sapiens) CpG-island No: 5519
  unsure (101..102, 104)
cgtttttttgttttttgttcgcgttgtgtttgttttgtgtgtgttacggttgtgttttgtttgtgtattcgtcgcgcggtgcgtttgtgttatcgttttannangagcgagtagggagttatagtttagtttgacgttttttggtttttgttagttcggtggtttgcggtcgataattacgtgtgatattcggttttgtcgcggtgttaatcgaacgtttattcgcgatatttcggttgtgtatacgtataatttcgttaggtatttagatagcgagttcgttttaagcgacgtattggcgtcgtattcgcgttacgtcgataagtcgtgcgtgatcggcggataagtaatttcgggttaggatatttatgatgtattttcgattggcgtttttagttcggagtagttttataggtattagttcgttagcgttagtatttttttagtcgttagcgtattattgcgatagttatttattggttggttagtcgttaggtatttagt

SEQ ID NO: 5520 - DNA, 504 bp, Artificial Sequence
  chemically treated genomic DNA (Homo sapiens) CpG-island No: 5520
  unsure (401, 403..)
actaaatacctaacgactaaccaaccaataaataactatcgcaataatacgctaacgactaaaaaaatactaacgctaacgaactaatacctataaaactactccgaactaaaaacgccaatcgaaaatacatcataaatatcctaacccgaaattacttatccgccgatcacgcacgacttatcgacgtaacgcgaatacgacgccaatacgtcgcttaaaacgaactcgctatctaaatacctaacgaaattatacgtatacacaaccgaaatatcgcgaataaacgttcgattaacaccgcgacaaaaccgaatatcacacgtaattatcgaccgcaaaccaccgaactaacaaaaaccaaaaaacgtcaaactaaactataactccctactcgctcntnntaaaacgataacacaaacgcaccgcgcgacgaatacacaaacaaaacacaaccgtaacacacacaaaacaaacacaacgcgaacaaaaaacaaaaaaacg

SEQ ID NO: 5521 - DNA, 906 bp, Artificial Sequence
  chemically treated genomic DNA (Homo sapiens) CpG-island No: 5521
tttatcggcgatgtttttttttagtaataggcgcgtttcggcgatgtatatttgtttttggttgtagaaaatgtttgttgcggtggcgtttgtcgtttgttgtaaattcgggtagttagcgaaaacgatgttggcgtttttgtcgttcgtttttagttagacgcgttttatgttgttgtcgttcgtattttttagtagttgtttttcggtacgggttgaatcggtaaaggtaatggcgtcgatatcgttatgacgcgatagcgtttgttcggttttatgattaaaattcgttattacgtttaatatattattcggtaagtttgtttttttcgttagtttcgcgagacgaatcgtattgagcggtgattttttagacggttttagaattacgttgtttttcgtcgttagcgtcgggtcgagtttttagtaagttagtaatagcgggaagttttacggtacgatggcggtaattacgtcgatcggtttacgtacgattatcgttagtttatggttattggtggtcgttatttcgttatatattttgtcgatcgtttcggcgtattagcgaatggcgcgcgtcgcgtcgggaatattattacgtagattgtgacgaatcggtttgtcggtgtcgagagtttttagtagtgttagtttttcggcgtgggtttttattaaatcggcgagtttatttagtatcgttttacgtttagtcggagaagagagtgattagtcgtcgcgtttaaatacgtcgcgtgttgcgtttatcgtacggtcgatatcgacgtttttgtcgcgggtaattttcgttagcggtgtttgggtgatcggattaacggttttaaagggtttatttttcgtcgagttagtatatttatcggttatatataagcgggttttaatggggag

SEQ ID NO: 5522 - DNA, 906 bp, Artificial Sequence
  chemically treated genomic DNA (Homo sapiens) CpG-island No: 5522
ctccccattaaaacccgcttatatataaccgataaatatactaactcgacgaaaaataaaccctttaaaaccgttaatccgatcacccaaacaccgctaacgaaaattacccgcgacaaaaacgtcgatatcgaccgtacgataaacgcaacacgcgacgtatttaaacgcgacgactaatcactctcttctccgactaaacgtaaaacgatactaaataaactcgccgatttaataaaaacccacgccgaaaaactaacactactaaaaactctcgacaccgacaaaccgattcgtcacaatctacgtaataatattcccgacgcgacgcgcgccattcgctaatacgccgaaacgatcgacaaaatatataacgaaataacgaccaccaataaccataaactaacgataatcgtacgtaaaccgatcgacgtaattaccgccatcgtaccgtaaaacttcccgctattactaacttactaaaaactcgacccgacgctaacgacgaaaaacaacgtaattctaaaaccgtctaaaaaatcaccgctcaatacgattcgtctcgcgaaactaacgaaaaaaacaaacttaccgaataatatattaaacgtaataacgaattttaatcataaaaccgaacaaacgctatcgcgtcataacgatatcgacgccattacctttaccgattcaacccgtaccgaaaaacaactactaaaaaatacgaacgacaacaacataaaacgcgtctaactaaaaacgaacgacaaaaacgccaacatcgttttcgctaactacccgaatttacaacaaacgacaaacgccaccgcaacaaacattttctacaaccaaaaacaaatatacatcgccgaaacgcgcctattactaaaaaaaaacatcgccgataaa

SEQ ID NO: 5523 - DNA, 906 bp, Artificial Sequence
  chemically treated genomic DNA (Homo sapiens) CpG-island No: 5523
ttttttattgaaattcgtttatgtataatcggtgaatatattggttcggcggaaaatgaattttttgaaatcgttgattcggttatttaggtatcgttggcgaaaattgttcgcggtaagagcgtcgatatcgatcgtgcgatgagcgtagtacgcggcgtatttgaacgcggcgattggttattttttttttcggttaaacgtaaagcggtattgaataaattcgtcgatttaatggaagtttacgtcgaagagttggtattgttggaaattttcgatatcggtaaatcgattcgttatagtttgcgtgatgatattttcggcgcggcgcgcgttattcgttggtacgtcgaagcgatcgataaagtgtatggcgaagtggcgattattagtagttatgagttggcgatgatcgtgcgtgaatcggtcggcgtgattgtcgttatcgtgtcgtggaatttttcgttgttgttgatttgttggaaattcggttcggcgttggcggcgggaaatagcgtgattttaaaatcgtttgaaaaattatcgtttagtgcgattcgtttcgcggggttggcgaaagaagtaggtttgtcggatggtgtgttgaacgtggtgacgggttttggttatgaagtcgggtaggcgttgtcgcgttataacgatatcgacgttattgtttttatcggtttaattcgtatcgggaaatagttgttgaaagatgcgggcgatagtaatatgaaacgcgtttggttggaagcgggcggtaaaagcgttaatatcgttttcgttgattgttcggatttgtaataggcggtaagcgttatcgtagtaggtattttttataattagggataggtgtgtatcgtcggaacgcgtttgttgttggaagagagtatcgtcgatgaa

SEQ ID NO: 5524 - DNA, 906 bp, Artificial Sequence
  chemically treated genomic DNA (Homo sapiens) CpG-island No: 5524
ttcatcgacgatactctcttccaacaacaaacgcgttccgacgatacacacctatccctaattataaaaaatacctactacgataacgcttaccgcctattacaaatccgaacaatcaacgaaaacgatattaacgcttttaccgcccgcttccaaccaaacgcgtttcatattactatcgcccgcatctttcaacaactatttcccgatacgaattaaaccgataaaaacaataacgtcgatatcgttataacgcgacaacgcctacccgacttcataaccaaaacccgtcaccacgttcaacacaccatccgacaaacctacttctttcgccaaccccgcgaaacgaatcgcactaaacgataatttttcaaacgattttaaaatcacgctatttcccgccgccaacgccgaaccgaatttccaacaaatcaacaacaacgaaaaattccacgacacgataacgacaatcacgccgaccgattcacgcacgatcatcgccaactcataactactaataatcgccacttcgccatacactttatcgatcgcttcgacgtaccaacgaataacgcgcgccgcgccgaaaatatcatcacgcaaactataacgaatcgatttaccgatatcgaaaatttccaacaataccaactcttcgacgtaaacttccattaaatcgacgaatttattcaataccgctttacgtttaaccgaaaaaaaaaataaccaatcgccgcgttcaaatacgccgcgtactacgctcatcgcacgatcgatatcgacgctcttaccgcgaacaattttcgccaacgatacctaaataaccgaatcaacgatttcaaaaaattcattttccgccgaaccaatatattcaccgattatacataaacgaatttcaataaaaaa

SEQ ID NO: 5525 - DNA, 750 bp, Artificial Sequence
  chemically treated genomic DNA (Homo sapiens) CpG-island No: 5525
tcgagttacggttcgttatttttagcgtttgattgttgaagtagaacgggaagtgcgtttaggaagttgacgaaataaataagtagttttatttgttcgttaattaaacggtatttttttagtttttgtttttcgggaacggtatcgcgttatttacgttacggatttggaatattacgtttttaatatggaacgtttgcggttcgttcgcgcgtatcgtttagcgtttttacgttttttgttgcgcggtgatattaatacggttgacgttttatagttgtttattaatattcgggttattatttagattgatatcgcgattgcgaattggcgaattagttatgattttagttggtagtaagcgtatcggaagattgtttgtgattagcggtagaaggtcggttgggcgtagcgttagtattagggtagaaattagaatattggatggtttaaagaagttacgaatacgattaataatgttcgtcgtttcgttataggtgatcgatattttatcgtcgttgtttatatttattagaatttcgcggcgttcgttcggtgttagcgaaagttgttttatcgatataggagtaggtaggaatttttgatcgttagaaattatatgtaacgggcgattatcgtttatttgtagttgatagcgacgagagttcgacgcgtttagtagtcgtaagcgtatttagttacgcgagattttaacgtacgggtttgtatatcgtgtattagtagcgtatt

SEQ ID NO: 5526 - DNA, 750 bp, Artificial Sequence
  chemically treated genomic DNA (Homo sapiens) CpG-island No: 5526
aatacgctactaatacacgatatacaaacccgtacgttaaaatctcgcgtaactaaatacgcttacgactactaaacgcgtcgaactctcgtcgctatcaactacaaataaacgataatcgcccgttacatataatttctaacgatcaaaaattcctacctactcctatatcgataaaacaactttcgctaacaccgaacgaacgccgcgaaattctaataaatataaacaacgacgataaaatatcgatcacctataacgaaacgacgaacattattaatcgtattcgtaacttctttaaaccatccaatattctaatttctaccctaatactaacgctacgcccaaccgaccttctaccgctaatcacaaacaatcttccgatacgcttactaccaactaaaatcataactaattcgccaattcgcaatcgcgatatcaatctaaataataacccgaatattaataaacaactataaaacgtcaaccgtattaatatcaccgcgcaacaaaaaacgtaaaaacgctaaacgatacgcgcgaacgaaccgcaaacgttccatattaaaaacgtaatattccaaatccgtaacgtaaataacgcgataccgttcccgaaaaacaaaaactaaaaaaataccgtttaattaacgaacaaataaaactacttatttatttcgtcaacttcctaaacgcacttcccgttctacttcaacaatcaaacgctaaaaataacgaaccgtaactcga

SEQ ID NO: 5527 - DNA, 750 bp, Artificial Sequence
  chemically treated genomic DNA (Homo sapiens) CpG-island No: 5527
gatacgttgttggtatacggtgtataagttcgtacgttgaagtttcgcgtggttgggtgcgtttgcgattgttgaacgcgtcgaattttcgtcgttattaattatagatgaacgatggtcgttcgttatatgtgatttttggcgattagggatttttgtttgtttttgtatcggtgaagtaattttcgttggtatcgggcgagcgtcgcgagattttggtggatatgagtaacggcgatgaagtgtcgattatttgtggcgaagcggcgagtattgttgatcgtattcgtggtttttttgagttatttagtattttggtttttattttggtgttaacgttgcgtttaatcggttttttgtcgttggttatagatagtttttcgatgcgtttgttgttaattgaaattatggttggttcgttaattcgtagtcgcgatattagtttgggtgatgattcgggtattaatggatagttgtgggacgttaatcgtattgatgttatcgcgtagtaaggaacgtgggaacgttggacggtacgcgcggacgagtcgtaagcgttttatattgaaggcgtaatgttttagattcgtaacgtgaatggcgcgatgtcgttttcggaagatagaggttggaaagatatcgtttggttgacggataagtggagttgtttgtttatttcgttagttttttgggcgtatttttcgttttattttaatagttagacgttggaaatggcggatcgtggttcga

SEQ ID NO: 5528 - DNA, 750 bp, Artificial Sequence
  chemically treated genomic DNA (Homo sapiens) CpG-island No: 5528
tcgaaccacgatccgccatttccaacgtctaactattaaaataaaacgaaaaatacgcccaaaaaactaacgaaataaacaaacaactccacttatccgtcaaccaaacgatatctttccaacctctatcttccgaaaacgacatcgcgccattcacgttacgaatctaaaacattacgccttcaatataaaacgcttacgactcgtccgcgcgtaccgtccaacgttcccacgttccttactacgcgataacatcaatacgattaacgtcccacaactatccattaatacccgaatcatcacccaaactaatatcgcgactacgaattaacgaaccaaccataatttcaattaacaacaaacgcatcgaaaaactatctataaccaacgacaaaaaaccgattaaacgcaacgttaacaccaaaataaaaaccaaaatactaaataactcaaaaaaaccacgaatacgatcaacaatactcgccgcttcgccacaaataatcgacacttcatcgccgttactcatatccaccaaaatctcgcgacgctcgcccgataccaacgaaaattacttcaccgatacaaaaacaaacaaaaatccctaatcgccaaaaatcacatataacgaacgaccatcgttcatctataattaataacgacgaaaattcgacgcgttcaacaatcgcaaacgcacccaaccacgcgaaacttcaacgtacgaacttatacaccgtataccaacaacgtatc

SEQ ID NO: 5529 - DNA, 501 bp, Artificial Sequence
  chemically treated genomic DNA (Homo sapiens) CpG-island No: 5529
cgtttagcgttttacggaatgcggtaatttggttgtttttatagtttagattaattattagtattgcgtttgcgttcgggtggcgtattatgttttgtagtatggtgcgggtattaatgtgatcgtcgtttagttgtgagtagtcgtaggtgtggttgaagaggaatacgtcgttagtattttcggcgttgttggttttttttagaaaacggttttggatttgtcgcgcgatgtcgttgatatagtttacggttggtaggatttatagtttattacgtatttcgatatcgtcgttagcgcgacgatagatttgtattttacgatttgtcgtttgcgtaggtagattttgaaaattaggttgatagcgatattgatttagatcgtttagattcgtgcgcgtattgtgggcgtgaacgtgaatatttgtcgtaatattcgttaatgtataattaatcggtaggttatatttgatgatattggttttttttgcgatattcgtta

SEQ ID NO: 5530 - DNA, 501 bp, Artificial Sequence
  chemically treated genomic DNA (Homo sapiens) CpG-island No: 5530
taacgaatatcgcaaaaaaaaccaatatcatcaaatataacctaccgattaattatacattaacgaatattacgacaaatattcacgttcacgcccacaatacgcgcacgaatctaaacgatctaaatcaatatcgctatcaacctaattttcaaaatctacctacgcaaacgacaaatcgtaaaatacaaatctatcgtcgcgctaacgacgatatcgaaatacgtaataaactataaatcctaccaaccgtaaactatatcaacgacatcgcgcgacaaatccaaaaccgttttctaaaaaaaaccaacaacgccgaaaatactaacgacgtattcctcttcaaccacacctacgactactcacaactaaacgacgatcacattaatacccgcaccatactacaaaacataatacgccacccgaacgcaaacgcaatactaataattaatctaaactataaaaacaaccaaattaccgcattccgtaaaacgctaaacg

SEQ ID NO: 5531 - DNA, 501 bp, Artificial Sequence
  chemically treated genomic DNA (Homo sapiens) CpG-island No: 5531
taacggatatcgtaaaaggggttaatgttattaaatatggtttgtcgattggttatgtattggcggatattgcggtaggtgtttacgtttacgtttataatacgcgtacgaatttgagcgatttggattagtatcgttattaatttgatttttaggatttgtttgcgtaagcggtagatcgtgaagtgtagatttatcgtcgcgttaacggcgatgtcggggtgcgtaatgagttgtggattttgttaatcgtgggttgtgttaacggtatcgcgcggtagatttagaatcgttttttgaaagagattaataacgtcgaaggtattgacggcgtgtttttttttagttatatttacggttgtttatagttgggcgacgattatattaatattcgtattatgttgtaaaatatggtgcgttattcgaacgtaggcgtagtgttggtgattggtttgggttgtgaaaataattaggttgtcgtatttcgtgaaacgttgggcg

SEQ ID NO: 5532 - DNA, 501 bp, Artificial Sequence
  chemically treated genomic DNA (Homo sapiens) CpG-island No: 5532
cgcccaacgtttcacgaaatacgacaacctaattattttcacaacccaaaccaatcaccaacactacgcctacgttcgaataacgcaccatattttacaacataatacgaatattaatataatcgtcgcccaactataaacaaccgtaaatataactaaaaaaaaacacgccgtcaataccttcgacgttattaatctctttcaaaaaacgattctaaatctaccgcgcgataccgttaacacaacccacgattaacaaaatccacaactcattacgcaccccgacatcgccgttaacgcgacgataaatctacacttcacgatctaccgcttacgcaaacaaatcctaaaaatcaaattaataacgatactaatccaaatcgctcaaattcgtacgcgtattataaacgtaaacgtaaacacctaccgcaatatccgccaatacataaccaatcgacaaaccatatttaataacattaaccccttttacgatatccgtta

SEQ ID NO: 5533 - DNA, 562 bp, Artificial Sequence
  chemically treated genomic DNA (Homo sapiens) CpG-island No: 5533
gatggggtattcggcgtattgtttatgtgtagcgattgtattagtgtaaacgtttgggcgtatattaggaagtaaaatgtttgtttaacgtcgataaagtgacgtgacggtggtaggatgatatgtggatcggtagcgacgatgtcgttgtttttcgcggcgatggcgattatacgtattgtttggttgttacggcgaagtttagttagtagattaagattatattgacgggtgtaagggtggttggagataaatattattattagcgtttcgttatcgattagcgattttggtttatgacggaattcggttggagaattataaaaggtcgttagtttattcgtcgttagttttagtatttttagcgtcgattcgcgtgttgcgttttgtaagttatcgttatcgagataaacgattcgtttttacggtgcgtaattaaatatattttcgttgaaatcgtttagtgaggttaggatcgtttggtaacgattcgttacgtcgcggaaggtttggttgttgatcgttttaggtgcgaaaatcgcgaggtagttggttattatgg

SEQ ID NO: 5534 - DNA, 562 bp, Artificial Sequence
  chemically treated genomic DNA (Homo sapiens) CpG-island No: 5534
ccataataaccaactacctcgcgattttcgcacctaaaacgatcaacaaccaaaccttccgcgacgtaacgaatcgttaccaaacgatcctaacctcactaaacgatttcaacgaaaatatatttaattacgcaccgtaaaaacgaatcgtttatctcgataacgataacttacaaaacgcaacacgcgaatcgacgctaaaaatactaaaactaacgacgaataaactaacgaccttttataattctccaaccgaattccgtcataaaccaaaatcgctaatcgataacgaaacgctaataataatatttatctccaaccacccttacacccgtcaatataatcttaatctactaactaaacttcgccgtaacaaccaaacaatacgtataatcgccatcgccgcgaaaaacaacgacatcgtcgctaccgatccacatatcatcctaccaccgtcacgtcactttatcgacgttaaacaaacattttacttcctaatatacgcccaaacgtttacactaatacaatcgctacacataaacaatacgccgaataccccatc

SEQ ID NO: 5535 - DNA, 562 bp, Artificial Sequence
  chemically treated genomic DNA (Homo sapiens) CpG-island No: 5535
ttatgatggttagttgtttcgcggttttcgtatttgagacgattaatagttaaatttttcgcgacgtggcggatcgttgttaggcgattttgattttattgggcgattttagcgaaggtgtgtttggttacgtatcgtggaaacggatcgtttatttcggtagcggtggtttatagggcgtagtacgcgagtcggcgttgaaagtgttggaattgacggcgggtaaattggcggttttttatgattttttaatcggatttcgttatggattaaaatcgttggtcgatgacgaaacgttggtggtggtatttgtttttagttatttttatattcgttagtatgattttgatttgttggttgaatttcgtcgtgataattaggtaatgcgtgtaatcgttatcgtcgcggaaagtagcgatatcgtcgttgtcggtttatatattattttgttatcgttacgttattttatcgacgttgagtaggtattttgttttttgatgtacgtttagacgtttgtattgatgtagtcgttgtatatgggtaatacgtcggatattttatt

SEQ ID NO: 5536 - DNA, 562 bp, Artificial Sequence
  chemically treated genomic DNA (Homo sapiens) CpG-island No: 5536
aataaaatatccgacgtattacccatatacaacgactacatcaatacaaacgtctaaacgtacatcaaaaaacaaaatacctactcaacgtcgataaaataacgtaacgataacaaaataatatataaaccgacaacgacgatatcgctactttccgcgacgataacgattacacgcattacctaattatcacgacgaaattcaaccaacaaatcaaaatcatactaacgaatataaaaataactaaaaacaaataccaccaccaacgtttcgtcatcgaccaacgattttaatccataacgaaatccgattaaaaaatcataaaaaaccgccaatttacccgccgtcaattccaacactttcaacgccgactcgcgtactacgccctataaaccaccgctaccgaaataaacgatccgtttccacgatacgtaaccaaacacaccttcgctaaaatcgcccaataaaatcaaaatcgcctaacaacgatccgccacgtcgcgaaaaatttaactattaatcgtctcaaatacgaaaaccgcgaaacaactaaccatcataa

SEQ ID NO: 5537 - DNA, 628 bp, Artificial Sequence
  chemically treated genomic DNA (Homo sapiens) CpG-island No: 5537
ggtttgacgtttgggcgtttatacgcgtattgataaattatcgtttaggttattggttcggtttatgttggtaatttgtatgttaatcgtaatatggtgggcgtagtggttggtgtgtagtcgttcggcggcgaagggttgttcggtatcgggtcgaaagtaggcggttcgttttatttttatcgtttgttggcgaatcgttcggaaagtgcgttggtagtgacgttcgcgcgttaggatgtaaagtattcggtcgatgcgtagttgaaagtcgtattgatttagtcgttaaatgtattgcgggaatgggtagtaaatcgtttagaattgtaggcgttatgtacgtaatatggcgagttggcgtaggtaggaatataacgattgttgtcggggtcgacgggtgaacgtaatatttggacgttgttgtcgcgtgagcgcgtgttgtgtattgtcgatgatgagtaggatgcgttgatttagttcgtcgtcgtgttggcggtgggtagttaggtattgtggtcggatgacgcgttgtatcgttagttagtgaaggtattgttatcggtagttagcgaacgtatttaattggcgaaagcggaaaatattatcgtttaatcgtttgatgcgg

SEQ ID NO: 5538 - DNA, 628 bp, Artificial Sequence
  chemically treated genomic DNA (Homo sapiens) CpG-island No: 5538
ccgcatcaaacgattaaacgataatattttccgctttcgccaattaaatacgttcgctaactaccgataacaataccttcactaactaacgatacaacgcgtcatccgaccacaatacctaactacccaccgccaacacgacgacgaactaaatcaacgcatcctactcatcatcgacaatacacaacacgcgctcacgcgacaacaacgtccaaatattacgttcacccgtcgaccccgacaacaatcgttatattcctacctacgccaactcgccatattacgtacataacgcctacaattctaaacgatttactacccattcccgcaatacatttaacgactaaatcaatacgactttcaactacgcatcgaccgaatactttacatcctaacgcgcgaacgtcactaccaacgcactttccgaacgattcgccaacaaacgataaaaataaaacgaaccgcctactttcgacccgataccgaacaacccttcgccgccgaacgactacacaccaaccactacgcccaccatattacgattaacatacaaattaccaacataaaccgaaccaataacctaaacgataatttatcaatacgcgtataaacgcccaaacgtcaaacc

SEQ ID NO: 5539 - DNA, 628 bp, Artificial Sequence
  chemically treated genomic DNA (Homo sapiens) CpG-island No: 5539
tcgtattaaacggttgagcggtaatatttttcgttttcgttagttgaatacgttcgttgattgtcgatggtaatgtttttattaattgacgatgtagcgcgttattcggttatagtatttggttgtttatcgttagtacggcggcgagttgagttagcgtattttgtttattatcggtaatatataatacgcgtttacgcggtagtagcgtttaggtgttgcgtttattcgtcggtttcggtagtaatcgttgtgtttttgtttgcgttagttcgttatattgcgtatataacgtttgtaattttggacgatttgttgtttattttcgtagtgtatttagcggttgagttaatgcggtttttaattgcgtatcgatcggatattttgtattttgacgcgcgagcgttattgttagcgtatttttcgggcgattcgttagtagacggtagagatagagcggatcgtttgttttcggttcggtatcggataatttttcgtcgtcgaacggttgtatattaattattgcgtttattatattacggttaatatataggttattaatatgggtcgagttagtgatttgggcgatggtttattaatgcgcgtatggacgtttaagcgttagatt

SEQ ID NO: 5540 - DNA, 628 bp, Artificial Sequence
  chemically treated genomic DNA (Homo sapiens) CpG-island No: 5540
aatctaacgcttaaacgtccatacgcgcattaataaaccatcgcccaaatcactaactcgacccatattaataacctatatattaaccgtaatataataaacgcaataattaatatacaaccgttcgacgacgaaaaattatccgataccgaaccgaaaacaaacgatccgctctatctctaccgtctactaacgaatcgcccgaaaaatacgctaacaataacgctcgcgcgtcaaaatacaaaatatccgatcgatacgcaattaaaaaccgcattaactcaaccgctaaatacactacgaaaataaacaacaaatcgtccaaaattacaaacgttatatacgcaatataacgaactaacgcaaacaaaaacacaacgattactaccgaaaccgacgaataaacgcaacacctaaacgctactaccgcgtaaacgcgtattatatattaccgataataaacaaaatacgctaactcaactcgccgccgtactaacgataaacaaccaaatactataaccgaataacgcgctacatcgtcaattaataaaaacattaccatcgacaatcaacgaacgtattcaactaacgaaaacgaaaaatattaccgctcaaccgtttaatacga

SEQ ID NO: 5541 - DNA, 545 bp, Artificial Sequence
  chemically treated genomic DNA (Homo sapiens) CpG-island No: 5541
ttaggcggttatggtttagacggtttattgttggtaaaattttgagttttcggttatagttttattttattaagatttcgattttagttcgtagttttgcgagtataaatagatttttagcgagtcggtgttagttttttaaattatgttagattttaggttcgtttagattacggttatttattttttttatttttaatttgtcggttttaaggttattgcgatcgtttaattgtaagtcggtgaaatagaaggcggtttatagtcgaatcgtagaaagttttggtatatcgtttttcgttcggaggattaaaggagttttgaacgggataagggtcgcggtgaaataatttggcgtagtaataagtggggtttggttttaatggaagtgtttcgggagttgattatgtttcgatttaatttttttaatcgcgtaatatgcgttgatttgttcggtggtttatagtatttttttaggcgaaattttcgggtttaaagtttatattggaggagtggattaaatcgttttattttaaaaatttagt

SEQ ID NO: 5542 - DNA, 545 bp, Artificial Sequence
  chemically treated genomic DNA (Homo sapiens) CpG-island No: 5542
actaaatttttaaaataaaacgatttaatccactcctccaatataaactttaaacccgaaaatttcgcctaaaaaaatactataaaccaccgaacaaatcaacgcatattacgcgattaaaaaaattaaatcgaaacataatcaactcccgaaacacttccattaaaaccaaaccccacttattactacgccaaattatttcaccgcgacccttatcccgttcaaaactcctttaatcctccgaacgaaaaacgatataccaaaactttctacgattcgactataaaccgccttctatttcaccgacttacaattaaacgatcgcaataaccttaaaaccgacaaattaaaaataaaaaaaataaataaccgtaatctaaacgaacctaaaatctaacataatttaaaaaactaacaccgactcgctaaaaatctatttatactcgcaaaactacgaactaaaatcgaaatcttaataaaataaaactataaccgaaaactcaaaattttaccaacaataaaccgtctaaaccataaccgcctaa

SEQ ID NO: 5543 - DNA, 545 bp, Artificial Sequence
  chemically treated genomic DNA (Homo sapiens) CpG-island No: 5543
gttaagtttttggaatagaacggtttggtttatttttttaatgtgagttttgggttcgggggtttcgtttgggagaatattataggttatcggataagttaacgtatgttgcgcggttagaagggttgaatcgagatatagttagttttcgagatatttttattggggttaagttttatttgttgttgcgttaagttattttatcgcggtttttgtttcgtttagaatttttttgatttttcgagcgagaaacggtgtgttagagttttttgcggttcggttgtgggtcgttttttgttttatcggtttgtaattaagcggtcgtaatggttttggagtcggtaaattaggggtgggagaagtagatggtcgtagtttagacgggtttggagtttgatatggtttagagagttgatatcggttcgttaagagtttgtttgtattcgtaaggttgcgaattgaaatcggggttttggtgagatagaattgtaatcgggggtttaaggttttgttaataataggtcgtttggattatagtcgtttgg

SEQ ID NO: 5544 - DNA, 545 bp, Artificial Sequence
  chemically treated genomic DNA (Homo sapiens) CpG-island No: 5544
ccaaacgactataatccaaacgacctattattaacaaaaccttaaacccccgattacaattctatctcaccaaaaccccgatttcaattcgcaaccttacgaatacaaacaaactcttaacgaaccgatatcaactctctaaaccatatcaaactccaaacccgtctaaactacgaccatctacttctcccacccctaatttaccgactccaaaaccattacgaccgcttaattacaaaccgataaaacaaaaaacgacccacaaccgaaccgcaaaaaactctaacacaccgtttctcgctcgaaaaatcaaaaaaattctaaacgaaacaaaaaccgcgataaaataacttaacgcaacaacaaataaaacttaaccccaataaaaatatctcgaaaactaactatatctcgattcaacccttctaaccgcgcaacatacgttaacttatccgataacctataatattctcccaaacgaaacccccgaacccaaaactcacattaaaaaaataaaccaaaccgttctattccaaaaacttaac

SEQ ID NO: 5545 - DNA, 560 bp, Artificial Sequence
  chemically treated genomic DNA (Homo sapiens) CpG-island No: 5545
ttatcgagcgcgggtcggatgcgtcgtataatttatcgttcggtttaattataatgttttgtgtattgtttatcgttttttttagcgttattttttgattttttgtttttagtagtttgagcgtattcgggttaaattttttttcgatacgtagttcgttcggtaattattgatggtggaaattcggcgtattggtcgtttcggcgacgtttaagttataatcgatgttatttattattatttgtagtattgtagtgatgattcggttatcgtttgggttatcggtaattagttaggttttatcgttttttattataatggtcggcgatatcgacgatagcgggcgtttgttcggttcgacggcgttggtattatcgtttattagttcgtaaacgttcggtacgttcggtttggcggagaaattatttatttggttattaagtagaatatcgttttcgttcgcgataatgttcgtatcgaaggtggtgtttagcgtataggttatcgttatcgcgttattatttttatttattattgagtaatgggtagtttgattattt

SEQ ID NO: 5546 - DNA, 560 bp, Artificial Sequence
  chemically treated genomic DNA (Homo sapiens) CpG-island No: 5546
aaataatcaaactacccattactcaataataaataaaaataataacgcgataacgataacctatacgctaaacaccaccttcgatacgaacattatcgcgaacgaaaacgatattctacttaataaccaaataaataatttctccgccaaaccgaacgtaccgaacgtttacgaactaataaacgataataccaacgccgtcgaaccgaacaaacgcccgctatcgtcgatatcgccgaccattataataaaaaacgataaaacctaactaattaccgataacccaaacgataaccgaatcatcactacaatactacaaataataataaataacatcgattataacttaaacgtcgccgaaacgaccaatacgccgaatttccaccatcaataattaccgaacgaactacgtatcgaaaaaaaatttaacccgaatacgctcaaactactaaaaacaaaaaatcaaaaaataacgctaaaaaaaacgataaacaatacacaaaacattataattaaaccgaacgataaattatacgacgcatccgacccgcgctcgataa

SEQ ID NO: 5547 - DNA, 560 bp, Artificial Sequence
  chemically treated genomic DNA (Homo sapiens) CpG-island No: 5547
gagtaattaaattatttattatttagtggtggataaagatggtaacgcggtggcggtgatttatacgttgaatattattttcggtacgggtattgtcgcgggcgagagcggtattttgtttaataattagatggatgattttttcgttaaatcgggcgtatcgaacgtttacgggttggtgggcggtgatgttaacgtcgtcgggtcgaataaacgttcgttgtcgtcgatgtcgtcgattattgtggtgaaagacggtaaaatttggttggttatcggtagtttaggcggtagtcggattattattatagtgttgtaaatggtggtgaatagtatcgattatggtttgaacgtcgtcgaagcgattaatgcgtcgggtttttattattagtggttgtcggacgagttgcgtgtcgaaaaagggtttagttcggatacgtttaagttgttggaagtaaaaggttagaaagtggcgttgaaagaggcgatgggtagtatataaagtattatggttgggtcggacggtgagttgtacggcgtattcgattcgcgttcggtgg

SEQ ID NO: 5548 - DNA, 560 bp, Artificial Sequence
  chemically treated genomic DNA (Homo sapiens) CpG-island No: 5548
ccaccgaacgcgaatcgaatacgccgtacaactcaccgtccgacccaaccataatactttatatactacccatcgcctctttcaacgccactttctaaccttttacttccaacaacttaaacgtatccgaactaaaccctttttcgacacgcaactcgtccgacaaccactaataataaaaacccgacgcattaatcgcttcgacgacgttcaaaccataatcgatactattcaccaccatttacaacactataataataatccgactaccgcctaaactaccgataaccaaccaaattttaccgtctttcaccacaataatcgacgacatcgacgacaacgaacgtttattcgacccgacgacgttaacatcaccgcccaccaacccgtaaacgttcgatacgcccgatttaacgaaaaaatcatccatctaattattaaacaaaataccgctctcgcccgcgacaatacccgtaccgaaaataatattcaacgtataaatcaccgccaccgcgttaccatctttatccaccactaaataataaataatttaattactc

SEQ ID NO: 5549 - DNA, 556 bp, Artificial Sequence
  chemically treated genomic DNA (Homo sapiens) CpG-island No: 5549
tttcgatcgatattttcgacgtttaggatgaggaatatcgggagtcggtgttgttttttaacgttgcggttcgcgtggcggtggaagtaggtattgtcgattattggtataagtatgttggtttgaaaggggtaattgtcgggatgacgggttacggggaatttgtttcggcggataagttgttttcgttttttggttttatcgtcgagaatattgtggtaaaagcgtataaggtgttgggagtgaaaggtgtttgatggtgattgtcggatgttgattgtcggatgcgacgttgacgcgttttattcggtttatagcgttttattcggtttatatgtttcgttattttgtttaacgggtgatttataacgtgggttaggcgtttggtttatgttagttatcgtaggtgggttttgcggcgtaacgtattaggcgaaaacgttgatcgttaaagcgttagcgcgtttgaatgttataatcgtttaattcgcgttttttcgttaaggttattagtttacgcgattttttattaaatgttgcgtttattagttttagt

SEQ ID NO: 5550 - DNA, 556 bp, Artificial Sequence
  chemically treated genomic DNA (Homo sapiens) CpG-island No: 5550
actaaaactaataaacgcaacatttaataaaaaatcgcgtaaactaataaccttaacgaaaaaacgcgaattaaacgattataacattcaaacgcgctaacgctttaacgatcaacgttttcgcctaatacgttacgccgcaaaacccacctacgataactaacataaaccaaacgcctaacccacgttataaatcacccgttaaacaaaataacgaaacatataaaccgaataaaacgctataaaccgaataaaacgcgtcaacgtcgcatccgacaatcaacatccgacaatcaccatcaaacacctttcactcccaacaccttatacgcttttaccacaatattctcgacgataaaaccaaaaaacgaaaacaacttatccgccgaaacaaattccccgtaacccgtcatcccgacaattacccctttcaaaccaacatacttataccaataatcgacaatacctacttccaccgccacgcgaaccgcaacgttaaaaaacaacaccgactcccgatattcctcatcctaaacgtcgaaaatatcgatcgaaa

SEQ ID NO: 5551 - DNA, 556 bp, Artificial Sequence
  chemically treated genomic DNA (Homo sapiens) CpG-island No: 5551
attggaattgatgaacgtaatatttgatgagaaatcgcgtgaattggtgattttagcgaaagggcgcggattaagcgattgtggtatttaggcgcgttggcgttttgacggttagcgttttcgtttggtgcgttacgtcgtagaatttatttgcgataattggtatgggttagacgtttggtttacgttgtggattattcgttaaataaaatggcgggatatgtaggtcggataagacgttgtaggtcggataagacgcgttagcgtcgtattcggtaattagtattcggtaattattattaggtattttttatttttagtattttatgcgtttttgttataatattttcggcggtaaagttaaagaacgggaatagtttattcgtcggagtagatttttcgtaattcgttatttcgataattgttttttttagattaatatatttgtattagtaatcggtaatatttgtttttatcgttacgcgagtcgtaacgttagaaggtaatatcgattttcgatattttttattttgggcgtcgaaaatatcggtcgagg

SEQ ID NO: 5552 - DNA, 556 bp, Artificial Sequence
  chemically treated genomic DNA (Homo sapiens) CpG-island No: 5552
cctcgaccgatattttcgacgcccaaaataaaaaatatcgaaaatcgatattaccttctaacgttacgactcgcgtaacgataaaaacaaatattaccgattactaatacaaatatattaatctaaaaaaaacaattatcgaaataacgaattacgaaaaatctactccgacgaataaactattcccgttctttaactttaccgccgaaaatattataacaaaaacgcataaaatactaaaaataaaaaatacctaataataattaccgaatactaattaccgaatacgacgctaacgcgtcttatccgacctacaacgtcttatccgacctacatatcccgccattttatttaacgaataatccacaacgtaaaccaaacgtctaacccataccaattatcgcaaataaattctacgacgtaacgcaccaaacgaaaacgctaaccgtcaaaacgccaacgcgcctaaataccacaatcgcttaatccgcgccctttcgctaaaatcaccaattcacgcgatttctcatcaaatattacgttcatcaattccaat

SEQ ID NO: 5553 - DNA, 657 bp, Artificial Sequence
  chemically treated genomic DNA (Homo sapiens) CpG-island No: 5553
tcgcgttttattgtcgtttattagtaatgaattggttacgttattagttagcgagggttggaaagcgtttttattagttattgacgcggattttggaataggtgtaattggttttggataacgtttagggaaaaatcggacgttatttatttgatcggcggtagcgttcgtttttcgtgattaaaaaagcgttggtagaatagttgtcgggtatttcgatgtaggcgggatgattttggtttcgttatcgtcgggttggtacgttgggcggaagtggtgtttcgttaattgaaaaatggtttagtagcggtttaaatttgtttgcgtttgagttagtttttttgttgtttgacgtaacggttttattacggtatggttcgtgttggagtatgaaggcggaatcgttgattttgtcgcgtcgattgttacgtcgattttagtcgatgtcgtttggcggttattttcgttattatcgtttgtttgtttgttggcgttattagcgtttaattttcgggttatgaatataaaacggcgtttatagttcgttttttagtcgataatcgtttgggttagatggtcgttaaatttttttatttgggtttaacgttacgacgggtaatatttgcggttgtattaatattagaagatcgtaacgtt

SEQ ID NO: 5554 - DNA, 657 bp, Artificial Sequence
  chemically treated genomic DNA (Homo sapiens) CpG-island No: 5554
aacgttacgatcttctaatattaatacaaccgcaaatattacccgtcgtaacgttaaacccaaataaaaaaatttaacgaccatctaacccaaacgattatcgactaaaaaacgaactataaacgccgttttatattcataacccgaaaattaaacgctaataacgccaacaaacaaacaaacgataataacgaaaataaccgccaaacgacatcgactaaaatcgacgtaacaatcgacgcgacaaaatcaacgattccgccttcatactccaacacgaaccataccgtaataaaaccgttacgtcaaacaacaaaaaaactaactcaaacgcaaacaaatttaaaccgctactaaaccatttttcaattaacgaaacaccacttccgcccaacgtaccaacccgacgataacgaaaccaaaatcatcccgcctacatcgaaatacccgacaactattctaccaacgcttttttaatcacgaaaaacgaacgctaccgccgatcaaataaataacgtccgatttttccctaaacgttatccaaaaccaattacacctattccaaaatccgcgtcaataactaataaaaacgctttccaaccctcgctaactaataacgtaaccaattcattactaataaacgacaataaaacgcga

SEQ ID NO: 5555 - DNA, 657 bp, Artificial Sequence
  chemically treated genomic DNA (Homo sapiens) CpG-island No: 5555
ggcgttacggttttttggtattgatatagtcgtagatgttattcgtcgtggcgttaagtttaagtgaaagggtttggcgattatttgatttaggcggttatcgattggaaagcgagttgtgaacgtcgttttgtgtttatggttcggaaattgaacgttgataacgttagtagatagataagcggtaatggcgaaaatgatcgttaaacgatatcggttggaatcggcgtgatagtcggcgcgatagagttagcgatttcgtttttatgttttagtacggattatgtcgtgatggaatcgttacgttaggtagtagaaaaattggtttaggcgtaggtagatttaagtcgttgttgagttattttttaattaacgaaatattattttcgtttagcgtgttagttcggcggtgacggagttaaagttatttcgtttgtatcggaatgttcggtaattgttttgttagcgtttttttaattacggagaacgggcgttatcgtcggttaggtagataacgttcggtttttttttgggcgttatttagggttagttgtatttgttttagaattcgcgttagtggttggtgagggcgttttttagttttcgttggttaatagcgtagttagtttattgttgataaacggtagtgaggcgcgg

SEQ ID NO: 5556 - DNA, 657 bp, Artificial Sequence
  chemically treated genomic DNA (Homo sapiens) CpG-island No: 5556
ccgcgcctcactaccgtttatcaacaataaactaactacgctattaaccaacgaaaactaaaaaacgccctcaccaaccactaacgcgaattctaaaacaaatacaactaaccctaaataacgcccaaaaaaaaaccgaacgttatctacctaaccgacgataacgcccgttctccgtaattaaaaaaacgctaacaaaacaattaccgaacattccgatacaaacgaaataactttaactccgtcaccgccgaactaacacgctaaacgaaaataatatttcgttaattaaaaaataactcaacaacgacttaaatctacctacgcctaaaccaatttttctactacctaacgtaacgattccatcacgacataatccgtactaaaacataaaaacgaaatcgctaactctatcgcgccgactatcacgccgattccaaccgatatcgtttaacgatcattttcgccattaccgcttatctatctactaacgttatcaacgttcaatttccgaaccataaacacaaaacgacgttcacaactcgctttccaatcgataaccgcctaaatcaaataatcgccaaaccctttcacttaaacttaacgccacgacgaataacatctacgactatatcaataccaaaaaaccgtaacgcc

SEQ ID NO: 5557 - DNA, 525 bp, Artificial Sequence
  chemically treated genomic DNA (Homo sapiens) CpG-island No: 5557
gtcgttattttttatttttatggattttttttcggtttgacgagtcgggatgtttcgtttcggacgatggaattcgtgatgttacgttgggtagttaaatcgtgttgttttatattaattcggtaacgttttgtatcggttttcgttcgtaatagcgtttgttacgtatggttagtttattgttttgtatttgttttttcgaggattttatgatatttttagcgtatcgatttttcggcgggtaaacggatcgcgtaaggttttaattaataatagcgtaattatcgggtcgatgcggttgaattgatattcgtcgcgtacgtttattagcggtattcgcgtagttcgtatatcgttgtatttattaaacgttatagtaattttgtttagtcgaatagggaaagagcgattcgttttagatcggtaattttgtttcgtttgtaattgttcggtaagtcgatatataaacgcgtagggtgtagaattaattttagcgtatatagattattatcgttcggtattaga

SEQ ID NO: 5558 - DNA, 525 bp, Artificial Sequence
  chemically treated genomic DNA (Homo sapiens) CpG-island No: 5558
tctaataccgaacgataataatctatatacgctaaaattaattctacaccctacgcgtttatatatcgacttaccgaacaattacaaacgaaacaaaattaccgatctaaaacgaatcgctctttccctattcgactaaacaaaattactataacgtttaataaatacaacgatatacgaactacgcgaataccgctaataaacgtacgcgacgaatatcaattcaaccgcatcgacccgataattacgctattattaattaaaaccttacgcgatccgtttacccgccgaaaaatcgatacgctaaaaatatcataaaatcctcgaaaaaacaaatacaaaacaataaactaaccatacgtaacaaacgctattacgaacgaaaaccgatacaaaacgttaccgaattaatataaaacaacacgatttaactacccaacgtaacatcacgaattccatcgtccgaaacgaaacatcccgactcgtcaaaccgaaaaaaaatccataaaaataaaaaataacgac

SEQ ID NO: 5559 - DNA, 525 bp, Artificial Sequence
  chemically treated genomic DNA (Homo sapiens) CpG-island No: 5559
tttggtgtcggacgatagtgatttatatgcgttgagattgattttgtattttgcgcgtttatgtgtcggtttgtcgaatagttataaacgaggtagagttgtcgatttgagacggatcgttttttttttattcggttgggtaaaattgttgtggcgtttgataagtatagcggtgtgcgaattgcgcgagtatcgttgatgggcgtgcgcgacgagtattagtttagtcgtatcggttcggtgattgcgttgttattgattgaagttttacgcgattcgtttgttcgtcggaagatcgatgcgttggagatgttatgggattttcggaagagtaagtatagggtagtgaattaattatgcgtggtaagcgttattgcgggcgggagtcgatataaggcgttatcgagttggtatgaaatagtacgatttaattatttagcgtaatattacgggttttatcgttcgaggcggggtatttcggttcgttaggtcgggaagaagtttatagagatggagggtggcggt

SEQ ID NO: 5560 - DNA, 525 bp, Artificial Sequence
  chemically treated genomic DNA (Homo sapiens) CpG-island No: 5560
accgccaccctccatctctataaacttcttcccgacctaacgaaccgaaataccccgcctcgaacgataaaacccgtaatattacgctaaataattaaatcgtactatttcataccaactcgataacgccttatatcgactcccgcccgcaataacgcttaccacgcataattaattcactaccctatacttactcttccgaaaatcccataacatctccaacgcatcgatcttccgacgaacaaacgaatcgcgtaaaacttcaatcaataacaacgcaatcaccgaaccgatacgactaaactaatactcgtcgcgcacgcccatcaacgatactcgcgcaattcgcacaccgctatacttatcaaacgccacaacaattttacccaaccgaataaaaaaaaaacgatccgtctcaaatcgacaactctacctcgtttataactattcgacaaaccgacacataaacgcgcaaaatacaaaatcaatctcaacgcatataaatcactatcgtccgacaccaaa

SEQ ID NO: 5561 - DNA, 805 bp, Artificial Sequence
  chemically treated genomic DNA (Homo sapiens) CpG-island No: 5561
  unsure (530)
tatttcggtacgaaaacgcgtaatgagtgtcgttagtttttcgcgtcgtgtattatttttattattgcgaatgatcgttagcgacgtacgtaatgtttgcgtttgagcgggcggtatattggtgttgtagataaggtggcgggcgaattgtagtagataattcgttatcgtattggagtaaagtatcgttgtttcgttgacgttaaattttttgttaaaagttattattagtaattttggttttattttttgtagttagtagttgtcgcgtttttgtttttcgataacgttcgtgtcgtgggtattatcgattattaattagttattgtgttgttgcgttatttgttggattttcgttagtggcgtattatcgtcgtttatgttgaatacgttttttgttattattatttgttgtttcggatagggggaagtaagtaatcgcgttaaatgagtgatatcgttatgagtaaaacggcgaagttgcgaagggtttgaagtgatagtttttagtaatggaggtatggttgaangtcggtgcggtagtaatgcgggttttgtttcggcgatgattacgggtaataatttgcgtagatgagataggcgaaaattagagagaaagtacgtagtgtatcgcgaatagttagagttaatacggttaggttttgttattagcgtttgatagtacgtacgatataatcgcggatagtgatcggagtcgttgcgtattgatgttaaattgtttcgttatttgatgttaggtacggataagttgcggatgatgggatagatttaaataattataatt

SEQ ID NO: 5562 - DNA, 805 bp, Artificial Sequence
  chemically treated genomic DNA (Homo sapiens) CpG-island No: 5562
  unsure (276)
aattataattatttaaatctatcccatcatccgcaacttatccgtacctaacatcaaataacgaaacaatttaacatcaatacgcaacgactccgatcactatccgcgattatatcgtacgtactatcaaacgctaataacaaaacctaaccgtattaactctaactattcgcgatacactacgtactttctctctaattttcgcctatctcatctacgcaaattattacccgtaatcatcgccgaaacaaaacccgcattactaccgcaccgacnttcaaccatacctccattactaaaaactatcacttcaaacccttcgcaacttcgccgttttactcataacgatatcactcatttaacgcgattacttacttccccctatccgaaacaacaaataataataacaaaaaacgtattcaacataaacgacgataatacgccactaacgaaaatccaacaaataacgcaacaacacaataactaattaataatcgataatacccacgacacgaacgttatcgaaaaacaaaaacgcgacaactactaactacaaaaaataaaaccaaaattactaataataacttttaacaaaaaatttaacgtcaacgaaacaacgatactttactccaatacgataacgaattatctactacaattcgcccgccaccttatctacaacaccaatataccgcccgctcaaacgcaaacattacgtacgtcgctaacgatcattcgcaataataaaaataatacacgacgcgaaaaactaacgacactcattacgcgttttcgtaccgaaata

SEQ ID NO: 5563 - DNA, 805 bp, Artificial Sequence
  chemically treated genomic DNA (Homo sapiens) CpG-island No: 5563
  unsure (276)
agttatgattatttaggtttattttattattcgtaatttattcgtgtttgatattaggtggcggagtaatttggtattagtacgtagcggtttcggttattattcgcggttatatcgtgcgtgttattaggcgttgataataaaatttggtcgtattggttttggttattcgcggtgtattgcgtgttttttttttggttttcgtttgttttatttgcgtagattattgttcgtgattatcgtcgaaataggattcgtattgttgtcgtatcggtntttaattatgtttttattgttggaaattgttattttaagtttttcgtagtttcgtcgttttgtttataacgatgttatttatttggcgcgattgtttgtttttttttgttcggggtagtaaatggtggtgatagaaggcgtgtttagtatggacggcgatagtgcgttattggcggaaatttagtaggtaacgtaatagtataatggttggttgatggtcgatgatgtttacggtacgggcgttatcggggagtaggggcgcggtagttgttggttgtaaaaggtaaaattagaattgttggtagtgatttttggtaaaggatttggcgttagcggggtagcggtgttttgttttagtacggtggcggattatttgttgtaattcgttcgttattttatttatagtattagtatgtcgttcgtttaggcgtaggtattacgtgcgtcgttggcggttattcgtagtgatgagggtgatgtacggcgcgaaaaattggcggtatttattacgcgttttcgtgtcggagta

SEQ ID NO: 5564 - DNA, 805 bp, Artificial Sequence
  chemically treated genomic DNA (Homo sapiens) CpG-island No: 5564
  unsure (530)
tactccgacacgaaaacgcgtaataaataccgccaatttttcgcgccgtacatcaccctcatcactacgaataaccgccaacgacgcacgtaatacctacgcctaaacgaacgacatactaatactataaataaaataacgaacgaattacaacaaataatccgccaccgtactaaaacaaaacaccgctaccccgctaacgccaaatcctttaccaaaaatcactaccaacaattctaattttaccttttacaaccaacaactaccgcgcccctactccccgataacgcccgtaccgtaaacatcatcgaccatcaaccaaccattatactattacgttacctactaaatttccgccaataacgcactatcgccgtccatactaaacacgccttctatcaccaccatttactaccccgaacaaaaaaaaacaaacaatcgcgccaaataaataacatcgttataaacaaaacgacgaaactacgaaaaacttaaaataacaatttccaacaataaaaacataattaaanaccgatacgacaacaatacgaatcctatttcgacgataatcacgaacaataatctacgcaaataaaacaaacgaaaaccaaaaaaaaaacacgcaatacaccgcgaataaccaaaaccaatacgaccaaattttattatcaacgcctaataacacgcacgatataaccgcgaataataaccgaaaccgctacgtactaataccaaattactccgccacctaatatcaaacacgaataaattacgaataataaaataaacctaaataatcataact

SEQ ID NO: 5565 - DNA, 691 bp, Artificial Sequence
  chemically treated genomic DNA (Homo sapiens) CpG-island No: 5565
ggggcgttggtgtcgatttacggtacgttggtgatttcgtttatcgcgttgttgatcgtcgtttcggtgagtttcggtatcgttttgtttttgattgagtttgcgtttggttggttgaaacgttcgttgggtatcgttattgagttgttggtagttattttaagtatcgtttacggtatgtggggtttgtttatttttgcgtcgttgttcgtcgtttatttttaggagtcggtcggtaatattatgtcgaatatttcgattgttggcgcgttgttttttggtttcgtatttggtatcggtattttcgcggtaggcgtgattttcgttattatgattatttcgtatattgcggcggtaatgcgtgatgtgttcgaataaatttcggtgatgatgaaagagtcggtttacggtattggttgtattatttgggaagttatttggcgtatcgttttttcgtttattaaaaatggtgttatcggcggtattatgttggggttgggtcgcgcgttcggtgaaattatggcggtgatttttattatcggtaatatttattagttcgatagcgtttcgttgtatatgtcgggtaatagtattatttttgcgttggcgaacgaatttgcggaagcggaattcggtttgtacgttgtcgtattgatggaattgggtttgattttgtttgtgattattttta

SEQ ID NO: 5566 - DNA, 691 bp, Artificial Sequence
  chemically treated genomic DNA (Homo sapiens) CpG-island No: 5566
taaaaataatcacaaacaaaatcaaacccaattccatcaatacgacaacgtacaaaccgaattccgcttccgcaaattcgttcgccaacgcaaaaataatactattacccgacatatacaacgaaacgctatcgaactaataaatattaccgataataaaaatcaccgccataatttcaccgaacgcgcgacccaaccccaacataataccgccgataacaccatttttaataaacgaaaaaacgatacgccaaataacttcccaaataatacaaccaataccgtaaaccgactctttcatcatcaccgaaatttattcgaacacatcacgcattaccgccgcaatatacgaaataatcataataacgaaaatcacgcctaccgcgaaaataccgataccaaatacgaaaccaaaaaacaacgcgccaacaatcgaaatattcgacataatattaccgaccgactcctaaaaataaacgacgaacaacgacgcaaaaataaacaaaccccacataccgtaaacgatacttaaaataactaccaacaactcaataacgatacccaacgaacgtttcaaccaaccaaacgcaaactcaatcaaaaacaaaacgataccgaaactcaccgaaacgacgatcaacaacgcgataaacgaaatcaccaacgtaccgtaaatcgacaccaacgcccc

SEQ ID NO: 5567 - DNA, 691 bp, Artificial Sequence
  chemically treated genomic DNA (Homo sapiens) CpG-island No: 5567
tgaaggtaattataaataggattaggtttagttttattagtgcggtaacgtgtagatcggatttcgttttcgtaaattcgttcgttagcgtagaggtgatattgttgttcggtatatatagcgaggcgttgtcgagttggtaggtgttatcgatgataaaggttatcgttatggttttatcgagcgcgcggtttagttttagtatgatgtcgtcgataatattatttttggtgaacggaagaacgatacgttagataattttttaggtggtgtagttaatatcgtaggtcgatttttttattattatcggggtttgttcgaatatattacgtattatcgtcgtaatgtacggaataattatgatggcgaggattacgtttgtcgcgaggatatcgatattaaatgcggggttagagaatagcgcgttaataatcgggatattcgatatgatattgtcgatcggtttttgaaagtaaacggcgaatagcggcgtaaagataaataggttttatatgtcgtaaacgatatttggaatggttgttagtagtttaatggcgatatttagcgggcgttttagttagttaggcgtaagtttagttaggaatagggcgatatcgaaatttatcgggacggcgattagtagcgcgataaacgaagttattaacgtatcgtagatcggtattagcgtttt

SEQ ID NO: 5568 - DNA, 691 bp, Artificial Sequence
  chemically treated genomic DNA (Homo sapiens) CpG-island No: 5568
aaaacgctaataccgatctacgatacgttaataacttcgtttatcgcgctactaatcgccgtcccgataaatttcgatatcgccctattcctaactaaacttacgcctaactaactaaaacgcccgctaaatatcgccattaaactactaacaaccattccaaatatcgtttacgacatataaaacctatttatctttacgccgctattcgccgtttactttcaaaaaccgatcgacaatatcatatcgaatatcccgattattaacgcgctattctctaaccccgcatttaatatcgatatcctcgcgacaaacgtaatcctcgccatcataattattccgtacattacgacgataatacgtaatatattcgaacaaaccccgataataataaaaaaatcgacctacgatattaactacaccacctaaaaaattatctaacgtatcgttcttccgttcaccaaaaataatattatcgacgacatcatactaaaactaaaccgcgcgctcgataaaaccataacgataacctttatcatcgataacacctaccaactcgacaacgcctcgctatatataccgaacaacaatatcacctctacgctaacgaacgaatttacgaaaacgaaatccgatctacacgttaccgcactaataaaactaaacctaatcctatttataattaccttca

SEQ ID NO: 5569 - DNA, 577 bp, Artificial Sequence
  chemically treated genomic DNA (Homo sapiens) CpG-island No: 5569
ttcgtcgtcgtgtagttttttcgggggtcgatatcgttatcggtcgagttttttacgtttttcgaaatggtgtgtaagcggaagggggtcggggttttcgtttgtattttttggaagtagttcgttgcggcggcgggggttgcggcggcggtcggcggcggcggttggcgggggagggtttgcggggggagttttcgcgttcgggtttttcgacgtcgttgttgttaggtttcggagtagttttcgtagtcgttttgtttttcgttttttttttttattttcgaaggtgtttttatcgaagttggcggggacgttgttcggatgtcgtatcgtttttttgttcgtttagtagtagtatgaatgtggcgacgcggattgtcgggagtttttcgaaaatttttgcgattgttatagggagtcgtttttcgaaattttagatattaattagttgtcgtcgtttattttgtttaaggtgggtttgggcgagaggcgtagggatgttcgtttttttttattttcggttttcgttttcgaggtttttttttttttttttttaagcgcggaggaggggggtttt

SEQ ID NO: 5570 - DNA, 577 bp, Artificial Sequence
  chemically treated genomic DNA (Homo sapiens) CpG-island No: 5570
aaaacccccctcctccgcgcttaaaaaaaaaaaaaaaaaaacctcgaaaacgaaaaccgaaaataaaaaaaaacgaacatccctacgcctctcgcccaaacccaccttaaacaaaataaacgacgacaactaattaatatctaaaatttcgaaaaacgactccctataacaatcgcaaaaattttcgaaaaactcccgacaatccgcgtcgccacattcatactactactaaacgaacaaaaaaacgatacgacatccgaacaacgtccccgccaacttcgataaaaacaccttcgaaaataaaaaaaaaaaacgaaaaacaaaacgactacgaaaactactccgaaacctaacaacaacgacgtcgaaaaacccgaacgcgaaaactccccccgcaaaccctcccccgccaaccgccgccgccgaccgccgccgcaacccccgccgccgcaacgaactacttccaaaaaatacaaacgaaaaccccgacccccttccgcttacacaccatttcgaaaaacgtaaaaaactcgaccgataacgatatcgacccccgaaaaaactacacgacgacgaa

SEQ ID NO: 5571 - DNA, 577 bp, Artificial Sequence
  chemically treated genomic DNA (Homo sapiens) CpG-island No: 5571
ggaatttttttttttcgcgtttagggggaggagagagaaagtttcggaggcgggggtcgggggtgggggaaagcgagtatttttgcgtttttcgtttagatttattttgagtaggatggacggcggtagttggttgatgtttggggtttcggggggcggttttttgtgatagtcgtaggggttttcgggggattttcgatagttcgcgtcgttatatttatgttgttgttgggcggataagggggcggtgcggtattcggatagcgttttcgttagtttcggtgggggtattttcggaggtgggagaagagggcggagggtagagcggttgcgggggttgtttcggggtttggtagtagcggcgtcggggggttcgggcgcgaaggtttttttcgtaggttttttttcgttagtcgtcgtcgtcggtcgtcgtcgtagttttcgtcgtcgtagcgggttgtttttagggggtgtaggcggggatttcggttttttttcgtttgtatattatttcggggggcgtagggagttcggtcggtgacggtgtcggttttcggaagagttgtacggcggcggg

SEQ ID NO: 5572 - DNA, 577 bp, Artificial Sequence
  chemically treated genomic DNA (Homo sapiens) CpG-island No: 5572
cccgccgccgtacaactcttccgaaaaccgacaccgtcaccgaccgaactccctacgccccccgaaataatatacaaacgaaaaaaaaccgaaatccccgcctacaccccctaaaaacaacccgctacgacgacgaaaactacgacgacgaccgacgacgacgactaacgaaaaaaaacctacgaaaaaaaccttcgcgcccgaaccccccgacgccgctactaccaaaccccgaaacaacccccgcaaccgctctaccctccgccctcttctcccacctccgaaaatacccccaccgaaactaacgaaaacgctatccgaataccgcaccgcccccttatccgcccaacaacaacataaatataacgacgcgaactatcgaaaatcccccgaaaacccctacgactatcacaaaaaaccgccccccgaaaccccaaacatcaaccaactaccgccgtccatcctactcaaaataaatctaaacgaaaaacgcaaaaatactcgctttcccccacccccgacccccgcctccgaaactttctctctcctccccctaaacgcgaaaaaaaaaaattcc

SEQ ID NO: 5573 - DNA, 1131 bp, Artificial Sequence
  chemically treated genomic DNA (Homo sapiens) CpG-island No: 5573
  unsure (112, 826, 865)
tgttgtcgtgttttatgattgtcgtcgtttgattttggttagttttgcgttgttgttcgatgttttgtgcggtttgttcgtttacggttattgttgttgtgtcgatggtagnttgttttggtgatggtttcgttgcgttgtgtgttttgatggcggttgtggattgttggcgtgcgtgtgtgtttgatgtcgtttgttttggaatgtatgtggattgagttggagtcgtttgtgtatcgatgatgtttgcgtgtgatcgtgtggcggcgtcgtcgttacgatcggttgcgtggtggtggcgtcgtttgtgtttgttgcgatgtgtttggttgtcgatgtgttcgttgttggtgtgtttggcggtttgacgtacgttttgttgatggttagttgcgttcgtgtgatttgtggtgaggtgcgtgtgttgttgtatagtggttcggtgtgttgatcgttgttgtttgtgtggtgtagtttgtcgtcgtgttacggattgatttcgtggtggttttttggtcgcgcgtgcgcgtgtttagtggtgtgcgtgtgcggttgtgagttttcgtgcggttgtttgcgtgtttcgtgtattcgagatgatgacgacgtgtttgtgtcgcgcgtgtgtggttgtgcgttttgttgttttggcgattgtacgttttgtgttggcgtgtgtgttcgtgtgttggcgatttgtttgtcggcgtgtcgcgttgcgtgatatggttcgtggttgacgtgtttgatgatggttgttggtcgtgcggtcgtgcgcgtatacgtggattgatttgagtgattttgtgtttggtgttgttcggtntcgtagtttgatagtaatcgttacgtatgcgtgatagtngtgttcgtgttcggttgacgtagtgtgcgtggtgggacggtggcgttttgtcgacggtatgttgattggttagcgtcgatgcgtgattgcggagcgttagcgtttggcgagcgcgtttgtgcgtgttgcgagtgcgtgttgtgtgtagtagtgttgttagttgtggcgatttgttggcgatgtttgatttagtagagagtgattatatggtggtgtcgttcgtatgttgtcgtggtatgatgttttgttcgatttgatgtatcgtg

SEQ ID NO: 5574 - DNA, 1131 bp, Artificial Sequence
  chemically treated genomic DNA (Homo sapiens) CpG-island No: 5574
  unsure (267, 306, 1020)
cacgatacatcaaatcgaacaaaacatcataccacgacaacatacgaacgacaccaccatataatcactctctactaaatcaaacatcgccaacaaatcgccacaactaacaacactactacacacaacacgcactcgcaacacgcacaaacgcgctcgccaaacgctaacgctccgcaatcacgcatcgacgctaaccaatcaacataccgtcgacaaaacgccaccgtcccaccacgcacactacgtcaaccgaacacgaacacnactatcacgcatacgtaacgattactatcaaactacganaccgaacaacaccaaacacaaaatcactcaaatcaatccacgtatacgcgcacgaccgcacgaccaacaaccatcatcaaacacgtcaaccacgaaccatatcacgcaacgcgacacgccgacaaacaaatcgccaacacacgaacacacacgccaacacaaaacgtacaatcgccaaaacaacaaaacgcacaaccacacacgcgcgacacaaacacgtcgtcatcatctcgaatacacgaaacacgcaaacaaccgcacgaaaactcacaaccgcacacgcacaccactaaacacgcgcacgcgcgaccaaaaaaccaccacgaaatcaatccgtaacacgacgacaaactacaccacacaaacaacaacgatcaacacaccgaaccactatacaacaacacacgcacctcaccacaaatcacacgaacgcaactaaccatcaacaaaacgtacgtcaaaccgccaaacacaccaacaacgaacacatcgacaaccaaacacatcgcaacaaacacaaacgacgccaccaccacgcaaccgatcgtaacgacgacgccgccacacgatcacacgcaaacatcatcgatacacaaacgactccaactcaatccacatacattccaaaacaaacgacatcaaacacacacgcacgccaacaatccacaaccgccatcaaaacacacaacgcaacgaaaccatcaccaaaacaanctaccatcgacacaacaacaataaccgtaaacgaacaaaccgcacaaaacatcgaacaacaacgcaaaactaaccaaaatcaaacgacgacaatcataaaacacgacaaca

SEQ ID NO: 5575 - DNA, 1131 bp, Artificial Sequence
  chemically treated genomic DNA (Homo sapiens) CpG-island No: 5575
  unsure (267, 306, 1020)
tacgatatattagatcgagtagagtattatattacgatagtatgcgaacgatattattatatgattattttttgttagattaagtatcgttagtagatcgttatagttagtaatattgttatatatagtacgtattcgtagtacgtatagacgcgttcgttagacgttgacgtttcgtagttacgtatcgacgttaattagttagtatatcgtcggtagagcgttatcgttttattacgtatattacgttagtcgagtacgagtatngttattacgtatgcgtagcgattattgttagattgcgangtcgagtagtattaagtatagagttatttagattagtttacgtatacgcgtacgatcgtacgattagtagttattattaagtacgttagttacgagttatattacgtaacgcgatacgtcgatagataagtcgttagtatacgaatatatacgttagtatagagcgtatagtcgttaggatagtaggacgtataattatatacgcgcgatataagtacgtcgttattatttcggatgtacgaagtacgtagatagtcgtacgaagatttatagtcgtatacgtatattattaagtacgcgtacgcgcggttagaaagttattacgagattaattcgtagtacgacgatagattatattatatagatagtaacgattagtatatcgaattattatataatagtatacgtattttattataagttatacgggcgtaattagttattagtagaacgtacgttagatcgttaagtatattagtagcgagtatatcggtagttaagtatatcgtagtagatataagcgacgttattattacgtaatcggtcgtagcgacgacgtcgttatacggttatacgtaagtattatcgatgtataggcgattttaatttagtttatatatattttaggatagacgatattaagtatatacgtacgttagtagtttatagtcgttattaaagtatataacgtagcgagattattattaagatagnttattatcgatataataatagtagtcgtgaacgagtaagtcgtatagagtatcgagtagtagcgtagggttagttagggttagacggcgataattataagatacgataata

SEQ ID NO: 5576 - DNA, 1131 bp, Artificial Sequence
  chemically treated genomic DNA (Homo sapiens) CpG-island No: 5576
  unsure (112, 826, 865)
tattatcgtatcttataattatcgccgtctaaccctaactaaccctacgctactactcgatactctatacgacttactcgttcacgactactattattatatcgataataanctatcttaataataatctcgctacgttatatactttaataacgactataaactactaacgtacgtatatacttaatatcgtctatcctaaaatatatataaactaaattaaaatcgcctatacatcgataatacttacgtataaccgtataacgacgtcgtcgctacgaccgattacgtaataataacgtcgcttatatctactacgatatacttaactaccgatatactcgctactaatatacttaacgatctaacgtacgttctactaataactaattacgcccgtataacttataataaaatacgtatactattatataataattcgatatactaatcgttactatctatataatataatctatcgtcgtactacgaattaatctcgtaataactttctaaccgcgcgtacgcgtacttaataatatacgtatacgactataaatcttcgtacgactatctacgtacttcgtacatccgaaataataacgacgtacttatatcgcgcgtatataattatacgtcctactatcctaacgactatacgctctatactaacgtatatattcgtatactaacgacttatctatcgacgtatcgcgttacgtaatataactcgtaactaacgtacttaataataactactaatcgtacgatcgtacgcgtatacgtaaactaatctaaataactctatacttaatactactcgacntcgcaatctaacaataatcgctacgcatacgtaataacnatactcgtactcgactaacgtaatatacgtaataaaacgataacgctctaccgacgatatactaactaattaacgtcgatacgtaactacgaaacgtcaacgtctaacgaacgcgtctatacgtactacgaatacgtactatatataacaatattactaactataacgatctactaacgatacttaatctaacaaaaaataatcatataataatatcgttcgcatactatcgtaatataatactctactcgatctaatatatcgta

SEQ ID NO: 5577 - DNA, 537 bp, Artificial Sequence
  chemically treated genomic DNA (Homo sapiens) CpG-island No: 5577
attcgagacggtaaggatataaatagttacggagaaacggaggagatagtcgaaggggtcgagaaacgcgagtcgttagaaagtcgtacgatataagaggattttcgggtatcgagcgcgaaggcggaattacggttagagacggtagttagggagaaatcgcgagtcgtatataaggttatataatagacgagtcggaagcgtaaagcgtaaagttaggggagtcgaaagcgggagcgaacgtataaaagaaggcggagcgcgtaaggattcgcgggttaggcgggaaaatcgaagagttagtcggtaaaaagaaacggttaacgcgcggggagaggcggggttgcggaaaagggtcgtatattcgtaaattacggaagacgaattcggtagtagttacgggcggagacggtaggcggtcgagtacggaaagtagacggtatacgaaaagggcggtaaagaacgggttaattttattaggaattataggtgagtaaacgtttaggaaaggaattattgtgaagttaaaagggttag

SEQ ID NO: 5578 - DNA, 537 bp, Artificial Sequence
  chemically treated genomic DNA (Homo sapiens) CpG-island No: 5578
ctaacccttttaacttcacaataattcctttcctaaacgtttactcacctataattcctaataaaattaacccgttctttaccgcccttttcgtataccgtctactttccgtactcgaccgcctaccgtctccgcccgtaactactaccgaattcgtcttccgtaatttacgaatatacgacccttttccgcaaccccgcctctccccgcgcgttaaccgtttctttttaccgactaactcttcgattttcccgcctaacccgcgaatccttacgcgctccgccttcttttatacgttcgctcccgctttcgactcccctaactttacgctttacgcttccgactcgtctattatataaccttatatacgactcgcgatttctccctaactaccgtctctaaccgtaattccgccttcgcgctcgatacccgaaaatcctcttatatcgtacgactttctaacgactcgcgtttctcgaccccttcgactatctcctccgtttctccgtaactatttatatccttaccgtctcgaat

SEQ ID NO: 5579 - DNA, 537 bp, Artificial Sequence
  chemically treated genomic DNA (Homo sapiens) CpG-island No: 5579
ttggtttttttggttttataatggttttttttttgggcgtttatttatttgtgatttttggtgggattaattcgttttttgtcgtttttttcgtgtgtcgtttgtttttcgtgttcggtcgtttgtcgttttcgttcgtggttgttgtcgggttcgtttttcgtggtttgcggatgtgcggttttttttcgtaatttcgttttttttcgcgcgttggtcgtttttttttgtcggttggtttttcggttttttcgtttggttcgcgggtttttgcgcgtttcgtttttttttgtgcgttcgttttcgttttcggtttttttggttttgcgttttgcgttttcggttcgtttgttgtgtggttttgtgtgcggttcgcggtttttttttggttgtcgtttttggtcgtggtttcgttttcgcgttcggtgttcggggatttttttgtgtcgtgcggttttttggcggttcgcgtttttcggttttttcggttgtttttttcgttttttcgtggttgtttgtgtttttgtcgtttcggat

SEQ ID NO: 5580 - DNA, 537 bp, Artificial Sequence
  chemically treated genomic DNA (Homo sapiens) CpG-island No: 5580
atccgaaacgacaaaaacacaaacaaccacgaaaaaacgaaaaaaacaaccgaaaaaaccgaaaaacgcgaaccgccaaaaaaccgcacgacacaaaaaaatccccgaacaccgaacgcgaaaacgaaaccacgaccaaaaacgacaaccaaaaaaaaaccgcgaaccgcacacaaaaccacacaacaaacgaaccgaaaacgcaaaacgcaaaaccaaaaaaaccgaaaacgaaaacgaacgcacaaaaaaaaacgaaacgcgcaaaaacccgcgaaccaaacgaaaaaaccgaaaaaccaaccgacaaaaaaaaacgaccaacgcgcgaaaaaaaacgaaattacgaaaaaaaaccgcacatccgcaaaccacgaaaaacgaacccgacaacaaccacgaacgaaaacgacaaacgaccgaacacgaaaaacaaacgacacacgaaaaaaacgacaaaaaacgaattaatcccaccaaaaatcacaaataaataaacgcccaaaaaaaaaaccattataaaaccaaaaaaaccaa

SEQ ID NO: 5581 - DNA, 760 bp, Artificial Sequence
  chemically treated genomic DNA (Homo sapiens) CpG-island No: 5581
gtcggcgggggggataagaaagtagagttgaagggagagggaaatacgcgggggggaaggttggtcggtaggggggataaagtaggggggacggggggaagcggggtaagagggagggaaaaggggagaaaagaatagatcgaacgggtagagggagaagaagggtatttgagaagaatgggtcgatagagcgaatggagggtaatttgaaggggaattggattagataaaacgtgtaggacgggggagtggaatacgggaaagtgacgggtagaggaggtaaacggaatttgggttggataacgacggggcggtgcgttgcggtagaggtggggtaagagtaaaacggtatagaaatggcgaagagagtaggaggggggcggatcgtatattgcggcgtacgttggcgggggaatggtgcgggtagtgtatatgtgtgaaatgcgttagattgggggcgcggtaaacgcggagtaaagtaaatatggggggggttgcgagaaatatatattttggggtgtatcgggcggtttgcgaagattgtttataagagattatacggtatcgtaaatttaatgtatacggtaacggttcgttatgtacgggcggggcggcggaataaggcggaaagtggttgagacgtgcggtatatataaatacgcgcgggggaatgttggggtggggtttattttgcggaggaattaatcggttgttaatttgggtgaaaagttttttttaatattaggttattcggtttatt

SEQ ID NO: 5582 - DNA, 760 bp, Artificial Sequence
  chemically treated genomic DNA (Homo sapiens) CpG-island No: 5582
aataaaccgaataacctaatattaaaaaaaacttttcacccaaattaacaaccgattaattcctccgcaaaataaaccccaccccaacattcccccgcgcgtatttatatataccgcacgtctcaaccactttccgccttattccgccgccccgcccgtacataacgaaccgttaccgtatacattaaatttacgataccgtataatctcttataaacaatcttcgcaaaccgcccgatacaccccaaaatatatatttctcgcaaccccccccatatttactttactccgcgtttaccgcgcccccaatctaacgcatttcacacatatacactacccgcaccattcccccgccaacgtacgccgcaatatacgatccgcccccctcctactctcttcgccatttctataccgttttactcttaccccacctctaccgcaacgcaccgccccgtcgttatccaacccaaattccgtttacctcctctacccgtcactttcccgtattccactcccccgtcctacacgttttatctaatccaattccccttcaaattaccctccattcgctctatcgacccattcttctcaaatacccttcttctccctctacccgttcgatctattcttttctccccttttccctccctcttaccccgcttccccccgtcccccctactttatcccccctaccgaccaaccttcccccccgcgtatttccctctcccttcaactctactttcttatcccccccgccgac

SEQ ID NO: 5583 - DNA, 760 bp, Artificial Sequence
  chemically treated genomic DNA (Homo sapiens) CpG-island No: 5583
aataaatcgggtaatttaatattgggaagagttttttatttaaattggtaatcggttaattttttcgtaaggtggattttattttagtattttttcgcgcgtgtttatatgtatcgtacgttttagttatttttcgttttatttcgtcgtttcgttcgtatatagcgggtcgttatcgtgtatattaggtttacggtgtcgtgtagttttttataagtagttttcgtaagtcgttcggtatattttaaaatgtgtgtttttcgtagttttttttatatttgttttgtttcgcgtttatcgcgtttttagtttaacgtattttatatatatatattattcgtattattttttcgttagcgtacgtcgtagtgtacggttcgttttttttttgtttttttcgttatttttatgtcgttttatttttattttatttttgtcgtagcgtatcgtttcgtcgttatttagtttaagtttcgtttgttttttttattcgttattttttcgtattttattttttcgttttgtacgttttatttggtttagtttttttttaaattattttttattcgttttatcggtttattttttttaagtgttttttttttttttttgttcgttcggtttattttttttttttttttttttttttttttgtttcgttttttttcgttttttttattttattttttttgtcggttaattttttttttcgcgtatttttttttttttttagttttatttttttatttttttcgtcggt

SEQ ID NO: 5584 - DNA, 760 bp, Artificial Sequence
  chemically treated genomic DNA (Homo sapiens) CpG-island No: 5584
accgacgaaaaaaataaaaaaataaaactaaaaaaaaaaaaaaatacgcgaaaaaaaaaattaaccgacaaaaaaaataaaataaaaaaaacgaaaaaaaacgaaacaaaaaaaaaaaaaaaaaaaaaaaaaaaataaaccgaacgaacaaaaaaaaaaaaaaaacacttaaaaaaaataaaccgataaaacgaataaaaaataatttaaaaaaaaactaaaccaaataaaacgtacaaaacgaaaaaataaaatacgaaaaaataacgaataaaaaaaacaaacgaaacttaaactaaataacgacgaaacgatacgctacgacaaaaataaaataaaaataaaacgacataaaaataacgaaaaaaacaaaaaaaaaacgaaccgtacactacgacgtacgctaacgaaaaaataatacgaataatatatatatataaaatacgttaaactaaaaacgcgataaacgcgaaacaaaacaaatataaaaaaaactacgaaaaacacacattttaaaatataccgaacgacttacgaaaactacttataaaaaactacacgacaccgtaaacctaatatacacgataacgacccgctatatacgaacgaaacgacgaaataaaacgaaaaataactaaaacgtacgatacatataaacacgcgcgaaaaaatactaaaataaaatccaccttacgaaaaaattaaccgattaccaatttaaataaaaaactcttcccaatattaaattacccgatttatt

SEQ ID NO: 5585 - DNA, 575 bp, Artificial Sequence
  chemically treated genomic DNA (Homo sapiens) CpG-island No: 5585
tgcggggaggcggtgtaggaattcgtttcgtcgagtgtcgtcggtttttgtgggtttgtttgcgcgtttggggttggtcgtattttgggcgcgggtgtttgcgtgtcggggtggtagtttcgagtttgcgcgcgtgcgatcgggtacgggagggggaagagtgtcgtaaaaatttagacgagtggttcgtatgtaaatgtagttcgcggggagtagggaggcggtaatgatagtcgttggcgtttagtttcgtcggcggtttttagttttttcgttaagtgtagtcggaggatagatagttatgcgtgtttttggcgggagagtttttattcgtcgcgcgcgttcgattttcgcgtatacgtatatatttttttcgtaggcgtggggtttaatggttacgaatatgttaggaaaataaagttggggttgcgaggtggaacgatgaaacggtatatttggcggtcgagggtagagcggagaagtcgttattatagttatcggcgttttttttttgtttgttcgtagatttgtttttcggtttagaagaggtcgaggattattttttagttgtttta

SEQ ID NO: 5586 - DNA, 575 bp, Artificial Sequence
  chemically treated genomic DNA (Homo sapiens) CpG-island No: 5586
taaaacaactaaaaaataatcctcgacctcttctaaaccgaaaaacaaatctacgaacaaacaaaaaaaaaacgccgataactataataacgacttctccgctctaccctcgaccgccaaatataccgtttcatcgttccacctcgcaaccccaactttattttcctaacatattcgtaaccattaaaccccacgcctacgaaaaaaatatatacgtatacgcgaaaatcgaacgcgcgcgacgaataaaaactctcccgccaaaaacacgcataactatctatcctccgactacacttaacgaaaaaactaaaaaccgccgacgaaactaaacgccaacgactatcattaccgcctccctactccccgcgaactacatttacatacgaaccactcgtctaaatttttacgacactcttccccctcccgtacccgatcgcacgcgcgcaaactcgaaactaccaccccgacacgcaaacacccgcgcccaaaatacgaccaaccccaaacgcgcaaacaaacccacaaaaaccgacgacactcgacgaaacgaattcctacaccgcctccccgca

SEQ ID NO: 5587 - DNA, 575 bp, Artificial Sequence
  chemically treated genomic DNA (Homo sapiens) CpG-island No: 5587
tggggtagttaagaaatggttttcggttttttttgggtcggagggtagatttacgagtaggtaagaaaggggcgtcggtggttgtggtggcgattttttcgttttgttttcggtcgttaagtgtgtcgttttatcgttttatttcgtagttttagttttgtttttttgatatgttcgtggttattgggttttacgtttgcgaggggagtgtgtgcgtgtgcgcgggggtcgggcgcgcgcggcgggtgggggttttttcgttaaggatacgtatggttgtttgtttttcggttgtatttggcgggaaagttaggggtcgtcggcggggttgagcgttagcggttgttattatcgtttttttgtttttcgcgggttgtatttatatacgggttattcgtttgaatttttacggtatttttttttttttcgtattcggtcgtacgcgcgtaggttcggaattattatttcggtacgtagatattcgcgtttagaatgcggttagttttaggcgcgtaaataggtttataggggtcgacggtattcggcgggacggatttttgtatcgttttttcgta

SEQ ID NO: 5588 - DNA, 575 bp, Artificial Sequence
  chemically treated genomic DNA (Homo sapiens) CpG-island No: 5588
tacgaaaaaacgatacaaaaatccgtcccgccgaataccgtcgacccctataaacctatttacgcgcctaaaactaaccgcattctaaacgcgaatatctacgtaccgaaataataattccgaacctacgcgcgtacgaccgaatacgaaaaaaaaaaaaataccgtaaaaattcaaacgaataacccgtatataaatacaacccgcgaaaaacaaaaaaacgataataacaaccgctaacgctcaaccccgccgacgacccctaactttcccgccaaatacaaccgaaaaacaaacaaccatacgtatccttaacgaaaaaacccccacccgccgcgcgcgcccgacccccgcgcacacgcacacactcccctcgcaaacgtaaaacccaataaccacgaacatatcaaaaaaacaaaactaaaactacgaaataaaacgataaaacgacacacttaacgaccgaaaacaaaacgaaaaaatcgccaccacaaccaccgacgcccctttcttacctactcgtaaatctaccctccgacccaaaaaaaaccgaaaaccatttcttaactacccca

SEQ ID NO: 5589 - DNA, 586 bp, Artificial Sequence
  chemically treated genomic DNA (Homo sapiens) CpG-island No: 5589
gtaaaatcgttagagtttgaatagtttgttgtcgtcgttacgtgaataattggacggttttcgtcgttaggtttaggatagtttcggtaaagaagtataagaacgttatattttggattacgaaattcgtaatttttagtaatttaacgcgtaaatggtttaggaagcgattaatttgacgcgcgcgttgaaaggcgattataaaatttagggtatttgggtcgaggtattattgacgcggtcgttggaggttttcggtttgcgtgaagggtatgaatatgaaatttaggttagtatcgaaaatgacgttcgtttcgcggatgtagttcggatgttattcgtgcgttttgtcgatagggaaaagatcgtggtgattcgattgtcgaaattgacgtttgtttcgtcgtattgaattgttatgtttaatcgtcggaagatcgattattaatttcgcgaaagtcgttgttattacggaatagtatttgcgtcggttagcgtaattatgatgtcgtttgttagggacgttaaagatttattaatacgttgtttgggttttgcgaatatttggattatcgtgtttgatcgt

SEQ ID NO: 5590 - DNA, 586 bp, Artificial Sequence
  chemically treated genomic DNA (Homo sapiens) CpG-island No: 5590
acgatcaaacacgataatccaaatattcgcaaaacccaaacaacgtattaataaatctttaacgtccctaacaaacgacatcataattacgctaaccgacgcaaatactattccgtaataacaacgactttcgcgaaattaataatcgatcttccgacgattaaacataacaattcaatacgacgaaacaaacgtcaatttcgacaatcgaatcaccacgatcttttccctatcgacaaaacgcacgaataacatccgaactacatccgcgaaacgaacgtcattttcgatactaacctaaatttcatattcatacccttcacgcaaaccgaaaacctccaacgaccgcgtcaataatacctcgacccaaataccctaaattttataatcgcctttcaacgcgcgcgtcaaattaatcgcttcctaaaccatttacgcgttaaattactaaaaattacgaatttcgtaatccaaaatataacgttcttatacttctttaccgaaactatcctaaacctaacgacgaaaaccgtccaattattcacgtaacgacgacaacaaactattcaaactctaacgattttac

SEQ ID NO: 5591 - DNA, 586 bp, Artificial Sequence
  chemically treated genomic DNA (Homo sapiens) CpG-island No: 5591
acgattaggtacgataatttagatgttcgtagagtttaggtagcgtgttgataaatttttgacgtttttagtaaacggtattatggttacgttagtcgacgtagatattgtttcgtagtagtagcggttttcgcggggttgatagtcggtttttcggcggttaaatatagtagtttaatacggcgagatagacgttaatttcggtagtcggattattacgattttttttttgtcggtagagcgtacgagtgatattcgggttgtattcgcgaagcgggcgttattttcgatgttgatttgggttttatatttatattttttacgtagatcggaagtttttagcgatcgcgttaatagtatttcggtttaggtgttttgggttttatggtcgttttttagcgcgcgcgttaggttgatcgttttttgggttatttgcgcgttgagttgttggagattgcgaatttcgtggtttagggtatggcgtttttgtgtttttttatcgaagttgttttgaatttgacggcggaaatcgtttagttgtttacgtagcggcgataataggttgtttagattttgacggttttgt

SEQ ID NO: 5592 - DNA, 586 bp, Artificial Sequence
  chemically treated genomic DNA (Homo sapiens) CpG-island No: 5592
acaaaaccgtcaaaatctaaacaacctattatcgccgctacgtaaacaactaaacgatttccgccgtcaaattcaaaacaacttcgataaaaaaacacaaaaacgccataccctaaaccacgaaattcgcaatctccaacaactcaacgcgcaaataacccaaaaaacgatcaacctaacgcgcgcgctaaaaaacgaccataaaacccaaaacacctaaaccgaaatactattaacgcgatcgctaaaaacttccgatctacgtaaaaaatataaatataaaacccaaatcaacatcgaaaataacgcccgcttcgcgaatacaacccgaatatcactcgtacgctctaccgacaaaaaaaaaatcgtaataatccgactaccgaaattaacgtctatctcgccgtattaaactactatatttaaccgccgaaaaaccgactatcaaccccgcgaaaaccgctactactacgaaacaatatctacgtcgactaacgtaaccataataccgtttactaaaaacgtcaaaaatttatcaacacgctacctaaactctacgaacatctaaattatcgtacctaatcgt

SEQ ID NO: 5593 - DNA, 598 bp, Artificial Sequence
  chemically treated genomic DNA (Homo sapiens) CpG-island No: 5593
gacgttcgatgttatggggtttcgtttttatggtggaagagtatttcggcgttacgttggataagagtgaatcgcgtatcgattggttggttagatcgttgatcgaacgttagtgtgaatacgtagcggcggatgtttggtatttgttatcgattatcgttaagtttatggtagaaacggaggttttcggttggttatttgcggcgttggatgaatgtcgtttgatgtaaatgcgtcgttaggaagtcgttgcgtcggaagatgtttggcgtgatattattaatgtttggtaattacgtatacgttaattggtttgtttgtaattgttagtcgattggcgattgcgtaaggcgcgagagcgcgatttggcggtgaattttgtcgtgcgtgaagagtatttgtggtcggtagcgcgttatatgtcgggaagtttaggcgaattggatagtttgggtttattcggtagcgaaattcgtttttacggtaaaacgttgttagcgttggtggaaaaagcgtagatattgtcggaagatgttttatcgtagtcgatgtttaatttgatggatatgtcgggttatcgtaaagcgtttaaagcgat

SEQ ID NO: 5594 - DNA, 598 bp, Artificial Sequence
  chemically treated genomic DNA (Homo sapiens) CpG-island No: 5594
atcgctttaaacgctttacgataacccgacatatccatcaaattaaacatcgactacgataaaacatcttccgacaatatctacgctttttccaccaacgctaacaacgttttaccgtaaaaacgaatttcgctaccgaataaacccaaactatccaattcgcctaaacttcccgacatataacgcgctaccgaccacaaatactcttcacgcacgacaaaattcaccgccaaatcgcgctctcgcgccttacgcaatcgccaatcgactaacaattacaaacaaaccaattaacgtatacgtaattaccaaacattaataatatcacgccaaacatcttccgacgcaacgacttcctaacgacgcatttacatcaaacgacattcatccaacgccgcaaataaccaaccgaaaacctccgtttctaccataaacttaacgataatcgataacaaataccaaacatccgccgctacgtattcacactaacgttcgatcaacgatctaaccaaccaatcgatacgcgattcactcttatccaacgtaacgccgaaatactcttccaccataaaaacgaaaccccataacatcgaacgtc

SEQ ID NO: 5595 - DNA, 598 bp, Artificial Sequence
  chemically treated genomic DNA (Homo sapiens) CpG-island No: 5595
atcgttttaaacgttttacgataattcggtatgtttattaggttaagtatcggttgcggtaaggtatttttcggtaatgtttgcgttttttttattagcgttagtagcgttttatcgtgaaagcggatttcgttatcggataaatttaggttgtttagttcgtttaaatttttcggtatataacgcgttatcgattataaatgttttttacgtacgataaagtttatcgttagatcgcgttttcgcgttttgcgtagtcgttagtcggttaatagttgtagataggttagttggcgtgtgcgtaattgttaggtattggtgatattacgttaggtatttttcggcgtaacgattttttgacgacgtatttgtattaggcggtatttatttagcgtcgtaggtagttagtcggaggttttcgtttttattataagtttggcggtgatcggtaatagatattagatattcgtcgttgcgtatttatattgacgttcggttagcggtttggttagttagtcggtgcgcgatttatttttgtttagcgtaacgtcggaatatttttttattatggaagcgaaattttatgatatcgggcgtt

SEQ ID NO: 5596 - DNA, 598 bp, Artificial Sequence
  chemically treated genomic DNA (Homo sapiens) CpG-island No: 5596
aacgcccgatatcataaaatttcgcttccataataaaaaaatattccgacgttacgctaaacaaaaataaatcgcgcaccgactaactaaccaaaccgctaaccgaacgtcaatataaatacgcaacgacgaatatctaatatctattaccgatcaccgccaaacttataataaaaacgaaaacctccgactaactacctacgacgctaaataaataccgcctaatacaaatacgtcgtcaaaaaatcgttacgccgaaaaatacctaacgtaatatcaccaatacctaacaattacgcacacgccaactaacctatctacaactattaaccgactaacgactacgcaaaacgcgaaaacgcgatctaacgataaactttatcgtacgtaaaaaacatttataatcgataacgcgttatataccgaaaaatttaaacgaactaaacaacctaaatttatccgataacgaaatccgctttcacgataaaacgctactaacgctaataaaaaaaacgcaaacattaccgaaaaataccttaccgcaaccgatacttaacctaataaacataccgaattatcgtaaaacgtttaaaacgat

SEQ ID NO: 5597 - DNA, 694 bp, Artificial Sequence
  chemically treated genomic DNA (Homo sapiens) CpG-island No: 5597
gttacgtcgttgaggttgttgcggggtttggaaaggaagcgggaatggtagggagaggcgggattaggttgaggtgggcggggagtcgggggcggagttatgagtggatttcgtgtcggtttaggtggagttcggggcgcgcggggagaggcgggatcgagtcgaggtgggtgtggcgtggggcggggtaatggcggggcggggttcgtcgttttttggggtttagtttagttattcgattagttcgtcggtttcggagcggttttgttttttcgagcgcgggacgcggcgttttgggggaggagggcgaagcgacgcggcgatggtttcgcgggtattttcggggttcgtcgttttagtcgttgttgttttcgtgggaggcgtcgtgagttcgtcgttggtggtttcgggtgagtgttcggtcgtagtcggggcgtcgggtgttgagttcggtttcgggagcgcggaaggaagcgaggggtcgggacggtagtttcgcggcgttttgttttttggtatagtcgcgggatttcggtattgaataattggttgtttcgcggcggttcgggtagggcgcggtgcgtggtaacggttttcgttttttttttttcgcgggtttcgttttcgttttttttttttggggtttttttcgaggatttgtgttttttagcgttgggtagtgcggggcgtaggg

SEQ ID NO: 5598 - DNA, 694 bp, Artificial Sequence
  chemically treated genomic DNA (Homo sapiens) CpG-island No: 5598
ccctacgccccgcactacccaacgctaaaaaacacaaatcctcgaaaaaaaccccaaaaaaaaaaaacgaaaacgaaacccgcgaaaaaaaaaaaacgaaaaccgttaccacgcaccgcgccctacccgaaccgccgcgaaacaaccaattattcaataccgaaatcccgcgactataccaaaaaacaaaacgccgcgaaactaccgtcccgacccctcgcttccttccgcgctcccgaaaccgaactcaacacccgacgccccgactacgaccgaacactcacccgaaaccaccaacgacgaactcacgacgcctcccacgaaaacaacaacgactaaaacgacgaaccccgaaaatacccgcgaaaccatcgccgcgtcgcttcgccctcctcccccaaaacgccgcgtcccgcgctcgaaaaaacaaaaccgctccgaaaccgacgaactaatcgaataactaaactaaaccccaaaaaacgacgaaccccgccccgccattaccccgccccacgccacacccacctcgactcgatcccgcctctccccgcgcgccccgaactccacctaaaccgacacgaaatccactcataactccgcccccgactccccgcccacctcaacctaatcccgcctctccctaccattcccgcttcctttccaaaccccgcaacaacctcaacgacgtaac

SEQ ID NO: 5599 - DNA, 694 bp, Artificial Sequence
  chemically treated genomic DNA (Homo sapiens) CpG-island No: 5599
ttttacgtttcgtattgtttagcgttggggaatatagattttcggaggaggttttagggagggaaggcgggagcggggttcgcgggaggggagggacgggagtcgttgttacgtatcgcgttttgttcggatcgtcgcgggatagttagttgtttagtgtcgggatttcgcggttgtgttagaaagtaggacgtcgcggggttgtcgtttcgatttttcgttttttttcgcgttttcgggatcgggtttagtattcggcgtttcggttacgatcggatatttattcggagttattagcggcgaatttacggcgttttttacgaagatagtagcggttaggacggcggatttcgggagtgttcgcggagttatcgtcgcgtcgtttcgttttttttttttagggcgtcgcgtttcgcgttcgggaaggtagagtcgtttcggagtcggcgggttgatcgagtggttgggttgggttttagggagcggcgaatttcgtttcgttattgtttcgttttacgttatatttatttcggttcggtttcgttttttttcgcgcgtttcgggttttatttaagtcggtacgaggtttatttatggtttcgttttcgatttttcgtttattttagtttgatttcgtttttttttgttattttcgttttttttttaaatttcgtagtagttttagcggcgtagt

SEQ ID NO: 5600 - DNA, 694 bp, Artificial Sequence
  chemically treated genomic DNA (Homo sapiens) CpG-island No: 5600
actacgccgctaaaactactacgaaatttaaaaaaaaaacgaaaataacaaaaaaaaacgaaatcaaactaaaataaacgaaaaatcgaaaacgaaaccataaataaacctcgtaccgacttaaataaaacccgaaacgcgcgaaaaaaaacgaaaccgaaccgaaataaatataacgtaaaacgaaacaataacgaaacgaaattcgccgctccctaaaacccaacccaaccactcgatcaacccgccgactccgaaacgactctaccttcccgaacgcgaaacgcgacgccctaaaaaaaaaaaacgaaacgacgcgacgataactccgcgaacactcccgaaatccgccgtcctaaccgctactatcttcgtaaaaaacgccgtaaattcgccgctaataactccgaataaatatccgatcgtaaccgaaacgccgaatactaaacccgatcccgaaaacgcgaaaaaaaacgaaaaatcgaaacgacaaccccgcgacgtcctactttctaacacaaccgcgaaatcccgacactaaacaactaactatcccgcgacgatccgaacaaaacgcgatacgtaacaacgactcccgtccctcccctcccgcgaaccccgctcccgccttccctccctaaaacctcctccgaaaatctatattccccaacgctaaacaatacgaaacgtaaaa

SEQ ID NO: 5601 - DNA, 810 bp, Artificial Sequence
  chemically treated genomic DNA (Homo sapiens) CpG-island No: 5601
tcggttttcggggatagaaaggggacgtttcggattgcggaatttagtttcgggcgggagaaggcgaagaggaagcgggatttttatacgtttgtttttgttttttcgggaggaggtttttttcgggttttcggcggaggaaagagaaagagtcgcggtcggtatatcgttttcgaggtgggggcggcggtttttttcgtatttatcggcgaatttgagttatcgttttttatggttgttttttgttaggtgttattagcggtacgttttatttatatcggttatcgagcgtagggtttggtgggcgggtttttgcggcggtcgtggagtttcggttcgaagttggaagatgagttggttagttgtacgtggttagcggatcgacgcggggagaagtaagtcggggtaggtaaaagtataggcgcgggagaagcgagttttgtttttagcgattatttcgggaatttcgtttagttgtcggttgtagtagcggtttttgcggattgcggttgggaacggcgtcgcgtagagatttgggcggggtatcgcggggcgtggatagggcgtggtttggtcgttgtttaggtaatagcgttagtcgtataaaagaggcggggtcgtttggggttggtaggtcgggtgtttgagtggtaggttgagcgggattcggttgggcgtgggtgtggtacgcggttgggattcggcgtttttcgtcgttattttttttttacgtatttagttttttttttttattcgggtagtcgttcgtcgttttatgttaggttggggggttttgaggaacggaagtga

SEQ ID NO: 5602 - DNA, 810 bp, Artificial Sequence
  chemically treated genomic DNA (Homo sapiens) CpG-island No: 5602
tcacttccgttcctcaaaaccccccaacctaacataaaacgacgaacgactacccgaataaaaaaaaaaaactaaatacgtaaaaaaaaaataacgacgaaaaacgccgaatcccaaccgcgtaccacacccacgcccaaccgaatcccgctcaacctaccactcaaacacccgacctaccaaccccaaacgaccccgcctcttttatacgactaacgctattacctaaacaacgaccaaaccacgccctatccacgccccgcgataccccgcccaaatctctacgcgacgccgttcccaaccgcaatccgcaaaaaccgctactacaaccgacaactaaacgaaattcccgaaataatcgctaaaaacaaaactcgcttctcccgcgcctatacttttacctaccccgacttacttctccccgcgtcgatccgctaaccacgtacaactaaccaactcatcttccaacttcgaaccgaaactccacgaccgccgcaaaaacccgcccaccaaaccctacgctcgataaccgatataaataaaacgtaccgctaataacacctaacaaaaaacaaccataaaaaacgataactcaaattcgccgataaatacgaaaaaaaccgccgcccccacctcgaaaacgatataccgaccgcgactctttctctttcctccgccgaaaacccgaaaaaaacctcctcccgaaaaaacaaaaacaaacgtataaaaatcccgcttcctcttcgccttctcccgcccgaaactaaattccgcaatccgaaacgtcccctttctatccccgaaaaccga

SEQ ID NO: 5603 - DNA, 810 bp, Artificial Sequence
  chemically treated genomic DNA (Homo sapiens) CpG-island No: 5603
ttattttcgttttttagagttttttagtttggtatagggcgacgggcgattattcgggtgggagggaggggttgaatgcgtagggggaaggtggcggcggagggcgtcgagttttaatcgcgtgttatatttacgtttagtcgagtttcgtttagtttattatttagatattcggtttattagttttaggcggtttcgttttttttgtgcgattggcgttgttgtttgggtaacgattaggttacgttttgtttacgtttcgcggtgtttcgtttaggtttttgcgcggcgtcgtttttagtcgtagttcgtaggagtcgttgttgtagtcggtagttgggcgggattttcggggtagtcgttgggagtaaagttcgtttttttcgcgtttgtgtttttgtttgtttcggtttattttttttcgcgtcggttcgttggttacgtatagttgattagtttattttttagtttcggatcgaggttttacggtcgtcgtagggattcgtttattagattttgcgttcggtagtcggtgtgagtggaacgtgtcgttgatgatatttggtagaaggtagttatggagggcgatggtttagattcgtcggtgagtgcggaggggatcgtcgtttttatttcgagggcggtgtgtcgatcgcggttttttttttttttttcgtcgggagttcggagggagttttttttcgggagagtaaaggtaggcgtgtggggatttcgtttttttttcgttttttttcgttcggggttaggtttcgtaattcggggcgttttttttttattttcgagagtcgg

SEQ ID NO: 5604 - DNA, 810 bp, Artificial Sequence
  chemically treated genomic DNA (Homo sapiens) CpG-island No: 5604
ccgactctcgaaaataaaaaaaaaacgccccgaattacgaaacctaaccccgaacgaaaaaaaacgaaaaaaaaacgaaatccccacacgcctacctttactctcccgaaaaaaaactccctccgaactcccgacgaaaaaaaaaaaaaaaaccgcgatcgacacaccgccctcgaaataaaaacgacgatcccctccgcactcaccgacgaatctaaaccatcgccctccataactaccttctaccaaatatcatcaacgacacgttccactcacaccgactaccgaacgcaaaatctaataaacgaatccctacgacgaccgtaaaacctcgatccgaaactaaaaaataaactaatcaactatacgtaaccaacgaaccgacgcgaaaaaaaataaaccgaaacaaacaaaaacacaaacgcgaaaaaaacgaactttactcccaacgactaccccgaaaatcccgcccaactaccgactacaacaacgactcctacgaactacgactaaaaacgacgccgcgcaaaaacctaaacgaaacaccgcgaaacgtaaacaaaacgtaacctaatcgttacccaaacaacaacgccaatcgcacaaaaaaaacgaaaccgcctaaaactaataaaccgaatatctaaataataaactaaacgaaactcgactaaacgtaaatataacacgcgattaaaactcgacgccctccgccgccaccttccccctacgcattcaacccctccctcccacccgaataatcgcccgtcgccctataccaaactaaaaaactctaaaaaacgaaaataa

SEQ ID NO: 5605 - DNA, 535 bp, Artificial Sequence
  chemically treated genomic DNA (Homo sapiens) CpG-island No: 5605
ttgttaagcgtatatatatatatatatatatacgtatatatatacgcgtatatatatattcgggtttttaacggcgcgtacgtacgtagcgttcggggtagattagcgcggcggtcgtttttcgggacgttcggacgtcggagggtttcgattttcgcgcggtttatgcgttcgcgttcgtttcgttgtttcgcgaggttcgcgggatttttttcgtcgtcgtcgtcgcgttcgtcgttttcggaggagcgggttggtcgatcgttatcgcgtcgtttttcggtcgttttcgaagtcgttttatcgcggtttttgtcgttttggggtcgcgtttcgttttcgcgttttgggggttgagtcgagtaaatttcgcgtatcggtcgacgttcggcggggatttcgttgcgtattcgcgcgttcgggtgggcgttgggcgcgcggatttttggggagcgggttgtttttttcgttgtatttgttcggtttttttttcgtttgtaggggattttagagatatcgttatttcgtaaatttt

SEQ ID NO: 5606 - DNA, 535 bp, Artificial Sequence
  chemically treated genomic DNA (Homo sapiens) CpG-island No: 5606
aaaatttacgaaataacgatatctctaaaatcccctacaaacgaaaaaaaaaccgaacaaatacaacgaaaaaaacaacccgctccccaaaaatccgcgcgcccaacgcccacccgaacgcgcgaatacgcaacgaaatccccgccgaacgtcgaccgatacgcgaaatttactcgactcaacccccaaaacgcgaaaacgaaacgcgaccccaaaacgacaaaaaccgcgataaaacgacttcgaaaacgaccgaaaaacgacgcgataacgatcgaccaacccgctcctccgaaaacgacgaacgcgacgacgacgacgaaaaaaatcccgcgaacctcgcgaaacaacgaaacgaacgcgaacgcataaaccgcgcgaaaatcgaaaccctccgacgtccgaacgtcccgaaaaacgaccgccgcgctaatctaccccgaacgctacgtacgtacgcgccgttaaaaacccgaatatatatatacgcgtatatatatacgtatatatatatatatatatatacgcttaacaa

SEQ ID NO: 5607 - DNA, 535 bp, Artificial Sequence
  chemically treated genomic DNA (Homo sapiens) CpG-island No: 5607
aaagtttgcgaagtggcggtgtttttggagttttttgtaagcggggagggggtcgagtaggtgtagcgggaggggtagttcgttttttaaaggttcgcgcgtttagcgtttattcgggcgcgcgggtgcgtagcggggttttcgtcgggcgtcggtcggtgcgcgaagtttgttcggtttaatttttaaggcgcgggagcggggcgcggttttaggacggtagggatcgcgatggagcggtttcgggggcggtcgggggacggcgcggtggcggtcggttagttcgttttttcgggggcggcgggcgcggcggcggcggcgggaggggtttcgcgggtttcgcggagtagcggggcggacgcgggcgtatgagtcgcgcgggggtcggggtttttcggcgttcgggcgtttcgggaggcggtcgtcgcgttggtttgtttcgggcgttacgtgcgtgcgcgtcgttgggagttcgaatgtgtgtgtgcgcgtgtgtatgtgcgtgtgtgtgtgtgtgtgtgtgtgcgtttggtag

SEQ ID NO: 5608 - DNA, 535 bp, Artificial Sequence
  chemically treated genomic DNA (Homo sapiens) CpG-island No: 5608
ctaccaaacgcacacacacacacacacacacacgcacatacacacgcgcacacacacattcgaactcccaacgacgcgcacgcacgtaacgcccgaaacaaaccaacgcgacgaccgcctcccgaaacgcccgaacgccgaaaaaccccgacccccgcgcgactcatacgcccgcgtccgccccgctactccgcgaaacccgcgaaacccctcccgccgccgccgccgcgcccgccgcccccgaaaaaacgaactaaccgaccgccaccgcgccgtcccccgaccgcccccgaaaccgctccatcgcgatccctaccgtcctaaaaccgcgccccgctcccgcgccttaaaaattaaaccgaacaaacttcgcgcaccgaccgacgcccgacgaaaaccccgctacgcacccgcgcgcccgaataaacgctaaacgcgcgaacctttaaaaaacgaactacccctcccgctacacctactcgaccccctccccgcttacaaaaaactccaaaaacaccgccacttcgcaaacttt

SEQ ID NO: 5609 - DNA, 804 bp, Artificial Sequence
  chemically treated genomic DNA (Homo sapiens) CpG-island No: 5609
ggcggcggcggcggcggcggaggaggaggcggcggcggtcgtcgggcgttgtagtgggacgcgcgcggttgtgagtttgcgggatatgtttttcgcgtcggttttttgttggcggttatgaagaggtagaacgtgcggattttgttttttatcgtttgtatttttatttatttgttggtgggcgtcgtcgtgttcgacgttttcgagtcggattacgagatgcgcgaggaggagaaatttaaagtcgaggagattcggattaaggggaagtataatattagtagcgaggattatcggtagttggagttggtgattttgtagtcggaatcgtatcgcgtcggcgtttagtggaaattcgtcggttttttttattttgcgattacggttattattattataggtaagggttgggcgcgtcgttgggttttcgcgtttcgggaggagttcggggaggcggttgagcgcgtcgcgtcgggttgggtgtagggcgtcgagggttaaacgtagttttttttgggggttttttcgtagcgtttttttttttttagggagtttttttttcgcggcgttttcgagttttatttttcggggattttattcggtgttttttatcgcgttggtgtttgggtcgggcgtgcgagtttcgagcgagtgtgtttgagtcgggagggcggaggcgttatttttgcgaagagagtggagcgttaagaataattttatagtagatatttatttatttatcgtttcggcgcgggttgggttgcgcggggttttgagttttatatttattatttttttgggagt

SEQ ID NO: 5610 - DNA, 804 bp, Artificial Sequence
  chemically treated genomic DNA (Homo sapiens) CpG-island No: 5610
actcccaaaaaaataataaatataaaactcaaaaccccgcgcaacccaacccgcgccgaaacgataaataaataaatatctactataaaattattcttaacgctccactctcttcgcaaaaataacgcctccgccctcccgactcaaacacactcgctcgaaactcgcacgcccgacccaaacaccaacgcgataaaaaacaccgaataaaatccccgaaaaataaaactcgaaaacgccgcgaaaaaaaaactccctaaaaaaaaaaaaacgctacgaaaaaacccccaaaaaaaactacgtttaaccctcgacgccctacacccaacccgacgcgacgcgctcaaccgcctccccgaactcctcccgaaacgcgaaaacccaacgacgcgcccaacccttacctataataataataaccgtaatcgcaaaataaaaaaaaccgacgaatttccactaaacgccgacgcgatacgattccgactacaaaatcaccaactccaactaccgataatcctcgctactaatattatacttccccttaatccgaatctcctcgactttaaatttctcctcctcgcgcatctcgtaatccgactcgaaaacgtcgaacacgacgacgcccaccaacaaataaataaaaatacaaacgataaaaaacaaaatccgcacgttctacctcttcataaccgccaacaaaaaaccgacgcgaaaaacatatcccgcaaactcacaaccgcgcgcgtcccactacaacgcccgacgaccgccgccgcctcctcctccgccgccgccgccgccgcc

SEQ ID NO: 5611 - DNA, 804 bp, Artificial Sequence
  chemically treated genomic DNA (Homo sapiens) CpG-island No: 5611
atttttagagaggtagtaagtgtaaggtttagagtttcgcgtagtttagttcgcgtcggggcggtgggtgggtgggtgtttgttatgggattatttttagcgttttatttttttcgtaaaagtggcgttttcgttttttcggtttaggtatattcgttcggggttcgtacgttcggtttagatattagcgcggtggagagtatcgggtggggttttcgaagggtgaggttcggaggcgtcgcggagggggggttttttagagaggagggggcgttgcgggaaggtttttaagggaggttgcgtttaattttcgacgttttgtatttagttcggcgcggcgcgtttagtcgttttttcggatttttttcggggcgcgggagtttagcggcgcgtttagtttttatttatggtggtgatgatcgtgatcgtaaagtagaaggagtcggcgaatttttattggacgtcggcgcggtgcggtttcgattgtaggattattagttttagttgtcggtagttttcgttgttgatgttgtatttttttttgattcggattttttcggttttgagtttttttttttcgcgtatttcgtggttcgattcgagggcgtcgaatacggcggcgtttattagtaggtaggtgaaggtgtagacgatgagggatagagttcgtacgttttgtttttttatggtcgttagtaaggagtcggcgcggggggtatgtttcgtaggtttatagtcgcgcgcgttttattgtagcgttcggcggtcgtcgtcgttttttttttcgtcgtcgtcgtcgtcgtt

SEQ ID NO: 5612 - DNA, 804 bp, Artificial Sequence
  chemically treated genomic DNA (Homo sapiens) CpG-island No: 5612
aacgacgacgacgacgacgaaaaaaaaaacgacgacgaccgccgaacgctacaataaaacgcgcgcgactataaacctacgaaacataccccccgcgccgactccttactaacgaccataaaaaaacaaaacgtacgaactctatccctcatcgtctacaccttcacctacctactaataaacgccgccgtattcgacgccctcgaatcgaaccacgaaatacgcgaaaaaaaaaaactcaaaaccgaaaaaatccgaatcaaaaaaaaatacaacatcaacaacgaaaactaccgacaactaaaactaataatcctacaatcgaaaccgcaccgcgccgacgtccaataaaaattcgccgactccttctactttacgatcacgatcatcaccaccataaataaaaactaaacgcgccgctaaactcccgcgccccgaaaaaaatccgaaaaaacgactaaacgcgccgcgccgaactaaatacaaaacgtcgaaaattaaacgcaacctcccttaaaaaccttcccgcaacgccccctcctctctaaaaaaccccccctccgcgacgcctccgaacctcacccttcgaaaaccccacccgatactctccaccgcgctaatatctaaaccgaacgtacgaaccccgaacgaatatacctaaaccgaaaaaacgaaaacgccacttttacgaaaaaaataaaacgctaaaaataatcccataacaaacacccacccacccaccgccccgacgcgaactaaactacgcgaaactctaaaccttacacttactacctctctaaaaat

SEQ ID NO: 5613 - DNA, 557 bp, Artificial Sequence
  chemically treated genomic DNA (Homo sapiens) CpG-island No: 5613
ggagtatttgtagcgtggcggtggtcgagcgcggaggttcgttattgtttttgattagtattattagtttgtgtttggttacgtcgcgttcgtttagtagtttggcggtgcgtatttcgttattgtgcgtttatacgtcgaatagttcgggtttcgtggttttgagtagttggtacgatagttaggcgttttggttcgagtcgtcgtttatcgttattattttggttattaggtagttcggttcggtcgttcggggtattagttcggtgtagggcgcggagtcgttttgtagcgggtatagtacgaagggcgagttgtcgttggcgtttagtattagtacgcgtattagcgtttcgttgtttagcgtcggggagtcgcggtttgtggcgtttacgcggaattcgaattttcgtagggtttcgtagtttagcgatttgagggcgaataggtggtcgttgttcgcgttgatggagattagggatgtgaggggtaggtgcgggttttggggcggtagtagcgagtaggtgatttgggcgttggtgtttgagtttttgttt

SEQ ID NO: 5614 - DNA, 557 bp, Artificial Sequence
  chemically treated genomic DNA (Homo sapiens) CpG-island No: 5614
aaacaaaaactcaaacaccaacgcccaaatcacctactcgctactaccgccccaaaacccgcacctacccctcacatccctaatctccatcaacgcgaacaacgaccacctattcgccctcaaatcgctaaactacgaaaccctacgaaaattcgaattccgcgtaaacgccacaaaccgcgactccccgacgctaaacaacgaaacgctaatacgcgtactaatactaaacgccaacgacaactcgcccttcgtactatacccgctacaaaacgactccgcgccctacaccgaactaataccccgaacgaccgaaccgaactacctaataaccaaaataataacgataaacgacgactcgaaccaaaacgcctaactatcgtaccaactactcaaaaccacgaaacccgaactattcgacgtataaacgcacaataacgaaatacgcaccgccaaactactaaacgaacgcgacgtaaccaaacacaaactaataatactaatcaaaaacaataacgaacctccgcgctcgaccaccgccacgctacaaatactcc

SEQ ID NO: 5615 - DNA, 557 bp, Artificial Sequence
  chemically treated genomic DNA (Homo sapiens) CpG-island No: 5615
agatagagatttaggtattaacgtttaggttatttattcgttgttgtcgttttaggattcgtatttgttttttatatttttggtttttattaacgcggataacggttatttgttcgtttttaggtcgttggattacgaggttttgcgggagttcgagtttcgcgtgggcgttatagatcgcggtttttcggcgttgagtagcgaggcgttggtgcgcgtgttggtgttggacgttaacgataattcgtttttcgtgttgtattcgttgtagaacggtttcgcgttttgtatcgagttggtgtttcgggcggtcgagtcgggttatttggtgattaaggtggtggcggtggacggcgattcgggttagaacgtttggttgtcgtattagttgtttaaggttacggagttcgggttgttcggcgtgtgggcgtataatggcgaggtgcgtatcgttaggttgttgagcgagcgcgacgtggttaagtataggttagtggtgttggttaaggataatggcgagttttcgcgttcggttatcgttacgttgtaagtgtttt

SEQ ID NO: 5616 - DNA, 557 bp, Artificial Sequence
  chemically treated genomic DNA (Homo sapiens) CpG-island No: 5616
aaaacacttacaacgtaacgataaccgaacgcgaaaactcgccattatccttaaccaacaccactaacctatacttaaccacgtcgcgctcgctcaacaacctaacgatacgcacctcgccattatacgcccacacgccgaacaacccgaactccgtaaccttaaacaactaatacgacaaccaaacgttctaacccgaatcgccgtccaccgccaccaccttaatcaccaaataacccgactcgaccgcccgaaacaccaactcgatacaaaacgcgaaaccgttctacaacgaatacaacacgaaaaacgaattatcgttaacgtccaacaccaacacgcgcaccaacgcctcgctactcaacgccgaaaaaccgcgatctataacgcccacgcgaaactcgaactcccgcaaaacctcgtaatccaacgacctaaaaacgaacaaataaccgttatccgcgttaataaaaaccaaaaatataaaaaacaaatacgaatcctaaaacgacaacaacgaataaataacctaaacgttaatacctaaatctctatct

SEQ ID NO: 5617 - DNA, 659 bp, Artificial Sequence
  chemically treated genomic DNA (Homo sapiens) CpG-island No: 5617
  unsure (331)
tagcgttggatgcggcgtgcggtcggtaaagattagatcgtttatatagaattggcgatcgttcggcgtatcgttaaaattatcgtcgtaagtcgattacgggttgtcgtttttattatatttaattagcgattgatttatttagttttagacgaagtcgttttgtaaacggggatattgacgaaacgtttgttagtatttagcgaaatcgttaagattgttatttatcgcgtgggcgtattcgtaaaggattagcgggcgcgtttttttaggtagcgaaagttattttttgatggattatttcggtatagtcgggaagggttggttttantttacgcgcgcgtatatcgggtaaataatatcggtggtcgtggtgtcggtttcgtcgtttttatattgtatcgggcgggaaggatcgatagatttgatttagcgatatagcgcgtcgtgattagcgtcgtggcgttgatttattacgttatcgaatttagtatgaattaaattcggttagattattattgattcggcgcgtgggcggaatcgcgtcgtatagtcgaatcgtcggtttaagtcgatttgataagggtagtggcgtcgacgtcgtgcgtagattttgttgttataattaaatggttcgatacgtttggttattattaatt

SEQ ID NO: 5618 - DNA, 659 bp, Artificial Sequence
  chemically treated genomic DNA (Homo sapiens) CpG-island No: 5618
  unsure (329)
aattaataataaccaaacgtatcgaaccatttaattataacaacaaaatctacgcacgacgtcgacgccactacccttatcaaatcgacttaaaccgacgattcgactatacgacgcgattccgcccacgcgccgaatcaataataatctaaccgaatttaattcatactaaattcgataacgtaataaatcaacgccacgacgctaatcacgacgcgctatatcgctaaatcaaatctatcgatccttcccgcccgatacaatataaaaacgacgaaaccgacaccacgaccaccgatattatttacccgatatacgcgcgcgtaaantaaaaccaacccttcccgactataccgaaataatccatcaaaaaataactttcgctacctaaaaaaacgcgcccgctaatcctttacgaatacgcccacgcgataaataacaatcttaacgatttcgctaaatactaacaaacgtttcgtcaatatccccgtttacaaaacgacttcgtctaaaactaaataaatcaatcgctaattaaatataataaaaacgacaacccgtaatcgacttacgacgataattttaacgatacgccgaacgatcgccaattctatataaacgatctaatctttaccgaccgcacgccgcatccaacgcta

SEQ ID NO: 5619 - DNA, 659 bp, Artificial Sequence
  chemically treated genomic DNA (Homo sapiens) CpG-island No: 5619
  unsure (329)
gattagtgataattaagcgtatcgaattatttgattataatagtagaatttgcgtacgacgtcggcgttattgtttttgttaagtcggtttaagtcgacggttcgattatacgacgcgatttcgtttacgcgtcgagttagtgatggtttgatcgagtttaatttatgttgagttcggtggcgtaatgaattagcgttacggcgttaattacgacgcgttgtatcgttggattaaatttgtcgatttttttcgttcggtgtagtatgaaggcggcggagtcgatattacggttatcgatattatttgttcgatgtacgcgcgcgtggantaagattagtttttttcggttgtgtcgaaatggtttattaaaaaatggttttcgttatttggagagacgcgttcgttgattttttgcgaatacgtttacgcgatgggtaatagttttggcggtttcgttaaatattggtaggcgtttcgttagtattttcgtttatagggcggtttcgtttgggattgggtggattagtcgttgattaaatatgatgaaaacggtaattcgtggtcggtttacggcggtgattttggcgatacgtcgaacgatcgttagttttgtatgaacggtttggtttttgtcgatcgtacgtcgtatttagcgttg

SEQ ID NO: 5620 - DNA, 659 bp, Artificial Sequence
  chemically treated genomic DNA (Homo sapiens) CpG-island No: 5620
  unsure (331)
caacgctaaatacgacgtacgatcgacaaaaaccaaaccgttcatacaaaactaacgatcgttcgacgtatcgccaaaatcaccgccgtaaaccgaccacgaattaccgttttcatcatatttaatcaacgactaatccacccaatcccaaacgaaaccgccctataaacgaaaatactaacgaaacgcctaccaatatttaacgaaaccgccaaaactattacccatcgcgtaaacgtattcgcaaaaaatcaacgaacgcgtctctccaaataacgaaaaccattttttaataaaccatttcgacacaaccgaaaaaaactaatcttantccacgcgcgcgtacatcgaacaaataatatcgataaccgtaatatcgactccgccgccttcatactacaccgaacgaaaaaaatcgacaaatttaatccaacgatacaacgcgtcgtaattaacgccgtaacgctaattcattacgccaccgaactcaacataaattaaactcgatcaaaccatcactaactcgacgcgtaaacgaaatcgcgtcgtataatcgaaccgtcgacttaaaccgacttaacaaaaacaataacgccgacgtcgtacgcaaattctactattataatcaaataattcgatacgcttaattatcactaatc

SEQ ID NO: 5621 - DNA, 553 bp, Artificial Sequence
  chemically treated genomic DNA (Homo sapiens) CpG-island No: 5621
gttggcgggagtggggtatgcgacgttgaatgaaggggtaatagcgaaaatttattagattagatttggtcgggattttcggatgcgtttttttaaagcgttttagtagttttagcgattagttgtaatttgtattaggtcgtatttgattgttggttttttgttggaacgaatatattttgaagtcggaatatatttcgttgtaggattttaacgataattttttcgttaatatttagaaagacggtatttattcggtgatttcgcgtttttcgggcggtgaaattatttcggaagggttgatggcggtaggtcgtatcgcgcgtgaatttaatttttatattaagattattggtttttagtcgtttggacgatgtttggcgtatagaaagacgatttgtcggagatttggcgttagttgattgaagtcggtttcgaaatcggttatgtttatgcgaaagtattgcgtatggcgaaaatttgcgtggggtagtatttggtgtcgttacggcgttggcgataggcgtcgattcgggtggtattgggaaatcgt

SEQ ID NO: 5622 - DNA, 553 bp, Artificial Sequence
  chemically treated genomic DNA (Homo sapiens) CpG-island No: 5622
acgatttcccaataccacccgaatcgacgcctatcgccaacgccgtaacgacaccaaatactaccccacgcaaattttcgccatacgcaatactttcgcataaacataaccgatttcgaaaccgacttcaatcaactaacgccaaatctccgacaaatcgtctttctatacgccaaacatcgtccaaacgactaaaaaccaataatcttaatataaaaattaaattcacgcgcgatacgacctaccgccatcaacccttccgaaataatttcaccgcccgaaaaacgcgaaatcaccgaataaataccgtctttctaaatattaacgaaaaaattatcgttaaaatcctacaacgaaatatattccgacttcaaaatatattcgttccaacaaaaaaccaacaatcaaatacgacctaatacaaattacaactaatcgctaaaactactaaaacgctttaaaaaaacgcatccgaaaatcccgaccaaatctaatctaataaattttcgctattaccccttcattcaacgtcgcataccccactcccgccaac

SEQ ID NO: 5623 - DNA, 553 bp, Artificial Sequence
  chemically treated genomic DNA (Homo sapiens) CpG-island No: 5623
acggttttttagtattattcgagtcgacgtttgtcgttaacgtcgtagcggtattaggtgttattttacgtaggttttcgttatacgtagtgttttcgtataggtatgatcggtttcgaagtcggttttaattagttgacgttagattttcggtagatcgtttttttgtgcgttaaatatcgtttagacgattgggagttagtgattttggtgtagagattaaatttacgcgcgatacgatttatcgttattagttttttcggggtgattttatcgttcggagaacgcgggattatcgagtaggtgtcgtttttttggatgttagcgaggaagttgtcgttagaattttgtagcggagtatgtttcggttttagaatgtattcgttttagtaggaggttagtagttaggtacggtttggtgtagattataattggtcgttgaagttgttggaacgttttaaagaagcgtattcggaaatttcgattaagtttggtttgatggattttcgttgttatttttttatttagcgtcgtatgttttattttcgttagt

SEQ ID NO: 5624 - DNA, 553 bp, Artificial Sequence
  chemically treated genomic DNA (Homo sapiens) CpG-island No: 5624
actaacgaaaataaaacatacgacgctaaataaaaaaataacaacgaaaatccatcaaaccaaacttaatcgaaatttccgaatacgcttctttaaaacgttccaacaacttcaacgaccaattataatctacaccaaaccgtacctaactactaacctcctactaaaacgaatacattctaaaaccgaaacatactccgctacaaaattctaacgacaacttcctcgctaacatccaaaaaaacgacacctactcgataatcccgcgttctccgaacgataaaatcaccccgaaaaaactaataacgataaatcgtatcgcgcgtaaatttaatctctacaccaaaatcactaactcccaatcgtctaaacgatatttaacgcacaaaaaaacgatctaccgaaaatctaacgtcaactaattaaaaccgacttcgaaaccgatcatacctatacgaaaacactacgtataacgaaaacctacgtaaaataacacctaataccgctacgacgttaacgacaaacgtcgactcgaataatactaaaaaaccgt

SEQ ID NO: 5625 - DNA, 1011 bp, Artificial Sequence
  chemically treated genomic DNA (Homo sapiens) CpG-island No: 5625
  unsure (793, 803..804, 815, 821..822, 826, 828..829, 835, 837..838)
  unsure (844, 846..847, 859..860, 868..869, 880..881, 885..886, 897)
  unsure (901..902, 921..922, 950)
tacgtattcgttcgcgttgacggtgagcgaggcgcgattgaggacgggtaggcgtacgtcgttttgttggtgtaggatgaaggttttattgacgttttgtacgttaattatttttcgtttcgtggttcgggtgtcggatgcgacgttgacgcgttttattcgatttacggggagcgtatttgtaggtcggataaggcgtttacgtcgtattcggtatcggtttaattttgtaaaatcgatgatattagtagttgtgtatacggatgatgcgggtcgtcgagtacgcggtcggttaatttattttttattatttgtttttgttttattattagtaaacggttcgttagtaggcgggcgacgtttaaattatgggttgataattattatcgcgaggtttagttttattattaggtcgcgtagtaggtcgagtaggcgggtttgtatcgatatatttagttcgtcggtcggtttatttataaatattagtttcggatgcgttattaggttgcgggtaatttgtaaacgttgttgtatatcgtcggaaaaggtggtcggtaggtcgtcgattcggttggcgggaatttttattttttttagttatttttgcgcggtggtacgaatatcgtcgtaatgacgtgtttcggtcgttattagtcgttcgtcgatattgtcgtttgtcgatatttggcggcgtaggtcgtcgagtggatgttgatgtattacgttttattcggtacgtagtaggcgacggcggtcggtttcgtttattgtatatagcgaacggttttcgttnacgtgaattnntttttttgggnttgcgnngcgntnntaggtngnncgcggnanngattcgattttnnagtagcgnntggtttttttnngganngtcggattttntcgnnataagtgtttagtattttnntttcggttataatattaataagagatantcgttaaagtttttgttcggcgcgtaaaggtgggttaggttattgatcgaaagtaacggtt

SEQ ID NO: 5626 - DNA, 1011 bp, Artificial Sequence
  chemically treated genomic DNA (Homo sapiens) CpG-island No: 5626
  unsure (62, 90..91, 110..111, 115, 126..127, 131..132, 143..144, 152..153)
  unsure (165..166, 168, 174..175, 177, 183..184, 186, 190..191, 197)
  unsure (208..209, 219)
aaccgttactttcgatcaataacctaacccacctttacgcgccgaacaaaaactttaacgantatctcttattaatattataaccgaaannaaaatactaaacacttatnncganaaaatccgacnntccnnaaaaaaaccanncgctactnnaaaatcgaatcnntnccgcgnncnacctannancgcnncgcaancccaaaaaaannaattcacgtnaacgaaaaccgttcgctatatacaataaacgaaaccgaccgccgtcgcctactacgtaccgaataaaacgtaatacatcaacatccactcgacgacctacgccgccaaatatcgacaaacgacaatatcgacgaacgactaataacgaccgaaacacgtcattacgacgatattcgtaccaccgcgcaaaaataactaaaaaaaataaaaattcccgccaaccgaatcgacgacctaccgaccaccttttccgacgatatacaacaacgtttacaaattacccgcaacctaataacgcatccgaaactaatatttataaataaaccgaccgacgaactaaatatatcgatacaaacccgcctactcgacctactacgcgacctaataataaaactaaacctcgcgataataattatcaacccataatttaaacgtcgcccgcctactaacgaaccgtttactaataataaaacaaaaacaaataataaaaaataaattaaccgaccgcgtactcgacgacccgcatcatccgtatacacaactactaatatcatcgattttacaaaattaaaccgataccgaatacgacgtaaacgccttatccgacctacaaatacgctccccgtaaatcgaataaaacgcgtcaacgtcgcatccgacacccgaaccacgaaacgaaaaataattaacgtacaaaacgtcaataaaaccttcatcctacaccaacaaaacgacgtacgcctacccgtcctcaatcgcgcctcgctcaccgtcaacgcgaacgaatacgta

SEQ ID NO: 5627 - DNA, 1011 bp, Artificial Sequence
  chemically treated genomic DNA (Homo sapiens) CpG-island No: 5627
  unsure (62, 90..91, 110..111, 115, 126..127, 131..132, 143..144, 152..153)
  unsure (165..166, 168, 174..175, 177, 183..184, 186, 190..191, 197)
  unsure (208..209, 219)
aatcgttattttcggttaataatttgatttatttttacgcgtcgggtaaaggttttagcgantgttttttgttgatgttatggtcggggnngaagtgttgggtatttgtnncggnggaattcggtnntttnngggaagattanncgttgttnngaagtcgagttnntntcgcgnntngtttgnnancgtnncgtagntttagggggannaatttacgtnagcgagaatcgttcgttgtatgtaatgagcgaggtcgatcgtcgtcgtttgttgcgtatcgaatggggcgtggtgtattagtatttattcgacggtttgcgtcgttaggtgtcggtaggcggtaatatcggcgagcggttgatggcgatcggggtacgttattacggcgatattcgtgttatcgcgtagaagtggttggaagaggtggagattttcgttaatcggatcgacgatttgtcgattatttttttcggcggtatgtagtagcgtttgtagattgttcgtaatttggtgacgtattcgaagttggtgtttatggatgaatcgatcggcgggttggatgtgtcggtgtaggttcgtttgttcgatttgttgcgcggtttggtggtggagttgaatttcgcggtggtgattgttaatttatgatttaggcgtcgttcgtttgttggcggatcgtttgttggtgatgaagtaggggtaagtggtggagagtgggttaatcgatcgcgtgttcgacgattcgtattattcgtatatatagttgttggtgttatcggttttgtagaattgagtcggtgtcggatgcggcgtaaacgttttattcggtttataaatgcgtttttcgtaggtcggataagacgcgttagcgtcgtattcgatattcgaattacgaggcgaaaaatgattaacgtataaaacgttagtaaaatttttattttgtattagtaaaacggcgtgcgtttgttcgtttttaatcgcgtttcgtttatcgttaacgcgggcgaatgcgtg

SEQ ID NO: 5628 - DNA, 1011 bp, Artificial Sequence
  chemically treated genomic DNA (Homo sapiens) CpG-island No: 5628
  unsure (793, 803..804, 815, 821..822, 826, 828..829, 835, 837..838)
  unsure (844, 846..847, 859..860, 868..869, 880..881, 885..886, 897)
  unsure (901..902, 921..922, 950)
cacgcattcgcccgcgttaacgataaacgaaacgcgattaaaaacgaacaaacgcacgccgttttactaatacaaaataaaaattttactaacgttttatacgttaatcatttttcgcctcgtaattcgaatatcgaatacgacgctaacgcgtcttatccgacctacgaaaaacgcatttataaaccgaataaaacgtttacgccgcatccgacaccgactcaattctacaaaaccgataacaccaacaactatatatacgaataatacgaatcgtcgaacacgcgatcgattaacccactctccaccacttacccctacttcatcaccaacaaacgatccgccaacaaacgaacgacgcctaaatcataaattaacaatcaccaccgcgaaattcaactccaccaccaaaccgcgcaacaaatcgaacaaacgaacctacaccgacacatccaacccgccgatcgattcatccataaacaccaacttcgaatacgtcaccaaattacgaacaatctacaaacgctactacataccgccgaaaaaaataatcgacaaatcgtcgatccgattaacgaaaatctccacctcttccaaccacttctacgcgataacacgaatatcgccgtaataacgtaccccgatcgccatcaaccgctcgccgatattaccgcctaccgacacctaacgacgcaaaccgtcgaataaatactaatacaccacgccccattcgatacgcaacaaacgacgacgatcgacctcgctcattacatacaacgaacgattctcgctnacgtaaattnntccccctaaanctacgnnacgntnncaaacnanncgcganannaactcgacttcnnaacaacgnntaatcttcccnnaaannaccgaattccnccgnnacaaatacccaacacttcnnccccgaccataacatcaacaaaaaacantcgctaaaacctttacccgacgcgtaaaaataaatcaaattattaaccgaaaataacgatt

SEQ ID NO: 5629 - DNA, 1057 bp, Artificial Sequence
  chemically treated genomic DNA (Homo sapiens) CpG-island No: 5629
  unsure (391, 399, 401, 404, 406, 408, 412, 414, 417, 419, 433, 750..751)
  unsure (758)
atagttgtgggtcgattcgtagatggcgtatggtttattttattgttgaacggtgaacgggtgatcgtcgaaatcgagattttttacgcgggtaaacggcggtatcgtatagatgcgtttttcgcgtttcgcgtcgaatagttgtagggcgggtattatgtttatttttgggttatcgaatttcgggatcggcgacgggtttattacgtagcgtttatttatttttatcggataggcgtaggtggtggcgatatgatcgaagcgggcgatatttttatatagttttatttgtattacgtcgtatttttttagcgcgtgtatggtgcgggttttcgtttcgcgcggttcgataaagcgtagcggttcggggattggtatttggaagataatnatttgaantnttntntngggntntangncggggtcgtttttnggggatgcggtgacgcgtttggataatcgtcgtatcgttcgtacgtttcgtggtgtttatttcggttacgcgtttgaagaagttgcgaatcgatacggcgttggtggtgtattcgcgttttggttaattatttttagtacgtcgttttcgttaattacgttggcggtaagttgaatgtcgtcggttttttagtcgtacggtatcggtatttcgcgttcgttaaacggtatttgataatcggggatcgttatcgtttttaagatggcgcggcggattatgcgtttggtttgttcgtcgaggtaggtaaagttgtagtnncgtttangattagttatggttttgtttttgttgtagacgtttgagtagttttagttcggtttggaaatcgacgtagtgggggagtttgaggtgtgagataaagtttgcggtttcgacgttgtcggtatgtgttagtacgaattttttattttgcgtcgggtttgtcgcgtgttcgtcgtatttcggggtttgtagagcgcggtcgattagcgttatcgttatcgttttgcgttcgtttatgtcgaatattagttcgtagtcgcgcgtgaagtgcggcggtttattcggcgggtcgataaaatcgtt

SEQ ID NO: 5630 - DNA, 1057 bp, Artificial Sequence
  chemically treated genomic DNA (Homo sapiens) CpG-island No: 5630
  unsure (300, 307..308, 625, 639, 641, 644, 646, 650, 652, 654, 657)
  unsure (659, 667)
aacgattttatcgacccgccgaataaaccgccgcacttcacgcgcgactacgaactaatattcgacataaacgaacgcaaaacgataacgataacgctaatcgaccgcgctctacaaaccccgaaatacgacgaacacgcgacaaacccgacgcaaaataaaaaattcgtactaacacataccgacaacgtcgaaaccgcaaactttatctcacacctcaaactcccccactacgtcgatttccaaaccgaactaaaactactcaaacgtctacaacaaaaacaaaaccataactaatcntaaacgnnactacaactttacctacctcgacgaacaaaccaaacgcataatccgccgcgccatcttaaaaacgataacgatccccgattatcaaataccgtttaacgaacgcgaaataccgataccgtacgactaaaaaaccgacgacattcaacttaccgccaacgtaattaacgaaaacgacgtactaaaaataattaaccaaaacgcgaatacaccaccaacgccgtatcgattcgcaacttcttcaaacgcgtaaccgaaataaacaccacgaaacgtacgaacgatacgacgattatccaaacgcgtcaccgcatccccnaaaaacgaccccgncntanancccnananaananttcaaatnattatcttccaaataccaatccccgaaccgctacgctttatcgaaccgcgcgaaacgaaaacccgcaccatacacgcgctaaaaaaatacgacgtaatacaaataaaactatataaaaatatcgcccgcttcgatcatatcgccaccacctacgcctatccgataaaaataaataaacgctacgtaataaacccgtcgccgatcccgaaattcgataacccaaaaataaacataatacccgccctacaactattcgacgcgaaacgcgaaaaacgcatctatacgataccgccgtttacccgcgtaaaaaatctcgatttcgacgatcacccgttcaccgttcaacaataaaataaaccatacgccatctacgaatcgacccacaactat

SEQ ID NO: 5631 - DNA, 1057 bp, Artificial Sequence
  chemically treated genomic DNA (Homo sapiens) CpG-island No: 5631
  unsure (300, 307..308, 625, 639, 641, 644, 646, 650, 652, 654, 657)
  unsure (659, 667)
aacggttttatcgattcgtcgggtgagtcgtcgtattttacgcgcggttacgggttggtgttcggtatgagcgagcgtaaagcgatggcgatggcgttggtcgatcgcgttttgtaagtttcggagtacggcgagtacgcgataggttcggcgtaggatgaagagttcgtgttggtatatgtcgataacgtcgaagtcgtaggttttgttttatattttaaatttttttattacgtcgatttttaggtcgaattggagttatttaaacgtttgtaataggagtagaattatggttaattntgagcgnngttataattttgtttatttcgacgagtagattaaacgtatgattcgtcgcgttattttaaaagcggtggcgattttcggttattaggtgtcgtttggcgggcgcgagatgtcgatgtcgtacggttggggaatcggcggtatttagtttatcgttagcgtgattggcgaaagcgacgtgttgaaggtgattgattagggcgcggatatattattaacgtcgtgtcgattcgtaatttttttaagcgcgtgatcggggtaaatattacggaacgtacggacgatgcgacggttatttagacgcgttatcgtatttttngaaagcggtttcgntntgnantttngnanagnantttagatnattattttttaggtgttaattttcgagtcgttgcgttttatcgagtcgcgcgaaacggaaattcgtattatgtacgcgttggaagagtacggcgtgatgtaggtgaaattgtatgaagatatcgttcgtttcggttatatcgttattatttacgtttattcggtgaaggtaaatgggcgttacgtgatggattcgtcgtcgatttcgaaattcgataatttaaaaatggatatgatgttcgttttgtaattgttcggcgcggggcgcgagaagcgtatttatgcggtgtcgtcgtttattcgcgtggaaagtttcgatttcgacgattattcgtttatcgtttagtagtgggatgagttatgcgttatttgcggatcgatttatagttat

SEQ ID NO: 5632 - DNA, 1057 bp, Artificial Sequence
  chemically treated genomic DNA (Homo sapiens) CpG-island No: 5632
  unsure (391, 399, 401, 404, 406, 408, 412, 414, 417, 419, 433, 750..751)
  unsure (758)
ataactataaatcgatccgcaaataacgcataactcatcccactactaaacgataaacgaataatcgtcgaaatcgaaactttccacgcgaataaacgacgacaccgcataaatacgcttctcgcgccccgcgccgaacaattacaaaacgaacatcatatccatttttaaattatcgaatttcgaaatcgacgacgaatccatcacgtaacgcccatttaccttcaccgaataaacgtaaataataacgatataaccgaaacgaacgatatcttcatacaatttcacctacatcacgccgtactcttccaacgcgtacataatacgaatttccgtttcgcgcgactcgataaaacgcaacgactcgaaaattaacacctaaaaaataatnatctaaantnctntncnaaantncanancgaaaccgctttcnaaaaatacgataacgcgtctaaataaccgtcgcatcgtccgtacgttccgtaatatttaccccgatcacgcgcttaaaaaaattacgaatcgacacgacgttaataatatatccgcgccctaatcaatcaccttcaacacgtcgctttcgccaatcacgctaacgataaactaaataccgccgattccccaaccgtacgacatcgacatctcgcgcccgccaaacgacacctaataaccgaaaatcgccaccgcttttaaaataacgcgacgaatcatacgtttaatctactcgtcgaaataaacaaaattataacnncgctcanaattaaccataattctactcctattacaaacgtttaaataactccaattcgacctaaaaatcgacgtaataaaaaaatttaaaatataaaacaaaacctacgacttcgacgttatcgacatataccaacacgaactcttcatcctacgccgaacctatcgcgtactcgccgtactccgaaacttacaaaacgcgatcgaccaacgccatcgccatcgctttacgctcgctcataccgaacaccaacccgtaaccgcgcgtaaaatacgacgactcacccgacgaatcgataaaaccgtt

SEQ ID NO: 5633 - DNA, 1431 bp, Artificial Sequence
  chemically treated genomic DNA (Homo sapiens) CpG-island No: 5633
  unsure (1371..)
tcggcgcgtttgttttcgttaattatttcgcgattttggagattaagcgtttgcgttggatttttagttattagttttatcgtttgcggtagcgtaaagcggttgttttggttatcggcgacgcgaaatgtcgtatcgagtaggttggcggggtagtagtcggaagagaggatatttagtaggttaagttgcgttagtttattggtcgttacgttgtcggagtgcgagtcgtcgcgtataatattcggcgcgtttattagtacgtttatgttatgtttgcgcgaggttttcgtcgtttcgaacgtggtgggaaattcggcgattacgttgttaagttggtgagatttagtaacgtgggcgtgggtggcgttatcgtggttggtaagcgtaatttttcgcgcgcggtatagggcggcgatggattcgcgattcggttgcgattagcgtgcggcgagcgttagttgttttttttcgtattgttgtatttgcgtattagtgagggagtatttgttttgataatattcgcgatatttttcgcggttggcgaattggcgttggttcggcgagtggtttattagcgatattagcgttatcggttcgcgttgtattagttttttaaatagcggtagcgtggtgtgatgcggtagttcgtagcgtagatgtagacggtgttcggcgcggttgacgtcgcgtttttgcgttttttcgatggcgttgattattttttttagattttttagtcgatcgtcgtcgtcgcgtacgtcgttaattgttacggtatttagtacggtggtgatgtcgttcgttattattagcgcgtcgtggttgtttatcgtcgagtgggtaggttagttaattttcgggcgcggggtgaagaatttatttagattatcggtatgtagtttaattagtttcggtagtagttagtcgttttcgtcgtttatcgttttcggtaggcggttttggttttcggtaaaggcgcggatttcgtcgttttgtatttttagcgaatcgtttattatttcgttttttagtattagtttaacgttattgataattatgaagaggtttttattgggtgtacgcggtcggcgacgttattacgtatagtttcgttatggaagatgtttacgatggttgcgttacgggtttggtttcgcgaattagtttattacggcggcgttgttttgggttagcgagcggtggtcgtaatcgtaatgggtgttagatagtcgggtatttgttttgtgtcgtcgggagtttggttcggtaggtcgattcggggtaaatcgataggcgtacggacgatacgggtatcggaagggttagttcgggtgttgcgttttttttttgtttcgtttcgtttttttnntaaaagaaagaataagagaacgaggagagtataagagtaagaggataaagagaagtaga

SEQ ID NO: 5634 - DNA, 1431 bp, Artificial Sequence
  chemically treated genomic DNA (Homo sapiens) CpG-island No: 5634
  unsure (60..)
tctacttctctttatcctcttactcttatactctcctcgttctcttattctttcttttannaaaaaaacgaaacgaaacaaaaaaaaaacgcaacacccgaactaacccttccgatacccgtatcgtccgtacgcctatcgatttaccccgaatcgacctaccgaaccaaactcccgacgacacaaaacaaatacccgactatctaacacccattacgattacgaccaccgctcgctaacccaaaacaacgccgccgtaataaactaattcgcgaaaccaaacccgtaacgcaaccatcgtaaacatcttccataacgaaactatacgtaataacgtcgccgaccgcgtacacccaataaaaacctcttcataattatcaataacgttaaactaatactaaaaaacgaaataataaacgattcgctaaaaatacaaaacgacgaaatccgcgcctttaccgaaaaccaaaaccgcctaccgaaaacgataaacgacgaaaacgactaactactaccgaaactaattaaactacataccgataatctaaataaattcttcaccccgcgcccgaaaattaactaacctacccactcgacgataaacaaccacgacgcgctaataataacgaacgacatcaccaccgtactaaataccgtaacaattaacgacgtacgcgacgacgacgatcgactaaaaaatctaaaaaaaataatcaacgccatcgaaaaaacgcaaaaacgcgacgtcaaccgcgccgaacaccgtctacatctacgctacgaactaccgcatcacaccacgctaccgctatttaaaaaactaatacaacgcgaaccgataacgctaatatcgctaataaaccactcgccgaaccaacgccaattcgccaaccgcgaaaaatatcgcgaatattatcaaaacaaatactccctcactaatacgcaaatacaacaatacgaaaaaaaacaactaacgctcgccgcacgctaatcgcaaccgaatcgcgaatccatcgccgccctataccgcgcgcgaaaaattacgcttaccaaccacgataacgccacccacgcccacgttactaaatctcaccaacttaacaacgtaatcgccgaatttcccaccacgttcgaaacgacgaaaacctcgcgcaaacataacataaacgtactaataaacgcgccgaatattatacgcgacgactcgcactccgacaacgtaacgaccaataaactaacgcaacttaacctactaaatatcctctcttccgactactaccccgccaacctactcgatacgacatttcgcgtcgccgataaccaaaacaaccgctttacgctaccgcaaacgataaaactaataactaaaaatccaacgcaaacgcttaatctccaaaatcgcgaaataattaacgaaaacaaacgcgccga

SEQ ID NO: 5635 - DNA, 1431 bp, Artificial Sequence
  chemically treated genomic DNA (Homo sapiens) CpG-island No: 5635
  unsure (60..)
tttgtttttttttgtttttttgtttttgtgtttttttcgtttttttgtttttttttttannagaagagcgggacgaggtagaagaggagcgtagtattcggattggttttttcggtattcgtatcgttcgtacgtttatcggtttatttcgagtcgatttgtcggattagattttcggcgatataggataaatgttcggttatttgatatttattgcggttacgattatcgttcgttgatttaaaatagcgtcgtcgtggtgaattgattcgcgaagttaaattcgtggcgtagttatcgtaggtattttttatgacgaagttgtacgtaatgacgtcgtcgatcgcgtgtatttaatgggagtttttttatgattattaataacgttaagttggtgttggaaaacgaggtggtaagcggttcgttggaggtgtagaacggcgaaattcgcgtttttgtcgaaagttagagtcgtttgtcggaggcgatggacggcgaaggcggttggttgttgtcggggttgattgagttgtatatcgataatttggataaattttttatttcgcgttcgaaagttgattggtttgtttattcggcgatgagtagttacgacgcgttgatggtggcgagcggtattattatcgtattggatgtcgtggtaattggcgacgtgcgcgacggcggcgatcggttggagaatttggagaagatgattaacgttatcgaagagacgtagaaacgcggcgttaatcgcgtcgagtatcgtttgtatttgcgttgcgaattgtcgtattatattacgttgtcgttgtttgaaaaattggtgtagcgcgagtcggtgacgttggtgtcgttgatggattattcgtcgggttagcgttagttcgttaatcgcgagaagtatcgcgaatattattagggtaaatatttttttattgatgcgtagatgtagtagtacgaagaagagtaattggcgttcgtcgtacgttggtcgtagtcgaatcgcgaatttatcgtcgttttgtgtcgcgcgcgaaaaattgcgtttgttagttacgatgacgttatttacgtttacgttgttgaattttattagtttggtagcgtgatcgtcgaattttttattacgttcgaagcggcggaagtttcgcgtaagtatggtatgaacgtgttgatgggcgcgtcgaatattgtgcgcggcggttcgtatttcggtaacgtggcggttagtgaattggcgtagtttggtttgttggatattttttttttcgattattatttcgttagtttgttcgatgcggtatttcgcgtcgtcgatgattagagtaatcgttttacgttgtcgtaggcggtgaagttggtgattaaaaatttagcgtaggcgtttaatttttaggatcgcggggtgattggcgagggtaaacgcgtcga

SEQ ID NO: 5636 - DNA, 1431 bp, Artificial Sequence
  chemically treated genomic DNA (Homo sapiens) CpG-island No: 5636
  unsure (1371..)
tcgacgcgtttaccctcgccaatcaccccgcgatcctaaaaattaaacgcctacgctaaatttttaatcaccaacttcaccgcctacgacaacgtaaaacgattactctaatcatcgacgacgcgaaataccgcatcgaacaaactaacgaaataataatcgaaaaaaaaaatatccaacaaaccaaactacgccaattcactaaccgccacgttaccgaaatacgaaccgccgcgcacaatattcgacgcgcccatcaacacgttcataccatacttacgcgaaacttccgccgcttcgaacgtaataaaaaattcgacgatcacgctaccaaactaataaaattcaacaacgtaaacgtaaataacgtcatcgtaactaacaaacgcaatttttcgcgcgcgacacaaaacgacgataaattcgcgattcgactacgaccaacgtacgacgaacgccaattactcttcttcgtactactacatctacgcatcaataaaaaaatatttaccctaataatattcgcgatacttctcgcgattaacgaactaacgctaacccgacgaataatccatcaacgacaccaacgtcaccgactcgcgctacaccaatttttcaaacaacgacaacgtaatataatacgacaattcgcaacgcaaatacaaacgatactcgacgcgattaacgccgcgtttctacgtctcttcgataacgttaatcatcttctccaaattctccaaccgatcgccgccgtcgcgcacgtcgccaattaccacgacatccaatacgataataataccgctcgccaccatcaacgcgtcgtaactactcatcgccgaataaacaaaccaatcaactttcgaacgcgaaataaaaaatttatccaaattatcgatatacaactcaatcaaccccgacaacaaccaaccgccttcgccgtccatcgcctccgacaaacgactctaactttcgacaaaaacgcgaatttcgccgttctacacctccaacgaaccgcttaccacctcgttttccaacaccaacttaacgttattaataatcataaaaaaactcccattaaatacacgcgatcgacgacgtcattacgtacaacttcgtcataaaaaatacctacgataactacgccacgaatttaacttcgcgaatcaattcaccacgacgacgctattttaaatcaacgaacgataatcgtaaccgcaataaatatcaaataaccgaacatttatcctatatcgccgaaaatctaatccgacaaatcgactcgaaataaaccgataaacgtacgaacgatacgaataccgaaaaaaccaatccgaatactacgctcctcttctacctcgtcccgctcttctnntaaaaaaaaaaacaaaaaaacgaaaaaaacacaaaaacaaaaaaacaaaaaaaaacaaa

SEQ ID NO: 5637 - DNA, 690 bp, Artificial Sequence
  chemically treated genomic DNA (Homo sapiens) CpG-island No: 5637
  unsure (348)
ggaaaacgcgcgacgaaatcgattaacgcgttgatgatcgttagtatcgcggcgtaacgtataggtagcgaggcgggaagcgttagtacgtacgcgttagttttgggattaagatttagttgaattagcgtttgttgttaggtttttattagattcgttttattaatcgggatcgttatcggtaaattgcgtagcggtagtttgtacgtttttaagttagattgttgttgtagagagcgaaagggtattcgcgttcgtgttaaattacgtgtgtgtcgttacggattgcgtcggaaattgtacgtttattttacgtaggcgcggatggttttgtagcgtaatttgtantagcgggttatatcggtaaatagaacggtcggcggttgtgggatatatcgttaagcggtagaaaaggtaagagtcggcgtaatcgtggtataacggttgtatagtttgtgacgtatacgttcgaatttttatatagttttcgcggattttatatgtcgattagggtgtttttcgttattaatttcggttaattttcgtttttattttaggcgatatcggaaggttttaaatcgagttttattttttttttttttttagttgtatagatcgtaaaaaacgagttatacgtaatatattagaagtttttacgtttataatagttattaataataaacgtagttt

SEQ ID NO: 5638 - DNA, 690 bp, Artificial Sequence
  chemically treated genomic DNA (Homo sapiens) CpG-island No: 5638
  unsure (343)
aaactacgtttattattaataactattataaacgtaaaaacttctaatatattacgtataactcgttttttacgatctatacaactaaaaaaaaaaaaaaaataaaactcgatttaaaaccttccgatatcgcctaaaataaaaacgaaaattaaccgaaattaataacgaaaaacaccctaatcgacatataaaatccgcgaaaactatataaaaattcgaacgtatacgtcacaaactatacaaccgttataccacgattacgccgactcttaccttttctaccgcttaacgatatatcccacaaccgccgaccgttctatttaccgatataacccgctantacaaattacgctacaaaaccatccgcgcctacgtaaaataaacgtacaatttccgacgcaatccgtaacgacacacacgtaatttaacacgaacgcgaataccctttcgctctctacaacaacaatctaacttaaaaacgtacaaactaccgctacgcaatttaccgataacgatcccgattaataaaacgaatctaataaaaacctaacaacaaacgctaattcaactaaatcttaatcccaaaactaacgcgtacgtactaacgcttcccgcctcgctacctatacgttacgccgcgatactaacgatcatcaacgcgttaatcgatttcgtcgcgcgttttcc

SEQ ID NO: 5639 - DNA, 690 bp, Artificial Sequence
  chemically treated genomic DNA (Homo sapiens) CpG-island No: 5639
  unsure (343)
aagttgcgtttgttgttggtggttgttgtagacgtgagggtttttggtgtgttgcgtgtggttcgttttttgcggtttgtgtaattggagagagagaggggataagattcggtttagggtttttcgatatcgtttagggtggaaacgggggttaatcggaattgatagcggaagatattttgatcggtatgtggagttcgcgggaattgtgtaagggttcgaacgtgtacgttatagattatgtaatcgttgtgttacggttacgtcgatttttattttttttgtcgtttggcgatgtattttatagtcgtcgatcgttttgtttgtcgatatggttcgttgntgtaaattgcgttgtaggattattcgcgtttgcgtgagatgaacgtatagttttcggcgtaattcgtggcggtatatacgtgatttggtacgggcgcgaatattttttcgttttttgtagtaataatttggtttgagggcgtataaattgtcgttgcgtaatttgtcggtggcgatttcgattgatgaaacggatttggtgggggtttggtaataggcgttgatttagttggattttgattttaaaattgacgcgtacgtgttggcgtttttcgtttcgttgtttgtgcgttacgtcgcggtattgacggttattaacgcgttggtcgatttcgtcgcgcgtttttt

SEQ ID NO: 5640 - DNA, 690 bp, Artificial Sequence
  chemically treated genomic DNA (Homo sapiens) CpG-island No: 5640
  unsure (348)
aaaaaacgcgcgacgaaatcgaccaacgcgttaataaccgtcaataccgcgacgtaacgcacaaacaacgaaacgaaaaacgccaacacgtacgcgtcaattttaaaatcaaaatccaactaaatcaacgcctattaccaaacccccaccaaatccgtttcatcaatcgaaatcgccaccgacaaattacgcaacgacaatttatacgccctcaaaccaaattattactacaaaaaacgaaaaaatattcgcgcccgtaccaaatcacgtatataccgccacgaattacgccgaaaactatacgttcatctcacgcaaacgcgaataatcctacaacgcaatttacancaacgaaccatatcgacaaacaaaacgatcgacgactataaaatacatcgccaaacgacaaaaaaaataaaaatcgacgtaaccgtaacacaacgattacataatctataacgtacacgttcgaacccttacacaattcccgcgaactccacataccgatcaaaatatcttccgctatcaattccgattaacccccgtttccaccctaaacgatatcgaaaaaccctaaaccgaatcttatcccctctctctctccaattacacaaaccgcaaaaaacgaaccacacgcaacacaccaaaaaccctcacgtctacaacaaccaccaacaacaaacgcaactt

SEQ ID NO: 5641 - DNA, 578 bp, Artificial Sequence
  chemically treated genomic DNA (Homo sapiens) CpG-island No: 5641
tgtcgttcgataaaatcgtagcgacgatggaaaaagggatgggaggtattttcggttttttggcggtggttgtcgttttgggagttatgtttggtaagattttatatgaaatcggcgtagtcgattagattgtcgttaaaatgtttaaatttttcggttatagtcgcgcgtattatgttatcggttttgcggggttggtttgtgcgttatttgttgttttttgaacgtggcgatatgttttgttgattacgcgttgtttttttaatggcgcgttacgatcggtacgaatttgagtgaagttggtaattttattatttgtaggcgatggcggtagcggcggtatttttggtgtttggattagcgtcgatgttgttggtatcgtagatgaattgttcgaatttttgggggtatggatgattttgattggtttgtgtgcggtaatttcgggtaatgattattgtcgggtcgttgtggggtaattttattagtcgtttacgttgagttgtatatttttgacgatattagcgaatcgtatttcgcgcgaaggtaaaatgttattttttcggattttagttttt

SEQ ID NO: 5642 - DNA, 578 bp, Artificial Sequence
  chemically treated genomic DNA (Homo sapiens) CpG-island No: 5642
aaaaactaaaatccgaaaaaataacattttaccttcgcgcgaaatacgattcgctaatatcgtcaaaaatatacaactcaacgtaaacgactaataaaattaccccacaacgacccgacaataatcattacccgaaattaccgcacacaaaccaatcaaaatcatccatacccccaaaaattcgaacaattcatctacgataccaacaacatcgacgctaatccaaacaccaaaaataccgccgctaccgccatcgcctacaaataataaaattaccaacttcactcaaattcgtaccgatcgtaacgcgccattaaaaaaacaacgcgtaatcaacaaaacatatcgccacgttcaaaaaacaacaaataacgcacaaaccaaccccgcaaaaccgataacataatacgcgcgactataaccgaaaaatttaaacattttaacgacaatctaatcgactacgccgatttcatataaaatcttaccaaacataactcccaaaacgacaaccaccgccaaaaaaccgaaaatacctcccatccctttttccatcgtcgctacgattttatcgaacgaca

SEQ ID NO: 5643 - DNA, 578 bp, Artificial Sequence
  chemically treated genomic DNA (Homo sapiens) CpG-island No: 5643
aagggttgaaattcgaaaagatggtattttgttttcgcgcgagatgcggttcgttgatgtcgttaggaatatgtagtttaacgtagacggttgatgaagttattttatagcggttcggtaataattattgttcggaattgtcgtatataggttaattaggattatttatgtttttaaaagttcgggtaatttatttgcgatgttagtagtatcggcgttggtttaggtattagaaatgtcgtcgttgtcgttatcgtttgtaaataatgggattattagttttatttaggttcgtatcggtcgtggcgcgttattgagaaagtaacgcgtaattagtagaatatatcgttacgtttaaagaatagtaggtagcgtatagattagtttcgtaaggtcgatggtataatgcgcgcggttgtgatcgaaggatttgagtattttgacggtaatttgatcgattgcgtcggttttatgtaagattttgttaaatatagtttttagggcgataattatcgttaggaagtcgagggtgttttttatttttttttttatcgtcgttgcgattttatcgagcggta

SEQ ID NO: 5644 - DNA, 578 bp, Artificial Sequence
  chemically treated genomic DNA (Homo sapiens) CpG-island No: 5644
taccgctcgataaaatcgcaacgacgataaaaaaaaaaataaaaaacaccctcgacttcctaacgataattatcgccctaaaaactatatttaacaaaatcttacataaaaccgacgcaatcgatcaaattaccgtcaaaatactcaaatccttcgatcacaaccgcgcgcattataccatcgaccttacgaaactaatctatacgctacctactattctttaaacgtaacgatatattctactaattacgcgttactttctcaataacgcgccacgaccgatacgaacctaaataaaactaataatcccattatttacaaacgataacgacaacgacgacatttctaatacctaaaccaacgccgatactactaacatcgcaaataaattacccgaacttttaaaaacataaataatcctaattaacctatatacgacaattccgaacaataattattaccgaaccgctataaaataacttcatcaaccgtctacgttaaactacatattcctaacgacatcaacgaaccgcatctcgcgcgaaaacaaaataccatcttttcgaatttcaaccctt

SEQ ID NO: 5645 - DNA, 527 bp, Artificial Sequence
  chemically treated genomic DNA (Homo sapiens) CpG-island No: 5645
gaacgaattttagatattagtatttaattgaacgtttttttcggttgtgaagttgttgttagcgacgcgtcgagcggttagttgattgtggtggtggaagtagaagatagcgaaacgttgatttaaattattgagttagtacgtaacgtagagggcgtgttggcggtgtcgttggtttattattagtaggaagagtaaggtgaggaaatattatgaaatttagtcgtcgtagttttatgaaagttaacgtcgttgcggtcgttgcggcggttgtcggttttagcgtgtcgggcgttgttcgcgtcgttgttggttagtaggaagttattaaatgggataaagcgtcgtgtcgtttttgcggtattggttgcggcgttttggtcggaacgtagtagggacgtgtggtggtttgttagggcgattcggacgtatcggttaatcgtggtttgaattgtattaagggttattttttgtttaaaattatgtacggtaaagatcgtttgacgtagtcgttgttgcgtatgaaa

SEQ ID NO: 5646 - DNA, 527 bp, Artificial Sequence
  chemically treated genomic DNA (Homo sapiens) CpG-island No: 5646
tttcatacgcaacaacgactacgtcaaacgatctttaccgtacataattttaaacaaaaaataacccttaatacaattcaaaccacgattaaccgatacgtccgaatcgccctaacaaaccaccacacgtccctactacgttccgaccaaaacgccgcaaccaataccgcaaaaacgacacgacgctttatcccatttaataacttcctactaaccaacaacgacgcgaacaacgcccgacacgctaaaaccgacaaccgccgcaacgaccgcaacgacgttaactttcataaaactacgacgactaaatttcataatatttcctcaccttactcttcctactaataataaaccaacgacaccgccaacacgccctctacgttacgtactaactcaataatttaaatcaacgtttcgctatcttctacttccaccaccacaatcaactaaccgctcgacgcgtcgctaacaacaacttcacaaccgaaaaaaacgttcaattaaatactaatatctaaaattcgttc

SEQ ID NO: 5647 - DNA, 527 bp, Artificial Sequence
  chemically treated genomic DNA (Homo sapiens) CpG-island No: 5647
ttttatacgtagtagcggttgcgttaaacggtttttatcgtatatgattttgggtaggaaatagtttttaatgtagtttaggttacggttaatcggtgcgttcgggtcgttttgataggttattatacgtttttgttgcgtttcgattagaacgtcgtaattagtatcgtagaaacggtacggcgttttattttatttgatggttttttgttgattaataacggcgcgggtaacgttcggtacgttgagatcggtagtcgtcgtagcggtcgtaacggcgttagtttttataaagttacgacgattgagttttatggtgtttttttattttgttttttttgttggtgataaattagcgatatcgttagtacgttttttacgttgcgtattgatttaatggtttggattagcgtttcgttgttttttgtttttattattataattaattgatcgttcggcgcgtcgttgatagtaattttatagtcgggaaaggcgtttagttgggtgttgatgtttgaaattcgttt

SEQ ID NO: 5648 - DNA, 527 bp, Artificial Sequence
  chemically treated genomic DNA (Homo sapiens) CpG-island No: 5648
aaacgaatttcaaacatcaacacccaactaaacgcctttcccgactataaaattactatcaacgacgcgccgaacgatcaattaattataataataaaaacaaaaaacaacgaaacgctaatccaaaccattaaatcaatacgcaacgtaaaaaacgtactaacgatatcgctaatttatcaccaacaaaaaaaacaaaataaaaaaacaccataaaactcaatcgtcgtaactttataaaaactaacgccgttacgaccgctacgacgactaccgatctcaacgtaccgaacgttacccgcgccgttattaatcaacaaaaaaccatcaaataaaataaaacgccgtaccgtttctacgatactaattacgacgttctaatcgaaacgcaacaaaaacgtataataacctatcaaaacgacccgaacgcaccgattaaccgtaacctaaactacattaaaaactatttcctacccaaaatcatatacgataaaaaccgtttaacgcaaccgctactacgtataaaa

SEQ ID NO: 5649 - DNA, 530 bp, Artificial Sequence
  chemically treated genomic DNA (Homo sapiens) CpG-island No: 5649
tgttggcggtgtcgaatttaatttattcgtagttcgcgacgtataacgtttatacgttggcggcgatttattaattggcggggtagaattattattcgggttagtacgagttttagtgtttgtatggtatgggcgagttattgtatgagtaggttatcgggaaagttgtcgacggtaaatttaatcgttcgtgtcgtatttatgtttcggttggtatatatgaaacgttgttggcgtatttggtgcgtcgtttgttggaaaacggtgttaatatttcgtttgttaatcgtattggcgatatttttttgttattggatgaattggtcgtcgattcggttattgttgtagaaaaattggcgtaataggaagggtaaattggattatcgtattcgaaaatttttttgtcgcgcgatttttacggttacgggcgcgataattcggtagggttggatttcgttaacgaatatcgtttggtttcgtttttttttgttttgtttaatagtgtattgtaaaaatggtaggttttgtta

SEQ ID NO: 5650 - DNA, 530 bp, Artificial Sequence
  chemically treated genomic DNA (Homo sapiens) CpG-island No: 5650
taacaaaacctaccatttttacaatacactattaaacaaaacaaaaaaaaacgaaaccaaacgatattcgttaacgaaatccaaccctaccgaattatcgcgcccgtaaccgtaaaaatcgcgcgacaaaaaaattttcgaatacgataatccaatttacccttcctattacgccaatttttctacaacaataaccgaatcgacgaccaattcatccaataacaaaaaaatatcgccaatacgattaacaaacgaaatattaacaccgttttccaacaaacgacgcaccaaatacgccaacaacgtttcatatataccaaccgaaacataaatacgacacgaacgattaaatttaccgtcgacaactttcccgataacctactcatacaataactcgcccataccatacaaacactaaaactcgtactaacccgaataataattctaccccgccaattaataaatcgccgccaacgtataaacgttatacgtcgcgaactacgaataaattaaattcgacaccgccaaca

SEQ ID NO: 5651 - DNA, 530 bp, Artificial Sequence
  chemically treated genomic DNA (Homo sapiens) CpG-island No: 5651
tggtaaggtttgttatttttgtagtgtattattgagtagggtagaggagagcgaggttaggcggtgttcgttagcgagatttagttttgtcgagttgtcgcgttcgtgatcgtaaagatcgcgcggtaggggaattttcggatgcggtaatttagtttgttttttttgttgcgttagtttttttatagtagtgatcggatcggcgattagtttatttagtggtaaagaggtgtcgttaatacggttaataaacgaggtgttagtatcgttttttagtaggcgacgtattagatacgttaatagcgttttatgtgtgttaatcggagtataaatacgatacggacggttaagtttgtcgtcggtaattttttcggtgatttgtttatatagtggttcgtttatattatgtaggtattggaattcgtattgattcgggtagtagttttgtttcgttagttgataaatcgtcgttagcgtatgggcgttgtgcgtcgcgaattgcgggtagattagattcggtatcgttagta

SEQ ID NO: 5652 - DNA, 530 bp, Artificial Sequence
  chemically treated genomic DNA (Homo sapiens) CpG-island No: 5652
tactaacgataccgaatctaatctacccgcaattcgcgacgcacaacgcccatacgctaacgacgatttatcaactaacgaaacaaaactactacccgaatcaatacgaattccaatacctacataatataaacgaaccactatataaacaaatcaccgaaaaaattaccgacgacaaacttaaccgtccgtatcgtatttatactccgattaacacacataaaacgctattaacgtatctaatacgtcgcctactaaaaaacgatactaacacctcgtttattaaccgtattaacgacacctctttaccactaaataaactaatcgccgatccgatcactactataaaaaaactaacgcaacaaaaaaaacaaactaaattaccgcatccgaaaattcccctaccgcgcgatctttacgatcacgaacgcgacaactcgacaaaactaaatctcgctaacgaacaccgcctaacctcgctctcctctaccctactcaataatacactacaaaaataacaaaccttacca

SEQ ID NO: 5653 - DNA, 579 bp, Artificial Sequence
  chemically treated genomic DNA (Homo sapiens) CpG-island No: 5653
tacgggcgggtggattgttagcgatcggcgtcgtaattcgcgcgagataggttatcgggtatgtcggttttatcgtcgtaatattgtagtaggttgttgaaggtgtgtattttattcggcgtatatttgttttttagtattaggtcgtcgatgcgggtggcgttgtgttcgcgttagttattgtcgcgcgtgtcggagtagagtagcgcggtgttaaaatcgttgttcgttgtgtcgtttattattaggttgtgcgtttttttcgggttgttttgtgaagaggttgggttgagttgattttttacgttcgtttcgatattaaagttttgcggaatggtacgggtattatagtttattacgcggttacgttttgcggttcgaacgtatcggattattacgcgtattcgtttatggtttttggtgtcggcgaacggagtttttgagcggggttgtttatgggcgaggcgcgggtcgtttttagggggtcggtgtggaggggttttttattttttttttcggggttggcgcgcgtgttggcgcggtcggagtgggattttcggtgcgggtgatttcggggtt

SEQ ID NO: 5654 - DNA, 579 bp, Artificial Sequence
  chemically treated genomic DNA (Homo sapiens) CpG-island No: 5654
aaccccgaaatcacccgcaccgaaaatcccactccgaccgcgccaacacgcgcgccaaccccgaaaaaaaaaataaaaaacccctccacaccgaccccctaaaaacgacccgcgcctcgcccataaacaaccccgctcaaaaactccgttcgccgacaccaaaaaccataaacgaatacgcgtaataatccgatacgttcgaaccgcaaaacgtaaccgcgtaataaactataatacccgtaccattccgcaaaactttaatatcgaaacgaacgtaaaaaatcaactcaacccaacctcttcacaaaacaacccgaaaaaaacgcacaacctaataataaacgacacaacgaacaacgattttaacaccgcgctactctactccgacacgcgcgacaataactaacgcgaacacaacgccacccgcatcgacgacctaatactaaaaaacaaatatacgccgaataaaatacacaccttcaacaacctactacaatattacgacgataaaaccgacatacccgataacctatctcgcgcgaattacgacgccgatcgctaacaatccacccgcccgta

SEQ ID NO: 5655 - DNA, 579 bp, Artificial Sequence
  chemically treated genomic DNA (Homo sapiens) CpG-island No: 5655
agtttcgaggttattcgtatcgggagttttatttcggtcgcgttaatacgcgcgttaatttcggagaaggaggtggggaatttttttatatcggttttttaggggcgattcgcgtttcgtttatgggtagtttcgtttaagggtttcgttcgtcggtattaggagttatgaacgggtacgcgtggtggttcggtgcgttcggatcgtagagcgtggtcgcgtggtgaattgtggtattcgtgttatttcgtaggattttggtatcgaggcgggcgtggaaggttagtttagtttaatttttttataaaataattcgaaagagacgtataatttgatggtgggcggtatagcggataacggttttggtatcgcgttgttttatttcggtacgcgcggtagtgattggcgcgagtatagcgttattcgtatcgacgatttgatgttgaaaagtaaatatgcgtcggatgaggtgtatatttttaatagtttgttgtaatattacgacggtgaagtcgatatgttcggtggtttgtttcgcgcggattacgacgtcgatcgttggtaatttattcgttcgta

SEQ ID NO: 5656 - DNA, 579 bp, Artificial Sequence
  chemically treated genomic DNA (Homo sapiens) CpG-island No: 5656
tacgaacgaataaattaccaacgatcgacgtcgtaatccgcgcgaaacaaaccaccgaacatatcgacttcaccgtcgtaatattacaacaaactattaaaaatatacacctcatccgacgcatatttacttttcaacatcaaatcgtcgatacgaataacgctatactcgcgccaatcactaccgcgcgtaccgaaataaaacaacgcgataccaaaaccgttatccgctataccgcccaccatcaaattatacgtctctttcgaattattttataaaaaaattaaactaaactaaccttccacgcccgcctcgataccaaaatcctacgaaataacacgaataccacaattcaccacgcgaccacgctctacgatccgaacgcaccgaaccaccacgcgtacccgttcataactcctaataccgacgaacgaaacccttaaacgaaactacccataaacgaaacgcgaatcgcccctaaaaaaccgatataaaaaaattccccacctccttctccgaaattaacgcgcgtattaacgcgaccgaaataaaactcccgatacgaataacctcgaaact

SEQ ID NO: 5657 - DNA, 850 bp, Artificial Sequence
  chemically treated genomic DNA (Homo sapiens) CpG-island No: 5657
ggttcgggttcggtgagtagttgcggatagtaagcgtaaacgcgtgggttgaaatatttgttcgtgatggtagatagttttttgtattaggtagggatatcgtcgggttgacgcgtagtttgatcgttaaaggtatcgttatgacgttttggttatgttcggtgggcgaatcgtgtattatcgacgtgtgtgtagtcgtggcgtagttgcgtgagttaggttgtgatggggtgatcgcgtttggcggcggttcggtgttggatgcggcgaaagtcgtgacgttgttggtgacgaattcggatagtacgttggtagagatgttagaaattagcgttttgtaatcgcgtttgtcgttgattgttattttaattatcgtcggaatcggttttgaaattattaatgtaacggtgattatcgacgcggtgagcgggcgtaagtaggtgttagtttatgtttcgttgatgtcggatgtggcgattttcgacgtcgtattgatcgaaggtgtgtcgtcgtatgttacggcgatgatcggtattgatgcgttaatttatgttattgaagtatatagcgttttgaacgttatatcgtttatcgatagtttggcgattggtgttattgcgtatgattggtaaatcgttgtcgaaagcggtgggttacggttacgaatttgtcgcgcgcgagagtatgttgttgggtttatgtattggcgggaatggcgttttttagtgcgggttttgggttgggtttcgcgaatggtttatttagtcgtgggtgacggtgtttgtattttttcgaacgggttttcgaagttttgtttgtgtttcgcgtagggaattttaatcgcgggaag

SEQ ID NO: 5658 - DNA, 850 bp, Artificial Sequence
  chemically treated genomic DNA (Homo sapiens) CpG-island No: 5658
cttcccgcgattaaaattccctacgcgaaacacaaacaaaacttcgaaaacccgttcgaaaaaatacaaacaccgtcacccacgactaaataaaccattcgcgaaacccaacccaaaacccgcactaaaaaacgccattcccgccaatacataaacccaacaacatactctcgcgcgcgacaaattcgtaaccgtaacccaccgctttcgacaacgatttaccaatcatacgcaataacaccaatcgccaaactatcgataaacgatataacgttcaaaacgctatatacttcaataacataaattaacgcatcaataccgatcatcgccgtaacatacgacgacacaccttcgatcaatacgacgtcgaaaatcgccacatccgacatcaacgaaacataaactaacacctacttacgcccgctcaccgcgtcgataatcaccgttacattaataatttcaaaaccgattccgacgataattaaaataacaatcaacgacaaacgcgattacaaaacgctaatttctaacatctctaccaacgtactatccgaattcgtcaccaacaacgtcacgactttcgccgcatccaacaccgaaccgccgccaaacgcgatcaccccatcacaacctaactcacgcaactacgccacgactacacacacgtcgataatacacgattcgcccaccgaacataaccaaaacgtcataacgatacctttaacgatcaaactacgcgtcaacccgacgatatccctacctaatacaaaaaactatctaccatcacgaacaaatatttcaacccacgcgtttacgcttactatccgcaactactcaccgaacccgaacc

SEQ ID NO: 5659 - DNA, 850 bp, Artificial Sequence
  chemically treated genomic DNA (Homo sapiens) CpG-island No: 5659
tttttcgcggttaaaattttttacgcggggtataaatagggtttcggaggttcgttcggaaaaatgtaggtatcgttatttacggttagatgggttattcgcggggtttaatttaagattcgtattggaaaacgttattttcgttaatatatgaatttagtaatatgttttcgcgcgcggtaagttcgtgatcgtagtttatcgttttcggtagcgatttgttaattatgcgtaatggtattaatcgttagattgtcggtaaacggtgtagcgtttagggcgttgtatgttttaatggtatgggttaacgtattaatgtcggttatcgtcgtgatatgcgacggtatattttcggttaatgcggcgtcgaggatcgttatattcggtattagcgaggtatgggttaatatttgtttgcgttcgtttatcgcgtcgataattatcgttatattggtggttttagagtcggtttcggcggtagttggaatggtaattagcggtaagcgcggttgtagaacgttggtttttgatatttttgttagcgtgttattcgggttcgttattagtaacgttacggttttcgtcgtatttagtatcgagtcgtcgttaaacgcgattattttattatagtttgatttacgtaattgcgttacggttgtatatacgtcggtaatgtacggttcgtttatcggatatggttagagcgttatggcgatatttttaacggttaggttacgcgttagttcggcggtatttttgtttgatgtaaaaagttgtttgttattacgaatagatgttttagtttacgcgtttgcgtttgttgttcgtaattgtttatcgagttcggatt

SEQ ID NO: 5660 - DNA, 850 bp, Artificial Sequence
  chemically treated genomic DNA (Homo sapiens) CpG-island No: 5660
aatccgaactcgataaacaattacgaacaacaaacgcaaacgcgtaaactaaaacatctattcgtaataacaaacaactttttacatcaaacaaaaataccgccgaactaacgcgtaacctaaccgttaaaaatatcgccataacgctctaaccatatccgataaacgaaccgtacattaccgacgtatatacaaccgtaacgcaattacgtaaatcaaactataataaaataatcgcgtttaacgacgactcgatactaaatacgacgaaaaccgtaacgttactaataacgaacccgaataacacgctaacaaaaatatcaaaaaccaacgttctacaaccgcgcttaccgctaattaccattccaactaccgccgaaaccgactctaaaaccaccaatataacgataattatcgacgcgataaacgaacgcaaacaaatattaacccatacctcgctaataccgaatataacgatcctcgacgccgcattaaccgaaaatataccgtcgcatatcacgacgataaccgacattaatacgttaacccataccattaaaacatacaacgccctaaacgctacaccgtttaccgacaatctaacgattaataccattacgcataattaacaaatcgctaccgaaaacgataaactacgatcacgaacttaccgcgcgcgaaaacatattactaaattcatatattaacgaaaataacgttttccaatacgaatcttaaattaaaccccgcgaataacccatctaaccgtaaataacgatacctacatttttccgaacgaacctccgaaaccctatttataccccgcgtaaaaaattttaaccgcgaaaaa

SEQ ID NO: 5661 - DNA, 789 bp, Artificial Sequence
  chemically treated genomic DNA (Homo sapiens) CpG-island No: 5661
cgtcgtatatcggtagttatgcgtcgatgttaaatgcgttattttaaagtagcgtattcgtaatgatgtatttattttttcggtttaaatcgtagtaatcggttggcgttatttattacggtaatcgacgagagcgttattgtcgtttcggtaattatcgggttaagtagtgttttagtgaacggttataaaatatcggcggcgatcggaatatcgatattgttgtagataaacgtatcgagtaggttttgttttatgttgtgtagcgttgcgcgggaaatagcgagcgtattcgtaacgtttattaggttatggcgtattagggtaatcgtcgcggttttaatggtaatattattgtcgttatttatcgtaatgtcgatattcgtttgagttagcgttggcgcgtcgttaatgtcgtcgtttattattgttatttgacgttttttattttgtagatgtttgatcgtttcggttttatcgttcggtagtatttcggcgattattttattaatttttgtttttttggcgatcgtattggcggtggttgggttattttcggttaatattattagacgatatttcgttttatgtaggcgttgtagcgtcgttacgttattattacgtaacggatcgcgtattgttagtagggttatcgttttttcgttaatcgttagtagtataggcgttgttttttgcgatgtttgagtagtaattttcgtttcgatagttttggtattaatttgttgtttatttaatagcgtttgattgtttagtaataacgtatgattt

SEQ ID NO: 5662 - DNA, 789 bp, Artificial Sequence
  chemically treated genomic DNA (Homo sapiens) CpG-island No: 5662
aaatcatacgttattactaaacaatcaaacgctattaaataaacaacaaattaataccaaaactatcgaaacgaaaattactactcaaacatcgcaaaaaacaacgcctatactactaacgattaacgaaaaaacgataaccctactaacaatacgcgatccgttacgtaataataacgtaacgacgctacaacgcctacataaaacgaaatatcgtctaataatattaaccgaaaataacccaaccaccgccaatacgatcgccaaaaaaacaaaaattaataaaataatcgccgaaatactaccgaacgataaaaccgaaacgatcaaacatctacaaaataaaaaacgtcaaataacaataataaacgacgacattaacgacgcgccaacgctaactcaaacgaatatcgacattacgataaataacgacaataatattaccattaaaaccgcgacgattaccctaatacgccataacctaataaacgttacgaatacgctcgctatttcccgcgcaacgctacacaacataaaacaaaacctactcgatacgtttatctacaacaatatcgatattccgatcgccgccgatattttataaccgttcactaaaacactacttaacccgataattaccgaaacgacaataacgctctcgtcgattaccgtaataaataacgccaaccgattactacgatttaaaccgaaaaaataaatacatcattacgaatacgctactttaaaataacgcatttaacatcgacgcataactaccgatatacgacg

SEQ ID NO: 5663 - DNA, 789 bp, Artificial Sequence
  chemically treated genomic DNA (Homo sapiens) CpG-island No: 5663
aggttatgcgttattgttgggtaattaggcgttgttaaatgagtaataggttggtattaaagttatcgaagcggagattattgtttaggtatcgtaaggggtaacgtttgtgttgttggcggttgacgggaaagcggtagttttgttggtagtacgcgattcgttgcgtagtgatagcgtggcggcgttgtaacgtttgtataaagcgggatatcgtttggtgatgttgatcggggataatttaattatcgttaatgcgatcgttaaagaagtagggattgatgaggtgatcgtcggggtgttgtcggacggtaaagtcgaagcgattaaatatttgtaaagtgaaggacgttaggtggtaatggtgggcgacggtattaacgacgcgttagcgttggtttaggcggatgtcggtattgcgatgggtggcggtagtgatgttgttattgaaatcgcggcgattattttgatgcgttatagtttgatgggcgttgcggatgcgttcgttatttttcgcgtaacgttgtataatatgaagtagaatttgttcggtgcgtttatttataatagtatcggtatttcggtcgtcgtcggtattttgtggtcgtttattggaatattgtttaattcggtagttgtcggagcggtaatggcgttttcgtcgattatcgtagtgagtaacgttaatcggttgttgcggtttaaatcgaaggaataagtatattattgcggatgcgttgttttagggtggcgtatttggtatcgacgtatgattgtcggtatgcggcg

SEQ ID NO: 5664 - DNA, 789 bp, Artificial Sequence
  chemically treated genomic DNA (Homo sapiens) CpG-island No: 5664
cgccgcataccgacaatcatacgtcgataccaaatacgccaccctaaaacaacgcatccgcaataatatacttattccttcgatttaaaccgcaacaaccgattaacgttactcactacgataatcgacgaaaacgccattaccgctccgacaactaccgaattaaacaatattccaataaacgaccacaaaataccgacgacgaccgaaataccgatactattataaataaacgcaccgaacaaattctacttcatattatacaacgttacgcgaaaaataacgaacgcatccgcaacgcccatcaaactataacgcatcaaaataatcgccgcgatttcaataacaacatcactaccgccacccatcgcaataccgacatccgcctaaaccaacgctaacgcgtcgttaataccgtcgcccaccattaccacctaacgtccttcactttacaaatatttaatcgcttcgactttaccgtccgacaacaccccgacgatcacctcatcaatccctacttctttaacgatcgcattaacgataattaaattatccccgatcaacatcaccaaacgatatcccgctttatacaaacgttacaacgccgccacgctatcactacgcaacgaatcgcgtactaccaacaaaactaccgctttcccgtcaaccgccaacaacacaaacgttaccccttacgatacctaaacaataatctccgcttcgataactttaataccaacctattactcatttaacaacgcctaattacccaacaataacgcataacct

SEQ ID NO: 5665 - DNA, 576 bp, Artificial Sequence
  chemically treated genomic DNA (Homo sapiens) CpG-island No: 5665
agatcgtgcgataaatgttatggttatggtcgtgttgagcgtagtaaaacgttgttcgttaaaatttcggtaggggtggatattggagatcgtattcgttttgcgggcgaagtaagcgggcgagtatggcgtatcggtaggcgatttgtacgtttaggtttaggttaaatagtattcgattttcgagcgtgaaggtataatttgtattgcgaatttcgattaatttcgttatggcggcgttggtggcgaaatcgaagtatcgatttttgatggtcgcgttaaattgaaagtgtttggcgaaatttagatcggtagttatttcgtatgcgcggtaaaggcgttagtttgttcgcggtggcgtatagggtgatttgttgtgtcgcgttgtcgttaaatatcggtaggtttgaacgaaaggtagaaatagttgttgtaagagttgtaagaaagtttcggtggtttaatcggcgagtataatagttcgcgtttaagagtttttttgatggtgtgaagaagttttttgacgatttgattcgttatttttttaaaagtttgttcgtgggtaggtttgggtaa

SEQ ID NO: 5666 - DNA, 576 bp, Artificial Sequence
  chemically treated genomic DNA (Homo sapiens) CpG-island No: 5666
ttacccaaacctacccacgaacaaacttttaaaaaaataacgaatcaaatcgtcaaaaaacttcttcacaccatcaaaaaaactcttaaacgcgaactattatactcgccgattaaaccaccgaaactttcttacaactcttacaacaactatttctacctttcgttcaaacctaccgatatttaacgacaacgcgacacaacaaatcaccctatacgccaccgcgaacaaactaacgcctttaccgcgcatacgaaataactaccgatctaaatttcgccaaacactttcaatttaacgcgaccatcaaaaatcgatacttcgatttcgccaccaacgccgccataacgaaattaatcgaaattcgcaatacaaattataccttcacgctcgaaaatcgaatactatttaacctaaacctaaacgtacaaatcgcctaccgatacgccatactcgcccgcttacttcgcccgcaaaacgaatacgatctccaatatccacccctaccgaaattttaacgaacaacgttttactacgctcaacacgaccataaccataacatttatcgcacgatct

SEQ ID NO: 5667 - DNA, 576 bp, Artificial Sequence
  chemically treated genomic DNA (Homo sapiens) CpG-island No: 5667
ttatttaggtttgtttacgggtaggtttttggggaggtagcgggttaggtcgttaaaaaatttttttatattattaaagaagtttttgagcgcgggttgttgtgttcgtcggttgggttatcgaagtttttttgtagtttttgtagtagttgtttttgtttttcgtttaggtttatcggtgtttgacgataacgcggtatagtaaattattttgtgcgttatcgcggatagattgacgtttttatcgcgtatacggaatagttatcggtttgggtttcgttaggtatttttagtttgacgcgattattaagggtcggtatttcgatttcgttattagcgtcgttatagcgaagttgatcgggattcgtaatataggttgtgtttttacgttcgaaaatcgggtgttgtttaatttgaatttgaacgtatagatcgtttgtcggtgcgttatgttcgttcgtttatttcgttcgtaagacggatgcggtttttagtgtttatttttgtcgggattttaacggatagcgttttgttgcgtttaatacgattatgattatgatatttgtcgtacgattt

SEQ ID NO: 5668 - DNA, 576 bp, Artificial Sequence
  chemically treated genomic DNA (Homo sapiens) CpG-island No: 5668
aaatcgtacgacaaatatcataatcataatcgtattaaacgcaacaaaacgctatccgttaaaatcccgacaaaaataaacactaaaaaccgcatccgtcttacgaacgaaataaacgaacgaacataacgcaccgacaaacgatctatacgttcaaattcaaattaaacaacacccgattttcgaacgtaaaaacacaacctatattacgaatcccgatcaacttcgctataacgacgctaataacgaaatcgaaataccgacccttaataatcgcgtcaaactaaaaatacctaacgaaacccaaaccgataactattccgtatacgcgataaaaacgtcaatctatccgcgataacgcacaaaataatttactataccgcgttatcgtcaaacaccgataaacctaaacgaaaaacaaaaacaactactacaaaaactacaaaaaaacttcgataacccaaccgacgaacacaacaacccgcgctcaaaaacttctttaataatataaaaaaattttttaacgacctaacccgctacctccccaaaaacctacccgtaaacaaacctaaataa

SEQ ID NO: 5669 - DNA, 729 bp, Artificial Sequence
  chemically treated genomic DNA (Homo sapiens) CpG-island No: 5669
cgtattatcgatgtggaacgtacgtatggttagttgtgtattcggtttatcgatggattgtgtcgcgataatatcgattgttttatttttgttgatgattggttacgcgttaggttacgatcgtagtagtgcgtatatatattaaagtcggtgttataagatataatagaacgtattttaatcgcgtcgatagagtttttttttagtaggttatattattgttcgtgtagtagcgtgttgcgcggaacgaggatattagtagtattcggttttagaacgtttttagtagttatacgatttagtacgcgatcgcgtagcggttttttaacgttattattttcgatatcggagttattatgatatttttatgggtattataatcgttttcggtaattattaggttttgcgttacgttaattagacgacgagttaggtaatcggagttcgtagtttttagtgcggtattcgttagatttttacgagtatcgtgggtggtagatgaagtattggagtacgttttagatttttacggaagtttcgcggtgattggcgtttcgatgatggagttattcggtttcgttattagattacgtatattagtaagttgacgaatttgtgtcgtagaattacgcgtatcggagtcggttattatgtagatgttgttgaaggaaatttgtttttttttttgatcgttacggttaattacggttttagtttgtaggttattta

SEQ ID NO: 5670 - DNA, 729 bp, Artificial Sequence
  chemically treated genomic DNA (Homo sapiens) CpG-island No: 5670
taaataacctacaaactaaaaccgtaattaaccgtaacgatcaaaaaaaaaaacaaatttccttcaacaacatctacataataaccgactccgatacgcgtaattctacgacacaaattcgtcaacttactaatatacgtaatctaataacgaaaccgaataactccatcatcgaaacgccaatcaccgcgaaacttccgtaaaaatctaaaacgtactccaatacttcatctaccacccacgatactcgtaaaaatctaacgaataccgcactaaaaactacgaactccgattacctaactcgtcgtctaattaacgtaacgcaaaacctaataattaccgaaaacgattataatacccataaaaatatcataataactccgatatcgaaaataataacgttaaaaaaccgctacgcgatcgcgtactaaatcgtataactactaaaaacgttctaaaaccgaatactactaatatcctcgttccgcgcaacacgctactacacgaacaataatataacctactaaaaaaaaactctatcgacgcgattaaaatacgttctattatatcttataacaccgactttaatatatatacgcactactacgatcgtaacctaacgcgtaaccaatcatcaacaaaaataaaacaatcgatattatcgcgacacaatccatcgataaaccgaatacacaactaaccatacgtacgttccacatcgataatacg

SEQ ID NO: 5671 - DNA, 729 bp, Artificial Sequence
  chemically treated genomic DNA (Homo sapiens) CpG-island No: 5671
tggataatttgtaaattgaaatcgtgattaatcgtgacggttaggaagagaagtaggttttttttaatagtatttatatgatggtcgatttcggtgcgcgtggttttgcggtatagattcgttagtttgttggtatgcgtggtttgatggcgaagtcggatggttttattatcgaaacgttaattatcgcggaattttcgtgaaggtttgaaacgtattttagtattttatttgttatttacggtgttcgtaaaggtttggcggatatcgtattgaaaattgcgaatttcggttatttgattcgtcgtttggttgacgtggcgtaggatttggtggttatcgaagacgattgtggtatttatgaaggtattatgatgatttcggtatcgagggtggtgacgttaaagagtcgttgcgcgatcgcgtattgggtcgtgtaattgttgaagacgttttgaagtcgggtattgttgatattttcgtttcgcgtaatacgttgttgtacgaatagtggtgtgatttgttggaagagaattttgtcgacgcggttaaagtacgttttgttgtattttgtgatatcgattttggtgtatgtgcgtattgttacggtcgtgatttggcgcgtggttaattattaataagggtgaagtaatcggtgttatcgcggtatagtttatcggtgaatcgggtatatagttgattatgcgtacgttttatatcggtggtgcg

SEQ ID NO: 5672 - DNA, 729 bp, Artificial Sequence
  chemically treated genomic DNA (Homo sapiens) CpG-island No: 5672
cgcaccaccgatataaaacgtacgcataatcaactatatacccgattcaccgataaactataccgcgataacaccgattacttcacccttattaataattaaccacgcgccaaatcacgaccgtaacaatacgcacatacaccaaaatcgatatcacaaaatacaacaaaacgtactttaaccgcgtcgacaaaattctcttccaacaaatcacaccactattcgtacaacaacgtattacgcgaaacgaaaatatcaacaatacccgacttcaaaacgtcttcaacaattacacgacccaatacgcgatcgcgcaacgactctttaacgtcaccaccctcgataccgaaatcatcataataccttcataaataccacaatcgtcttcgataaccaccaaatcctacgccacgtcaaccaaacgacgaatcaaataaccgaaattcgcaattttcaatacgatatccgccaaacctttacgaacaccgtaaataacaaataaaatactaaaatacgtttcaaaccttcacgaaaattccgcgataattaacgtttcgataataaaaccatccgacttcgccatcaaaccacgcataccaacaaactaacgaatctataccgcaaaaccacgcgcaccgaaatcgaccatcatataaatactattaaaaaaaacctacttctcttcctaaccgtcacgattaatcacgatttcaatttacaaattatcca

SEQ ID NO: 5673 - DNA, 504 bp, Artificial Sequence
  chemically treated genomic DNA (Homo sapiens) CpG-island No: 5673
agtacggcgataatgtttaacgtattatttaacgttagcgaatttatatcgtttataaagatttgcgtcggataggtgttaaattataggaagtttagttttgtttcgattatcgcggtatagataataattagtttttcggcgtgtcgtagatacggtatatgtaagtagttggtaaagtttatattgtcggtcgtttacgttattagcgtaaaattatcggcgataaatacggtcggtataattgttaggtcgtcgagattatcggttaggtttatcgcgttgttagtatttataatgacgaagtaagttagtagaatgtagaatagttttagttgcggtattatatttttaaagaatgggattattagttgcgttgcgggcgtgtttttgtcggtaaggtatagggcgaaggcgatatttagcgtaatgatcgatatttagaaatatttttaacgagcgattaattttttggtgtttttacgtattattttgcgataatta

SEQ ID NO: 5674 - DNA, 504 bp, Artificial Sequence
  chemically treated genomic DNA (Homo sapiens) CpG-island No: 5674
taattatcgcaaaataatacgtaaaaacaccaaaaaattaatcgctcgttaaaaatatttctaaatatcgatcattacgctaaatatcgccttcgccctataccttaccgacaaaaacacgcccgcaacgcaactaataatcccattctttaaaaatataataccgcaactaaaactattctacattctactaacttacttcgtcattataaatactaacaacgcgataaacctaaccgataatctcgacgacctaacaattataccgaccgtatttatcgccgataattttacgctaataacgtaaacgaccgacaatataaactttaccaactacttacatataccgtatctacgacacgccgaaaaactaattattatctataccgcgataatcgaaacaaaactaaacttcctataatttaacacctatccgacgcaaatctttataaacgatataaattcgctaacgttaaataatacgttaaacattatcgccgtact

SEQ ID NO: 5675 - DNA, 504 bp, Artificial Sequence
  chemically treated genomic DNA (Homo sapiens) CpG-island No: 5675
tgattatcgtaaagtggtgcgtaaagatattaaagggttgatcgttcgttggaagtatttttggatgtcggttattgcgttgggtgtcgttttcgttttgtattttgtcggtaaagatacgttcgtaacgtagttggtggttttattttttaaagatgtgatgtcgtagttggggttgttttatattttgttggtttatttcgttattgtgggtattggtaacgcggtaaatttgatcgatggtttcgacggtttggtaattatgtcgatcgtatttgtcgtcggtggttttgcgttggtggcgtgggcgatcggtaatatgaattttgttagttatttgtatatatcgtatttgcgatacgtcggggaattggttattgtttgtatcgcgatagtcggggtaggattgggttttttgtggtttaatatttattcggcgtaggtttttatgggcgatgtaggttcgttggcgttaggtggtgcgttaggtattatcgtcgtatt

SEQ ID NO: 5676 - DNA, 504 bp, Artificial Sequence
  chemically treated genomic DNA (Homo sapiens) CpG-island No: 5676
aatacgacgataatacctaacgcaccacctaacgccaacgaacctacatcgcccataaaaacctacgccgaataaatattaaaccacaaaaaacccaatcctaccccgactatcgcgatacaaacaataaccaattccccgacgtatcgcaaatacgatatatacaaataactaacaaaattcatattaccgatcgcccacgccaccaacgcaaaaccaccgacgacaaatacgatcgacataattaccaaaccgtcgaaaccatcgatcaaatttaccgcgttaccaatacccacaataacgaaataaaccaacaaaatataaaacaaccccaactacgacatcacatctttaaaaaataaaaccaccaactacgttacgaacgtatctttaccgacaaaatacaaaacgaaaacgacacccaacgcaataaccgacatccaaaaatacttccaacgaacgatcaaccctttaatatctttacgcaccactttacgataatca

SEQ ID NO: 5677 - DNA, 874 bp, Artificial Sequence
  chemically treated genomic DNA (Homo sapiens) CpG-island No: 5677
ttttattttcgttagtaattaggcgtgtcgtcggcggggttaaatcgagtaatttttttagcgttttagaagaacgttggcgtgcgcgcgtttttagtatatggtcgagattgattagatcgataattatcgcgttggtttcgtaataaagatgtcgcgtttttatcgggaattattgcggttataggttgacgtttatcgaatagagttacgttacgttagtatttagcgttattagcgtatttatcgtcgtcgtatcgtttagtaggtttttttatgtattgcggtaaaaatggtcgtcggcgaaaattattattgttagggttattaggtcgataattaattataggttgcggttgttagcggtgattattatgttatcgtcgattattttttagattattatcgggatatttatcgttagtgcgataattgtttgttagcggaagcgttttatcgtagcgacggcggttttttgttggcgttcgcggcgtttagcgttatttttaatcgttttcgcgtcgtagttcgttttttttatcgtttgtattaaattttgtggggaggtattgtttattattagcgtagtacgtttcgttaggtttattcgtgtttgagtgacgttcggtacgttttgtagcgtattttgtacgcgggtgatatagttggcgtagtttatgtcgtttagtagtaattgttggttgttatcgttatcggcggtcgttgtcggaagcgttttagaaatcgttgttagtgttttcgacgggattgatgatttcgttagcggtttagtttttgggttggtttatagatgcgttataattcgtttgtttgatggtttcgattagttgttttgtattggtagtttcgtacg

SEQ ID NO: 5678 - DNA, 874 bp, Artificial Sequence
  chemically treated genomic DNA (Homo sapiens) CpG-island No: 5678
cgtacgaaactaccaatacaaaacaactaatcgaaaccatcaaacaaacgaattataacgcatctataaaccaacccaaaaactaaaccgctaacgaaatcatcaatcccgtcgaaaacactaacaacgatttctaaaacgcttccgacaacgaccgccgataacgataacaaccaacaattactactaaacgacataaactacgccaactatatcacccgcgtacaaaatacgctacaaaacgtaccgaacgtcactcaaacacgaataaacctaacgaaacgtactacgctaataataaacaatacctccccacaaaatttaatacaaacgataaaaaaaacgaactacgacgcgaaaacgattaaaaataacgctaaacgccgcgaacgccaacaaaaaaccgccgtcgctacgataaaacgcttccgctaacaaacaattatcgcactaacgataaatatcccgataataatctaaaaaataatcgacgataacataataatcaccgctaacaaccgcaacctataattaattatcgacctaataaccctaacaataataattttcgccgacgaccatttttaccgcaatacataaaaaaacctactaaacgatacgacgacgataaatacgctaataacgctaaatactaacgtaacgtaactctattcgataaacgtcaacctataaccgcaataattcccgataaaaacgcgacatctttattacgaaaccaacgcgataattatcgatctaatcaatctcgaccatatactaaaaacgcgcgcacgccaacgttcttctaaaacgctaaaaaaattactcgatttaaccccgccgacgacacgcctaattactaacgaaaataaaa

SEQ ID NO: 5679 - DNA, 874 bp, Artificial Sequence
  chemically treated genomic DNA (Homo sapiens) CpG-island No: 5679
cgtacgggattgttagtgtagaatagttgatcgaaattattaaataagcgggttatgacgtatttgtaagttaatttaaaggttaaatcgttggcggagttattaatttcgtcggaagtattgatagcggtttttgaggcgttttcggtagcgatcgtcgatgacgatgatagttagtagttgttgttgagcggtatgagttgcgttagttgtgttattcgcgtataaaatgcgttgtaaagcgtatcgggcgttatttaggtacgggtaaatttggcggagcgtattgcgttggtgatgggtagtgtttttttataagatttagtgtaggcggtggaaaaagcgggttacggcgcggaagcgattgaagatgacgttaaacgtcgcgagcgttagtaagaaatcgtcgtcgttacgatgaagcgttttcgttggtaggtaattgtcgtattggcggtgggtatttcggtgatggtttgggggatgatcggcgataatatgatggttatcgttgataatcgtagtttgtggttggttatcggtttgataattttggtagtgatggttttcgtcggcggttatttttatcgtagtgtatggaaaagtttgttgaacggtgcggcgacgatggatacgttggtggcgttgggtattggcgtggcgtggttttattcgatgagcgttaatttgtggtcgtagtggttttcgatggaagcgcgatatttttattacgaagttagcgcgatgattatcggtttgattaatttcggttatatgttggaagcgcgcgtacgttagcgtttttttaaggcgttggaaaagttattcgatttaatttcgtcgacggtacgtttggttattgacgaaggtgaaa

SEQ ID NO: 5680 - DNA, 874 bp, Artificial Sequence
  chemically treated genomic DNA (Homo sapiens) CpG-island No: 5680
tttcaccttcgtcaataaccaaacgtaccgtcgacgaaattaaatcgaataacttttccaacgccttaaaaaaacgctaacgtacgcgcgcttccaacatataaccgaaattaatcaaaccgataatcatcgcgctaacttcgtaataaaaatatcgcgcttccatcgaaaaccactacgaccacaaattaacgctcatcgaataaaaccacgccacgccaatacccaacgccaccaacgtatccatcgtcgccgcaccgttcaacaaacttttccatacactacgataaaaataaccgccgacgaaaaccatcactaccaaaattatcaaaccgataaccaaccacaaactacgattatcaacgataaccatcatattatcgccgatcatcccccaaaccatcaccgaaatacccaccgccaatacgacaattacctaccaacgaaaacgcttcatcgtaacgacgacgatttcttactaacgctcgcgacgtttaacgtcatcttcaatcgcttccgcgccgtaacccgctttttccaccgcctacactaaatcttataaaaaaacactacccatcaccaacgcaatacgctccgccaaatttacccgtacctaaataacgcccgatacgctttacaacgcattttatacgcgaataacacaactaacgcaactcataccgctcaacaacaactactaactatcatcgtcatcgacgatcgctaccgaaaacgcctcaaaaaccgctatcaatacttccgacgaaattaataactccgccaacgatttaacctttaaattaacttacaaatacgtcataacccgcttatttaataatttcgatcaactattctacactaacaatcccgtacg

SEQ ID NO: 5681 - DNA, 625 bp, Artificial Sequence
  chemically treated genomic DNA (Homo sapiens) CpG-island No: 5681
ttttttggcgtttttggtttgttatttggcgaacgataaagcgttgttcggtatttagtcgggtgcgggatttttcgcgtcgcgcgttggtgttgcgcgcgttggcgatttggttatttcgttttttggtttcgtaaatgtgcgttttggtaagagtagttataattcgttgttcggtttattgttgatttcgttcgttatttttgtttggttttcggttgtgtttatttattacgttatcgggtcggtgatgttcgattttatgggtcgggttgttttattttttgaatattatttttttattaatgaagtttgcggtagcgtttttggtcggtcgcgatcgttggcgttcgatatgggcggttttattaataaaattagtcgatgtacgttggcgtaaaatgtgggacgtcggtttggttatcggtagtttggtatcgtcggtagttttcggtatcgttttcggtaatttgttgtatcggcgtagtcgttaggtcgtttatatcgtaattacgcgtggagtatttcgggtagtattttggtaattgttgacgttaatttcgttttattgtacggattgtttagttttgggatggtgattttgtaaggtggcgttatggttata

SEQ ID NO: 5682 - DNA, 625 bp, Artificial Sequence
  chemically treated genomic DNA (Homo sapiens) CpG-island No: 5682
tataaccataacgccaccttacaaaatcaccatcccaaaactaaacaatccgtacaataaaacgaaattaacgtcaacaattaccaaaatactacccgaaatactccacgcgtaattacgatataaacgacctaacgactacgccgatacaacaaattaccgaaaacgataccgaaaactaccgacgataccaaactaccgataaccaaaccgacgtcccacattttacgccaacgtacatcgactaattttattaataaaaccgcccatatcgaacgccaacgatcgcgaccgaccaaaaacgctaccgcaaacttcattaataaaaaaataatattcaaaaaataaaacaacccgacccataaaatcgaacatcaccgacccgataacgtaataaataaacacaaccgaaaaccaaacaaaaataacgaacgaaatcaacaataaaccgaacaacgaattataactactcttaccaaaacgcacatttacgaaaccaaaaaacgaaataaccaaatcgccaacgcgcgcaacaccaacgcgcgacgcgaaaaatcccgcacccgactaaataccgaacaacgctttatcgttcgccaaataacaaaccaaaaacgccaaaaaa

SEQ ID NO: 5683 - DNA, 625 bp, Artificial Sequence
  chemically treated genomic DNA (Homo sapiens) CpG-island No: 5683
tgtaattatgacgttattttgtaaaattattattttaaggttgagtaattcgtataataaagcggaattggcgttagtagttgttagaatgttgttcgagatattttacgcgtaattgcggtgtgaacggtttaacggttacgtcgatgtaataagttgtcgaaggcgatatcgaagattatcggcggtattagattgtcgatgattagatcggcgttttatattttacgttagcgtgtatcggttggttttattgatggggtcgtttatatcgaacgttagcgatcgcgatcgattagaaacgttgtcgtaaattttattgatggaggaatggtatttaggaagtggagtagttcggtttatgaggtcggatattatcggttcgataacgtagtaagtgagtatagtcgaaaattaagtaggagtaacgaacgggattagtaatgaatcgagtagcggattgtaattgtttttgttaaggcgtatatttgcggaattagaagacgaaatagttaagtcgttagcgcgcgtagtattagcgcgcggcgcgaggaatttcgtattcgattgggtgtcgagtagcgttttgtcgttcgttagatagtaaattagaaacgttaggagg

SEQ ID NO: 5684 - DNA, 625 bp, Artificial Sequence
  chemically treated genomic DNA (Homo sapiens) CpG-island No: 5684
cctcctaacgtttctaatttactatctaacgaacgacaaaacgctactcgacacccaatcgaatacgaaattcctcgcgccgcgcgctaatactacgcgcgctaacgacttaactatttcgtcttctaattccgcaaatatacgccttaacaaaaacaattacaatccgctactcgattcattactaatcccgttcgttactcctacttaattttcgactatactcacttactacgttatcgaaccgataatatccgacctcataaaccgaactactccacttcctaaataccattcctccatcaataaaatttacgacaacgtttctaatcgatcgcgatcgctaacgttcgatataaacgaccccatcaataaaaccaaccgatacacgctaacgtaaaatataaaacgccgatctaatcatcgacaatctaataccgccgataatcttcgatatcgccttcgacaacttattacatcgacgtaaccgttaaaccgttcacaccgcaattacgcgtaaaatatctcgaacaacattctaacaactactaacgccaattccgctttattatacgaattactcaaccttaaaataataattttacaaaataacgtcataattaca

SEQ ID NO: 5685 - DNA, 696 bp, Artificial Sequence
  chemically treated genomic DNA (Homo sapiens) CpG-island No: 5685
gcgattaacggtatgagtaatggtatttttgttcggttcggtacgtttatagtatcgcgtattggtgcggcgaggatttttttcgtgcggttggttcgtttaacgttaataatcgcgcgaggttattttgatgtaaataaggatagcggcgttatgtattaatatttattgcgcgtcgttagcggtttttagattgttagtacggaatcggtacgtttattatcgttatttataacggtgattgcggatgattcgttagaggaagttgtgtaaaacggttatcgttaggattatggtaatgacgatacgttttattcggggatgcgttagtagcgtatgttcgagtgtttaagaatggtttgattatcgattgagagatattgtttaggtatttcgtttgtattcgacggttaaattcggtcgtcggaattacggcgtaatatttaaatgagtggttgttatgttaattttcgggttgatttatcgatgttttgtttcgtagattgtgcgcgtttcgacgcgttaggtattagacgtaaaaagtttcgttcggtttggttatgttgagtttattacgcgtacgttttcgagcgttttttggtcgttattgagatcgttaatttcggtaaaaagtgatcgtttcgcgttttaagtttcgcgtttgtagtttgttgtgtcgttatttattattgacgt

SEQ ID NO: 5686 - DNA, 696 bp, Artificial Sequence
  chemically treated genomic DNA (Homo sapiens) CpG-island No: 5686
acgtcaataataaataacgacacaacaaactacaaacgcgaaacttaaaacgcgaaacgatcactttttaccgaaattaacgatctcaataacgaccaaaaaacgctcgaaaacgtacgcgtaataaactcaacataaccaaaccgaacgaaactttttacgtctaatacctaacgcgtcgaaacgcgcacaatctacgaaacaaaacatcgataaatcaacccgaaaattaacataacaaccactcatttaaatattacgccgtaattccgacgaccgaatttaaccgtcgaatacaaacgaaatacctaaacaatatctctcaatcgataatcaaaccattcttaaacactcgaacatacgctactaacgcatccccgaataaaacgtatcgtcattaccataatcctaacgataaccgttttacacaacttcctctaacgaatcatccgcaatcaccgttataaataacgataataaacgtaccgattccgtactaacaatctaaaaaccgctaacgacgcgcaataaatattaatacataacgccgctatccttatttacatcaaaataacctcgcgcgattattaacgttaaacgaaccaaccgcacgaaaaaaatcctcgccgcaccaatacgcgatactataaacgtaccgaaccgaacaaaaataccattactcataccgttaatcgc

SEQ ID NO: 5687 - DNA, 696 bp, Artificial Sequence
  chemically treated genomic DNA (Homo sapiens) CpG-island No: 5687
gcgttaatgatgagtggcggtatagtaagttataaacgcgaaatttaaagcgcgaaacgattattttttgtcgaaattgacgattttaatggcggttaggaggcgttcgaaagcgtgcgcgtaatgaatttagtatgattaggtcgggcgaaattttttacgtttggtgtttgacgcgtcgaagcgcgtatagtttgcggggtaaaatatcgataaattagttcgggaattaatatggtaattatttatttggatgttgcgtcgtggtttcggcggtcggatttggtcgtcgaatgtaaacggaatgtttaagtaatattttttaatcggtaattaaattatttttgaatattcgggtatgcgttgttggcgtattttcgggtgaaacgtgtcgttattgttatagttttggcgatagtcgttttgtataattttttttggcgaattattcgtaattatcgttgtagatggcggtgatgagcgtgtcgatttcgtgttggtagtttgaaagtcgttggcgacgcgtagtgggtattggtgtatgacgtcgttgtttttgtttgtattaggatgatttcgcgcgattgttggcgttgagcgaattagtcgtacgggggggattttcgtcgtattagtgcgcgatattatgaacgtgtcgaatcgggtaaaaatgttattgtttatatcgttgatcgt

SEQ ID NO: 5688 - DNA, 696 bp, Artificial Sequence
  chemically treated genomic DNA (Homo sapiens) CpG-island No: 5688
acgatcaacgatataaacaataacatttttacccgattcgacacgttcataatatcgcgcactaatacgacgaaaatcccccccgtacgactaattcgctcaacgccaacaatcgcgcgaaatcatcctaatacaaacaaaaacaacgacgtcatacaccaatacccactacgcgtcgccaacgactttcaaactaccaacacgaaatcgacacgctcatcaccgccatctacaacgataattacgaataattcgccaaaaaaaattatacaaaacgactatcgccaaaactataacaataacgacacgtttcacccgaaaatacgccaacaacgcatacccgaatattcaaaaataatttaattaccgattaaaaaatattacttaaacattccgtttacattcgacgaccaaatccgaccgccgaaaccacgacgcaacatccaaataaataattaccatattaattcccgaactaatttatcgatattttaccccgcaaactatacgcgcttcgacgcgtcaaacaccaaacgtaaaaaatttcgcccgacctaatcatactaaattcattacgcgcacgctttcgaacgcctcctaaccgccattaaaatcgtcaatttcgacaaaaaataatcgtttcgcgctttaaatttcgcgtttataacttactataccgccactcatcattaacgc

SEQ ID NO: 5689 - DNA, 626 bp, Artificial Sequence
  chemically treated genomic DNA (Homo sapiens) CpG-island No: 5689
aacgttagtcggatattatttggtacgtggtgcgcgtgtagttgttaggttagtttttataatggttggtagagaagtcgttcgtgcggtggagttaggtttttggggcgtggattttaattgcgttgttcgtcgaaaacggttaacggtagcggcggcggggcgacgttatttaagattttgaatttatttattagggtgtaaaagcgatgcgtgaagttgttcggcgtatttgttcgttagcgtgaaagtgcgtttgggttgggatagcgtgagaagaaatttgaaatcgtcgatgcggtttaataggttggcgttacgagttggtggtgtatgggcggacgaaagagtagggttatcgcgcggagtaattgattggtaggcgattggcgatattcgttagcggttgaatatttcgggattgttaacggtgaaatttgggattggtagagcgcgtaataatgtatgcgattagcggttgcgacgtagtgatgattggtcgcggggcgtttaatattttaatttgagtcgggtggtaaaatataacgaatcgcgaatgtcgtggcggaggtggttgttttgttgtaaaaatatattcgtttggaaaagtagggtatatcgggtta

SEQ ID NO: 5690 - DNA, 626 bp, Artificial Sequence
  chemically treated genomic DNA (Homo sapiens) CpG-island No: 5690
taacccgatataccctacttttccaaacgaatatatttttacaacaaaacaaccacctccgccacgacattcgcgattcgttatattttaccacccgactcaaattaaaatattaaacgccccgcgaccaatcatcactacgtcgcaaccgctaatcgcatacattattacgcgctctaccaatcccaaatttcaccgttaacaatcccgaaatattcaaccgctaacgaatatcgccaatcgcctaccaatcaattactccgcgcgataaccctactctttcgtccgcccatacaccaccaactcgtaacgccaacctattaaaccgcatcgacgatttcaaatttcttctcacgctatcccaacccaaacgcactttcacgctaacgaacaaatacgccgaacaacttcacgcatcgcttttacaccctaataaataaattcaaaatcttaaataacgtcgccccgccgccgctaccgttaaccgttttcgacgaacaacgcaattaaaatccacgccccaaaaacctaactccaccgcacgaacgacttctctaccaaccattataaaaactaacctaacaactacacgcgcaccacgtaccaaataatatccgactaacgtt

SEQ ID NO: 5691 - DNA, 626 bp, Artificial Sequence
  chemically treated genomic DNA (Homo sapiens) CpG-island No: 5691
taattcggtatgttttgtttttttagacgggtatatttttgtagtaaagtaattattttcgttacggtattcgcggttcgttatattttattattcggtttaggttgggatattgagcgtttcgcgattaattattattgcgtcgtagtcgttgatcgtatgtattgttgcgcgttttgttagttttagattttatcgttggtaatttcggaatatttagtcgttggcgaatatcgttaatcgtttgttagttaattgtttcgcgcggtaattttgttttttcgttcgtttatgtattattagttcgtagcgttagtttgttgaatcgtatcggcgattttaaatttttttttacgttgttttagtttagacgtatttttacgttgacgggtaaatgcgtcggatagttttacgtatcgtttttgtattttggtagatgagtttaggattttgagtaacgtcgtttcgtcgtcgttatcgttaatcgttttcgacgggtagcgtaattgagatttacgttttaggaatttaattttatcgtacgggcggtttttttgttagttattgtgggaattgatttaataattgtacgcgtattacgtattagatggtgttcggttggcgtt

SEQ ID NO: 5692 - DNA, 626 bp, Artificial Sequence
  chemically treated genomic DNA (Homo sapiens) CpG-island No: 5692
aacgccaaccgaacaccatctaatacgtaatacgcgtacaattattaaatcaattcccacaataactaacaaaaaaaccgcccgtacgataaaattaaattcctaaaacgtaaatctcaattacgctacccgtcgaaaacgattaacgataacgacgacgaaacgacgttactcaaaatcctaaactcatctaccaaaatacaaaaacgatacgtaaaactatccgacgcatttacccgtcaacgtaaaaatacgtctaaactaaaacaacgtaaaaaaaaatttaaaatcgccgatacgattcaacaaactaacgctacgaactaataatacataaacgaacgaaaaaacaaaattaccgcgcgaaacaattaactaacaaacgattaacgatattcgccaacgactaaatattccgaaattaccaacgataaaatctaaaactaacaaaacgcgcaacaatacatacgatcaacgactacgacgcaataataattaatcgcgaaacgctcaatatcccaacctaaaccgaataataaaatataacgaaccgcgaataccgtaacgaaaataattactttactacaaaaatatacccgtctaaaaaaacaaaacataccgaatta

SEQ ID NO: 5693 - DNA, 1060 bp, Artificial Sequence
  chemically treated genomic DNA (Homo sapiens) CpG-island No: 5693
taaagttaattatcgtggtattgtcgttgtcgggttttagtaattcgttaatattcgtattagcgtggttttatttgtatcgttcggttttattatttcgttatataatcggcgtgaatggtataatcgagcggcgcgacggcggtttgtttatgttcggaaagcgtttttttaggtcgtttagcgtgataacgtattatttatgttttgtttcgttatcgaattgtatcgttattggtatttttggcgtaacgtattatcggcgtcggttattataatacgtaggcgataacgaggtcggtacgtagattcggcgtttcgacggttttcggggtaaattagtagtcggcgaaacgaaattaatttgttcgtgatacggtttgttcggggattatcggtataaagtagtattttgcgtttcggttgggtttggttaagttacgtttattaatataagcgcgtatttatatcggacgcgttagtgaaaggtaaatatcgtgttatttttattgaggatcgtgtttggttttatcgcggcgttaatagcgtgttattagacggggttattaacgtggagttttgtaatttaatttcgtttgcgttagttgcgtttgcgtttgttcgagtttggtttcgtttgagcgatgttttgtttacggttatcggaacggtattgacgtaattattttgtgttgattttaagttttgtttgcgtttggtcgcgcgaggagcggtattttttaggttatttgtcgaaatagtgcggtttttttataattttgttggcggttatagaagttttgcgtatagttataggcggtttgcgtttgtttatcgttgcggcggtttgagcgatttttttattgcgatattcggtaatattaggttatattgcgtttgtgttatcgaaatattcgttttcgtttgtttagggtaattttatacggtttgtgatttagttcgtttagtatttggtcgttttgatagtattattttcgtttatcgttagcgatttaacgcgtttttaatataggaaattaagatttatcgtaagaatatt

SEQ ID NO: 5694 - DNA, 1060 bp, Artificial Sequence
  chemically treated genomic DNA (Homo sapiens) CpG-island No: 5694
aatattcttacgataaatcttaatttcctatattaaaaacgcgttaaatcgctaacgataaacgaaaataatactatcaaaacgaccaaatactaaacgaactaaatcacaaaccgtataaaattaccctaaacaaacgaaaacgaatatttcgataacacaaacgcaatataacctaatattaccgaatatcgcaataaaaaaatcgctcaaaccgccgcaacgataaacaaacgcaaaccgcctataactatacgcaaaacttctataaccgccaacaaaattataaaaaaaccgcactatttcgacaaataacctaaaaaataccgctcctcgcgcgaccaaacgcaaacaaaacttaaaatcaacacaaaataattacgtcaataccgttccgataaccgtaaacaaaacatcgctcaaacgaaaccaaactcgaacaaacgcaaacgcaactaacgcaaacgaaattaaattacaaaactccacgttaataaccccgtctaataacacgctattaacgccgcgataaaaccaaacacgatcctcaataaaaataacacgatatttacctttcactaacgcgtccgatataaatacgcgcttatattaataaacgtaacttaaccaaacccaaccgaaacgcaaaatactactttataccgataatccccgaacaaaccgtatcacgaacaaattaatttcgtttcgccgactactaatttaccccgaaaaccgtcgaaacgccgaatctacgtaccgacctcgttatcgcctacgtattataataaccgacgccgataatacgttacgccaaaaataccaataacgatacaattcgataacgaaacaaaacataaataatacgttatcacgctaaacgacctaaaaaaacgctttccgaacataaacaaaccgccgtcgcgccgctcgattataccattcacgccgattatataacgaaataataaaaccgaacgatacaaataaaaccacgctaatacgaatattaacgaattactaaaacccgacaacgacaataccacgataattaacttta

SEQ ID NO: 5695 - DNA, 1060 bp, Artificial Sequence
  chemically treated genomic DNA (Homo sapiens) CpG-island No: 5695
gatatttttacggtaaattttagttttttgtgttgggggcgcgttgaatcgttggcggtggacgaaggtgatgttattaaagcggttaggtgttgggcgaattggattataagtcgtatgagattgttttgagtaggcgaaagcgggtgtttcggtggtataggcgtagtatgatttgatgttgtcgggtatcgtaatgaagaaatcgtttaggtcgtcgtagcggtgaataggcgtaagtcgtttatgattatgcgtagaatttttataatcgttagtagggttgtggaaaagtcgtattatttcggtaaatgatttggaaaatgtcgtttttcgcgcgattaggcgtaggtaaagtttgaaattagtataggataattgcgttagtatcgtttcggtaatcgtgaataggatatcgtttaggcgaagttaggttcgaataggcgtaggcgtaattggcgtaggcggagttgaattataggattttacgttgatagtttcgtttgatggtacgttgttaacgtcgcggtggagttaggtacggtttttaatgaaggtggtacggtgtttattttttattaacgcgttcggtgtgggtgcgcgtttatgttgatgaacgtaatttgattaggtttagtcggggcgtaaagtgttgttttatatcgatggttttcggataagtcgtattacgggtagattggtttcgtttcgtcgattgttaatttatttcgaaaatcgtcgaaacgtcggatttgcgtatcgatttcgttatcgtttgcgtattgtggtgatcgacgtcgatgatgcgttacgttaggaatgttagtgacggtataattcggtgacgaggtaggatatgaatgatgcgttattacgttgaacggtttggaaaaacgtttttcgggtatggataagtcgtcgtcgcgtcgttcgattgtattatttacgtcggttatgtgacggggtggtggggtcggacggtgtaggtaaaattacgttgatgcggatgttggcggattattgaaattcgatagcggtagtgttacggtgattggttttg

SEQ ID NO: 5696 - DNA, 1060 bp, Artificial Sequence
  chemically treated genomic DNA (Homo sapiens) CpG-island No: 5696
caaaaccaatcaccgtaacactaccgctatcgaatttcaataatccgccaacatccgcatcaacgtaattttacctacaccgtccgaccccaccaccccgtcacataaccgacgtaaataatacaatcgaacgacgcgacgacgacttatccatacccgaaaaacgtttttccaaaccgttcaacgtaataacgcatcattcatatcctacctcgtcaccgaattataccgtcactaacattcctaacgtaacgcatcatcgacgtcgatcaccacaatacgcaaacgataacgaaatcgatacgcaaatccgacgtttcgacgattttcgaaataaattaacaatcgacgaaacgaaaccaatctacccgtaatacgacttatccgaaaaccatcgatataaaacaacactttacgccccgactaaacctaatcaaattacgttcatcaacataaacgcgcacccacaccgaacgcgttaataaaaaataaacaccgtaccaccttcattaaaaaccgtacctaactccaccgcgacgttaacaacgtaccatcaaacgaaactatcaacgtaaaatcctataattcaactccgcctacgccaattacgcctacgcctattcgaacctaacttcgcctaaacgatatcctattcacgattaccgaaacgatactaacgcaattatcctatactaatttcaaactttacctacgcctaatcgcgcgaaaaacgacattttccaaatcatttaccgaaataatacgacttttccacaaccctactaacgattataaaaattctacgcataatcataaacgacttacgcctattcaccgctacgacgacctaaacgatttcttcattacgatacccgacaacatcaaatcatactacgcctataccaccgaaacacccgctttcgcctactcaaaacaatctcatacgacttataatccaattcgcccaacacctaaccgctttaataacatcaccttcgtccaccgccaacgattcaacgcgcccccaacacaaaaaactaaaatttaccgtaaaaatatc

SEQ ID NO: 5697 - DNA, 869 bp, Artificial Sequence
  chemically treated genomic DNA (Homo sapiens) CpG-island No: 5697
acgttaaattttttgttaaaagttattattagtaattttggttttattttttgtagttagtagttgtcgcgtttttgtttttcgataacgttcgtgtcgtgggtattatcgattattaattagttattgattgtcggtgataatagtcgtgcgttataattggtagaaaaattgcgttagtaaggttgttgggttacggcgattcgttcgttaatcgtattcgttggtattgcgcgattgcgtttaacgttaatcgttgcgtatgaaatgtaggatatcgatcgtttgttggaggtgttgtatggtaacggttaataaataagttattgtagcggtatttggtcgggtagtcgtatattatgagtaatatgtagatttatagcgttagagtgttgacgttttattggtaatgtttttatagcgtaaatatatttacgtattggacgcgggttgtggatttggttggatgagtcgttattggcgggaacgttacgcgtaggtgacggttttagatttttcgtcgttaatgtttgtttaggtacgttagaaggatgtcgtagattattatttggcgggagatatcgaatttttgtcgttagcgattgcgacgttcgattttgtatggagtaatttcgtagtgtagtggtgcggtaattatttacggtatttcgcgagttgtatcgggtggtgcgttttaaaggcgtggtcgcgtttattacgttggtgtagggatcgttattcgaattgtattaggcgtggtaggcggtggacgagcgttcgtatgttaatcgttttttatcgttagatgaaatcgaatagtcgttgaacggcgtgtatagttaatattatatttagtttattacgttgtg

SEQ ID NO: 5698 - DNA, 869 bp, Artificial Sequence
  chemically treated genomic DNA (Homo sapiens) CpG-island No: 5698
cacaacgtaataaactaaatataatattaactatacacgccgttcaacgactattcgatttcatctaacgataaaaaacgattaacatacgaacgctcgtccaccgcctaccacgcctaatacaattcgaataacgatccctacaccaacgtaataaacgcgaccacgcctttaaaacgcaccacccgatacaactcgcgaaataccgtaaataattaccgcaccactacactacgaaattactccatacaaaatcgaacgtcgcaatcgctaacgacaaaaattcgatatctcccgccaaataataatctacgacatccttctaacgtacctaaacaaacattaacgacgaaaaatctaaaaccgtcacctacgcgtaacgttcccgccaataacgactcatccaaccaaatccacaacccgcgtccaatacgtaaatatatttacgctataaaaacattaccaataaaacgtcaacactctaacgctataaatctacatattactcataatatacgactacccgaccaaataccgctacaataacttatttattaaccgttaccatacaacacctccaacaaacgatcgatatcctacatttcatacgcaacgattaacgttaaacgcaatcgcgcaataccaacgaatacgattaacgaacgaatcgccgtaacccaacaaccttactaacgcaatttttctaccaattataacgcacgactattatcaccgacaatcaataactaattaataatcgataatacccacgacacgaacgttatcgaaaaacaaaaacgcgacaactactaactacaaaaaataaaaccaaaattactaataataacttttaacaaaaaatttaacgt

SEQ ID NO: 5699 - DNA, 869 bp, Artificial Sequence
  chemically treated genomic DNA (Homo sapiens) CpG-island No: 5699
tatagcgtgatgggttgaatatgatgttgattatgtacgtcgtttagcgattgttcgattttatttggcggtaaaaagcgattagtatgcggacgttcgtttatcgtttgttacgtttgatgtagttcgggtaacgatttttgtattagcgtggtaaacgcgattacgtttttggggcgtattattcgatatagttcgcggagtgtcgtggataattatcgtattattgtattgcgagattgttttatgtaagatcgaacgtcgtagtcgttaacggtagggattcgatatttttcgttagataatggtttgcggtatttttttggcgtgtttgaataagtattggcggcgagagatttaaggtcgttatttgcgcgtgacgttttcgttagtggcggtttatttagttaggtttataattcgcgtttagtacgtgggtgtatttacgttgtggaagtattgttagtaaggcgttagtattttggcgttgtagatttgtatgttgtttatagtgtgcggttgttcgattaaatgtcgttgtaatggtttgtttattaatcgttgttatgtagtatttttagtagacggtcgatattttgtattttatgcgtagcggttagcgttaagcgtagtcgcgtagtattagcgggtacggttggcgggcgaatcgtcgtgatttagtagttttgttgacgtagtttttttgttagttgtaacgtacggttgttattatcgataattaatggttggttgatggtcgatgatgtttacggtacgggcgttatcggggagtaggggcgcggtagttgttggttgtaaaaggtaaaattagaattgttggtagtgatttttggtaaaggatttggcgt

SEQ ID NO: 5700 - DNA, 869 bp, Artificial Sequence
  chemically treated genomic DNA (Homo sapiens) CpG-island No: 5700
acgccaaatcctttaccaaaaatcactaccaacaattctaattttaccttttacaaccaacaactaccgcgcccctactccccgataacgcccgtaccgtaaacatcatcgaccatcaaccaaccattaattatcgataataacaaccgtacgttacaactaacaaaaaaactacgtcaacaaaactactaaatcacgacgattcgcccgccaaccgtacccgctaatactacgcgactacgcttaacgctaaccgctacgcataaaatacaaaatatcgaccgtctactaaaaatactacataacaacgattaataaacaaaccattacaacgacatttaatcgaacaaccgcacactataaacaacatacaaatctacaacgccaaaatactaacgccttactaacaatacttccacaacgtaaatacacccacgtactaaacgcgaattataaacctaactaaataaaccgccactaacgaaaacgtcacgcgcaaataacgaccttaaatctctcgccgccaatacttattcaaacacgccaaaaaaataccgcaaaccattatctaacgaaaaatatcgaatccctaccgttaacgactacgacgttcgatcttacataaaacaatctcgcaatacaataatacgataattatccacgacactccgcgaactatatcgaataatacgccccaaaaacgtaatcgcgtttaccacgctaatacaaaaatcgttacccgaactacatcaaacgtaacaaacgataaacgaacgtccgcatactaatcgctttttaccgccaaataaaatcgaacaatcgctaaacgacgtacataatcaacatcatattcaacccatcacgctata

SEQ ID NO: 5701 - DNA, 698 bp, Artificial Sequence
  chemically treated genomic DNA (Homo sapiens) CpG-island No: 5701
cggggtagacgatttggggttgatttagcgtgcggcgcgtaagattgacggtttgggtattaagtatgtttagttaagcggtgaaggttgggatgcggatcgttgttgggtattttggtaaggttataaagtttcgaaaggtacgcgtaaagtggtgtggtcggatttggacgatgtttagcgttaggaattggataatcgtttgatgattatcgattgggtgcgtgatattattaacgtatcggtagaagaattgggattatcgtaattggtatagcgtgttgttgatttgattagtaacgtcgcgggcgatcgtgtgatttatcggattattaaaggcgaagatttgcgtgagtaaggttatatggggttgtatatagtcggacgcggtttagaacgtttttcggtattgttggcgttggattataatttaattggcgataaagaagcgttagtgtacgcgtgtttggtaggtaaaggtattatttttgatttcggcggttatagtattaaatagattgcgtttatggattcgatgaagtcggatatgggcggcgcggtaacggttatcggggcgttggtatttgttattacgcgcggattgaataagcgcgtgaagttgtttttttgttgtgcggataatttgattaacggtaatgcgtttaagttgggcgatattattatttatcgtaacggta

SEQ ID NO: 5702 - DNA, 698 bp, Artificial Sequence
  chemically treated genomic DNA (Homo sapiens) CpG-island No: 5702
taccgttacgataaataataatatcgcccaacttaaacgcattaccgttaatcaaattatccgcacaacaaaaaaacaacttcacgcgcttattcaatccgcgcgtaataacaaataccaacgccccgataaccgttaccgcgccgcccatatccgacttcatcgaatccataaacgcaatctatttaatactataaccgccgaaatcaaaaataatacctttacctaccaaacacgcgtacactaacgcttctttatcgccaattaaattataatccaacgccaacaataccgaaaaacgttctaaaccgcgtccgactatatacaaccccatataaccttactcacgcaaatcttcgcctttaataatccgataaatcacacgatcgcccgcgacgttactaatcaaatcaacaacacgctataccaattacgataatcccaattcttctaccgatacgttaataatatcacgcacccaatcgataatcatcaaacgattatccaattcctaacgctaaacatcgtccaaatccgaccacaccactttacgcgtacctttcgaaactttataaccttaccaaaatacccaacaacgatccgcatcccaaccttcaccgcttaactaaacatacttaatacccaaaccgtcaatcttacgcgccgcacgctaaatcaaccccaaatcgtctaccccg

SEQ ID NO: 5703 - DNA, 698 bp, Artificial Sequence
  chemically treated genomic DNA (Homo sapiens) CpG-island No: 5703
tatcgttgcgataggtgatgatatcgtttagtttgaacgtattgtcgttaattaggttattcgtatagtagaggaatagttttacgcgtttgtttagttcgcgcgtaatggtaaatgttagcgtttcggtaatcgttgtcgcgtcgtttatgttcgattttatcgagtttataaacgtagtttgtttgatgttgtagtcgtcggagttaaaagtgatatttttatttattaggtacgcgtatattggcgtttttttatcgttagttgggttgtaatttagcgttagtaatatcggagaacgttttgaatcgcgttcgattgtgtgtagttttatataattttgtttacgtagattttcgtttttggtgattcgataagttatacgatcgttcgcgacgttgttgattagattaatagtacgttgtgttagttgcgatggttttaatttttttgtcggtgcgttgatggtgttacgtatttagtcgatgattattaggcggttatttagtttttggcgttgggtatcgtttagattcggttatattattttacgcgtgtttttcggggttttgtaattttgttagaatgtttagtagcgattcgtattttagtttttatcgtttaattgaatatgtttgatgtttagatcgttaattttgcgcgtcgtacgttggattagttttagatcgtttgtttcg

SEQ ID NO: 5704 - DNA, 698 bp, Artificial Sequence
  chemically treated genomic DNA (Homo sapiens) CpG-island No: 5704
cgaaacaaacgatctaaaactaatccaacgtacgacgcgcaaaattaacgatctaaacatcaaacatattcaattaaacgataaaaactaaaatacgaatcgctactaaacattctaacaaaattacaaaaccccgaaaaacacgcgtaaaataatataaccgaatctaaacgatacccaacgccaaaaactaaataaccgcctaataatcatcgactaaatacgtaacaccatcaacgcaccgacaaaaaaattaaaaccatcgcaactaacacaacgtactattaatctaatcaacaacgtcgcgaacgatcgtataacttatcgaatcaccaaaaacgaaaatctacgtaaacaaaattatataaaactacacacaatcgaacgcgattcaaaacgttctccgatattactaacgctaaattacaacccaactaacgataaaaaaacgccaatatacgcgtacctaataaataaaaatatcacttttaactccgacgactacaacatcaaacaaactacgtttataaactcgataaaatcgaacataaacgacgcgacaacgattaccgaaacgctaacatttaccattacgcgcgaactaaacaaacgcgtaaaactattcctctactatacgaataacctaattaacgacaatacgttcaaactaaacgatatcatcacctatcgcaacgata

SEQ ID NO: 5705 - DNA, 516 bp, Artificial Sequence
  chemically treated genomic DNA (Homo sapiens) CpG-island No: 5705
gttggagcgtaggcgttaattttgtttgtttaattattcgtattattaacgatatgtcgattgtcgattcgtaaggtttcgatgcgttaaatttgttttcgttgtaaattaattcgtattttattaacgcgttgtcggaaggttagttggtcggtttgaatatcgatttgggtaacgttttgtgttagtagttgcgcgaattggaaaacgttattgagcgcgcggtattgttaatacgcggtaacgtgttgtagttgttattgttagatattgttttatcggaatttgaaacgtcgtttgtcgtaacggttgtcgttttggagggcgaagatgaatattagttgattgtgcgcgtgttgaaagaaattaacggcgtggttgtcgggtttaaaggcgttgcgtaacgtttggggttgaaacgtacgattttgttgttacggatgaagcggttgggaattgataaatcggtattgatttaattgtaaattgtcggatagatttgtttgttcggtatat

SEQ ID NO: 5706 - DNA, 516 bp, Artificial Sequence
  chemically treated genomic DNA (Homo sapiens) CpG-island No: 5706
atataccgaacaaacaaatctatccgacaatttacaattaaatcaataccgatttatcaattcccaaccgcttcatccgtaacaacaaaatcgtacgtttcaaccccaaacgttacgcaacgcctttaaacccgacaaccacgccgttaatttctttcaacacgcgcacaatcaactaatattcatcttcgccctccaaaacgacaaccgttacgacaaacgacgtttcaaattccgataaaacaatatctaacaataacaactacaacacgttaccgcgtattaacaataccgcgcgctcaataacgttttccaattcgcgcaactactaacacaaaacgttacccaaatcgatattcaaaccgaccaactaaccttccgacaacgcgttaataaaatacgaattaatttacaacgaaaacaaatttaacgcatcgaaaccttacgaatcgacaatcgacatatcgttaataatacgaataattaaacaaacaaaattaacgcctacgctccaac

SEQ ID NO: 5707 - DNA, 516 bp, Artificial Sequence
  chemically treated genomic DNA (Homo sapiens) CpG-island No: 5707
gtatgtcggataggtagatttgttcggtaatttgtagttaaattaatgtcgatttattaatttttagtcgttttattcgtgatagtagggtcgtgcgttttagttttagacgttgcgtagcgtttttaggttcggtaattacgtcgttggttttttttagtacgcgtataattaattgatatttattttcgttttttagggcgataatcgttgcggtaggcggcgttttaggtttcggtaaaataatatttggtaatgatagttgtagtacgttatcgcgtgttagtaatatcgcgcgtttaatgacgttttttagttcgcgtaattgttggtatagggcgttatttaggtcgatatttaggtcgattaattggtttttcggtagcgcgttggtgaagtgcgggttgatttgtagcgggaatagatttagcgtatcgaaattttgcggatcgataatcggtatatcgttggtggtacgaatagttgggtaagtaaggttagcgtttgcgttttagt

SEQ ID NO: 5708 - DNA, 516 bp, Artificial Sequence
  chemically treated genomic DNA (Homo sapiens) CpG-island No: 5708
actaaaacgcaaacgctaaccttacttacccaactattcgtaccaccaacgatataccgattatcgatccgcaaaatttcgatacgctaaatctattcccgctacaaatcaacccgcacttcaccaacgcgctaccgaaaaaccaattaatcgacctaaatatcgacctaaataacgccctataccaacaattacgcgaactaaaaaacgtcattaaacgcgcgatattactaacacgcgataacgtactacaactatcattaccaaatattattttaccgaaacctaaaacgccgcctaccgcaacgattatcgccctaaaaaacgaaaataaatatcaattaattatacgcgtactaaaaaaaaccaacgacgtaattaccgaacctaaaaacgctacgcaacgtctaaaactaaaacgcacgaccctactatcacgaataaaacgactaaaaattaataaatcgacattaatttaactacaaattaccgaacaaatctacctatccgacatac

SEQ ID NO: 5709 - DNA, 503 bp, Artificial Sequence
  chemically treated genomic DNA (Homo sapiens) CpG-island No: 5709
cgtatttatttgtaatatggtagtgtgcgtttttagatcggagtaattatcggtgtcgttcgaattttagtaatcgtgtttaagggtgacgttaagattttgttggcgatagaggttcgtcgtatcgttgcgtacgttacgttttagttagttatttttttcgtcgttacgggttagtcgggtaaaggtgtcgttattttgcggacgcgtcgtagttatatcggatgcgattatggcgtttttgtaggtttttattttttgcgttggatcgttcgtttgcgttttaaatttcgtattattacgtagtattatcgcgttttttatcgacgggtggttgaaattttgtttgcgggattaattttataaacggtcgttgcgttgttgcggtatcgttaaattgcgtttgtgtaagcgtaacgcgtcgttttgtgtttatagtttggaatatgggttttcggtatttaattaatagatttcgttttgtcgagatttgaaaatcgcga

SEQ ID NO: 5710 - DNA, 503 bp, Artificial Sequence
  chemically treated genomic DNA (Homo sapiens) CpG-island No: 5710
tcgcgattttcaaatctcgacaaaacgaaatctattaattaaataccgaaaacccatattccaaactataaacacaaaacgacgcgttacgcttacacaaacgcaatttaacgataccgcaacaacgcaacgaccgtttataaaattaatcccgcaaacaaaatttcaaccacccgtcgataaaaaacgcgataatactacgtaataatacgaaatttaaaacgcaaacgaacgatccaacgcaaaaaataaaaacctacaaaaacgccataatcgcatccgatataactacgacgcgtccgcaaaataacgacacctttacccgactaacccgtaacgacgaaaaaaataactaactaaaacgtaacgtacgcaacgatacgacgaacctctatcgccaacaaaatcttaacgtcacccttaaacacgattactaaaattcgaacgacaccgataattactccgatctaaaaacgcacactaccatattacaaataaatacg

SEQ ID NO: 5711 - DNA, 503 bp, Artificial Sequence
  chemically treated genomic DNA (Homo sapiens) CpG-island No: 5711
tcgcgatttttaaatttcggtaaagcgggatttattgattaagtgtcgagagtttatattttaaattgtgaatataaagcggcgcgttgcgtttgtataggcgtagtttggcgatatcgtagtagcgtagcgatcgtttataaagttgatttcgtaggtaaaattttagttattcgtcgatggaaagcgcgatggtgttgcgtgatggtgcgaagtttgaagcgtaggcgggcgatttaacgtagggggtgaaaatttataaagacgttatggtcgtattcggtgtgattacgacgcgttcgtaggataacgatatttttattcgattgattcgtaacgacgagaaagatgattggttgaaacgtggcgtgcgtagcgatgcggcggatttttatcgttagtaggattttaacgttatttttgagtacgattattggggttcgagcggtatcggtggttatttcgatttgaaagcgtatattattatgttgtaggtggatgcg

SEQ ID NO: 5712 - DNA, 503 bp, Artificial Sequence
  chemically treated genomic DNA (Homo sapiens) CpG-island No: 5712
cgcatccacctacaacataataatatacgctttcaaatcgaaataaccaccgataccgctcgaaccccaataatcgtactcaaaaataacgttaaaatcctactaacgataaaaatccgccgcatcgctacgcacgccacgtttcaaccaatcatctttctcgtcgttacgaatcaatcgaataaaaatatcgttatcctacgaacgcgtcgtaatcacaccgaatacgaccataacgtctttataaattttcaccccctacgttaaatcgcccgcctacgcttcaaacttcgcaccatcacgcaacaccatcgcgctttccatcgacgaataactaaaattttacctacgaaatcaactttataaacgatcgctacgctactacgatatcgccaaactacgcctatacaaacgcaacgcgccgctttatattcacaatttaaaatataaactctcgacacttaatcaataaatcccgctttaccgaaatttaaaaatcgcga

SEQ ID NO: 5713 - DNA, 519 bp, Artificial Sequence
  chemically treated genomic DNA (Homo sapiens) CpG-island No: 5713
gggtttttttgtagaacggcgtgggtaatgtttaataagcgcgtaaggcgtgtggcggtttatttttttttcgcggcgggattagtggttttttttatcgggtgggggcggcgggtgacgggcgtgttttttttttaatgagaggcggggggaggcgggttttgcgtcgttatgtcgcggaggttgttgtttcgggcggagaagcggcgtcggcggttggagtagaggtagtagtcggacgagtagcggaggcggtcgggagcgatggtgaagatggcggcggcgggcggcggaggcggcggtggtcgttattacggcggcggtagtgagggcggtcgggtttttaagcggtttaagattgataacgtcggcgattagtacggaggcggcggcggtggcggtggaggagtcggggcggcgggcggcggcggcggtggggtgaggttagggttttatgcgttgggaaggtcgggaattgggggataattttttagtttgagggtattttaatttttgagg

SEQ ID NO: 5714 - DNA, 519 bp, Artificial Sequence
  chemically treated genomic DNA (Homo sapiens) CpG-island No: 5714
cctcaaaaattaaaataccctcaaactaaaaaattatcccccaattcccgaccttcccaacgcataaaaccctaacctcaccccaccgccgccgccgcccgccgccccgactcctccaccgccaccgccgccgcctccgtactaatcgccgacgttatcaatcttaaaccgcttaaaaacccgaccgccctcactaccgccgccgtaataacgaccaccgccgcctccgccgcccgccgccgccatcttcaccatcgctcccgaccgcctccgctactcgtccgactactacctctactccaaccgccgacgccgcttctccgcccgaaacaacaacctccgcgacataacgacgcaaaacccgcctccccccgcctctcattaaaaaaaaaacacgcccgtcacccgccgcccccacccgataaaaaaaaccactaatcccgccgcgaaaaaaaaataaaccgccacacgccttacgcgcttattaaacattacccacgccgttctacaaaaaaaccc

SEQ ID NO: 5715 - DNA, 519 bp, Artificial Sequence
  chemically treated genomic DNA (Homo sapiens) CpG-island No: 5715
ttttaaaaattaaaatgtttttaagttgggaaattgttttttagttttcggtttttttagcgtatagggttttggttttattttatcgtcgtcgtcgttcgtcgtttcggtttttttatcgttatcgtcgtcgttttcgtgttggtcgtcggcgttgttagttttgagtcgtttaggggttcggtcgtttttattgtcgtcgtcgtagtagcggttatcgtcgttttcgtcgttcgtcgtcgttatttttattatcgttttcgatcgttttcgttgttcgttcggttgttgtttttgttttagtcgtcgacgtcgttttttcgttcggggtagtagttttcgcgatatggcggcgtagaattcgttttttttcgttttttattgggggagggatacgttcgttattcgtcgtttttattcgatagggggagttattggtttcgtcgcggggggagggtaggtcgttatacgttttgcgcgtttattggatattgtttacgtcgttttgtaggagggttt

SEQ ID NO: 5716 - DNA, 519 bp, Artificial Sequence
  chemically treated genomic DNA (Homo sapiens) CpG-island No: 5716
aaaccctcctacaaaacgacgtaaacaatatccaataaacgcgcaaaacgtataacgacctaccctccccccgcgacgaaaccaataactccccctatcgaataaaaacgacgaataacgaacgtatccctcccccaataaaaaacgaaaaaaaacgaattctacgccgccatatcgcgaaaactactaccccgaacgaaaaaacgacgtcgacgactaaaacaaaaacaacaaccgaacgaacaacgaaaacgatcgaaaacgataataaaaataacgacgacgaacgacgaaaacgacgataaccgctactacgacgacgacaataaaaacgaccgaacccctaaacgactcaaaactaacaacgccgacgaccaacacgaaaacgacgacgataacgataaaaaaaccgaaacgacgaacgacgacgacgataaaataaaaccaaaaccctatacgctaaaaaaaccgaaaactaaaaaacaatttcccaacttaaaaacattttaatttttaaaa

SEQ ID NO: 5717 - DNA, 748 bp, Artificial Sequence
  chemically treated genomic DNA (Homo sapiens) CpG-island No: 5717
aagtttattttcgtttttttcgggggttcgggtagttgggtttaggttacgcggggcggcggtttagagtataggtaggggtagttcggcgggcggaggcggaagcggcgcggggttgttagttatttttttttgtttttcgcgtagtcgcgttatattcggggcgcgtaacggaattagggtaggggtcggggtcgaagggggcgaggggtcggggggcgtttttacggtgggcgtttttatgacgggttcgcgggttttagcgcggcgtgtgagttttgaattagcgtttgcgtaggcggcgcggttcggtagttgtttagcgttcgcgcgttcgtttttaggtatcgcgcgtttcgcgtttaggaggtcgcgttcgtcgtcgtcgttgttgttcgcgttcgcgtcgttcgttgtcgtattttatacgtgtatgttttcgtcgtcgtcgtttcgtagcgggtttcgagtagtaggtcgtttgttaggtatcgagacgttttttcggtgcgggtttagttaggcgtcgcgtggcggtcgcgtttttttatacgtttcgtttttcgcggtacgtcggaagtaagcgcgtaggtttcgttttcgatacgtttagttcgcgtaggtttcgtttttaggggagtgcgtttgatgcgaatcgcgtggttggggttggcggtgttcgcgttgggttgcgtttgtatttttttggaagtttatattttatgtcgatattttttttttttttttt

SEQ ID NO: 5718 - DNA, 748 bp, Artificial Sequence
  chemically treated genomic DNA (Homo sapiens) CpG-island No: 5718
aaaaaaaaaaaaaaaaatatcgacataaaatataaacttccaaaaaaatacaaacgcaacccaacgcgaacaccgccaaccccaaccacgcgattcgcatcaaacgcactcccctaaaaacgaaacctacgcgaactaaacgtatcgaaaacgaaacctacgcgcttacttccgacgtaccgcgaaaaacgaaacgtataaaaaaacgcgaccgccacgcgacgcctaactaaacccgcaccgaaaaaacgtctcgatacctaacaaacgacctactactcgaaacccgctacgaaacgacgacgacgaaaacatacacgtataaaatacgacaacgaacgacgcgaacgcgaacaacaacgacgacgacgaacgcgacctcctaaacgcgaaacgcgcgatacctaaaaacgaacgcgcgaacgctaaacaactaccgaaccgcgccgcctacgcaaacgctaattcaaaactcacacgccgcgctaaaacccgcgaacccgtcataaaaacgcccaccgtaaaaacgccccccgacccctcgcccccttcgaccccgacccctaccctaattccgttacgcgccccgaatataacgcgactacgcgaaaaacaaaaaaaaataactaacaaccccgcgccgcttccgcctccgcccgccgaactacccctacctatactctaaaccgccgccccgcgtaacctaaacccaactacccgaacccccgaaaaaaacgaaaataaactt

SEQ ID NO: 5719 - DNA, 748 bp, Artificial Sequence
  chemically treated genomic DNA (Homo sapiens) CpG-island No: 5719
aaaaaaaaagaaagaaatatcggtataaaatgtaagtttttagagggatataaacgtagtttagcgcggatatcgttagttttagttacgcggttcgtattaagcgtatttttttgggggcggggtttgcgcgagttgggcgtgtcgggggcggggtttgcgcgtttgttttcggcgtgtcgcgagaggcggggcgtgtggggaggcgcggtcgttacgcgacgtttggttgggttcgtatcggagaggcgtttcggtatttggtaggcggtttgttattcggagttcgttgcggggcggcggcggcggggatatgtacgtgtgagatgcggtagcgggcggcgcggacgcgaatagtagcggcggcggcgggcgcggttttttgggcgcggggcgcgcggtgtttgagggcgggcgcgcgggcgttgggtaattgtcgggtcgcgtcgtttgcgtaggcgttggtttaggatttatacgtcgcgttgaggttcgcgggttcgttatggaggcgtttatcgtggagacgtttttcgatttttcgtttttttcggtttcggtttttgttttggtttcgttgcgcgtttcggatgtggcgcggttgcgcgaggagtaggaaaaggtaattagtagtttcgcgtcgttttcgttttcgttcgtcgggttgtttttgtttgtgttttgggtcgtcgtttcgcgtggtttaggtttagttgttcgggttttcggagggaacggggataaattt

SEQ ID NO: 5720 - DNA, 748 bp, Artificial Sequence
  chemically treated genomic DNA (Homo sapiens) CpG-island No: 5720
aaatttatccccgttccctccgaaaacccgaacaactaaacctaaaccacgcgaaacgacgacccaaaacacaaacaaaaacaacccgacgaacgaaaacgaaaacgacgcgaaactactaattaccttttcctactcctcgcgcaaccgcgccacatccgaaacgcgcaacgaaaccaaaacaaaaaccgaaaccgaaaaaaacgaaaaatcgaaaaacgtctccacgataaacgcctccataacgaacccgcgaacctcaacgcgacgtataaatcctaaaccaacgcctacgcaaacgacgcgacccgacaattacccaacgcccgcgcgcccgccctcaaacaccgcgcgccccgcgcccaaaaaaccgcgcccgccgccgccgctactattcgcgtccgcgccgcccgctaccgcatctcacacgtacatatccccgccgccgccgccccgcaacgaactccgaataacaaaccgcctaccaaataccgaaacgcctctccgatacgaacccaaccaaacgtcgcgtaacgaccgcgcctccccacacgccccgcctctcgcgacacgccgaaaacaaacgcgcaaaccccgcccccgacacgcccaactcgcgcaaaccccgcccccaaaaaaatacgcttaatacgaaccgcgtaactaaaactaacgatatccgcgctaaactacgtttatatccctctaaaaacttacattttataccgatatttctttcttttttttt

SEQ ID NO: 5721 - DNA, 692 bp, Artificial Sequence
  chemically treated genomic DNA (Homo sapiens) CpG-island No: 5721
  unsure (579, 587, 600..601, 607..608, 617..618, 621, 626..627, 631..632)
  unsure (635, 637, 642..643, 646, 652..653, 656, 661..662, 670..671)
  unsure (673, 680, 682)
tgaatatcggacgcgtatcgtgttggtcgcgtttagtaataagttgttttcgttttcggagattaagggtttttttttaggtaagtgcggataagtttcgacggtcggttgttcggtggaatgtgtttttttcgttttttagcgttacgatgtggatggattttacggatagagggggcgaggggagaagggaagtacggttagcgcgcgggtttttttcggaataggaagtgcgggggatagcgcgcggcgaggatgggtttagtttttgtttttggggcgtacggtacgcgttggagagagataatggaggacggcggcgcgtacgtatatgattttaaatttaagggtagggcggtattcggagaaaagtagcggtttacggtttcgcggggttttcgggcggcggtttattcgtaattcgtttattttcggtcgcgttttttcgcgcgttttttcgcggcggggtcgacgtagagcggggtcggggtcgcgttagttagcgacgagtcggggattagggcgggttagcgggcgggggataagttgtcgttattagggagtgttcgggaatatcgntcgggcgncgggatcgtcgtnnatattnnnttaagtgnngancgtanngttnngantncgtanngtntttttnnttntcgtnntagcgttnntntttttgngnttgtgtacgt

SEQ ID NO: 5722 - DNA, 692 bp, Artificial Sequence
  chemically treated genomic DNA (Homo sapiens) CpG-island No: 5722
  unsure (11, 13, 20, 22..23, 31..32, 37, 40..41, 47, 50..51, 56, 58)
  unsure (61..62, 66..67, 72, 75..76, 84..85, 92..93, 106, 114)
acgtacacaancncaaaaanannaacgctannacganaannaaaaanacnntacgnantcnnaacnntacgntcnncacttaannnaatatnnacgacgatcccgncgcccgancgatattcccgaacactccctaataacgacaacttatcccccgcccgctaacccgccctaatccccgactcgtcgctaactaacgcgaccccgaccccgctctacgtcgaccccgccgcgaaaaaacgcgcgaaaaaacgcgaccgaaaataaacgaattacgaataaaccgccgcccgaaaaccccgcgaaaccgtaaaccgctacttttctccgaataccgccctacccttaaatttaaaatcatatacgtacgcgccgccgtcctccattatctctctccaacgcgtaccgtacgccccaaaaacaaaaactaaacccatcctcgccgcgcgctatcccccgcacttcctattccgaaaaaaacccgcgcgctaaccgtacttcccttctcccctcgccccctctatccgtaaaatccatccacatcgtaacgctaaaaaacgaaaaaaacacattccaccgaacaaccgaccgtcgaaacttatccgcacttacctaaaaaaaaacccttaatctccgaaaacgaaaacaacttattactaaacgcgaccaacacgatacgcgtccgatattca

SEQ ID NO: 5723 - DNA, 692 bp, Artificial Sequence
  chemically treated genomic DNA (Homo sapiens) CpG-island No: 5723
  unsure (11, 13, 20, 22..23, 31..32, 37, 40..41, 47, 50..51, 56, 58)
  unsure (61..62, 66..67, 72, 75..76, 84..85, 92..93, 106, 114)
gcgtgtatagntntagaggnannggcgttgnngcggnagnnaggggnatnntgcgngnttnnagtnntgcgnttnntatttggnnnggtgtnngcggcggtttcgncgttcggncgatgttttcgggtattttttgatagcggtagtttatttttcgttcgttagttcgttttggttttcggttcgtcgttggttggcgcggtttcggtttcgttttgcgtcggtttcgtcgcggggaggcgcgcgaggggacgcggtcggggatgagcggattgcgggtgaatcgtcgttcgggggtttcgcgaagtcgtgagtcgttgttttttttcgagtgtcgttttgtttttggatttgagattatgtacgtacgcgtcgtcgttttttattgtttttttttagcgcgtgtcgtgcgttttagggataggggttgggtttattttcgtcgcgcgttgtttttcgtattttttgtttcgaggagagttcgcgcgttgatcgtgtttttttttttttttcgttttttttgttcgtgaggtttatttatatcgtggcgttggggaacgagggggatatattttatcggataatcggtcgtcggggtttattcgtatttatttggggagaagtttttggttttcggggacgagagtagtttgttgttgaacgcggttagtacggtgcgcgttcggtgttta

SEQ ID NO: 5724 - DNA, 692 bp, Artificial Sequence
  chemically treated genomic DNA (Homo sapiens) CpG-island No: 5724
  unsure (579, 587, 600..601, 607..608, 617..618, 621, 626..627, 631..632)
  unsure (635, 637, 642..643, 646, 652..653, 656, 661..662, 670..671)
  unsure (673, 680, 682)
taaacaccgaacgcgcaccgtactaaccgcgttcaacaacaaactactctcgtccccgaaaaccaaaaacttctccccaaataaatacgaataaaccccgacgaccgattatccgataaaatatatccccctcgttccccaacgccacgatataaataaacctcacgaacaaaaaaaacgaaaaaaaaaaaaaaacacgatcaacgcgcgaactctcctcgaaacaaaaaatacgaaaaacaacgcgcgacgaaaataaacccaacccctatccctaaaacgcacgacacgcgctaaaaaaaaacaataaaaaacgacgacgcgtacgtacataatctcaaatccaaaaacaaaacgacactcgaaaaaaaacaacgactcacgacttcgcgaaacccccgaacgacgattcacccgcaatccgctcatccccgaccgcgtcccctcgcgcgcctccccgcgacgaaaccgacgcaaaacgaaaccgaaaccgcgccaaccaacgacgaaccgaaaaccaaaacgaactaacgaacgaaaaataaactaccgctatcaaaaaatacccgaaaacatcgnccgaacgncgaaaccgccgcnnacaccnnnccaaatannaancgcannactnnaancncgcannatncccctnnctnccgcnncaacgccnntncctctananctatacacgc

SEQ ID NO: 5725 - DNA, 570 bp, Artificial Sequence
  chemically treated genomic DNA (Homo sapiens) CpG-island No: 5725
tattttacgtttattaaggacggagtgtattgcgtacggagttggtacgtttttacgttggtatgcgtaattttatgatttttatggaggttggtaattatagatatgcgcggaattatagttgttaaattagggcggagtgcgtattcggatatgagtttttatgcgttaaagtatttcgagttgatatatattatatacgaaatttatcgcgcgtaaggatttcgtcgcgttataatagcgtatattcggcgtggtatattttgatattattagcgtatataacgacgattagtaaataagtgtaatatgtttttagagttattagaggtaattattacgggaggaaaagtgaatacgcggaggaacgcgtaagagagtaaatttaaaatcggtgattcgttcgggtagtacgattttagatacgatgtttagaatatttatgggatagtatattatttgatatcgcgttaacgattagttggtagggatatatcgatagtaggatagtgcgtaattaaattaattaataaagatatacgtaatcgggttattataagattatattta

SEQ ID NO: 5726 - DNA, 570 bp, Artificial Sequence
  chemically treated genomic DNA (Homo sapiens) CpG-island No: 5726
taaatataatcttataataacccgattacgtatatctttattaattaatttaattacgcactatcctactatcgatatatccctaccaactaatcgttaacgcgatatcaaataatatactatcccataaatattctaaacatcgtatctaaaatcgtactacccgaacgaatcaccgattttaaatttactctcttacgcgttcctccgcgtattcacttttcctcccgtaataattacctctaataactctaaaaacatattacacttatttactaatcgtcgttatatacgctaataatatcaaaatataccacgccgaatatacgctattataacgcgacgaaatccttacgcgcgataaatttcgtatataatatatatcaactcgaaatactttaacgcataaaaactcatatccgaatacgcactccgccctaatttaacaactataattccgcgcatatctataattaccaacctccataaaaatcataaaattacgcataccaacgtaaaaacgtaccaactccgtacgcaatacactccgtccttaataaacgtaaaata

SEQ ID NO: 5727 - DNA, 570 bp, Artificial Sequence
  chemically treated genomic DNA (Homo sapiens) CpG-island No: 5727
tgggtgtggttttgtggtggttcggttgcgtgtgtttttattggttggtttggttgcgtattgttttgttgtcggtgtgtttttgttagttggtcgttgacgcggtgttaagtggtgtgttgttttatgggtattttgggtatcgtgtttggggtcgtgttgttcgggcgggttatcggttttgggtttatttttttgcgcgttttttcgcgtgtttattttttttttcgtggtggttgtttttggtggttttgggggtatgttgtatttatttattggtcgtcgttgtgtgcgttgatggtattagggtgtattacgtcggatatgcgttattgtggcgcggcggggtttttacgcgcgatgagtttcgtgtgtgatatgtgttagttcggggtattttggcgtatagaggtttatattcgagtgcgtatttcgttttaatttggtagttgtggtttcgcgtatgtttgtggttattaatttttatgggagttatgaaattacgtatgttagcgtgggaacgtattaatttcgtgcgtagtatatttcgtttttaatggacgtaaggta

SEQ ID NO: 5728 - DNA, 570 bp, Artificial Sequence
  chemically treated genomic DNA (Homo sapiens) CpG-island No: 5728
taccttacgtccattaaaaacgaaatatactacgcacgaaattaatacgttcccacgctaacatacgtaatttcataactcccataaaaattaataaccacaaacatacgcgaaaccacaactaccaaattaaaacgaaatacgcactcgaatataaacctctatacgccaaaataccccgaactaacacatatcacacacgaaactcatcgcgcgtaaaaaccccgccgcgccacaataacgcatatccgacgtaatacaccctaataccatcaacgcacacaacgacgaccaataaataaatacaacatacccccaaaaccaccaaaaacaaccaccacgaaaaaaaaaataaacacgcgaaaaaacgcgcaaaaaaataaacccaaaaccgataacccgcccgaacaacacgaccccaaacacgatacccaaaatacccataaaacaacacaccacttaacaccgcgtcaacgaccaactaacaaaaacacaccgacaacaaaacaatacgcaaccaaaccaaccaataaaaacacacgcaaccgaaccaccacaaaaccacaccca

SEQ ID NO: 5729 - DNA, 600 bp, Artificial Sequence
  chemically treated genomic DNA (Homo sapiens) CpG-island No: 5729
  unsure (271)
gtttcggttttgcgtagttgttggggttggaatttgatttgtaggtagttgtcgagtttggttcggggcgcgaggcgttggcggggttgtcggggcgcggtgtgtaggtgtgtatttgcgatatttttatgttcgatattttcggtttggagttgttaagttagttgtcgaaaggtatggcgacgattatgtttttcgtttacgatagttttgcgttggttgagtaggcgtttaacgcgggggtacgcggttttttttttaaacgttgtangtcggatggaatttattgttgcggtgtatacggttgttacggcgcgtgttattttgagtcggatatttgttattaaaattggtattcggtcgttaggatttcgttaacgtaaacgtgaacgtttagtgtcggaaaaattggcgtaaggaatggcggtgaaagagattgtcgtcgaattgggtttgttatcgaaaacggtatacgtttatcgcgttaatttgatggaaaaattgggcgttagtaacgacgtagagttggcgcgtcgtatgtttgatggttggtgatgaagacgttgttttttcgtttaattatcgttattgtttgttttt

SEQ ID NO: 5730 - DNA, 600 bp, Artificial Sequence
  chemically treated genomic DNA (Homo sapiens) CpG-island No: 5730
  unsure (330)
aaaaacaaacaataacgataattaaacgaaaaaacaacgtcttcatcaccaaccatcaaacatacgacgcgccaactctacgtcgttactaacgcccaatttttccatcaaattaacgcgataaacgtataccgttttcgataacaaacccaattcgacgacaatctctttcaccgccattccttacgccaatttttccgacactaaacgttcacgtttacgttaacgaaatcctaacgaccgaataccaattttaataacaaatatccgactcaaaataacacgcgccgtaacaaccgtatacaccgcaacaataaattccatccgacntacaacgtttaaaaaaaaaaccgcgtacccccgcgttaaacgcctactcaaccaacgcaaaactatcgtaaacgaaaaacataatcgtcgccatacctttcgacaactaacttaacaactccaaaccgaaaatatcgaacataaaaatatcgcaaatacacacctacacaccgcgccccgacaaccccgccaacgcctcgcgccccgaaccaaactcgacaactacctacaaatcaaattccaaccccaacaactacgcaaaaccgaaac

SEQ ID NO: 5731 - DNA, 600 bp, Artificial Sequence
  chemically treated genomic DNA (Homo sapiens) CpG-island No: 5731
  unsure (330)
aaaagtaggtaataacggtaattaagcgggagaataacgtttttattattagttattaaatatgcggcgcgttagttttacgtcgttattgacgtttagtttttttattagattggcgcgatggacgtgtatcgttttcggtgataagtttagttcggcggtaattttttttatcgttattttttgcgttagttttttcggtattgggcgtttacgtttgcgttagcggggttttgacgatcggatgttagttttaatggtaaatattcggtttaagataatacgcgtcgtggtaatcgtatgtatcgtagtaatgagttttattcggtntatagcgtttggaaagaaagtcgcgtgttttcgcgttaagcgtttgtttaattagcgtaggattgtcgtgaacggagagtataatcgtcgttatatttttcggtagttggtttagtagttttagatcggagatatcgggtatggagatatcgtaaatatatatttgtatatcgcgtttcggtagtttcgttagcgtttcgcgtttcgaattaaattcggtaattatttgtaaattaggttttagttttagtagttgcgtaaagtcggagt

SEQ ID NO: 5732 - DNA, 600 bp, Artificial Sequence
  chemically treated genomic DNA (Homo sapiens) CpG-island No: 5732
  unsure (271)
actccgactttacgcaactactaaaactaaaacctaatttacaaataattaccgaatttaattcgaaacgcgaaacgctaacgaaactaccgaaacgcgatatacaaatatatatttacgatatctccatacccgatatctccgatctaaaactactaaaccaactaccgaaaaatataacgacgattatactctccgttcacgacaatcctacgctaattaaacaaacgcttaacgcgaaaacacgcgactttctttccaaacgctatanaccgaataaaactcattactacgatacatacgattaccacgacgcgtattatcttaaaccgaatatttaccattaaaactaacatccgatcgtcaaaaccccgctaacgcaaacgtaaacgcccaataccgaaaaaactaacgcaaaaaataacgataaaaaaaattaccgccgaactaaacttatcaccgaaaacgatacacgtccatcgcgccaatctaataaaaaaactaaacgtcaataacgacgtaaaactaacgcgccgcatatttaataactaataataaaaacgttattctcccgcttaattaccgttattacctactttt

SEQ ID NO: 5733 - DNA, 894 bp, Artificial Sequence
  chemically treated genomic DNA (Homo sapiens) CpG-island No: 5733
tgtgcgcgcgttgtgcgcgagtgtgcgagcgcgtgtgagcgggtgtgtggtgcggtcgggcgtttttatttttttgattcgttttatttcggcgggcgttcgagtagaggtagcggttcgggtcggggcgggcgagggagggacgcgagtcggggtaagcgggttgcgttatcgtcggcgtcgcgtcgattttgttttttaaatcggtttttaagtcgattatagttgagtttttacgtgacgttttattttttgtttttcggagcgcgttgttcgaggatagttttttttcggttgtcgttttagttcgtcgcgggggttcggttttcgtaattttgggcgaagcggcggtcggttcgggcgttttcgcggggtcgcgttttacgcgggcgttgggggtttggggggtttcgggggttcggtcgggagggtggtggttagggcggagagcgtgtttcggttttagttcgcgtttttgttatcgcgcgtcgcggtttttcgaaagcgggcggggtgttttgcgcgcggcgtggggaaagggggcgtttttcgtcggtcgggatttgagcggtcgcgttttcgagggagttagttgggttatggtcgcgaggtaggggtgagatcggcggttattcgtgagtttttcgtattcgtattatgtagaagagcgtgcgttataacgaggggtacgttttgtatttggtttttttggcgcgtaaggagggtattaagcgcggttttttgagtaagaagacggtcgaggcggagttcgttggtttatcgaggataggtttgcgttgttcggttttttttgtttagttttagaattgttgttcgttttatttttgagggcgagtagagttgtcgttcggcgggtatgtattttttggaggg

SEQ ID NO: 5734 - DNA, 894 bp, Artificial Sequence
  chemically treated genomic DNA (Homo sapiens) CpG-island No: 5734
ccctccaaaaaatacatacccgccgaacgacaactctactcgccctcaaaaataaaacgaacaacaattctaaaactaaacaaaaaaaaccgaacaacgcaaacctatcctcgataaaccaacgaactccgcctcgaccgtcttcttactcaaaaaaccgcgcttaataccctccttacgcgccaaaaaaaccaaatacaaaacgtacccctcgttataacgcacgctcttctacataatacgaatacgaaaaactcacgaataaccgccgatctcacccctacctcgcgaccataacccaactaactccctcgaaaacgcgaccgctcaaatcccgaccgacgaaaaacgccccctttccccacgccgcgcgcaaaacaccccgcccgctttcgaaaaaccgcgacgcgcgataacaaaaacgcgaactaaaaccgaaacacgctctccgccctaaccaccaccctcccgaccgaacccccgaaaccccccaaacccccaacgcccgcgtaaaacgcgaccccgcgaaaacgcccgaaccgaccgccgcttcgcccaaaattacgaaaaccgaacccccgcgacgaactaaaacgacaaccgaaaaaaaactatcctcgaacaacgcgctccgaaaaacaaaaaataaaacgtcacgtaaaaactcaactataatcgacttaaaaaccgatttaaaaaacaaaatcgacgcgacgccgacgataacgcaacccgcttaccccgactcgcgtccctccctcgcccgccccgacccgaaccgctacctctactcgaacgcccgccgaaataaaacgaatcaaaaaaataaaaacgcccgaccgcaccacacacccgctcacacgcgctcgcacactcgcgcacaacgcgcgcaca

SEQ ID NO: 5735 - DNA, 894 bp, Artificial Sequence
  chemically treated genomic DNA (Homo sapiens) CpG-island No: 5735
ttttttaggaggtatatgttcgtcgggcggtagttttgttcgtttttagaagtagaacgagtagtaattttagggttaagtaaggggggtcgaataacgtaaatttattttcgatgggttagcgagtttcgtttcggtcgtttttttatttaggaagtcgcgtttggtgttttttttgcgcgttagaaaggttaggtatagggcgtgtttttcgttgtagcgtacgtttttttgtatggtgcgggtgcggagggtttacgggtggtcgtcggttttatttttgtttcgcggttatggtttagttggttttttcgagggcgcgatcgtttaggtttcggtcggcgaagggcgttttttttttttacgtcgcgcgtagggtatttcgttcgttttcgggaggtcgcggcgcgcggtggtaggggcgcgggttggggtcgaggtacgtttttcgttttaattattattttttcggtcgagttttcggagttttttaagtttttaacgttcgcgtggagcgcggtttcgcgagggcgttcgagtcggtcgtcgtttcgtttaaagttgcgggagtcgagttttcgcggcgggttggggcggtagtcggggaaggattgttttcgggtaacgcgtttcgggagatagaaggtaaaacgttacgtgggagtttagttgtaatcggtttggagatcgatttaaagggtaaagtcggcgcggcgtcggcggtggcgtagttcgtttgtttcggttcgcgtttttttttcgttcgtttcggttcgggtcgttgtttttgttcgggcgttcgtcgggatggggcggattagggaggtggaggcgttcggtcgtattatatattcgtttatacgcgttcgtatattcgcgtataacgcgcgtata

SEQ ID NO: 5736 - DNA, 894 bp, Artificial Sequence
  chemically treated genomic DNA (Homo sapiens) CpG-island No: 5736
tatacgcgcgttatacgcgaatatacgaacgcgtataaacgaatatataatacgaccgaacgcctccacctccctaatccgccccatcccgacgaacgcccgaacaaaaacaacgacccgaaccgaaacgaacgaaaaaaaaacgcgaaccgaaacaaacgaactacgccaccgccgacgccgcgccgactttaccctttaaatcgatctccaaaccgattacaactaaactcccacgtaacgttttaccttctatctcccgaaacgcgttacccgaaaacaatccttccccgactaccgccccaacccgccgcgaaaactcgactcccgcaactttaaacgaaacgacgaccgactcgaacgccctcgcgaaaccgcgctccacgcgaacgttaaaaacttaaaaaactccgaaaactcgaccgaaaaaataataattaaaacgaaaaacgtacctcgaccccaacccgcgcccctaccaccgcgcgccgcgacctcccgaaaacgaacgaaataccctacgcgcgacgtaaaaaaaaaaaacgcccttcgccgaccgaaacctaaacgatcgcgccctcgaaaaaaccaactaaaccataaccgcgaaacaaaaataaaaccgacgaccacccgtaaaccctccgcacccgcaccatacaaaaaaacgtacgctacaacgaaaaacacgccctatacctaacctttctaacgcgcaaaaaaaacaccaaacgcgacttcctaaataaaaaaacgaccgaaacgaaactcgctaacccatcgaaaataaatttacgttattcgaccccccttacttaaccctaaaattactactcgttctacttctaaaaacgaacaaaactaccgcccgacgaacatatacctcctaaaaaa

SEQ ID NO: 5737 - DNA, 786 bp, Artificial Sequence
  chemically treated genomic DNA (Homo sapiens) CpG-island No: 5737
ttgtttgtaggttcgcgaattgaacgaataattggaagagaatttcggttataaattgttcgtcgaatttgtttcggttcgttttatttcgtggatgggcggcgatcgcgacggtaattcgaacgttattgtcgatattattcgttacgttttgttatttagtcgttggaaagttatcgatttgtttttgaaagatatttaggtgttggtttttgaattgtcgatggttgaagcgatttttgaattgttggcgttggttggcgaagaaggtgtcgtagaatcgtatcgttatttgatgaaaaatttgcgttttcgtttgatggcgatataggtatggttggaagcgcgtttgaaaggcgaagaattgttaaaattagaaggtttgttgatataaaacgaagaattgtgggaatcgttttacgtttgttattagttattttaggcgtgtggtatgggtattatcgttaacggcgatttgttcgatattttgcgtcgcgtgaaatgtttcggcgtatcgttggttcgtattgatattcgttaggagagtacgcgttatatcgaagcgttgagggtgtattcgttgtttgtaggttatcgaggaagggatttgttaggtatcgatggatttttacgttacgtcgttttgttttgttagcgtttgtgttagttgttcggcgttaattagtttttgtattagtattgaatcgtttaggcgtagattttcgacgcgattacgtagtgttgtatcgagttgttttttagtgatgatttgattttttagtagaa

SEQ ID NO: 5738 - DNA, 786 bp, Artificial Sequence
  chemically treated genomic DNA (Homo sapiens) CpG-island No: 5738
ttctactaaaaaatcaaatcatcactaaaaaacaactcgatacaacactacgtaatcgcgtcgaaaatctacgcctaaacgattcaatactaatacaaaaactaattaacgccgaacaactaacacaaacgctaacaaaacaaaacgacgtaacgtaaaaatccatcgatacctaacaaatcccttcctcgataacctacaaacaacgaatacaccctcaacgcttcgatataacgcgtactctcctaacgaatatcaatacgaaccaacgatacgccgaaacatttcacgcgacgcaaaatatcgaacaaatcgccgttaacgataatacccataccacacgcctaaaataactaataacaaacgtaaaacgattcccacaattcttcgttttatatcaacaaaccttctaattttaacaattcttcgcctttcaaacgcgcttccaaccatacctatatcgccatcaaacgaaaacgcaaatttttcatcaaataacgatacgattctacgacaccttcttcgccaaccaacgccaacaattcaaaaatcgcttcaaccatcgacaattcaaaaaccaacacctaaatatctttcaaaaacaaatcgataactttccaacgactaaataacaaaacgtaacgaataatatcgacaataacgttcgaattaccgtcgcgatcgccgcccatccacgaaataaaacgaaccgaaacaaattcgacgaacaatttataaccgaaattctcttccaattattcgttcaattcgcgaacctacaaacaa

SEQ ID NO: 5739 - DNA, 786 bp, Artificial Sequence
  chemically treated genomic DNA (Homo sapiens) CpG-island No: 5739
ttttgttggaaaattaggttattattgaagaataattcgatatagtattgcgtaatcgcgtcgaaggtttacgtttgggcggtttaatgttgatgtaggggttgattagcgtcgagtagttggtataggcgttggtagagtaaaacggcgtggcgtgggaatttatcgatgtttggtagatttttttttcgatgatttgtagatagcgagtgtatttttagcgtttcggtatgacgcgtgtttttttgacggatattaatacggattagcggtacgtcgaaatattttacgcggcgtagggtgtcgagtagatcgtcgttggcgataatatttatgttatacgtttgaagtgattggtagtaagcgtagagcggtttttatagtttttcgttttgtgttagtaggttttttggttttggtagtttttcgttttttaggcgcgtttttagttatgtttgtgtcgttattaggcgagaacgtaggttttttattagatagcgatacggttttgcggtatttttttcgttaattagcgttagtagtttaggggtcgttttaattatcgatagtttagaaattagtatttgaatattttttaggaataaatcggtggttttttagcggttgagtagtaggacgtggcgggtgatatcggtagtgacgttcgggttgtcgtcgcggtcgtcgtttatttacgaagtaaaacggatcggaataaattcgacgggtagtttgtagtcgaggtttttttttagttgttcgtttagttcgcggatttgtaggtag

SEQ ID NO: 5740 - DNA, 786 bp, Artificial Sequence
  chemically treated genomic DNA (Homo sapiens) CpG-island No: 5740
ctacctacaaatccgcgaactaaacgaacaactaaaaaaaaacctcgactacaaactacccgtcgaatttattccgatccgttttacttcgtaaataaacgacgaccgcgacgacaacccgaacgtcactaccgatatcacccgccacgtcctactactcaaccgctaaaaaaccaccgatttattcctaaaaaatattcaaatactaatttctaaactatcgataattaaaacgacccctaaactactaacgctaattaacgaaaaaaataccgcaaaaccgtatcgctatctaataaaaaacctacgttctcgcctaataacgacacaaacataactaaaaacgcgcctaaaaaacgaaaaactaccaaaaccaaaaaacctactaacacaaaacgaaaaactataaaaaccgctctacgcttactaccaatcacttcaaacgtataacataaatattatcgccaacgacgatctactcgacaccctacgccgcgtaaaatatttcgacgtaccgctaatccgtattaatatccgtcaaaaaaacacgcgtcataccgaaacgctaaaaatacactcgctatctacaaatcatcgaaaaaaaaatctaccaaacatcgataaattcccacgccacgccgttttactctaccaacgcctataccaactactcgacgctaatcaacccctacatcaacattaaaccgcccaaacgtaaaccttcgacgcgattacgcaatactatatcgaattattcttcaataataacctaattttccaacaaaa

SEQ ID NO: 5741 - DNA, 721 bp, Artificial Sequence
  chemically treated genomic DNA (Homo sapiens) CpG-island No: 5741
attagtattttgcgtttcgataagttgtacgtttttggtaagggcgaataggtgttggtttattcgggtattacgttttattcgttggaaaaagtttttaaatcgttgggacgcgaatcgtatttagtgattggattatcgtgtataggcgttttgtcggttggtgcgtcgatatttagcgtcggtttaatattttgtatcggaatcggttcgtatttgtgtacgatgttgttaatattattttttttttttttttggacgttgtatttttagcggtaggcgttggtgtaggtgttttggttcgggttacgtttgttgatatagttagagagtaggtagcgatcggagtaggttatgtatagcgcgtcgtgaacgaagatttcgatttttatattcggtatttgattgcggatttttttaattttttttagcgatagttcgcgagagaggattacgcgggttaggtttatttgttgttagaattttatcgtcgtttagtttacggcgttagtttgtatcgaaaggtggatcggtattttagggaagtgtttacgtattagtataattagttttggatcggatataattagcgtattcggttttatttttattatcggttttaggttacggataaaggtttttagtttggcgttgtgcggtgtaatgttgattattatataaaattttttttttagcgcgtgggttttattgatgtcgagtt

SEQ ID NO: 5742 - DNA, 721 bp, Artificial Sequence
  chemically treated genomic DNA (Homo sapiens) CpG-island No: 5742
aactcgacatcaataaaacccacgcgctaaaaaaaaaattttatataataatcaacattacaccgcacaacgccaaactaaaaacctttatccgtaacctaaaaccgataataaaaataaaaccgaatacgctaattatatccgatccaaaactaattatactaatacgtaaacacttccctaaaataccgatccacctttcgatacaaactaacgccgtaaactaaacgacgataaaattctaacaacaaataaacctaacccgcgtaatcctctctcgcgaactatcgctaaaaaaaattaaaaaaatccgcaatcaaataccgaatataaaaatcgaaatcttcgttcacgacgcgctatacataacctactccgatcgctacctactctctaactatatcaacaaacgtaacccgaaccaaaacacctacaccaacgcctaccgctaaaaatacaacgtccaaaaaaaaaaaaaaaataatattaacaacatcgtacacaaatacgaaccgattccgatacaaaatattaaaccgacgctaaatatcgacgcaccaaccgacaaaacgcctatacacgataatccaatcactaaatacgattcgcgtcccaacgatttaaaaactttttccaacgaataaaacgtaatacccgaataaaccaacacctattcgcccttaccaaaaacgtacaacttatcgaaacgcaaaatactaat

SEQ ID NO: 5743 - DNA, 721 bp, Artificial Sequence
  chemically treated genomic DNA (Homo sapiens) CpG-island No: 5743
agttcggtattaatgaagtttacgcgttggggaaaaagttttatgtggtggttaatattgtatcgtataacgttaagttgaaaatttttattcgtgatttgaaatcggtggtggaaatggggtcggatgcgttgattatgttcgatttagggttgattatgttggtgcgtgagtatttttttgaaatgtcgatttatttttcggtgtaggttaacgtcgtgaattgggcgacggtgaaattttggtagtaaatgggtttgattcgcgtgattttttttcgcgagttgtcgttggaagagattgaagagattcgtaattaggtgtcggatatggagatcgagattttcgtttacggcgcgttgtgtatggtttatttcggtcgttgtttgttttttggttatattaataagcgtgattcgaattagggtatttgtattaacgtttgtcgttgggagtataacgtttaggaagggaaagaagatgatgttggtaatatcgtatataagtacgagtcgatttcggtgtaaaatgttgagtcgacgttgggtatcggcgtattaatcgataaagcgtttatatacgatgatttaattattgagtgcggttcgcgttttagcggtttgagggttttttttagcgaatagagcgtggtgttcggataggttagtatttgttcgtttttgttaagaacgtgtagtttgtcgagacgtagggtgttgat

SEQ ID NO: 5744 - DNA, 721 bp, Artificial Sequence
  chemically treated genomic DNA (Homo sapiens) CpG-island No: 5744
atcaacaccctacgtctcgacaaactacacgttcttaacaaaaacgaacaaatactaacctatccgaacaccacgctctattcgctaaaaaaaaccctcaaaccgctaaaacgcgaaccgcactcaataattaaatcatcgtatataaacgctttatcgattaatacgccgatacccaacgtcgactcaacattttacaccgaaatcgactcgtacttatatacgatattaccaacatcatcttctttcccttcctaaacgttatactcccaacgacaaacgttaatacaaataccctaattcgaatcacgcttattaatataaccaaaaaacaaacaacgaccgaaataaaccatacacaacgcgccgtaaacgaaaatctcgatctccatatccgacacctaattacgaatctcttcaatctcttccaacgacaactcgcgaaaaaaaatcacgcgaatcaaacccatttactaccaaaatttcaccgtcgcccaattcacgacgttaacctacaccgaaaaataaatcgacatttcaaaaaaatactcacgcaccaacataatcaaccctaaatcgaacataatcaacgcatccgaccccatttccaccaccgatttcaaatcacgaataaaaattttcaacttaacgttatacgatacaatattaaccaccacataaaactttttccccaacgcgtaaacttcattaataccgaact

SEQ ID NO: 5745 - DNA, 908 bp, Artificial Sequence
  chemically treated genomic DNA (Homo sapiens) CpG-island No: 5745
tatttttgttgggcgcgaggaaatagtaaatcgcggaagggggtagagggggaaggaaagggagcgcgaggtagtatgcggcgtaggagagaggatttggagtcgatggatagggaattcgaattatattgagcgggcgggggagagggttttttgggttttgcgattggtaggttgagtcgggttgacgtgcggttataattaatggggaggaagggagggatacggcgggggattatggcgtcgtggattggcgggtatagggcggggcgggacggtagtgcgggattgagattgatcgatcgcgggggttgtcgcgtagagatattcgggtcgtcggtgggtggtcgttagggttgggttagttttttggaggtttacgttcgtcgagtttacgttggttggggtcggggtgtcggcgcgttcgggattcgttttagtagtcgtttacggtttttgtgttttttttttcgtttttttttttgtttgtcgttttcggtcgttacgatgtttttgcgtttcgttgttgtcgtcgcggattggttgcgtcggttgcgcgttgtttgttgcggcggtggtggcgttttatttgttatacgggtttgaagaaggaagaagaggaagcgaagcgcgtttttcggtttatgtcgtagttacgggtttagattcgttacggcgttcgcgtcgtcgttttcgtcggagtttacgagatttgtatggacgggtatgggtttgagagtagtattttttagcgtcgtcgttgtcgtcgtcgaggttgagtagcgtcgtagtttcgggttttgtttttcgtcgttggagttgttgttgttgttgttgtttagtttcgggttgttttacgtaggtaggacgggagcgcgcgaggggagttagtttcggggtttagggtt

SEQ ID NO: 5746 - DNA, 908 bp, Artificial Sequence
  chemically treated genomic DNA (Homo sapiens) CpG-island No: 5746
aaccctaaaccccgaaactaactcccctcgcgcgctcccgtcctacctacgtaaaacaacccgaaactaaacaacaacaacaacaacaactccaacgacgaaaaacaaaacccgaaactacgacgctactcaacctcgacgacgacaacgacgacgctaaaaaatactactctcaaacccatacccgtccatacaaatctcgtaaactccgacgaaaacgacgacgcgaacgccgtaacgaatctaaacccgtaactacgacataaaccgaaaaacgcgcttcgcttcctcttcttccttcttcaaacccgtataacaaataaaacgccaccaccgccgcaacaaacaacgcgcaaccgacgcaaccaatccgcgacgacaacaacgaaacgcaaaaacatcgtaacgaccgaaaacgacaaacaaaaaaaaaaacgaaaaaaaaaacacaaaaaccgtaaacgactactaaaacgaatcccgaacgcgccgacaccccgaccccaaccaacgtaaactcgacgaacgtaaacctccaaaaaactaacccaaccctaacgaccacccaccgacgacccgaatatctctacgcgacaacccccgcgatcgatcaatctcaatcccgcactaccgtcccgccccgccctatacccgccaatccacgacgccataatcccccgccgtatccctcccttcctccccattaattataaccgcacgtcaacccgactcaacctaccaatcgcaaaacccaaaaaaccctctcccccgcccgctcaatataattcgaattccctatccatcgactccaaatcctctctcctacgccgcatactacctcgcgctccctttccttccccctctacccccttccgcgatttactatttcctcgcgcccaacaaaaata

SEQ ID NO: 5747 - DNA, 908 bp, Artificial Sequence
  chemically treated genomic DNA (Homo sapiens) CpG-island No: 5747
agttttaggtttcggggttggtttttttcgcgcgttttcgttttatttgcgtggagtagttcgaggttgaatagtagtagtagtagtagttttagcggcggggggtagagttcggggttgcggcgttgtttaatttcggcggcggtagcggcggcgttggaaggtgttgtttttaagtttatgttcgtttatgtaggtttcgtgggtttcggcgagggcggcggcgcgggcgtcgtggcgggtttgggttcgtggttgcggtatgggtcggggggcgcgtttcgttttttttttttttttttttaggttcgtgtagtagatggggcgttattatcgtcgtagtaagtagcgcgtagtcggcgtagttagttcgcggcggtagtagcggggcgtaggggtatcgtggcggtcggaggcggtaggtagggaaaggggcggaagagaagatataaagatcgtgagcgattgttgagacgagtttcgagcgcgtcggtatttcggttttagttagcgtgggttcggcgggcgtggatttttaagaggttggtttagttttagcgattatttatcggcggttcggatatttttgcgcggtagttttcgcggtcgattaattttagtttcgtattgtcgtttcgtttcgttttgtgttcgttaatttacgacgttataatttttcgtcgtgtttttttttttttttttattggttgtgatcgtacgttagttcgatttagtttgttaatcgtaggatttagagggttttttttttcgttcgtttagtgtaattcgagttttttgtttatcgattttaagtttttttttttgcgtcgtatgttgtttcgcgttttttttttttttttttttattttttttcgcgatttattgttttttcgcgtttaatagaaatg

SEQ ID NO: 5748 - DNA, 908 bp, Artificial Sequence
  chemically treated genomic DNA (Homo sapiens) CpG-island No: 5748
catttctattaaacgcgaaaaaacaataaatcgcgaaaaaaaataaaaaaaaaaaaaaaaaaaacgcgaaacaacatacgacgcaaaaaaaaaaacttaaaatcgataaacaaaaaactcgaattacactaaacgaacgaaaaaaaaaaccctctaaatcctacgattaacaaactaaatcgaactaacgtacgatcacaaccaataaaaaaaaaaaaaaaaacacgacgaaaaattataacgtcgtaaattaacgaacacaaaacgaaacgaaacgacaatacgaaactaaaattaatcgaccgcgaaaactaccgcgcaaaaatatccgaaccgccgataaataatcgctaaaactaaaccaacctcttaaaaatccacgcccgccgaacccacgctaactaaaaccgaaataccgacgcgctcgaaactcgtctcaacaatcgctcacgatctttatatcttctcttccgcccctttccctacctaccgcctccgaccgccacgatacccctacgccccgctactaccgccgcgaactaactacgccgactacgcgctacttactacgacgataataacgccccatctactacacgaacctaaaaaaaaaaaaaaaaaaaacgaaacgcgccccccgacccataccgcaaccacgaacccaaacccgccacgacgcccgcgccgccgccctcgccgaaacccacgaaacctacataaacgaacataaacttaaaaacaacaccttccaacgccgccgctaccgccgccgaaattaaacaacgccgcaaccccgaactctaccccccgccgctaaaactactactactactactattcaacctcgaactactccacgcaaataaaacgaaaacgcgcgaaaaaaaccaaccccgaaacctaaaact

SEQ ID NO: 5749 - DNA, 618 bp, Artificial Sequence
  chemically treated genomic DNA (Homo sapiens) CpG-island No: 5749
tgggaaacggtagtgatagtttcggagcgttcggcgtgtttagcgattttgcggggtttttaggacggtcgtggattttacgttcgttcgtttttttttgtcggtattcgcggttttttttcgttcgtttagggttgttcgtttgtaggtcggtatcggcgtgtaggttttttgttcgtttttgcgtggggacgcggtcgttcggggagaggcgttatagttattgtcgggtttttggtacgtagttttttgttttttcggtcggacgattcgttcgtacgtaggtacgcgcgttttcggtgtttgttatcgcgcggtcgttagcgtagtttagatttattcgcgttgcgttgggggcgggtagcgggcggtaggttttttttagggaaatcgggtttttgggcgcgcggagtgttttattttttttttcgggatcgggttttttttttcgttttttttttttgggtgttttttgtcgcggtcgcggtttttttttttggatttcgatatttgtacggggttttaggtagcgggacggttttaggtttttattgtcgtttgcgttttcgtcgtttgtaattttagtgttcgagcgcggcgtttttttataagcgggta

SEQ ID NO: 5750 - DNA, 618 bp, Artificial Sequence
  chemically treated genomic DNA (Homo sapiens) CpG-island No: 5750
tacccgcttataaaaaaacgccgcgctcgaacactaaaattacaaacgacgaaaacgcaaacgacaataaaaacctaaaaccgtcccgctacctaaaaccccgtacaaatatcgaaatccaaaaaaaaaaaccgcgaccgcgacaaaaaacacccaaaaaaaaaaaacgaaaaaaaaaacccgatcccgaaaaaaaaaataaaacactccgcgcgcccaaaaacccgatttccctaaaaaaaacctaccgcccgctacccgcccccaacgcaacgcgaataaatctaaactacgctaacgaccgcgcgataacaaacaccgaaaacgcgcgtacctacgtacgaacgaatcgtccgaccgaaaaaacaaaaaactacgtaccaaaaacccgacaataactataacgcctctccccgaacgaccgcgtccccacgcaaaaacgaacaaaaaacctacacgccgataccgacctacaaacgaacaaccctaaacgaacgaaaaaaaaccgcgaataccgacaaaaaaaaacgaacgaacgtaaaatccacgaccgtcctaaaaaccccgcaaaatcgctaaacacgccgaacgctccgaaactatcactaccgtttccca

SEQ ID NO: 5751 - DNA, 618 bp, Artificial Sequence
  chemically treated genomic DNA (Homo sapiens) CpG-island No: 5751
tgttcgtttatagaaaggcgtcgcgttcgggtattgaggttgtaggcggcgggggcgtaggcggtagtggagatttgaggtcgtttcgttgtttgggatttcgtgtagatgtcggagtttaggaggaggggtcgcggtcgcggtaagaagtatttagagggaggaagcgggagagggagttcgatttcggggagaaaggtagggtatttcgcgcgtttagaaattcggtttttttgggagaaatttgtcgttcgttattcgtttttagcgtagcgcgggtgagtttaggttgcgttagcggtcgcgcggtgataggtatcgagggcgcgcgtgtttgcgtgcgagcgggtcgttcggtcgggagagtaaggggttgcgtgttaggagttcgatagtggttgtggcgttttttttcgggcggtcgcgtttttacgtaggggcgggtaagaggtttgtacgtcggtatcggtttgtaggcgagtagttttgagcgagcggggaggagtcgcggatatcgataagaaagggcgggcgggcgtggagtttacgatcgttttgggggtttcgtagagtcgttgggtacgtcgagcgtttcgggattgttattgtcgtttttta

SEQ ID NO: 5752 - DNA, 618 bp, Artificial Sequence
  chemically treated genomic DNA (Homo sapiens) CpG-island No: 5752
taaaaaacgacaataacaatcccgaaacgctcgacgtacccaacgactctacgaaacccccaaaacgatcgtaaactccacgcccgcccgccctttcttatcgatatccgcgactcctccccgctcgctcaaaactactcgcctacaaaccgataccgacgtacaaacctcttacccgcccctacgtaaaaacgcgaccgcccgaaaaaaaacgccacaaccactatcgaactcctaacacgcaaccccttactctcccgaccgaacgacccgctcgcacgcaaacacgcgcgccctcgatacctatcaccgcgcgaccgctaacgcaacctaaactcacccgcgctacgctaaaaacgaataacgaacgacaaatttctcccaaaaaaaccgaatttctaaacgcgcgaaataccctacctttctccccgaaatcgaactccctctcccgcttcctccctctaaatacttcttaccgcgaccgcgacccctcctcctaaactccgacatctacacgaaatcccaaacaacgaaacgacctcaaatctccactaccgcctacgcccccgccgcctacaacctcaatacccgaacgcgacgcctttctataaacgaaca

SEQ ID NO: 5753 - DNA, 555 bp, Artificial Sequence
  chemically treated genomic DNA (Homo sapiens) CpG-island No: 5753
ttattcgtaggggcgtttttggaagtttgattagggtcgtcgttagggagcgttaggttttacgtttatttgttaggacggtggtgcggtttagcggtgcggttttgcggtgcggtttagcggtgaggttttgtggtgaggttttgtggtgaggtttagcggtacggttttgtcgtgcggtttagcggtgcggtttagcggtgcggtttagcggtgcggttttgtggtgaggtttagcggtgaggtttagcggtgcggttttgtggtgaggtttagcggtgaggtttagcggtgcggttttgtggtgaggtttagcggtgcggtttagcggtgaggtttagcggtgcggttttgtggtgaggtttagcggtgaggtttagcggtgcggttttgtggtgaggtttagcggtgaggtttagcggtgcggtttagcggtgcggtttagcggtgcggtttagcggtgaggtttagtggtgtggtgggttttgttaagtgatcgcgtgggatattattggcgtttcgttaggtattaattttttatgattatcggggttg

SEQ ID NO: 5754 - DNA, 555 bp, Artificial Sequence
  chemically treated genomic DNA (Homo sapiens) CpG-island No: 5754
caaccccgataatcataaaaaattaatacctaacgaaacgccaataatatcccacgcgatcacttaacaaaacccaccacaccactaaacctcaccgctaaaccgcaccgctaaaccgcaccgctaaaccgcaccgctaaacctcaccgctaaacctcaccacaaaaccgcaccgctaaacctcaccgctaaacctcaccacaaaaccgcaccgctaaacctcaccgctaaaccgcaccgctaaacctcaccacaaaaccgcaccgctaaacctcaccgctaaacctcaccacaaaaccgcaccgctaaacctcaccgctaaacctcaccacaaaaccgcaccgctaaaccgcaccgctaaaccgcaccgctaaaccgcacgacaaaaccgtaccgctaaacctcaccacaaaacctcaccacaaaacctcaccgctaaaccgcaccgcaaaaccgcaccgctaaaccgcaccaccgtcctaacaaataaacgtaaaacctaacgctccctaacgacgaccctaatcaaacttccaaaaacgcccctacgaataa

SEQ ID NO: 5755 - DNA, 555 bp, Artificial Sequence
  chemically treated genomic DNA (Homo sapiens) CpG-island No: 5755
tagtttcggtggttataagaaattggtgtttggcgagacgttagtgatgttttacgcgattatttggtagaatttattatattattggattttatcgttgggtcgtatcgttggatcgtatcgttggatcgtatcgttggattttatcgttggattttattataggatcgtatcgttggattttatcgttggattttattataggatcgtatcgttggattttatcgttggatcgtatcgttggattttattataggatcgtatcgttggattttatcgttggattttattataggatcgtatcgttggattttatcgttggattttattataggatcgtatcgttggatcgtatcgttggatcgtatcgttggatcgtacggtaggatcgtatcgttggattttattataggattttattataggattttatcgttgggtcgtatcgtaggatcgtatcgttggatcgtattatcgttttggtaggtgagcgtggagtttggcgttttttggcgacgattttggttagatttttaggagcgtttttgcgggtaa

SEQ ID NO: 5756 - DNA, 555 bp, Artificial Sequence
  chemically treated genomic DNA (Homo sapiens) CpG-island No: 5756
ttacccgcaaaaacgctcctaaaaatctaaccaaaatcgtcgccaaaaaacgccaaactccacgctcacctaccaaaacgataatacgatccaacgatacgatcctacgatacgacccaacgataaaatcctataataaaatcctataataaaatccaacgatacgatcctaccgtacgatccaacgatacgatccaacgatacgatccaacgatacgatcctataataaaatccaacgataaaatccaacgatacgatcctataataaaatccaacgataaaatccaacgatacgatcctataataaaatccaacgatacgatccaacgataaaatccaacgatacgatcctataataaaatccaacgataaaatccaacgatacgatcctataataaaatccaacgataaaatccaacgatacgatccaacgatacgatccaacgatacgacccaacgataaaatccaataatataataaattctaccaaataatcgcgtaaaacatcactaacgtctcgccaaacaccaatttcttataaccaccgaaacta

SEQ ID NO: 5757 - DNA, 506 bp, Artificial Sequence
  chemically treated genomic DNA (Homo sapiens) CpG-island No: 5757
gaatcgcggcggttatcgttgtttattttgttattcggttagaaaagtttgcggagcgcggggatggattaatcggtttttttgtttcgtttttttagcgtttagaagtttgtagtttcggagtagtggtcgcgttacgtcggttttagcgcgtagaattttgtaggtttcgttcgttcgtttcgggtcgcgttcgttatgttttattcgtagtttggatatttttatttttcggttttttaggtaagcggagtttcgtttcgtttaggttatcgtaggtgtcggtagggcggatggggcggggacggggggtggggagtgttcgatttacgattgtttgcggttttcgagttagtaaggtttgggtcgcgcgttttttacgtttaatttttgttttttaaattttcggggaaaggtcgaggcgttaagaaaattcgacgggtcgggttcgggttttttgatgtttgaattataaggtttaggttgtgttttaggggagttttagg

SEQ ID NO: 5758 - DNA, 506 bp, Artificial Sequence
  chemically treated genomic DNA (Homo sapiens) CpG-island No: 5758
cctaaaactcccctaaaacacaacctaaaccttataattcaaacatcaaaaaacccgaacccgacccgtcgaattttcttaacgcctcgacctttccccgaaaatttaaaaaacaaaaattaaacgtaaaaaacgcgcgacccaaaccttactaactcgaaaaccgcaaacaatcgtaaatcgaacactccccaccccccgtccccgccccatccgccctaccgacacctacgataacctaaacgaaacgaaactccgcttacctaaaaaaccgaaaaataaaaatatccaaactacgaataaaacataacgaacgcgacccgaaacgaacgaacgaaacctacaaaattctacgcgctaaaaccgacgtaacgcgaccactactccgaaactacaaacttctaaacgctaaaaaaacgaaacaaaaaaaccgattaatccatccccgcgctccgcaaacttttctaaccgaataacaaaataaacaacgataaccgccgcgattc

SEQ ID NO: 5759 - DNA, 506 bp, Artificial Sequence
  chemically treated genomic DNA (Homo sapiens) CpG-island No: 5759
tttaggatttttttggggtatagtttgagttttgtggtttaaatattagggaattcgggttcggttcgtcggatttttttagcgtttcggttttttttcgggggtttggggagtaggggttgggcgtgaggggcgcgcgatttaggttttgttagttcggaagtcgtaggtagtcgtaggtcggatattttttatttttcgttttcgttttattcgttttatcggtatttgcggtggtttgggcggggcggggtttcgtttatttggggagtcgaggagtaggggtatttaaattgcgggtaggatatggcgggcgcggttcggggcggacgggcggggtttgtagggttttgcgcgttggggtcggcgtggcgcggttattgtttcggagttgtaggtttttaggcgttgggagggcgaagtaggagagtcggttagtttattttcgcgtttcgtaaatttttttaatcgggtaataaagtgagtagcggtggtcgtcgcgattt

SEQ ID NO: 5760 - DNA, 506 bp, Artificial Sequence
  chemically treated genomic DNA (Homo sapiens) CpG-island No: 5760
aaatcgcgacgaccaccgctactcactttattacccgattaaaaaaatttacgaaacgcgaaaataaactaaccgactctcctacttcgccctcccaacgcctaaaaacctacaactccgaaacaataaccgcgccacgccgaccccaacgcgcaaaaccctacaaaccccgcccgtccgccccgaaccgcgcccgccatatcctacccgcaatttaaatacccctactcctcgactccccaaataaacgaaaccccgccccgcccaaaccaccgcaaataccgataaaacgaataaaacgaaaacgaaaaataaaaaatatccgacctacgactacctacgacttccgaactaacaaaacctaaatcgcgcgcccctcacgcccaacccctactccccaaacccccgaaaaaaaaccgaaacgctaaaaaaatccgacgaaccgaacccgaattccctaatatttaaaccacaaaactcaaactataccccaaaaaaatcctaaa

SEQ ID NO: 5761 - DNA, 603 bp, Artificial Sequence
  chemically treated genomic DNA (Homo sapiens) CpG-island No: 5761
tgtattcgtagcgcgtgagtgtaattggagattttggatttaagatgtttttatgaggaacgattttagttcgcggtaatttcggttagtttgtagcgtggacgataaaataggtattacgtggtttcggcgtcggggcggggttaaaggggtcggaagtgatcgcgcggtgcgtcggttcgttaggaaatacgtttttaaattatggcgatttaagtaaaacgtttacgggtgattggcgggcgcggggtgtagttttttttttcgtgttttatttttttttcgtttatagaatcgttcgtttgcgtttttttcgttttttttcgcgggtttcgcgttttttttcggtcgttcgtttttttatttaaagtttagtatgcgttcgcgtcgcggttttttgtagtttttaacgggttttttgggggtcggatttggttattgcgcgtatttattttaagtggcggggttcgtggacggaggcgatttggattttgtggtttgatttttgagttggtgtcggcgggtggggttagaattgatttttaaggtgagcgaacgagtcggggggcggaggatttttagcggagcgcgggttggtttgat

SEQ ID NO: 5762 - DNA, 603 bp, Artificial Sequence
  chemically treated genomic DNA (Homo sapiens) CpG-island No: 5762
atcaaaccaacccgcgctccgctaaaaatcctccgccccccgactcgttcgctcaccttaaaaatcaattctaaccccacccgccgacaccaactcaaaaatcaaaccacaaaatccaaatcgcctccgtccacgaaccccgccacttaaaataaatacgcgcaataaccaaatccgacccccaaaaaacccgttaaaaactacaaaaaaccgcgacgcgaacgcatactaaactttaaataaaaaaacgaacgaccgaaaaaaaacgcgaaacccgcgaaaaaaaacgaaaaaaacgcaaacgaacgattctataaacgaaaaaaaaataaaacacgaaaaaaaaaactacaccccgcgcccgccaatcacccgtaaacgttttacttaaatcgccataatttaaaaacgtatttcctaacgaaccgacgcaccgcgcgatcacttccgacccctttaaccccgccccgacgccgaaaccacgtaatacctattttatcgtccacgctacaaactaaccgaaattaccgcgaactaaaatcgttcctcataaaaacatcttaaatccaaaatctccaattacactcacgcgctacgaataca

SEQ ID NO: 5763 - DNA, 603 bp, Artificial Sequence
  chemically treated genomic DNA (Homo sapiens) CpG-island No: 5763
gttaggttagttcgcgtttcgttaggggtttttcgtttttcggttcgttcgtttattttgggaattagttttagttttattcgtcggtattagtttaggaattaggttataggatttaggtcgttttcgtttacgggtttcgttatttgagataagtgcgcgtagtgattaggttcgatttttagagagttcgttgggaattgtaggagatcgcggcgcgagcgtatattgggttttgggtggaggagcggacgatcggagaggggcgcgggattcgcgggagggagcggagggggcgtagacggacggttttgtgaacgaagaaggggtgaggtacggaggaaaaggttgtatttcgcgttcgttagttattcgtggacgttttgtttgggtcgttatggtttaagagcgtgttttttagcgggtcggcgtatcgcgcggttattttcggtttttttggtttcgtttcggcgtcggaattacgtggtgtttgttttgtcgtttacgttgtagattggtcggagttatcgcgggttggaatcgttttttatgaaaatattttgagtttaggatttttaattgtatttacgcgttgcgagtgta

SEQ ID NO: 5764 - DNA, 603 bp, Artificial Sequence
  chemically treated genomic DNA (Homo sapiens) CpG-island No: 5764
tacactcgcaacgcgtaaatacaattaaaaatcctaaactcaaaatattttcataaaaaacgattccaacccgcgataactccgaccaatctacaacgtaaacgacaaaacaaacaccacgtaattccgacgccgaaacgaaaccaaaaaaaccgaaaataaccgcgcgatacgccgacccgctaaaaaacacgctcttaaaccataacgacccaaacaaaacgtccacgaataactaacgaacgcgaaatacaaccttttcctccgtacctcaccccttcttcgttcacaaaaccgtccgtctacgccccctccgctccctcccgcgaatcccgcgcccctctccgatcgtccgctcctccacccaaaacccaatatacgctcgcgccgcgatctcctacaattcccaacgaactctctaaaaatcgaacctaatcactacgcgcacttatctcaaataacgaaacccgtaaacgaaaacgacctaaatcctataacctaattcctaaactaataccgacgaataaaactaaaactaattcccaaaataaacgaacgaaccgaaaaacgaaaaacccctaacgaaacgcgaactaacctaac

SEQ ID NO: 5765 - DNA, 731 bp, Artificial Sequence
  chemically treated genomic DNA (Homo sapiens) CpG-island No: 5765
  unsure (146, 185..186, 193..194, 209, 241..242, 271..)
gtcgtcgttaaattgattagtgcgtgttgttgatttgtgatgcgatttacgcgttgttaatttaggtgttcgtaacgatattcgcgtaattgtagtcggtaacggttgtacggatgattgtagtttgagtatttgtcggcgaatancggattagttacgtgttggtgagtgttggtgattttcgnngtttggnnngcggtcgttttttnggaaggttttcggtcgcggttgtttttttttnngtaaaattttcgatatttagcgcgttatnnattgtgatttaggcgcgttcgattgtagggttgtaacgtttgtttatttgttgttgttgtggggggtagatcgtaacggcgttaattcgatgcgtcggaagaggtgtatcgtgttgttaatgaacgtttgatgtagatgattcgtaggtattgttttcgttagacgcgatggggttaaagttatttgaacggtaacggggatcgtttagtcgatttcgtagtaatcggcgataggaaattagttattgcgtttgttgcgtcgatatagtttgttgttaatcgtttttttaaagggttacgtcgtcgtaaagtggtgtttaatcgtttgcgcgtgcgcgggagggtaatagtggcgagttatcgtagttagggacgttgggtaatttgttttttttttttattgcgttgttgttgtaaattatgttttggtcggatatttgattgtttttcggttaaatt

SEQ ID NO: 5766 - DNA, 731 bp, Artificial Sequence
  chemically treated genomic DNA (Homo sapiens) CpG-island No: 5766
  unsure (460..461, 490..491, 523, 537..538, 546..547, 586)
aatttaaccgaaaaacaatcaaatatccgaccaaaacataatttacaacaacaacgcaataaaaaaaaaaaacaaattacccaacgtccctaactacgataactcgccactattaccctcccgcgcacgcgcaaacgattaaacaccactttacgacgacgtaaccctttaaaaaaacgattaacaacaaactatatcgacgcaacaaacgcaataactaatttcctatcgccgattactacgaaatcgactaaacgatccccgttaccgttcaaataactttaaccccatcgcgtctaacgaaaacaatacctacgaatcatctacatcaaacgttcattaacaacacgatacacctcttccgacgcatcgaattaacgccgttacgatctaccccccacaacaacaacaaataaacaaacgttacaaccctacaatcgaacgcgcctaaatcacaatnnataacgcgctaaatatcgaaaattttacnnaaaaaaaaacaaccgcgaccgaaaaccttccnaaaaaacgaccgcnnnccaaacnncgaaaatcaccaacactcaccaacacgtaactaatccgntattcgccgacaaatactcaaactacaatcatccgtacaaccgttaccgactacaattacgcgaatatcgttacgaacacctaaattaacaacgcgtaaatcgcatcacaaatcaacaacacgcactaatcaatttaacgacgac

SEQ ID NO: 5767 - DNA, 731 bp, Artificial Sequence
  chemically treated genomic DNA (Homo sapiens) CpG-island No: 5767
  unsure (460..461, 490..491, 523, 537..538, 546..547, 586)
agtttggtcggaaaataattaggtattcggttagggtatgatttgtagtaatagcgtaatgaggaaagagagtagattatttagcgtttttggttacgatagttcgttattattgttttttcgcgtacgcgtaggcggttgagtattattttgcggcggcgtagttttttgggagagcgattagtagtaggttgtgtcggcgtagtaggcgtagtagttgattttttgtcgtcggttgttgcggagtcggttgagcgattttcgttgtcgtttaggtaattttggttttatcgcgtttggcgaaggtaatatttgcggattatttgtattagacgtttattagtaatacgatgtatttttttcggcgtatcgggttagcgtcgttacgatttgttttttatagtagtagtagataagtaaacgttgtagttttgtagtcggacgcgtttgaattatagtnnataacgcgttgggtatcggaagttttatnnggaaggagataatcgcgatcggaagttttttngggaaacgatcgtnnnttagatnncggaagttattagtatttattaatacgtaattagttcgntattcgtcggtagatgtttaagttgtaattattcgtataatcgttatcggttgtaattacgcggatatcgttgcgagtatttggattggtagcgcgtgggtcgtattataaattagtagtacgtattggttagtttagcgacggt

SEQ ID NO: 5768 - DNA, 731 bp, Artificial Sequence
  chemically treated genomic DNA (Homo sapiens) CpG-island No: 5768
  unsure (146, 185..186, 193..194, 209, 241..242, 271..)
accgtcgctaaactaaccaatacgtactactaatttataatacgacccacgcgctaccaatccaaatactcgcaacgatatccgcgtaattacaaccgataacgattatacgaataattacaacttaaacatctaccgacgaatancgaactaattacgtattaataaatactaataacttccgnnatctaannnacgatcgtttcccnaaaaaacttccgatcgcgattatctccttccnnataaaacttccgatacccaacgcgttatnnactataattcaaacgcgtccgactacaaaactacaacgtttacttatctactactactataaaaaacaaatcgtaacgacgctaacccgatacgccgaaaaaaatacatcgtattactaataaacgtctaatacaaataatccgcaaatattaccttcgccaaacgcgataaaaccaaaattacctaaacgacaacgaaaatcgctcaaccgactccgcaacaaccgacgacaaaaaatcaactactacgcctactacgccgacacaacctactactaatcgctctcccaaaaaactacgccgccgcaaaataatactcaaccgcctacgcgtacgcgaaaaaacaataataacgaactatcgtaaccaaaaacgctaaataatctactctctttcctcattacgctattactacaaatcataccctaaccgaatacctaattattttccgaccaaact

SEQ ID NO: 5769 - DNA, 725 bp, Artificial Sequence
  chemically treated genomic DNA (Homo sapiens) CpG-island No: 5769
cggtgcgttcgggtcgttttgataggttattatacgtttcgttgcgtttcgattagaacgtcgtaattagtatcgtagaaacggtacgggttttattttatttgatggttttttgttgattaataacggcgcgggtaagttcggtacgttgagatcggtagtcgtcgtagcggtcgtaacggcgttatttttataaagttacgacgattgagttttatggtgtttttttattttgtttttttgttggtgataaattagcggatacgttagtacgttttttaagttcgtattgatttaatggtttggatttagcgtgtcgttgttttttgtttttttattataattaattgtacggttcgggcgtttttgtaaggaaatttatattcggaaacgggttatttgggtgcgaacgggttcgtattagtcgatgattattaggcggttattttgtttttggtttgggtatttgtttagattcggttatattattttacgcgtgtttttcgggttttgtaattttgttagaatgtttagtagcgattcgtattttagttttatcgtttaattgaatatgtttgatgtttagatcgttaattttgcgcgtttacgttggattagttttagatcgtttgtttcgtttaaatgtagggtaattcgttattattaatgttgtaagttgttttttttttttagcgcgcgtcggaggttgggtagagagggtaatt

SEQ ID NO: 5770 - DNA, 725 bp, Artificial Sequence
  chemically treated genomic DNA (Homo sapiens) CpG-island No: 5770
aattaccctctctacccaacctccgacgcgcgctaaaaaaaaaaaacaacttacaacattaataataacgaattaccctacatttaaacgaaacaaacgatctaaaactaatccaacgtaaacgcgcaaaattaacgatctaaacatcaaacatattcaattaaacgataaaactaaaatacgaatcgctactaaacattctaacaaaattacaaaacccgaaaaacacgcgtaaaataatataaccgaatctaaacaaatacccaaaccaaaaacaaaataaccgcctaataatcatcgactaatacgaacccgttcgcacccaaataacccgtttccgaatataaatttccttacaaaaacgcccgaaccgtacaattaattataataaaaaaacaaaaaacaacgacacgctaaatccaaaccattaaatcaatacgaacttaaaaaacgtactaacgtatccgctaatttatcaccaacaaaaaaacaaaataaaaaaacaccataaaactcaatcgtcgtaactttataaaaataacgccgttacgaccgctacgacgactaccgatctcaacgtaccgaacttacccgcgccgttattaatcaacaaaaaaccatcaaataaaataaaacccgtaccgtttctacgatactaattacgacgttctaatcgaaacgcaacgaaacgtataataacctatcaaaacgacccgaacgcaccg

SEQ ID NO: 5771 - DNA, 725 bp, Artificial Sequence
  chemically treated genomic DNA (Homo sapiens) CpG-island No: 5771
gattattttttttatttaattttcgacgcgcgttggggagaaaaagtaatttatagtattaataatgacggattattttgtatttgaacggggtagacgatttggggttgatttagcgtgggcgcgtaagattgacggtttgggtattaagtatgtttagttaagcggtaaggttgggatgcggatcgttgttgggtattttggtaaggttataaagttcgaaaggtacgcgtaaagtggtgtggtcggatttggatagatgtttaggttaggaataggataatcgtttgatgattatcgattaatgcgagttcgttcgtatttaggtgattcgttttcgggtgtgaatttttttatagggacgttcggatcgtataattaattgtggtggggaagtagaagatagcgatacgttggatttaaattattgagttagtacgaatttagagggcgtgttggcgtgttcgttggtttattattagtaggaaggtaaggtgaggaaatattatgaaatttagtcgtcgtagttttatgaaagtaacgtcgttgcggtcgttgcggcggttgtcggttttagcgtgtcgggtttgttcgcgtcgttgttggttagtaggaagttattaaatgggataaagttcgtgtcgtttttgcggtattggttgcggcgttttggtcggaacgtagcgggacgtgtggtggtttgttagggcgattcggacgtatcg

SEQ ID NO: 5772 - DNA, 725 bp, Artificial Sequence
  chemically treated genomic DNA (Homo sapiens) CpG-island No: 5772
cgatacgtccgaatcgccctaacaaaccaccacacgtcccgctacgttccgaccaaaacgccgcaaccaataccgcaaaaacgacacgaactttatcccatttaataacttcctactaaccaacaacgacgcgaacaaacccgacacgctaaaaccgacaaccgccgcaacgaccgcaacgacgttactttcataaaactacgacgactaaatttcataatatttcctcaccttaccttcctactaataataaaccaacgaacacgccaacacgccctctaaattcgtactaactcaataatttaaatccaacgtatcgctatcttctacttccccaccacaattaattatacgatccgaacgtccctataaaaaaattcacacccgaaaacgaatcacctaaatacgaacgaactcgcattaatcgataatcatcaaacgattatcctattcctaacctaaacatctatccaaatccgaccacaccactttacgcgtacctttcgaactttataaccttaccaaaatacccaacaacgatccgcatcccaaccttaccgcttaactaaacatacttaatacccaaaccgtcaatcttacgcgcccacgctaaatcaaccccaaatcgtctaccccgttcaaatacaaaataatccgtcattattaatactataaattactttttctccccaacgcgcgtcgaaaattaaataaaaaaaataatc

SEQ ID NO: 5773 - DNA, 733 bp, Artificial Sequence
  chemically treated genomic DNA (Homo sapiens) CpG-island No: 5773
  unsure (29, 51, 85, 140, 152, 161, 164, 166, 170, 191, 193, 195)
tagacgtcggcggtggtcgtaggtcgggnttgacgttaatttggagtattnttattcgcgtttttcgtttgttatttgtttggtntttgtttgacgtcgtcgggattagtttgcgtggatggcgtagtacgtggtaggtntaatttagagtnttttagcgnttnanaatngcgcgcggcgaagttagtcgngntntaggttttagttaggtatattcgagggggggattattcgcgacgtgtatttatcgagatttttttggttgaacgtttacgatagtgtttttaattcgagaatttaggtgttttaaagcggaaagtttcggcgggataattcgggggttttcgtcggtttttgttttttggcgtcgtttgtgttgcgttaattatggagggtgtttcggtttttttttttttgtgaatggagtcggtgttttttaatcgttatttcgtcgtcggttttttattggtttgtacgcgttggcgggtttatattttcggattagggcgacgtgtttatacgtttattttttcgggcggggttgtttttttttttcggaaggggttttttttcggtgcggtttcgttttcgttttttttgagcgttcgtttcgtcgtaaacggggagtttttggttgttcgtttgttttttttttttttcgcgatatcgttgagaacgaggttttatatataagtaaaggatttagattgagagtattttttttagaaaatta

SEQ ID NO: 5774 - DNA, 733 bp, Artificial Sequence
  chemically treated genomic DNA (Homo sapiens) CpG-island No: 5774
  unsure (539, 541, 543, 564, 568, 570, 573, 582, 594, 649, 683, 705)
taattttctaaaaaaaatactctcaatctaaatcctttacttatatataaaacctcgttctcaacgatatcgcgaaaaaaaaaaaaaacaaacgaacaaccaaaaactccccgtttacgacgaaacgaacgctcaaaaaaaacgaaaacgaaaccgcaccgaaaaaaaaccccttccgaaaaaaaaaaacaaccccgcccgaaaaaataaacgtataaacacgtcgccctaatccgaaaatataaacccgccaacgcgtacaaaccaataaaaaaccgacgacgaaataacgattaaaaaacaccgactccattcacaaaaaaaaaaaaaccgaaacaccctccataattaacgcaacacaaacgacgccaaaaaacaaaaaccgacgaaaacccccgaattatcccgccgaaactttccgctttaaaacacctaaattctcgaattaaaaacactatcgtaaacgttcaaccaaaaaaatctcgataaatacacgtcgcgaataatccccccctcgaatatacctaactaaaacctanancncgactaacttcgccgcgcgcnattntnaancgctaaaanactctaaattanacctaccacgtactacgccatccacgcaaactaatcccgacgacgtcaaacaaanaccaaacaaataacaaacgaaaaacgcgaataanaatactccaaattaacgtcaancccgacctacgaccaccgccgacgtcta

SEQ ID NO: 5775 - DNA, 733 bp, Artificial Sequence
  chemically treated genomic DNA (Homo sapiens) CpG-island No: 5775
  unsure (539, 541, 543, 564, 568, 570, 573, 582, 594, 649, 683, 705)
tagttttttgaagggaatgtttttaatttaggttttttgtttgtatatagaatttcgtttttagcggtgtcgcggagagggggaaaagtaggcgggtagttagggatttttcgtttacggcgggacgggcgtttaaaaaagacggggacggggtcgtatcgggggggaatttttttcgaaggggggagataatttcgttcggggggataagcgtgtaagtacgtcgttttggttcgggggtgtgggttcgttaacgcgtgtaaattagtgggaggtcggcggcgaaatggcggttggaaggtatcggttttatttataaggggggggggatcgaggtattttttataattggcgtagtataagcggcgttagagggtaaaagtcggcgagggttttcgggttgtttcgtcggggtttttcgttttggagtatttggattttcggattgggggtattgtcgtgagcgtttaattaaagaggtttcgatgggtatacgtcgcggataatttttttttcgaatgtatttggttaggatttanantncggttagtttcgtcgcgcgtngttntngancgttggaangttttagattanatttgttacgtgttgcgttatttacgtaagttgatttcgacgacgttaggtagangttaggtagatggtagacggaaagcgcgaatgangatgttttaagttaacgttaanttcgatttacggttatcgtcgacgtttg

SEQ ID NO: 5776 - DNA, 733 bp, Artificial Sequence
  chemically treated genomic DNA (Homo sapiens) CpG-island No: 5776
  unsure (29, 51, 85, 140, 152, 161, 164, 166, 170, 191, 193, 195)
caaacgtcgacgataaccgtaaatcgaanttaacgttaacttaaaacatcntcattcgcgctttccgtctaccatctacctaacntctacctaacgtcgtcgaaatcaacttacgtaaataacgcaacacgtaacaaatntaatctaaaacnttccaacgntcnanaacnacgcgcgacgaaactaaccgnantntaaatcctaaccaaatacattcgaaaaaaaaattatccgcgacgtatacccatcgaaacctctttaattaaacgctcacgacaatacccccaatccgaaaatccaaatactccaaaacgaaaaaccccgacgaaacaacccgaaaaccctcgccgacttttaccctctaacgccgcttatactacgccaattataaaaaatacctcgatccccccccccttataaataaaaccgataccttccaaccgccatttcgccgccgacctcccactaatttacacgcgttaacgaacccacacccccgaaccaaaacgacgtacttacacgcttatccccccgaacgaaattatctccccccttcgaaaaaaattcccccccgatacgaccccgtccccgtcttttttaaacgcccgtcccgccgtaaacgaaaaatccctaactacccgcctacttttccccctctccgcgacaccgctaaaaacgaaattctatatacaaacaaaaaacctaaattaaaaacattcccttcaaaaaacta

SEQ ID NO: 5777 - DNA, 504 bp, Artificial Sequence
  chemically treated genomic DNA (Homo sapiens) CpG-island No: 5777
ttttaggtcgcgtgggagagtgaggatgcgttatttattttcgcgcgcggagataaaagataggcgacgtttatatttgagaggcgtcgcgttatttatgggggttttttttttttgtttttcgggttaaatttagtttcgtttaaatggggggaaatggggtcgaaattttttttcgcgggagcggttggcgcgtgtttagaatgggcgcggggattcggaagtaggcgttttaaaaaatttttttaatattcgtatagtaaatagggtatatttgtgtagtttttgttcgttaagtttaattatttcgcgattgcgtcgttgtaatagtatttatcgtattgtattaaatcgttcgtttgttttaataggcgtattaatttaacgtagttattgatttatcggagtcggattcgttaataattgttaggttttatcgcgttgtagattaaaagagagattgcggatcgtagttatttttgttggttttgtataaaggtaata

SEQ ID NO: 5778 - DNA, 504 bp, Artificial Sequence
  chemically treated genomic DNA (Homo sapiens) CpG-island No: 5778
tattacctttatacaaaaccaacaaaaataactacgatccgcaatctctcttttaatctacaacgcgataaaacctaacaattattaacgaatccgactccgataaatcaataactacgttaaattaatacgcctattaaaacaaacgaacgatttaatacaatacgataaatactattacaacgacgcaatcgcgaaataattaaacttaacgaacaaaaactacacaaatataccctatttactatacgaatattaaaaaaattttttaaaacgcctacttccgaatccccgcgcccattctaaacacgcgccaaccgctcccgcgaaaaaaaatttcgaccccatttccccccatttaaacgaaactaaatttaacccgaaaaacaaaaaaaaaaaacccccataaataacgcgacgcctctcaaatataaacgtcgcctatcttttatctccgcgcgcgaaaataaataacgcatcctcactctcccacgcgacctaaaa

SEQ ID NO: 5779 - DNA, 504 bp, Artificial Sequence
  chemically treated genomic DNA (Homo sapiens) CpG-island No: 5779
tattgtttttatgtaggattagtagaaatagttgcggttcgtaattttttttttagtttgtaacgcggtgagatttggtaattgttggcgaattcggtttcggtaagttagtgattgcgttggattgatgcgtttgttggaataggcgggcggtttagtatagtgcgataaatgttgttgtagcggcgtagtcgcgaagtgattgaatttagcgagtagaagttgtataaatgtgttttgtttgttgtgcggatattgggaagattttttggggcgtttattttcgggttttcgcgtttattttgaatacgcgttaatcgttttcgcggggaagggtttcggttttatttttttttatttaagcggggttaagtttaattcggggggtagaaggagagggtttttataggtggcgcggcgttttttagatatgggcgtcgtttgttttttattttcgcgcgcgaggatgagtggcgtatttttatttttttacgcgatttgggg

SEQ ID NO: 5780 - DNA, 504 bp, Artificial Sequence
  chemically treated genomic DNA (Homo sapiens) CpG-island No: 5780
ccccaaatcgcgtaaaaaaataaaaatacgccactcatcctcgcgcgcgaaaataaaaaacaaacgacgcccatatctaaaaaacgccgcgccacctataaaaaccctctccttctaccccccgaattaaacttaaccccgcttaaataaaaaaaaataaaaccgaaacccttccccgcgaaaacgattaacgcgtattcaaaataaacgcgaaaacccgaaaataaacgccccaaaaaatcttcccaatatccgcacaacaaacaaaacacatttatacaacttctactcgctaaattcaatcacttcgcgactacgccgctacaacaacatttatcgcactatactaaaccgcccgcctattccaacaaacgcatcaatccaacgcaatcactaacttaccgaaaccgaattcgccaacaattaccaaatctcaccgcgttacaaactaaaaaaaaaattacgaaccgcaactatttctactaatcctacataaaaacaata

SEQ ID NO: 5781 - DNA, 702 bp, Artificial Sequence
  chemically treated genomic DNA (Homo sapiens) CpG-island No: 5781
gtatcgtttgcgtagttttaggcgcgatatttttttcggtgttaaacggtagcgcgatattttttttatggtcgatagtattaagttatcgttatcgttaagcgtagggagtttttttattattatttttcgtaggttttcgcgagatttaattcgtcgtaatttattaacgcggcgtgttatatgtcgttagcgcgcggatgaagatttcgttcgtgtcggtatagaaatcgttatattggcgttattggcgtagtattcggtatttattaaggattatcgttaattcgttcgggtaatttattggttatttcgtttgtggattggttgtcgttaaattgtcgtttaaatttaacgttacggtttttacggttttattttttgttttttatttagtggcgtatcgttatggtcgaggacggtgttttttttttgcgcgttgttagtagttgtttataacgtaaagacgtgagaaaattttcggcgagacgcgttttatgttacgagtaaacgtaaaatttttgttttttcgttaattattattatatgcgggttttgttttattattatcgggcggtaagaatcggattacgtagatgattaacgttcgttatcgtacggtttttagggtgttattatttattatatagcgtattatcgtgttttttataaatgcgtatgtattttttcggtaaatttttt

SEQ ID NO: 5782 - DNA, 702 bp, Artificial Sequence
  chemically treated genomic DNA (Homo sapiens) CpG-island No: 5782
aaaaaatttaccgaaaaaatacatacgcatttataaaaaacacgataatacgctatataataaataataacaccctaaaaaccgtacgataacgaacgttaatcatctacgtaatccgattcttaccgcccgataataataaaacaaaacccgcatataataataattaacgaaaaaacaaaaattttacgtttactcgtaacataaaacgcgtctcgccgaaaattttctcacgtctttacgttataaacaactactaacaacgcgcaaaaaaaaaacaccgtcctcgaccataacgatacgccactaaataaaaaacaaaaaataaaaccgtaaaaaccgtaacgttaaatttaaacgacaatttaacgacaaccaatccacaaacgaaataaccaataaattacccgaacgaattaacgataatccttaataaataccgaatactacgccaataacgccaatataacgatttctataccgacacgaacgaaatcttcatccgcgcgctaacgacatataacacgccgcgttaataaattacgacgaattaaatctcgcgaaaacctacgaaaaataataataaaaaaactccctacgcttaacgataacgataacttaatactatcgaccataaaaaaaatatcgcgctaccgtttaacaccgaaaaaaatatcgcgcctaaaactacgcaaacgatac

SEQ ID NO: 5783 - DNA, 702 bp, Artificial Sequence
  chemically treated genomic DNA (Homo sapiens) CpG-island No: 5783
gagaggtttgtcggaagaatgtatacgtatttataaaagatacgatggtacgttgtgtgatggatggtaatattttgaaagtcgtgcggtggcgggcgttagttatttgcgtaattcggtttttgtcgttcggtggtgatggagtaaagttcgtatgtgatgatgattggcgaaggggtagaaattttgcgtttgttcgtggtatggagcgcgtttcgtcggagatttttttacgtttttgcgttatgaataattattggtagcgcgtaaggaaggggtatcgttttcgattatagcggtgcgttattggatgaaaaatagaaaatgggatcgtgggggtcgtggcgttggatttagacggtaatttggcggtagttagtttataggcggaatgattaataaattattcggacgagttggcgatagtttttagtgggtgtcggatgttacgttaataacgttagtgtggcggtttttgtatcggtacgggcgaagtttttattcgcgcgttggcggtatatgatacgtcgcgttaatggattacggcggattaagtttcgcggaagtttgcgaggggtagtaatggaaaaattttttgcgtttggcggtagcggtggtttaatgttatcgattatgaagggaatgtcgcgttatcgtttaatatcgaaggaagtatcgcgtttggggttacgtaggcgatat

SEQ ID NO: 5784 - DNA, 702 bp, Artificial Sequence
  chemically treated genomic DNA (Homo sapiens) CpG-island No: 5784
atatcgcctacgtaaccccaaacgcgatacttccttcgatattaaacgataacgcgacattcccttcataatcgataacattaaaccaccgctaccgccaaacgcaaaaaatttttccattactacccctcgcaaacttccgcgaaacttaatccgccgtaatccattaacgcgacgtatcatataccgccaacgcgcgaataaaaacttcgcccgtaccgatacaaaaaccgccacactaacgttattaacgtaacatccgacacccactaaaaactatcgccaactcgtccgaataatttattaatcattccgcctataaactaactaccgccaaattaccgtctaaatccaacgccacgacccccacgatcccattttctatttttcatccaataacgcaccgctataatcgaaaacgataccccttccttacgcgctaccaataattattcataacgcaaaaacgtaaaaaaatctccgacgaaacgcgctccataccacgaacaaacgcaaaatttctaccccttcgccaatcatcatcacatacgaactttactccatcaccaccgaacgacaaaaaccgaattacgcaaataactaacgcccgccaccgcacgactttcaaaatattaccatccatcacacaacgtaccatcgtatcttttataaatacgtatacattcttccgacaaacctctc

SEQ ID NO: 5785 - DNA, 967 bp, Artificial Sequence
  chemically treated genomic DNA (Homo sapiens) CpG-island No: 5785
gggttattttggtttgttaatagcgtttgtattttttgataatatgcgtattaataggaattgttgatgtcgttgtcggggaggcgtattgtaggtgtggatcgtgcgcggggtggtgataaatagaaaatcgtaattagtttgtcgttcggcgatatcgtttgcgttcgtatatcggcgggtagggttggagatcgtttaacgaaagtcggggataatatttttgtattatcgtagatagtcgtttttgtatagcgagttttttatttcgtttagttttagcgtagatggttttgtagtattcggcgaattttcgacgagtttaaaattttagcgtgtcgttaaatgagaagtcgcgtttgcgatagttttcgcgttgaaagttagtatcgcgtttggttcgacggttacgttgtcgtcgattatggggtgagatgaacgtttaaaaacggtattgtcgggtcgggaatggggtaattaggtggttaataatttggttatgtttcggcgtaaggcggaaatattgttacggaacggggcgattgataagtttcggtcgagttcgagtatttttttagtcggttagtattaggtcgggaaaggtatcggggtgaagcgttaattgtcgttcgagagggaggatttatcgcggtgtatgttataaaatcggaatagggggtaaaaaatacggtcgggagggaaaattagtggtcgtaagttgtgggaaataacggggcggtaaaatcggatcggtaaatatgttcgtcgaggggtataataattatacgtagggtaatagtcgttattaatagcgaaaaggtattacgataataatgagggatatataggataattagtcgtgttttttttgcgcgattttagcgcgttttatttgtcgtacgtgatcgatagtattagtgttgtaggtcgatttagaggatttttaattttttttattattaagaag

SEQ ID NO: 5786 - DNA, 967 bp, Artificial Sequence
  chemically treated genomic DNA (Homo sapiens) CpG-island No: 5786
cttcttaataataaaaaaaattaaaaatcctctaaatcgacctacaacactaatactatcgatcacgtacgacaaataaaacgcgctaaaatcgcgcaaaaaaaacacgactaattatcctatatatccctcattattatcgtaataccttttcgctattaataacgactattaccctacgtataattattatacccctcgacgaacatatttaccgatccgattttaccgccccgttatttcccacaacttacgaccactaattttccctcccgaccgtattttttaccccctattccgattttataacatacaccgcgataaatcctccctctcgaacgacaattaacgcttcaccccgatacctttcccgacctaatactaaccgactaaaaaaatactcgaactcgaccgaaacttatcaatcgccccgttccgtaacaatatttccgccttacgccgaaacataaccaaattattaaccacctaattaccccattcccgacccgacaataccgtttttaaacgttcatctcaccccataatcgacgacaacgtaaccgtcgaaccaaacgcgatactaactttcaacgcgaaaactatcgcaaacgcgacttctcatttaacgacacgctaaaattttaaactcgtcgaaaattcgccgaatactacaaaaccatctacgctaaaactaaacgaaataaaaaactcgctatacaaaaacgactatctacgataatacaaaaatattatccccgactttcgttaaacgatctccaaccctacccgccgatatacgaacgcaaacgatatcgccgaacgacaaactaattacgattttctatttatcaccaccccgcgcacgatccacacctacaatacgcctccccgacaacgacatcaacaattcctattaatacgcatattatcaaaaaatacaaacgctattaacaaaccaaaataaccc

SEQ ID NO: 5787 - DNA, 967 bp, Artificial Sequence
  chemically treated genomic DNA (Homo sapiens) CpG-island No: 5787
ttttttaatagtgaaaagggttagggattttttagatcgatttatagtattgatgttatcgattacgtacgataagtggagcgcgttgaggtcgcgtaggagagatacgattggttgttttgtgtgttttttattattatcgtggtattttttcgttgttggtggcggttattgttttgcgtgtggttgttatatttttcggcggatatatttgtcggttcgattttgtcgtttcgttgttttttatagtttgcggttattaattttttttttcggtcgtattttttattttttatttcggttttatgatatatatcgcggtgaattttttttttcgggcggtaattgacgttttatttcgatatttttttcggtttgatgttgatcggttggaaaaatgttcgaattcgatcggggtttattaatcgtttcgtttcgtggtagtattttcgttttgcgtcggagtataattagattgttaattatttgattattttattttcgattcggtaatgtcgtttttgggcgtttattttattttatgatcgacggtagcgtgatcgtcgggttaaacgcggtgttggtttttaacgcgaaggttatcgtaagcgcgattttttatttagcgatacgttggaattttgggttcgtcggggattcgtcgggtgttgtaaaattatttacgttaggattgggcgagatgaaaaattcgttgtgtaaaagcggttatttgcggtggtgtaaaagtattgttttcggttttcgttaagcgatttttagttttgttcgtcggtgtgcgggcgtaggcggtatcgtcggacggtaagttgattgcgattttttgtttgttattatttcgcgtacgatttatatttgtaatgcgttttttcggtagcgatattagtaatttttattggtgcgtatattgttagaaggtataaacgttgttggtaagttagagtaattt

SEQ ID NO: 5788 - DNA, 967 bp, Artificial Sequence
  chemically treated genomic DNA (Homo sapiens) CpG-island No: 5788
aaattactctaacttaccaacaacgtttataccttctaacaatatacgcaccaataaaaattactaatatcgctaccgaaaaaacgcattacaaatataaatcgtacgcgaaataataacaaacaaaaaatcgcaatcaacttaccgtccgacgataccgcctacgcccgcacaccgacgaacaaaactaaaaatcgcttaacgaaaaccgaaaacaatacttttacaccaccgcaaataaccgcttttacacaacgaatttttcatctcgcccaatcctaacgtaaataattttacaacacccgacgaatccccgacgaacccaaaattccaacgtatcgctaaataaaaaatcgcgcttacgataaccttcgcgttaaaaaccaacaccgcgtttaacccgacgatcacgctaccgtcgatcataaaataaaataaacgcccaaaaacgacattaccgaatcgaaaataaaataatcaaataattaacaatctaattatactccgacgcaaaacgaaaatactaccacgaaacgaaacgattaataaaccccgatcgaattcgaacatttttccaaccgatcaacatcaaaccgaaaaaaatatcgaaataaaacgtcaattaccgcccgaaaaaaaaaattcaccgcgatatatatcataaaaccgaaataaaaaataaaaaatacgaccgaaaaaaaaaattaataaccgcaaactataaaaaacaacgaaacgacaaaatcgaaccgacaaatatatccgccgaaaaatataacaaccacacgcaaaacaataaccgccaccaacaacgaaaaaataccacgataataataaaaaacacacaaaacaaccaatcgtatctctcctacgcgacctcaacgcgctccacttatcgtacgtaatcgataacatcaatactataaatcgatctaaaaaatccctaacccttttcactattaaaaaa

SEQ ID NO: 5789 - DNA, 923 bp, Artificial Sequence
  chemically treated genomic DNA (Homo sapiens) CpG-island No: 5789
gcggttatacgtaggcggagcgaaaacgttcgggggggaagtaatataaataggtgatatcgtaaacgggatatgtgtcgtgatcggaggttagaatagttgcgattagcggtagcgggatagttaatgggcggcgttaagagttgcgcgtaaaagggaaacgcggaagtttgagcgcgagtgggtaagaagtgcgtttgcgtcggtaacgtagacgcgtcgcgtttttcgtcgtgtaatatatcgcggattgatagaaagggttttggttcgtcgacgggggtgcggtgagagtacggggtcgtataatgcgtacgagcgtttcggattcggtttatttggttgatcgggttgtgataaaaggcgggaagatttagcggacggtagatatgggattatgatcggcgacgttgtaggggggggtatgacggtttattacgaatcgaagtaatattattattattatcgtaaatttagtatattacgcgttgcggtttgcggtttgggacgcgtttgtattatacggtatattaaacgcgttattaaacgaatacggtttttcggggcgtcgggtattcggaaggtcgtaatcggtcgttaatttttatgaaaagagaaggagtagcgcgttatgtatgtataaaggggtcggatgtatttcggcgtcggatttgcgttagtgggcgttcgtcgattgtttatatgcggtacgtttttattttcggtcggtttatgttcgggggtatttttttatttttttattcgttgttatacgggtttgtattttttattatcgggggtgtggtatttttaggtcgtatacggcgtttttttggttgcgtcgcgttttatgtagttatgttaggcgttattagtttgttttttttggttggatttatgtgttgtatttggtaagatcgtgt

SEQ ID NO: 5790 - DNA, 923 bp, Artificial Sequence
  chemically treated genomic DNA (Homo sapiens) CpG-island No: 5790
acacgatcttaccaaatacaacacataaatccaaccaaaaaaaacaaactaataacgcctaacataactacataaaacgcgacgcaaccaaaaaaacgccgtatacgacctaaaaataccacacccccgataataaaaaatacaaacccgtataacaacgaataaaaaaataaaaaaatacccccgaacataaaccgaccgaaaataaaaacgtaccgcatataaacaatcgacgaacgcccactaacgcaaatccgacgccgaaatacatccgacccctttatacatacataacgcgctactccttctcttttcataaaaattaacgaccgattacgaccttccgaatacccgacgccccgaaaaaccgtattcgtttaataacgcgtttaatataccgtataatacaaacgcgtcccaaaccgcaaaccgcaacgcgtaatatactaaatttacgataataataataatattacttcgattcgtaataaaccgtcatacccccccctacaacgtcgccgatcataatcccatatctaccgtccgctaaatcttcccgccttttatcacaacccgatcaaccaaataaaccgaatccgaaacgctcgtacgcattatacgaccccgtactctcaccgcacccccgtcgacgaaccaaaaccctttctatcaatccgcgatatattacacgacgaaaaacgcgacgcgtctacgttaccgacgcaaacgcacttcttacccactcgcgctcaaacttccgcgtttcccttttacgcgcaactcttaacgccgcccattaactatcccgctaccgctaatcgcaactattctaacctccgatcacgacacatatcccgtttacgatatcacctatttatattacttcccccccgaacgttttcgctccgcctacgtataaccgc

SEQ ID NO: 5791 - DNA, 923 bp, Artificial Sequence
  chemically treated genomic DNA (Homo sapiens) CpG-island No: 5791
gtacgattttgttaggtatagtatatgggtttaattaggggggataggttgataacgtttgatatgattatatagagcgcgacgtagttaggaaggcgtcgtgtacggtttaaaaatgttatattttcgataatagaaggtataagttcgtgtggtaacgggtggaaaaatggggaaatattttcggatatgggtcggtcgagggtgaaggcgtgtcgtatataggtaatcggcgggcgtttattagcgtaaattcggcgtcggggtgtattcggtttttttatatatatatggcgcgttattttttttttttttataggggttaacggtcggttgcggtttttcgggtgttcggcgtttcggggagtcgtattcgtttggtagcgcgtttggtatatcgtgtggtataggcgcgttttaggtcgtagatcgtagcgcgtggtgtgttaaatttgcgataatggtgatggtgttgtttcggttcgtggtagatcgttatgtttttttttatagcgtcgtcggttatggttttatgtttgtcgttcgttagattttttcgttttttgttataattcggttagttaaatgggtcgaattcggggcgttcgtgcgtattatgcggtttcgtatttttatcgtattttcgtcggcggattagggttttttttattagttcgcggtgtattgtacggcgaagggcgcggcgcgtttgcgttgtcggcgtaggcgtattttttgtttattcgcgtttaaattttcgcgttttttttttacgcgtagtttttggcgtcgtttattggttatttcgttgtcgttggtcgtagttattttggttttcgattacggtatatgtttcgtttgcgatgttatttatttgtattatttttttttcgggcgttttcgtttcgtttgcgtatggtcgt

SEQ ID NO: 5792 - DNA, 923 bp, Artificial Sequence
  chemically treated genomic DNA (Homo sapiens) CpG-island No: 5792
acgaccatacgcaaacgaaacgaaaacgcccgaaaaaaaaataatacaaataaataacatcgcaaacgaaacatataccgtaatcgaaaaccaaaataactacgaccaacgacaacgaaataaccaataaacgacgccaaaaactacgcgtaaaaaaaaaacgcgaaaatttaaacgcgaataaacaaaaaatacgcctacgccgacaacgcaaacgcgccgcgcccttcgccgtacaatacaccgcgaactaataaaaaaaaccctaatccgccgacgaaaatacgataaaaatacgaaaccgcataatacgcacgaacgccccgaattcgacccatttaactaaccgaattataacaaaaaacgaaaaaatctaacgaacgacaaacataaaaccataaccgacgacgctataaaaaaaaacataacgatctaccacgaaccgaaacaacaccatcaccattatcgcaaatttaacacaccacgcgctacgatctacgacctaaaacgcgcctataccacacgatataccaaacgcgctaccaaacgaatacgactccccgaaacgccgaacacccgaaaaaccgcaaccgaccgttaacccctataaaaaaaaaaaaaataacgcgccatatatatataaaaaaaccgaatacaccccgacgccgaatttacgctaataaacgcccgccgattacctatatacgacacgccttcaccctcgaccgacccatatccgaaaatatttccccatttttccacccgttaccacacgaacttataccttctattatcgaaaatataacatttttaaaccgtacacgacgccttcctaactacgtcgcgctctatataatcatatcaaacgttatcaacctatcccccctaattaaacccatatactatacctaacaaaatcgtac

SEQ ID NO: 5793 - DNA, 928 bp, Artificial Sequence
  chemically treated genomic DNA (Homo sapiens) CpG-island No: 5793
gaatttttcgaataaaatttcgcggggtattttttcgtaatttatttatttcgggttaaagtggcggatattgcgttgtaatgatacgttatattcggtatggtatgcggatgtggcgtatgttgataagacgcgttagcgtcgtattaggtaatcgttcgggcgttagatgttggatgcggcgtaatcgttttatttaatttacgggtggagtattttatagcggtgtaggtttgataagacgcgttagcgtcgattaggtaatcggtttgggcgttagatgtcggatgcggcgtaatcgtttattcgatttacggggtggagtattttatagcggtgtaggtttgataagagcgttagcgtcgtattaggtaatcggttcggacgttggatgtcggatgcgcgtaatcgttttatttaatttacggggtggagtattttatagcggtgtggtttgataagacgcgttagcgtcgtattaggtaatcggtttgggcgttgatgtcggatgcggcgtaatcgttttattcgatttacggggtggagtatttatagcggtgtaggtttgataagacgcgttagcgtcgtattaggtaacggttcgggcgttggatgtcggatgcggcgtgatcgttttgtttgatttaggggtgtcgtattttatagcggtgtaggtttgataagacgcgttagcgtgtattaggtaatcggttcgggcgttggatgtcggatgcggcgtgatcgtttgtttgatttacggggtgtcgtattttacggtagtttagcgaattattcgttgttaattttttttttcgttttttagacgcggtattttatatttatttgtttggcgtatatattacgatcggtagtttgttgttgtaacgtagtatttagtatcgtttagatacgcggtgataaatttttt

SEQ ID NO: 5794 - DNA, 928 bp, Artificial Sequence
  chemically treated genomic DNA (Homo sapiens) CpG-island No: 5794
aaaaaatttatcaccgcgtatctaaacgatactaaatactacgttacaacaacaaactaccgatcgtaatatatacgccaaacaaataaatataaaataccgcgtctaaaaaacgaaaaaaaaaattaacaacgaataattcgctaaactaccgtaaaatacgacaccccgtaaatcaaacaaacgatcacgccgcatccgacatccaacgcccgaaccgattacctaatacacgctaacgcgtcttatcaaacctacaccgctataaaatacgacacccctaaatcaaacaaaacgatcacgccgcatccgacatccaacgcccgaaccgttacctaatacgacgctaacgcgtcttatcaaacctacaccgctataaatactccaccccgtaaatcgaataaaacgattacgccgcatccgacatcaacgcccaaaccgattacctaatacgacgctaacgcgtcttatcaaaccacaccgctataaaatactccaccccgtaaattaaataaaacgattacgcgcatccgacatccaacgtccgaaccgattacctaatacgacgctaacgctcttatcaaacctacaccgctataaaatactccaccccgtaaatcgaataaacgattacgccgcatccgacatctaacgcccaaaccgattacctaatcgacgctaacgcgtcttatcaaacctacaccgctataaaatactccacccgtaaattaaataaaacgattacgccgcatccaacatctaacgcccgaacgattacctaatacgacgctaacgcgtcttatcaacatacgccacatccgcataccataccgaatataacgtatcattacaacgcaatatccgccactttaacccgaaataaataaattacgaaaaaataccccgcgaaattttattcgaaaaattc

SEQ ID NO: 5795 - DNA, 928 bp, Artificial Sequence
  chemically treated genomic DNA (Homo sapiens) CpG-island No: 5795
aagaaatttgttatcgcgtatttgggcgatgttggatgttgcgttataatagtaagttgtcgatcgtggtgtatacgttagataagtagatgtgaagtatcgcgtttggaaggcggaagagaaaattgataacgggtagttcgttaaattgtcgtgaagtgcggtatttcgtaggttagataagcggttacgtcgtattcgatatttaacgttcgagtcggttgtttgatgtacgttggcgcgttttattaggtttatatcgttgtgaagtgcggtatttttaggttagataaggcggttacgtcgtattcgatatttaacgttcgagtcgttgtttgatgcgacgttggcgcgttttattaggtttatatcgttgtgagtgttttatttcgtaggtcggataaggcggttacgtcgtattcgatattaacgtttaagtcggttgtttgatgcgacgttggcgcgttttattaggttatatcgttgtgaagtgttttatttcgtaggttggataaggcggttacgcgtattcgatatttaacgttcgagtcggttgtttgatgcgacgttggcgtttttattaggtttatatcgttgtgaagtgttttatttcgtaggtcggataggcggttacgtcgtattcgatatttaacgtttaagtcggttgtttgatcgacgttggcgcgttttattaggtttatatcgttgtgaagtgttttattcgtaggttggataaggcggttacgtcgtatttaatatttaacgttcgagcggttgtttgatgcgacgttggcgcgttttattagtatacgttatattcgtatattatgtcggatgtggcgtattattataacgtaatattcgttattttggttcgggataagtgagttgcgggggagtgtttcgcggggttttgttcgaggagttt

SEQ ID NO: 5796 - DNA, 928 bp, Artificial Sequence
  chemically treated genomic DNA (Homo sapiens) CpG-island No: 5796
aaactcctcgaacaaaaccccgcgaaacactcccccgcaactcacttatcccgaaccaaaataacgaatattacgttataataatacgccacatccgacataatatacgaatataacgtatactaataaaacgcgccaacgtcgcatcaaacaaccgctcgaacgttaaatattaaatacgacgtaaccgccttatccaacctacgaataaaacacttcacaacgatataaacctaataaaacgcgccaacgtcgatcaaacaaccgacttaaacgttaaatatcgaatacgacgtaaccgcctatccgacctacgaaataaaacacttcacaacgatataaacctaataaaaacgccaacgtcgcatcaaacaaccgactcgaacgttaaatatcgaatacgcgtaaccgccttatccaacctacgaaataaaacacttcacaacgatataacctaataaaacgcgccaacgtcgcatcaaacaaccgacttaaacgttaatatcgaatacgacgtaaccgccttatccgacctacgaaataaaacactcacaacgatataaacctaataaaacgcgccaacgtcgcatcaaacaacgactcgaacgttaaatatcgaatacgacgtaaccgccttatctaacctaaaaataccgcacttcacaacgatataaacctaataaaacgcgccaacgtacatcaaacaaccgactcgaacgttaaatatcgaatacgacgtaaccgcttatctaacctacgaaataccgcacttcacgacaatttaacgaactacccgttatcaattttctcttccgccttccaaacgcgatacttcacatctacttatctaacgtatacaccacgatcgacaacttactattataacgcaacatccaacatcgcccaaatacgcgataacaaatttctt

SEQ ID NO: 5797 - DNA, 633 bp, Artificial Sequence
  chemically treated genomic DNA (Homo sapiens) CpG-island No: 5797
cgaatgggcgattattaacgttggcgtatagatgatgtaggtatgaagtagtagaacgttagcggcgtagttaggaagattagtcgtggaatgttcgataagagtggaatatggcgttgacgtaatatagtcgttgagtaaattttagtttttatcggtgagcgggttatcgagacggaagatttgtattatttcgcgcgttagcgaatacgttgatcgatatgcgtcgatagattttcggtcgttagttcgtcgtttgcggaatacgtatatacgcggaggtatagttacgacggtgtatcgtagagaagtatgcgtatttttagttacggtttcgatagtaatgttttaattttatttagcggtttacgacgaattatcgtataggaatcgtagagaaagtggcgttttatatatcgttgttattttgtattagattatagaacgcgtgttttcgttcggcgttttacggaaacgttttaggttgcgtttaaagggttcggtgagaagaagtggtgcggcgtttgtattatcgttagttgtttttttttaggaattagtttatggttatttgtaagaacgatcgcgtggtagtggtcgtagtcgaaaatcgatacgaattcgtttttggta

SEQ ID NO: 5798 - DNA, 633 bp, Artificial Sequence
  chemically treated genomic DNA (Homo sapiens) CpG-island No: 5798
taccaaaaacgaattcgtatcgattttcgactacgaccactaccacgcgatcgttcttacaaataaccataaactaattcctaaaaaaaaacaactaacgataatacaaacgccgcaccacttcttctcaccgaaccctttaaacgcaacctaaaacgtttccgtaaaacgccgaacgaaaacacgcgttctataatctaatacaaaataacaacgatatataaaacgccactttctctacgattcctatacgataattcgtcgtaaaccgctaaataaaattaaaacattactatcgaaaccgtaactaaaaatacgcatacttctctacgatacaccgtcgtaactatacctccgcgtatatacgtattccgcaaacgacgaactaacgaccgaaaatctatcgacgcatatcgatcaacgtattcgctaacgcgcgaaataatacaaatcttccgtctcgataacccgctcaccgataaaaactaaaatttactcaacgactatattacgtcaacgccatattccactcttatcgaacattccacgactaatcttcctaactacgccgctaacgttctactacttcatacctacatcatctatacgccaacgttaataatcgcccattcg

SEQ ID NO: 5799 - DNA, 633 bp, Artificial Sequence
  chemically treated genomic DNA (Homo sapiens) CpG-island No: 5799
tgttaaaggcgagttcgtgtcgattttcgattgcgattattattacgcgatcgtttttgtaaatgattatgggttggtttttgaaagaaaatagttggcgatgatgtagacgtcgtattatttttttttatcggattttttgaacgtaatttggggcgttttcgtaaaacgtcgaacgaaggtacgcgttttatggtttggtgtaggatggtaacgatatgtgggacgttattttttttgcggtttttgtgcggtgattcgtcgtaagtcgttggatgaaattggggtattgttgtcgaaatcgtgattgaagatgcgtatatttttttgcggtgtatcgtcgtggttatattttcgcgtatatgcgtatttcgtaggcggcgggttggcgatcgaaagtttgtcggcgtatatcggttagcgtattcgttggcgcgcgggatggtataaatttttcgtttcgataattcgtttatcggtaagggttgaagtttgtttagcggttatgttacgttaacgttatgttttatttttgtcgggtattttacggttgatttttttgattgcgtcgttggcgttttgttgttttatgtttatattatttatgcgttagcgttgatgatcgtttattcg

SEQ ID NO: 5800 - DNA, 633 bp, Artificial Sequence
  chemically treated genomic DNA (Homo sapiens) CpG-island No: 5800
cgaataaacgatcatcaacgctaacgcataaataatataaacataaaacaacaaaacgccaacgacgcaatcaaaaaaatcaaccgtaaaatacccgacaaaaataaaacataacgttaacgtaacataaccgctaaacaaacttcaacccttaccgataaacgaattatcgaaacgaaaaatttataccatcccgcgcgccaacgaatacgctaaccgatatacgccgacaaactttcgatcgccaacccgccgcctacgaaatacgcatatacgcgaaaatataaccacgacgatacaccgcaaaaaaatatacgcatcttcaatcacgatttcgacaacaataccccaatttcatccaacgacttacgacgaatcaccgcacaaaaaccgcaaaaaaaataacgtcccacatatcgttaccatcctacaccaaaccataaaacgcgtaccttcgttcgacgttttacgaaaacgccccaaattacgttcaaaaaatccgataaaaaaaaataatacgacgtctacatcatcgccaactattttctttcaaaaaccaacccataatcatttacaaaaacgatcgcgtaataataatcgcaatcgaaaatcgacacgaactcgcctttaaca

SEQ ID NO: 5801 - DNA, 553 bp, Artificial Sequence
  chemically treated genomic DNA (Homo sapiens) CpG-island No: 5801
agaaaagcgacggttcgtgtattaggttattatcgttcgcgtgaagttaggacgttagtattagaaaacgatttgtcggatttgatcgtttcgttcgattaatcgtttttgcgattttcgacggcgtaatcgattcgtataatttcggcgcgtttttgcgtgtgcggacgtcgtaggcgtttatgcggtgattgtgtcgaaagatcgttcgtatagtttaacgttacggcgaaaaaagtagtttgcggcgcggtagaaacgtttcgttgattcgggtgattaattttgcgcgtattatgcgtatgttgaggaagagaatatttggatcgtcggtacggtaggcgaggcggattatatttttattagagtaaaatgatcggacgtttggcgttggtgatgggtgcggaggtgaaggtatgcgtcgtttgattcgtgaatattgcgatgagttgatcgtatttcgatggttggaagcgttttttttttgaacgtttcggttgcgacggaatttgtttatttgaagcggtgcgttagcgtagttaattttttagaa

SEQ ID NO: 5802 - DNA, 553 bp, Artificial Sequence
  chemically treated genomic DNA (Homo sapiens) CpG-island No: 5802
ttctaaaaaattaactacgctaacgcaccgcttcaaataaacaaattccgtcgcaaccgaaacgttcaaaaaaaaaacgcttccaaccatcgaaatacgatcaactcatcgcaatattcacgaatcaaacgacgcataccttcacctccgcacccatcaccaacgccaaacgtccgatcattttactctaataaaaatataatccgcctcgcctaccgtaccgacgatccaaatattctcttcctcaacatacgcataatacgcgcaaaattaatcacccgaatcaacgaaacgtttctaccgcgccgcaaactacttttttcgccgtaacgttaaactatacgaacgatctttcgacacaatcaccgcataaacgcctacgacgtccgcacacgcaaaaacgcgccgaaattatacgaatcgattacgccgtcgaaaatcgcaaaaacgattaatcgaacgaaacgatcaaatccgacaaatcgttttctaatactaacgtcctaacttcacgcgaacgataataacctaatacacgaaccgtcgcttttct

SEQ ID NO: 5803 - DNA, 553 bp, Artificial Sequence
  chemically treated genomic DNA (Homo sapiens) CpG-island No: 5803
ttttgagaaattagttgcgttggcgtatcgttttaaataagtaaatttcgtcgtaatcgaaacgtttagggaagaaacgtttttagttatcgggatgcgattaatttatcgtaatgtttacgagttaggcgacgtatatttttattttcgtatttattattagcgttaggcgttcggttattttgttttgatagaggtatgattcgtttcgtttgtcgtatcgacgatttagatatttttttttttaatatacgtatggtgcgcgtaaggttagttattcgaattagcggaacgtttttgtcgcgtcgtaggttatttttttcgtcgtagcgttgagttgtgcgagcgatttttcggtataattatcgtatgaacgtttgcggcgttcgtatacgtaaggacgcgtcgaggttgtgcggatcggttacgtcgtcgagaatcgtaggaacggttgatcgagcgaagcgattagattcggtagatcgttttttgatattgacgttttggttttacgcgggcgataatggtttgatgtacggatcgtcgttttttt

SEQ ID NO: 5804 - DNA, 553 bp, Artificial Sequence
  chemically treated genomic DNA (Homo sapiens) CpG-island No: 5804
aaaaaaacgacgatccgtacatcaaaccattatcgcccgcgtaaaaccaaaacgtcaatatcaaaaaacgatctaccgaatctaatcgcttcgctcgatcaaccgttcctacgattctcgacgacgtaaccgatccgcacaacctcgacgcgtccttacgtatacgaacgccgcaaacgttcatacgataattataccgaaaaatcgctcgcacaactcaacgctacgacgaaaaaaataacctacgacgcgacaaaaacgttccgctaattcgaataactaaccttacgcgcaccatacgtatattaaaaaaaaaaatatctaaatcgtcgatacgacaaacgaaacgaatcatacctctatcaaaacaaaataaccgaacgcctaacgctaataataaatacgaaaataaaaatatacgtcgcctaactcgtaaacattacgataaattaatcgcatcccgataactaaaaacgtttcttccctaaacgtttcgattacgacgaaatttacttatttaaaacgatacgccaacgcaactaatttctcaaaa

SEQ ID NO: 5805 - DNA, 509 bp, Artificial Sequence
  chemically treated genomic DNA (Homo sapiens) CpG-island No: 5805
agtgtgatatcgatcgcgtgcgcgttattcgtaaaagtcggttggtggaagtggtagaagggtagtttgcgtagggcgattttttagtttgtttggtcgttaatgaaaattattattattttcgcgtggtgttggtgcgtatcgattcggtaatcgagcgtttgattttaatcgtcgtataattggatgtttttaaatgttacgtcggggatcgcgttcgtttggtgcgtttgtgcgtagaggagaaaatagtatgattttatggattaacggtgattggataacgggttagggcgtatcgcgtgtgaagcgtaattcggtatcgggcgaggtgttatggtaaggtaatgatgtcgatgtcgtttaggtcgagtaggtttgtcgggtagttcgtgcggcgttttcgcgttgggcgcggtttttatttgttgaacgttatgtcgttgtcgaacgttttgtcgtattgttggaaagtaataaagtcgaattaatcgttattattgtagaga

SEQ ID NO: 5806 - DNA, 509 bp, Artificial Sequence
  chemically treated genomic DNA (Homo sapiens) CpG-island No: 5806
tctctacaataataacgattaattcgactttattactttccaacaatacgacaaaacgttcgacaacgacataacgttcaacaaataaaaaccgcgcccaacgcgaaaacgccgcacgaactacccgacaaacctactcgacctaaacgacatcgacatcattaccttaccataacacctcgcccgataccgaattacgcttcacacgcgatacgccctaacccgttatccaatcaccgttaatccataaaatcatactattttctcctctacgcacaaacgcaccaaacgaacgcgatccccgacgtaacatttaaaaacatccaattatacgacgattaaaatcaaacgctcgattaccgaatcgatacgcaccaacaccacgcgaaaataataataattttcattaacgaccaaacaaactaaaaaatcgccctacgcaaactacccttctaccacttccaccaaccgacttttacgaataacgcgcacgcgatcgatatcacact

SEQ ID NO: 5807 - DNA, 509 bp, Artificial Sequence
  chemically treated genomic DNA (Homo sapiens) CpG-island No: 5807
tttttgtaataatggcggttaattcggttttattgttttttagtagtgcggtaaagcgttcgataacggtatgacgtttagtaaatgaaagtcgcgtttagcgcggaaacgtcgtacgggttgttcgataagtttgttcgatttgagcggtatcggtattattgttttgttataatatttcgttcgatatcggattacgttttatacgcgatgcgttttggttcgttatttagttatcgttaatttataaagttatgttgtttttttttttgcgtataggcgtattagacgaacgcgattttcggcgtggtatttgagggtatttagttgtgcggcggttaaaattaaacgttcggttgtcggatcggtacgtattagtattacgcggaaatggtgataatttttattggcgattaggtaggttgggaaatcgttttgcgtaggttgtttttttgttatttttattagtcgatttttacggatggcgcgtacgcggtcgatgttatatt

SEQ ID NO: 5808 - DNA, 509 bp, Artificial Sequence
  chemically treated genomic DNA (Homo sapiens) CpG-island No: 5808
aatataacatcgaccgcgtacgcgccatccgtaaaaatcgactaataaaaataacaaaaaaacaacctacgcaaaacgatttcccaacctacctaatcgccaataaaaattatcaccatttccgcgtaatactaatacgtaccgatccgacaaccgaacgtttaattttaaccgccgcacaactaaataccctcaaataccacgccgaaaatcgcgttcgtctaatacgcctatacgcaaaaaaaaaaacaacataactttataaattaacgataactaaataacgaaccaaaacgcatcgcgtataaaacgtaatccgatatcgaacgaaatattataacaaaacaataataccgataccgctcaaatcgaacaaacttatcgaacaacccgtacgacgtttccgcgctaaacgcgactttcatttactaaacgtcataccgttatcgaacgctttaccgcactactaaaaaacaataaaaccgaattaaccgccattattacaaaaa

SEQ ID NO: 5809 - DNA, 547 bp, Artificial Sequence
  chemically treated genomic DNA (Homo sapiens) CpG-island No: 5809
ttacgcgtatcgcgttgtcgaattcggtgtttcgcgttgggcggggggcgggtaggtttgtttatgtaaattatattatttgcgtgtttcgtttcgtcgacgttatttgattttaatatgtaagaaacgtttttttttagattcggttttttatattgcgttttttttttcgcgtaaagggggcggggcggaggatgtaaatgaatttcgtgtaggttacggatcgttgttttttttttttttggtaggggggttgtttcgaattttttcgtttcgtttcggaacgtttcggcggttcgggtttgcgtaggcgttttatttttttcggggcgcggttacgtcgtatcgggcgaggcggggtcggggagtcgcgcgcggtgggggcggggtatggcgcgttgtgcggcgtagggcggttggtataaacggcggcgtcggggtcggaggaaaaattcggtgaggaggtcgcggggcgagaagggagcgggaggagattgtagagggttaaatattaggttgaggagtttatttgtgttttggggttttg

SEQ ID NO: 5810 - DNA, 547 bp, Artificial Sequence
  chemically treated genomic DNA (Homo sapiens) CpG-island No: 5810
caaaaccccaaaacacaaataaactcctcaacctaatatttaaccctctacaatctcctcccgctcccttctcgccccgcgacctcctcaccgaatttttcctccgaccccgacgccgccgtttataccaaccgccctacgccgcacaacgcgccataccccgcccccaccgcgcgcgactccccgaccccgcctcgcccgatacgacgtaaccgcgccccgaaaaaaataaaacgcctacgcaaacccgaaccgccgaaacgttccgaaacgaaacgaaaaaattcgaaacaacccccctaccaaaaaaaaaaaaaacaacgatccgtaacctacacgaaattcatttacatcctccgccccgccccctttacgcgaaaaaaaaaacgcaatataaaaaaccgaatctaaaaaaaaacgtttcttacatattaaaatcaaataacgtcgacgaaacgaaacacgcaaataatataatttacataaacaaacctacccgccccccgcccaacgcgaaacaccgaattcgacaacgcgatacgcgtaa

SEQ ID NO: 5811 - DNA, 547 bp, Artificial Sequence
  chemically treated genomic DNA (Homo sapiens) CpG-island No: 5811
tagggttttaggatataaatgaattttttagtttggtgtttgattttttgtagttttttttcgtttttttttcgtttcgcgatttttttatcgagtttttttttcggtttcggcgtcgtcgtttgtgttagtcgttttgcgtcgtatagcgcgttatatttcgtttttatcgcgcgcgatttttcggtttcgtttcgttcggtgcgacgtgatcgcgtttcggagggggtaaggcgtttgcgtaggttcgagtcgtcgggacgtttcggagcggggcgaggaagttcgggataatttttttattaaggagaaaggaaatagcggttcgtggtttatacgaggtttatttgtatttttcgtttcgttttttttgcgcgggagggggaacgtagtgtgaggggtcgggtttgggagggggcgttttttgtatgttggaattaagtggcgtcggcggggcggggtacgtaaatgatgtgatttatatggataggtttattcgtttttcgtttagcgcggggtatcgagttcggtagcgcggtgcgcgtga

SEQ ID NO: 5812 - DNA, 547 bp, Artificial Sequence
  chemically treated genomic DNA (Homo sapiens) CpG-island No: 5812
tcacgcgcaccgcgctaccgaactcgataccccgcgctaaacgaaaaacgaataaacctatccatataaatcacatcatttacgtaccccgccccgccgacgccacttaattccaacatacaaaaaacgccccctcccaaacccgacccctcacactacgttccccctcccgcgcaaaaaaaacgaaacgaaaaatacaaataaacctcgtataaaccacgaaccgctatttcctttctccttaataaaaaaattatcccgaacttcctcgccccgctccgaaacgtcccgacgactcgaacctacgcaaacgccttaccccctccgaaacgcgatcacgtcgcaccgaacgaaacgaaaccgaaaaatcgcgcgcgataaaaacgaaatataacgcgctatacgacgcaaaacgactaacacaaacgacgacgccgaaaccgaaaaaaaaactcgataaaaaaatcgcgaaacgaaaaaaaaacgaaaaaaaactacaaaaaatcaaacaccaaactaaaaaattcatttatatcctaaaacccta

SEQ ID NO: 5813 - DNA, 1360 bp, Artificial Sequence
  chemically treated genomic DNA (Homo sapiens) CpG-island No: 5813
attatttcgttagtagtagcgtgtagtcggttgaggtgtttttattattaaaattttgttttgcgtggtgtcggtggtgttttacgcgggatgtttattatgttgtcgttttataagtttatcgatgttcgcgtggaggtattagtcggtagttgattaagtatcgcgcggcgtagggcgaggtcgtttcgacgtcgcgatagtcgtattttattaatcggaggtaatatggaaattttaattcgatatttatcggttttaattcggattcgtttttgtgtcgttaggcgaggattattatatcgttatttcgattttcgagtggttttcgggcggcgtatttattattttcgtgatttgaaaaattggtcgttggttagtattcgttggatcgcgtgtcgatgttggatatgaagggtaattcggatttcggggtatttgggcgtcgtgtttgagttacgtcgacggtaaattttggttgtttatatcgacgtgaagattgtcgattcgtcgtggaaaaacggtcgtaatttttcgttatcgcgttttttatcgaggggttatggagcgagttaattttatgggtaacggcgggtttgattcgtttttgttttacgacgacgatggtttaaatattatatttatcgttcgtgggggtcgcgttattatagtaattcgataatattatcgtgttataggcgtttgattcgtagatcggtacgtttttttcgagcgtaatacgttgtttatcggtacgtcgttttgttatatcgaagcgcgtatttgtatcgttacgcgggatggtattatttgatggtcgtcgaggcggtattagttacgagtacgttttcgtggtgttgcgttttaaaaatatgacgggtcgtacgagttgtattcggacgtaacgatgatgattagttggttttgtcggagaattcgttgtagaagagcggttacggttcgttgttgtagcgtatacgggtgaatggtatatggtttattttattagtcgttcgttgcgttgttcggcgtgtcgttgttggttttcggcggacgcggttattgttcgcggggcgcgagatcggtatcgttcgtattgaatggcgcgacggttggtcgacgtggaaggcggtaagtacgcgtagttgatcgtgaaaggttcgtaagtgtcgagtagtttgtagtcgtttcgggtaattggcgggacgatttcgacgtagttcgtttgattcggagttgtagattttgcgtatttcgttcgacgatttttcggttcgtttatcgcgcgttcgggttttttacggatcgggatttttagagttatatatgagagtgatatattattatattttaggttttt

SEQ ID NO: 5814 - DNA, 1360 bp, Artificial Sequence
  chemically treated genomic DNA (Homo sapiens) CpG-island No: 5814
aaaaacctaaaatataataatatatcactctcatatataactctaaaaatcccgatccgtaaaaaacccgaacgcgcgataaacgaaccgaaaaatcgtcgaacgaaatacgcaaaatctacaactccgaatcaaacgaactacgtcgaaatcgtcccgccaattacccgaaacgactacaaactactcgacacttacgaacctttcacgatcaactacgcgtacttaccgccttccacgtcgaccaaccgtcgcgccattcaatacgaacgataccgatctcgcgccccgcgaacaataaccgcgtccgccgaaaaccaacaacgacacgccgaacaacgcaacgaacgactaataaaataaaccatataccattcacccgtatacgctacaacaacgaaccgtaaccgctcttctacaacgaattctccgacaaaaccaactaatcatcatcgttacgtccgaatacaactcgtacgacccgtcatatttttaaaacgcaacaccacgaaaacgtactcgtaactaataccgcctcgacgaccatcaaataataccatcccgcgtaacgatacaaatacgcgcttcgatataacaaaacgacgtaccgataaacaacgtattacgctcgaaaaaaacgtaccgatctacgaatcaaacgcctataacacgataatattatcgaattactataataacgcgacccccacgaacgataaatataatatttaaaccatcgtcgtcgtaaaacaaaaacgaatcaaacccgccgttacccataaaattaactcgctccataacccctcgataaaaaacgcgataacgaaaaattacgaccgtttttccacgacgaatcgacaatcttcacgtcgatataaacaaccaaaatttaccgtcgacgtaactcaaacacgacgcccaaataccccgaaatccgaattacccttcatatccaacatcgacacgcgatccaacgaatactaaccaacgaccaatttttcaaatcacgaaaataataaatacgccgcccgaaaaccactcgaaaatcgaaataacgatataataatcctcgcctaacgacacaaaaacgaatccgaattaaaaccgataaatatcgaattaaaatttccatattacctccgattaataaaatacgactatcgcgacgtcgaaacgacctcgccctacgccgcgcgatacttaatcaactaccgactaatacctccacgcgaacatcgataaacttataaaacgacaacataataaacatcccgcgtaaaacaccaccgacaccacgcaaaacaaaattttaataataaaaacacctcaaccgactacacgctactactaacgaaataat

SEQ ID NO: 5815 - DNA, 1360 bp, Artificial Sequence
  chemically treated genomic DNA (Homo sapiens) CpG-island No: 5815
aaaaatttagaatatgatgatatattatttttatatatgattttagagatttcggttcgtaagaagttcgggcgcgcggtgagcgagtcgaggggtcgtcgaacggaatgcgtagggtttgtagtttcgggttaagcgaattgcgtcgaaatcgtttcgttagttgttcggaacggttgtaggttgttcggtatttgcgggttttttacggttagttgcgcgtgtttgtcgttttttacgtcggttagtcgtcgcgttatttaatgcgggcgatgtcggtttcgcgtttcgcgggtagtagtcgcgttcgtcggaggttagtagcggtacgtcgggtagcgtagcgggcggttggtgaggtaggttatgtattatttattcgtatgcgttgtagtagcgagtcgtggtcgtttttttgtagcgggtttttcggtagggttagttggttattatcgttacgttcgggtgtagttcgtacggttcgttatatttttggaacgtagtattacgaaggcgtgttcgtagttggtgtcgtttcggcggttattaggtagtattatttcgcgtggcgatataggtgcgcgtttcggtgtagtagagcggcgtgtcggtaaatagcgtattgcgttcggggagagcgtgtcggtttgcgggttaaacgtttgtaatacgatggtgttgtcgggttgttgtggtggcgcggtttttacgggcggtagatatagtatttgggttatcgtcgtcgtggaatagggacgggttaaattcgtcgttgtttatgggattggttcgttttatggtttttcgatggagggcgcggtgacgaggagttgcggtcgtttttttacggcgagtcgataatttttacgtcggtgtaggtagttagaatttatcgtcggcgtagtttaggtacggcgtttagatgtttcggagttcgggttgttttttatgtttagtatcgatacgcggtttaacgggtgttgattagcgattagttttttaggttacgggagtggtagatgcgtcgttcgggaattattcgaaggtcgaggtggcgatgtagtagttttcgtttggcggtatagggacgggttcgggttgaagtcggtgagtatcgggttaggatttttatattgttttcggttaatgggatgcggttgtcgcggcgtcggaacggtttcgttttgcgtcgcgcggtgtttaattagttgtcggttgatgtttttacgcgggtatcggtgagtttgtagagcgatagtatgatgaatatttcgcgtagagtattatcggtattacgtagaatagaattttgatggtgggagtattttaatcggttgtacgttgttgttggcggaatagt

SEQ ID NO: 5816 - DNA, 1360 bp, Artificial Sequence
  chemically treated genomic DNA (Homo sapiens) CpG-island No: 5816
actattccgccaacaacaacgtacaaccgattaaaatactcccaccatcaaaattctattctacgtaataccgataatactctacgcgaaatattcatcatactatcgctctacaaactcaccgatacccgcgtaaaaacatcaaccgacaactaattaaacaccgcgcgacgcaaaacgaaaccgttccgacgccgcgacaaccgcatcccattaaccgaaaacaatataaaaatcctaacccgatactcaccgacttcaacccgaacccgtccctataccgccaaacgaaaactactacatcgccacctcgaccttcgaataattcccgaacgacgcatctaccactcccgtaacctaaaaaactaatcgctaatcaacacccgttaaaccgcgtatcgatactaaacataaaaaacaacccgaactccgaaacatctaaacgccgtacctaaactacgccgacgataaattctaactacctacaccgacgtaaaaattatcgactcgccgtaaaaaaacgaccgcaactcctcgtcaccgcgccctccatcgaaaaaccataaaacgaaccaatcccataaacaacgacgaatttaacccgtccctattccacgacgacgataacccaaatactatatctaccgcccgtaaaaaccgcgccaccacaacaacccgacaacaccatcgtattacaaacgtttaacccgcaaaccgacacgctctccccgaacgcaatacgctatttaccgacacgccgctctactacaccgaaacgcgcacctatatcgccacgcgaaataatactacctaataaccgccgaaacgacaccaactacgaacacgccttcgtaatactacgttccaaaaatataacgaaccgtacgaactacacccgaacgtaacgataataaccaactaaccctaccgaaaaacccgctacaaaaaaacgaccacgactcgctactacaacgcatacgaataaataatacataacctacctcaccaaccgcccgctacgctacccgacgtaccgctactaacctccgacgaacgcgactactacccgcgaaacgcgaaaccgacatcgcccgcattaaataacgcgacgactaaccgacgtaaaaaacgacaaacacgcgcaactaaccgtaaaaaacccgcaaataccgaacaacctacaaccgttccgaacaactaacgaaacgatttcgacgcaattcgcttaacccgaaactacaaaccctacgcattccgttcgacgacccctcgactcgctcaccgcgcgcccgaacttcttacgaaccgaaatctctaaaatcatatataaaaataatatatcatcatattctaaattttt

SEQ ID NO: 5817 - DNA, 687 bp, Artificial Sequence
  chemically treated genomic DNA (Homo sapiens) CpG-island No: 5817
  unsure (10, 22..23, 27, 58, 70, 124, 126, 148, 185, 190, 301, 321)
  unsure (399..400, 439..440, 457, 594)
gggcgggggnggcggggggggnngggngggggggtcgggggggcgggaaggggggggncggcgggggggnggggtcggggcgtttcggtcggggggggtcgggcgcgtcgcgggggcggggcgntncgcgggggtcggcgcggggcgnttcggggcgggcgggggcgggcgtcgggtcggggggngggtnggtcgtttcgggggcggcgcggggggcggggcgggggcgggggggggtcgttcgggtcgggcgcggggggcgggggggcgttcgcgcggggggtcggggcgcgcgtcgcgnggcggcggcgggggcgggtngcgggggcgcggcggggcggggcgcgcgcgggggggggcgcgggcgggcgggggggcgggcgcgggggggggcgcggnntcggttttcgggcggggcgggcgggcgttcgggggtcgnnggggttcggggggcgtntcgggcgtcggggcgggttcgcgttcgggcggggcgggggcgtcggggcgcggggggggggcggggggttcggggttcgcggcggcgggcggggggcggggtcggcgcggggggggggggtcgcgcggtcggtcgtnggcggggcgtttcggtcgggcgcgggcggggggggtagtttttatgtttgtaggtcgtgttgttttaagttggagtgtgtggtgtgattatag

SEQ ID NO: 5818 - DNA, 687 bp, Artificial Sequence
  chemically treated genomic DNA (Homo sapiens) CpG-island No: 5818
  unsure (94, 231, 248..249, 288..289, 367, 387, 498, 503, 540, 562)
  unsure (564, 618, 630, 661, 665..666, 678)
ctataatcacaccacacactccaacttaaaacaacacgacctacaaacataaaaactaccccccccgcccgcgcccgaccgaaacgccccgccnacgaccgaccgcgcgaccccccccccccgcgccgaccccgccccccgcccgccgccgcgaaccccgaaccccccgccccccccccgcgccccgacgcccccgccccgcccgaacgcgaacccgccccgacgcccganacgccccccgaaccccnncgacccccgaacgcccgcccgccccgcccgaaaaccgannccgcgcccccccccgcgcccgcccccccgcccgcccgcgcccccccccgcgcgcgccccgccccgccgcgcccccgcnacccgcccccgccgccgccncgcgacgcgcgccccgaccccccgcgcgaacgcccccccgccccccgcgcccgacccgaacgacccccccccgcccccgccccgccccccgcgccgcccccgaaacgaccnacccnccccccgacccgacgcccgcccccgcccgccccgaancgccccgcgccgacccccgcgnancgccccgcccccgcgacgcgcccgaccccccccgaccgaaacgccccgaccccncccccccgccgnccccccccttcccgcccccccgacccccccncccnnccccccccgccncccccgccc

SEQ ID NO: 5819 - DNA, 687 bp, Artificial Sequence
  chemically treated genomic DNA (Homo sapiens) CpG-island No: 5819
  unsure (94, 231, 248..249, 288..289, 367, 387, 498, 503, 540, 562)
  unsure (564, 618, 630, 661, 665..666, 678)
ttgtgattatattatatattttagtttgaggtaatacgatttgtaggtatgaaagttgtttttttcgttcgcgttcggtcggggcgtttcgttngcggtcggtcgcgcggtttttttttttcgcgtcggtttcgtttttcgttcgtcgtcgcgggtttcgggtttttcgtttttttttcgcgtttcggcgttttcgtttcgttcgggcgcgggttcgtttcggcgttcggngcgtttttcgggttttnncggttttcgggcgttcgttcgtttcgttcgggggtcggnntcgcgttttttttcgcgttcgttttttcgttcgttcgcgttttttttcgcgcgcgtttcgtttcgtcgcgttttcgtngttcgttttcgtcgtcgttncgcggcgcgcgtttcggtttttcgcgcgggcgttttttcgtttttcgcgttcggttcgggcggttttttttcgttttcgtttcgtttttcgcgtcgttttcggggcggttngtttntttttcggttcggcgttcgttttcgttcgtttcgggncgtttcgcgtcggttttcgcgngncgtttcgttttcgcggcgcgttcggtttttttcggtcggggcgtttcggttttnttttttcgtcgnttttttttttttcgttttttcggtttttttntttnntttttttcgttnttttcgttt

SEQ ID NO: 5820 - DNA, 687 bp, Artificial Sequence
  chemically treated genomic DNA (Homo sapiens) CpG-island No: 5820
  unsure (10, 22..23, 27, 58, 70, 124, 126, 148, 185, 190, 301, 321)
  unsure (399..400, 439..440, 457, 594)
aaacgaaaanaacgaaaaaaannaaanaaaaaaaccgaaaaaacgaaaaaaaaaaaancgacgaaaaaanaaaaccgaaacgccccgaccgaaaaaaaccgaacgcgccgcgaaaacgaaacgncncgcgaaaaccgacgcgaaacgncccgaaacgaacgaaaacgaacgccgaaccgaaaaanaaacnaaccgccccgaaaacgacgcgaaaaacgaaacgaaaacgaaaaaaaaccgcccgaaccgaacgcgaaaaacgaaaaaacgcccgcgcgaaaaaccgaaacgcgcgccgcgnaacgacgacgaaaacgaacnacgaaaacgcgacgaaacgaaacgcgcgcgaaaaaaaacgcgaacgaacgaaaaaacgaacgcgaaaaaaaacgcgannccgacccccgaacgaaacgaacgaacgcccgaaaaccgnnaaaacccgaaaaacgcnccgaacgccgaaacgaacccgcgcccgaacgaaacgaaaacgccgaaacgcgaaaaaaaaacgaaaaacccgaaacccgcgacgacgaacgaaaaacgaaaccgacgcgaaaaaaaaaaaccgcgcgaccgaccgcnaacgaaacgccccgaccgaacgcgaacgaaaaaaacaactttcatacctacaaatcgtattacctcaaactaaaatatataatataatcacaa

SEQ ID NO: 5821 - DNA, 505 bp, Artificial Sequence
  chemically treated genomic DNA (Homo sapiens) CpG-island No: 5821
ggcgaagttcgggcggtgtagagagtcggggtatagagtaggtaggtgttaatggtatgggaaggaagagtaagaagtggggtaagaaggtgtcgcggtacgaggggaaggtgagatttaagaaggtgtcggttaagaagttggtgtcggcgtggaaggagaaggtgtggggcgaggaaataacgaagggcgaggaaagatttcgaggcgaagagatagtttttatcgagaaggggtagggcgaggaggaggggcgttattagagggcgggacggggcgacgggttcgcgcgggaagaattaatcgtcgagaattcggggaaggaacgggtttataaagattaagtggaggagtaggggcgcggttaggagcggaagtagagtgaggagtaagtttcgggcgagaaacgggggttcggtcgggagtaagagtaggggcggggtcgggagtaagagtagggcggggttcggagacgggcgagattaggtatagtatttagtttttg

SEQ ID NO: 5822 - DNA, 505 bp, Artificial Sequence
  chemically treated genomic DNA (Homo sapiens) CpG-island No: 5822
caaaaactaaatactatacctaatctcgcccgtctccgaaccccgccctactcttactcccgaccccgcccctactcttactcccgaccgaacccccgtttctcgcccgaaacttactcctcactctacttccgctcctaaccgcgcccctactcctccacttaatctttataaacccgttccttccccgaattctcgacgattaattcttcccgcgcgaacccgtcgccccgtcccgccctctaataacgcccctcctcctcgccctaccccttctcgataaaaactatctcttcgcctcgaaatctttcctcgcccttcgttatttcctcgccccacaccttctccttccacgccgacaccaacttcttaaccgacaccttcttaaatctcaccttcccctcgtaccgcgacaccttcttaccccacttcttactcttccttcccataccattaacacctacctactctataccccgactctctacaccgcccgaacttcgcc

SEQ ID NO: 5823 - DNA, 505 bp, Artificial Sequence
  chemically treated genomic DNA (Homo sapiens) CpG-island No: 5823
taggggttgggtattgtatttggtttcgttcgttttcgggtttcgttttgtttttgttttcggtttcgtttttgtttttgttttcggtcgggttttcgtttttcgttcggggtttgttttttattttgttttcgtttttgatcgcgtttttatttttttatttggtttttatggattcgtttttttttcgggttttcggcgattggtttttttcgcgcgggttcgtcgtttcgtttcgttttttggtaacgtttttttttttcgttttgttttttttcgatgaaaattgttttttcgtttcgggattttttttcgtttttcgttgttttttcgttttatattttttttttttacgtcggtattagttttttagtcggtatttttttgagttttatttttttttcgtatcgcgatatttttttgttttattttttattttttttttttatgttattaatatttgtttgttttatatttcgattttttgtatcgttcggatttcgtt

SEQ ID NO: 5824 - DNA, 505 bp, Artificial Sequence
  chemically treated genomic DNA (Homo sapiens) CpG-island No: 5824
aacgaaatccgaacgatacaaaaaatcgaaatataaaacaaacaaatattaataacataaaaaaaaaaaataaaaaataaaacaaaaaaatatcgcgatacgaaaaaaaaataaaactcaaaaaaataccgactaaaaaactaataccgacgtaaaaaaaaaaaatataaaacgaaaaaacaacgaaaaacgaaaaaaaatcccgaaacgaaaaaacaattttcatcgaaaaaaaacaaaacgaaaaaaaaaaacgttaccaaaaaacgaaacgaaacgacgaacccgcgcgaaaaaaaccaatcgccgaaaacccgaaaaaaaaacgaatccataaaaaccaaataaaaaaataaaaacgcgatcaaaaacgaaaacaaaataaaaaacaaaccccgaacgaaaaacgaaaacccgaccgaaaacaaaaacaaaaacgaaaccgaaaacaaaaacaaaacgaaacccgaaaacgaacgaaaccaaatacaatacccaaccccta

SEQ ID NO: 5825 - DNA, 757 bp, Artificial Sequence
  chemically treated genomic DNA (Homo sapiens) CpG-island No: 5825
cggcggggcggaatagtcgaggaataggggttggtagaatattttaaggttgggggcggataattataaggtgcgattatacgaggggggggcgggttagatataatagggcgaacggattatttaaagcgatttagataaaaaaggcgggtaaatttttcgggtagtcggataaaaaggcggataaataagggtcggtggaagtttgtatgtttgtaggtttaggcgcggacgatagttattgtcgaaaattattttttcgtcgttggcgcggtattcgcgtagtagggaaagtagtttttcgcggttggtcgggtttaagatcgttaggttaatttcgtttaggtagagataatcgaaattcgttagtttttcgtaaatcgtcgtagattgtttattttttagttagaatttggcggcggtttcgtttcgttagtagtagaacgtacgttcgtcggtgttgtcggttttaatgtagtaaaggttcggtagacggttttttattcgttgggttagggaagtattaacgttttcgtcgtgttaggcgtttagtatttgttggttaaaattgttcgtttttagcgtcgttacgtaatgaacggttaatgtcgtaggatcgatttgacgggcgatatagacggaagtgtttagggtatcgtcgtcgaaatcgcgtttaacgttcgcgtttttttcggaaagtttaattatgtattcgttaattacggtaatttttttggatatagtcgtgaatttgatt

SEQ ID NO: 5826 - DNA, 757 bp, Artificial Sequence
  chemically treated genomic DNA (Homo sapiens) CpG-island No: 5826
aatcaaattcacgactatatccaaaaaaattaccgtaattaacgaatacataattaaactttccgaaaaaaacgcgaacgttaaacgcgatttcgacgacgataccctaaacacttccgtctatatcgcccgtcaaatcgatcctacgacattaaccgttcattacgtaacgacgctaaaaacgaacaattttaaccaacaaatactaaacgcctaacacgacgaaaacgttaatacttccctaacccaacgaataaaaaaccgtctaccgaacctttactacattaaaaccgacaacaccgacgaacgtacgttctactactaacgaaacgaaaccgccgccaaattctaactaaaaaataaacaatctacgacgatttacgaaaaactaacgaatttcgattatctctacctaaacgaaattaacctaacgatcttaaacccgaccaaccgcgaaaaactactttccctactacgcgaataccgcgccaacgacgaaaaaataattttcgacaataactatcgtccgcgcctaaacctacaaacatacaaacttccaccgacccttatttatccgcctttttatccgactacccgaaaaatttacccgccttttttatctaaatcgctttaaataatccgttcgccctattatatctaacccgcccccccctcgtataatcgcaccttataattatccgcccccaaccttaaaatattctaccaacccctattcctcgactattccgccccgccg

SEQ ID NO: 5827 - DNA, 757 bp, Artificial Sequence
  chemically treated genomic DNA (Homo sapiens) CpG-island No: 5827
gattaggtttacgattatgtttaaaaagattgtcgtgattggcgaatgtatgattgagtttttcgagaaaggcgcggacgttaagcgcggtttcggcggcgatattttgaatattttcgtttatatcgttcgttaggtcgattttgcggtattaatcgtttattacgtaacggcgttgggaacggatagttttagttagtagatgttggacgtttggtacggcgagaacgttgatatttttttgatttaacggatggaaaatcgtttgtcgggtttttattatattgaaatcgatagtatcggcgagcgtacgttttattattggcggaacgaagtcgtcgttaaattttggttggagagtgagtagtttgcggcgatttgcgaagagttggcgaatttcgattatttttatttgagcgggattagtttggcgattttaagttcgattagtcgcgaaaagttgttttttttgttgcgcgaatgtcgcgttaacggcggaaaagtgattttcgataataattatcgttcgcgtttggatttgtaggtatgtaaatttttatcgatttttgtttgttcgtttttttgttcggttgttcgaagaatttattcgttttttttgtttgggtcgttttgaatggttcgttcgttttgttatgtttggttcgtttttttttcgtgtaatcgtattttgtaattgttcgtttttagttttaaaatgttttgttaatttttgtttttcggttgtttcgtttcgtcg

SEQ ID NO: 5828 - DNA, 757 bp, Artificial Sequence
  chemically treated genomic DNA (Homo sapiens) CpG-island No: 5828
cgacgaaacgaaacaaccgaaaaacaaaaattaacaaaacattttaaaactaaaaacgaacaattacaaaatacgattacacgaaaaaaaaacgaaccaaacataacaaaacgaacgaaccattcaaaacgacccaaacaaaaaaaacgaataaattcttcgaacaaccgaacaaaaaaacgaacaaacaaaaatcgataaaaatttacatacctacaaatccaaacgcgaacgataattattatcgaaaatcacttttccgccgttaacgcgacattcgcgcaacaaaaaaaacaacttttcgcgactaatcgaacttaaaatcgccaaactaatcccgctcaaataaaaataatcgaaattcgccaactcttcgcaaatcgccgcaaactactcactctccaaccaaaatttaacgacgacttcgttccgccaataataaaacgtacgctcgccgatactatcgatttcaatataataaaaacccgacaaacgattttccatccgttaaatcaaaaaaatatcaacgttctcgccgtaccaaacgtccaacatctactaactaaaactatccgttcccaacgccgttacgtaataaacgattaataccgcaaaatcgacctaacgaacgatataaacgaaaatattcaaaatatcgccgccgaaaccgcgcttaacgtccgcgcctttctcgaaaaactcaatcatacattcgccaatcacgacaatctttttaaacataatcgtaaacctaatc

SEQ ID NO: 5829 - DNA, 584 bp, Artificial Sequence
  chemically treated genomic DNA (Homo sapiens) CpG-island No: 5829
ggacggggatggggttgtagagtgttatggttcgcgttttttgcgttattgattgtttgtatattttttgcgtttcgggttgttcgttttgtcggttgttttcggtttttcgttcgttttcgttgtttacgattatttcggcggttgtttcggagttttttttttcgtagcgggtcggtatttcgttttcgaagcgggttattttgtaaagagtaaagggtttcgggttacgttgcggcgaacgatgcggaagacgtcgtcgtcgtcgtcgtcgtcgttgatgttgaggttgtcggggttgggagcgcggcggttggagttacgattgcggagacgttttacggtttagtttatcgggcggcggcggttcggcgtttcgggtcgggggtttagaaggcggttgttcgggtcgagtcggggatagtagttcgggatatttttttggttgatttcggagaaggaggggcgggaggagggtgcgggggcggggcgcgggggttcggggaggaggggggaggggagagagaagcgaggtaaaaaataatcgaggaaggaatttaggtaatttttagtttatttatttt

SEQ ID NO: 5830 - DNA, 584 bp, Artificial Sequence
  chemically treated genomic DNA (Homo sapiens) CpG-island No: 5830
aaaataaataaactaaaaattacctaaattccttcctcgattattttttacctcgcttctctctcccctcccccctcctccccgaacccccgcgccccgcccccgcaccctcctcccgcccctccttctccgaaatcaaccaaaaaaatatcccgaactactatccccgactcgacccgaacaaccgccttctaaacccccgacccgaaacgccgaaccgccgccgcccgataaactaaaccgtaaaacgtctccgcaatcgtaactccaaccgccgcgctcccaaccccgacaacctcaacatcaacgacgacgacgacgacgacgacgtcttccgcatcgttcgccgcaacgtaacccgaaaccctttactctttacaaaataacccgcttcgaaaacgaaataccgacccgctacgaaaaaaaaaactccgaaacaaccgccgaaataatcgtaaacaacgaaaacgaacgaaaaaccgaaaacaaccgacaaaacgaacaacccgaaacgcaaaaaatatacaaacaatcaataacgcaaaaaacgcgaaccataacactctacaaccccatccccgtcc

SEQ ID NO: 5831 - DNA, 584 bp, Artificial Sequence
  chemically treated genomic DNA (Homo sapiens) CpG-island No: 5831
ggagtgggtggattggggattgtttggatttttttttcggttattttttgtttcgtttttttttttttttttttttttttttcgggttttcgcgtttcgttttcgtatttttttttcgttttttttttttcggggttagttaggaagatgtttcgagttgttattttcggttcggttcgggtagtcgttttttgagttttcgattcgaggcgtcgagtcgtcgtcgttcgatgggttgggtcgtggagcgttttcgtagtcgtagttttagtcgtcgcgtttttagtttcggtagttttagtattagcggcggcggcggcggcggcggcgtttttcgtatcgttcgtcgtagcgtaattcggagttttttgttttttgtagaatggttcgtttcggagacgagatgtcggttcgttacgggggaggaggtttcggggtagtcgtcggggtggtcgtgggtagcggaggcgggcgaggagtcgggggtagtcggtagggcgggtagttcggggcgtaaaggatgtataagtagttaatggcgtagagagcgcggattatggtattttataattttattttcgttt

SEQ ID NO: 5832 - DNA, 584 bp, Artificial Sequence
  chemically treated genomic DNA (Homo sapiens) CpG-island No: 5832
aaacgaaaataaaattataaaataccataatccgcgctctctacgccattaactacttatacatcctttacgccccgaactacccgccctaccgactacccccgactcctcgcccgcctccgctacccacgaccaccccgacgactaccccgaaacctcctcccccgtaacgaaccgacatctcgtctccgaaacgaaccattctacaaaaaacaaaaaactccgaattacgctacgacgaacgatacgaaaaacgccgccgccgccgccgccgccgctaatactaaaactaccgaaactaaaaacgcgacgactaaaactacgactacgaaaacgctccacgacccaacccatcgaacgacgacgactcgacgcctcgaatcgaaaactcaaaaaacgactacccgaaccgaaccgaaaataacaactcgaaacatcttcctaactaaccccgaaaaaaaaaaaacgaaaaaaaaatacgaaaacgaaacgcgaaaacccgaaaaaaaaaaaaaaaaaaaaaaaaaaacgaaacaaaaaataaccgaaaaaaaaatccaaacaatccccaatccacccactcc

SEQ ID NO: 5833 - DNA, 562 bp, Artificial Sequence
  chemically treated genomic DNA (Homo sapiens) CpG-island No: 5833
  unsure (529, 540, 548, 559..)
cgtcgtcgcgttaatggtaaacgttagtttagtaggtttcgtatcgattatcgttagattttttttttgtacggcgggaaggattggtattttggtttcgtggtaggcgcgaggatttattaggtacgaggtgattttgttaacgaagatttgatcgagataggtttgattgtagttaatataagtgttgattttatcggttcgtttcgattgcgtttttgatagtagtttcgtattagtaagaaacggtcgcgttatcgatattatatcggtatcgtcgcgcgagagaatatcgtcggtaatttgcggatcgttaattcggttggtggttattagcggtagcgagacgtggttttttagtttgcgcgtgatttatttaaatgcgtcgcgcggtacgggcgtggtaatggtcggaatacgtgttttatgttagttaatgtcggtgttgataatggtcgcgttcgtcgttttaatggtttgcgttagttttatcgtttcggtaaaagtttcgtcgttttcgattaagttncggggaggaantttgattnattttagaaannnt

SEQ ID NO: 5834 - DNA, 562 bp, Artificial Sequence
  chemically treated genomic DNA (Homo sapiens) CpG-island No: 5834
  unsure (2..3, 15, 23, 34)
annntttctaaaatnaatcaaanttcctccccgnaacttaatcgaaaacgacgaaacttttaccgaaacgataaaactaacgcaaaccattaaaacgacgaacgcgaccattatcaacaccgacattaactaacataaaacacgtattccgaccattaccacgcccgtaccgcgcgacgcatttaaataaatcacgcgcaaactaaaaaaccacgtctcgctaccgctaataaccaccaaccgaattaacgatccgcaaattaccgacgatattctctcgcgcgacgataccgatataatatcgataacgcgaccgtttcttactaatacgaaactactatcaaaaacgcaatcgaaacgaaccgataaaatcaacacttatattaactacaatcaaacctatctcgatcaaatcttcgttaacaaaatcacctcgtacctaataaatcctcgcgcctaccacgaaaccaaaataccaatccttcccgccgtacaaaaaaaaaatctaacgataatcgatacgaaacctactaaactaacgtttaccattaacgcgacgacg

SEQ ID NO: 5835 - DNA, 562 bp, Artificial Sequence
  chemically treated genomic DNA (Homo sapiens) CpG-island No: 5835
  unsure (2..3, 15, 23, 34)
annntttttagggtnaattaaanttttttttcgngatttggtcgaagacggcgggatttttgtcgaaacggtagagttggcgtaggttattgaagcggcgggcgcgattattattaatatcggtattggttggtatgaagtacgtatttcgattattgttacgttcgtgtcgcgcggcgtatttagatgggttacgcgtaaattgaaaggttacgtttcgttgtcgttggtaattattaatcggattaacgattcgtaggttgtcgacgatattttttcgcgcggcgatgtcgatatggtatcgatggcgcgatcgttttttgttgatgcggagttgttgttaaaagcgtaatcgggacgagtcgatgagattaatatttgtattggttgtaattaggtttgtttcgattaaattttcgttggtaaagttatttcgtgtttggtgaattttcgcgtttgttacgaaattaaaatgttaatttttttcgtcgtgtagaaaaaaaatttggcggtggtcggtgcgggatttgttgggttggcgtttgttattaacgcggcggcg

SEQ ID NO: 5836 - DNA, 562 bp, Artificial Sequence
  chemically treated genomic DNA (Homo sapiens) CpG-island No: 5836
  unsure (529, 540, 548, 559..)
cgccgccgcgttaataacaaacgccaacccaacaaatcccgcaccgaccaccgccaaattttttttctacacgacgaaaaaaattaacattttaatttcgtaacaaacgcgaaaattcaccaaacacgaaataactttaccaacgaaaatttaatcgaaacaaacctaattacaaccaatacaaatattaatctcatcgactcgtcccgattacgcttttaacaacaactccgcatcaacaaaaaacgatcgcgccatcgataccatatcgacatcgccgcgcgaaaaaatatcgtcgacaacctacgaatcgttaatccgattaataattaccaacgacaacgaaacgtaacctttcaatttacgcgtaacccatctaaatacgccgcgcgacacgaacgtaacaataatcgaaatacgtacttcataccaaccaataccgatattaataataatcgcgcccgccgcttcaataacctacgccaactctaccgtttcgacaaaaatcccgccgtcttcgaccaaatcncgaaaaaaaantttaattnaccctaaaaannnt

SEQ ID NO: 5837 - DNA, 568 bp, Artificial Sequence
  chemically treated genomic DNA (Homo sapiens) CpG-island No: 5837
gcgcgcgggaaatatagtttttgagggtgtgagagttagtattttttatacgagcgttgcgaattggagttagtatgtgagacgagaatcgaacggtgggaaaagcggtttgtaaaagggtatcggcgttagtgtgaaattcgtttttatatttgcgtatagtagtgatcgattgtcgatcgaaacgcgatacgcgtatcgtgtaattttgagagtagttttcgatacgatatgttacgtaaatttgatcgatttttgttacgtatttaagtttttatttttcgcggtatgattattgatcgttttggtcgttcgttagcggtgagcgtgtcggtaaaagcgatttgggttgattcgaaagaagtgtatgacgttggcggtattagcgacggtgatcgttggaaggcgttggttaacgcgtttaatatttcgttggattagtttttagttcgtattaacgttaattcgaaagggcgttttatttatttggcgcgttaggtgaattttgatatggcggattatattaaaaaattgaaattgtcggggatttatttgcgtgaagaatttt

SEQ ID NO: 5838 - DNA, 568 bp, Artificial Sequence
  chemically treated genomic DNA (Homo sapiens) CpG-island No: 5838
aaaattcttcacgcaaataaatccccgacaatttcaattttttaatataatccgccatatcaaaattcacctaacgcgccaaataaataaaacgccctttcgaattaacgttaatacgaactaaaaactaatccaacgaaatattaaacgcgttaaccaacgccttccaacgatcaccgtcgctaataccgccaacgtcatacacttctttcgaatcaacccaaatcgcttttaccgacacgctcaccgctaacgaacgaccaaaacgatcaataatcataccgcgaaaaataaaaacttaaatacgtaacaaaaatcgatcaaatttacgtaacatatcgtatcgaaaactactctcaaaattacacgatacgcgtatcgcgtttcgatcgacaatcgatcactactatacgcaaatataaaaacgaatttcacactaacgccgatacccttttacaaaccgcttttcccaccgttcgattctcgtctcacatactaactccaattcgcaacgctcgtataaaaaatactaactctcacaccctcaaaaactatatttcccgcgcgc

SEQ ID NO: 5839 - DNA, 568 bp, Artificial Sequence
  chemically treated genomic DNA (Homo sapiens) CpG-island No: 5839
gagattttttacgtagatgaattttcggtagttttagttttttgatgtagttcgttatgttagggtttatttgacgcgttagataaataaagcgttttttcgggttggcgttaatgcgggttgaaagttgatttagcggaatattgagcgcgttagttagcgttttttagcggttatcgtcgttgatatcgttagcgttatgtatttttttcgggttagtttaaatcgtttttatcggtacgtttatcgttaacgggcgattagaacggttagtaattatgtcgcgggaggtggaaatttgggtacgtagtaagggtcgattaaatttgcgtgatatgtcgtgtcgaggattatttttaggattatacggtgcgcgtatcgcgtttcggtcggtagtcgattattgttgtgcgtaaatgtgagggcgggttttatattgacgtcgatgtttttttatagatcgttttttttatcgttcggttttcgttttatatgttggttttagttcgtagcgttcgtgtgaagagtgttggtttttatatttttaaaaattgtgtttttcgcgcgt

SEQ ID NO: 5840 - DNA, 568 bp, Artificial Sequence
  chemically treated genomic DNA (Homo sapiens) CpG-island No: 5840
acgcgcgaaaaacacaatttttaaaaatataaaaaccaacactcttcacacgaacgctacgaactaaaaccaacatataaaacgaaaaccgaacgataaaaaaaacgatctataaaaaaacatcgacgtcaatataaaacccgccctcacatttacgcacaacaataatcgactaccgaccgaaacgcgatacgcgcaccgtataatcctaaaaataatcctcgacacgacatatcacgcaaatttaatcgacccttactacgtacccaaatttccacctcccgcgacataattactaaccgttctaatcgcccgttaacgataaacgtaccgataaaaacgatttaaactaacccgaaaaaaatacataacgctaacgatatcaacgacgataaccgctaaaaaacgctaactaacgcgctcaatattccgctaaatcaactttcaacccgcattaacgccaacccgaaaaaacgctttatttatctaacgcgtcaaataaaccctaacataacgaactacatcaaaaaactaaaactaccgaaaattcatctacgtaaaaaatctc

SEQ ID NO: 5841 - DNA, 572 bp, Artificial Sequence
  chemically treated genomic DNA (Homo sapiens) CpG-island No: 5841
gtagtttttgtcgtttcgtttatttgtatatggtaggtttcgtttttagcgtttagtttcgttatatcgtttattattagtacgcggtagttcggtattttagttagtatttggattgttgtagttattgaatcgatattggcgttgtaggagtcgtcgagtagtaattggttttttgttagttggatggggaatagacggtttggaatagtttttagatttgttagtttcgttttgatagtattaagcgttgcgtttacggatatggagagcgtagcggttgttagcgtattcgtaatattgtgacgtttcggtaacggtagtagaatatcgacgttatcggttggggtttgtagggtaaatttcgtatcgtgcgaggttatatggatattggtggcggtgaaatcgttgttggcggtattgggtgagaaacgttatattttgcgtgagttaattacgttttgttagtttagttagtcgttgttgttcgcgtttataatggcgatatcgttttttgtacgtttattttaaggatttttttgttgtttgttgaaattttaataatatgtaga

SEQ ID NO: 5842 - DNA, 572 bp, Artificial Sequence
  chemically treated genomic DNA (Homo sapiens) CpG-island No: 5842
tctacatattattaaaatttcaacaaacaacaaaaaaatccttaaaataaacgtacaaaaaacgatatcgccattataaacgcgaacaacaacgactaactaaactaacaaaacgtaattaactcacgcaaaatataacgtttctcacccaataccgccaacaacgatttcaccgccaccaatatccatataacctcgcacgatacgaaatttaccctacaaaccccaaccgataacgtcgatattctactaccgttaccgaaacgtcacaatattacgaatacgctaacaaccgctacgctctccatatccgtaaacgcaacgcttaatactatcaaaacgaaactaacaaatctaaaaactattccaaaccgtctattccccatccaactaacaaaaaaccaattactactcgacgactcctacaacgccaatatcgattcaataactacaacaatccaaatactaactaaaataccgaactaccgcgtactaataataaacgatataacgaaactaaacgctaaaaacgaaacctaccatatacaaataaacgaaacgacaaaaactac

SEQ ID NO: 5843 - DNA, 572 bp, Artificial Sequence
  chemically treated genomic DNA (Homo sapiens) CpG-island No: 5843
tttgtatattgttggagttttagtaggtaataaggggatttttagagtaagcgtgtaggaggcggtatcgttattatgaacgcggataataacgattggttgaattggtagagcgtaattggtttacgtaaagtgtggcgttttttatttaatgtcgttaatagcgattttatcgttattaatatttatgtgatttcgtacggtacggaatttattttataaattttaatcggtagcgtcgatgttttgttgtcgttgtcggggcgttataatattgcgaatgcgttggtagtcgttgcgttttttatgttcgtgggcgtaacgtttgatgttattaaagcggggttggtaaatttgaaagttgttttaggtcgtttgttttttatttaattggtagaaaattagttgttgttcgacgatttttataacgttaatgtcggtttaatgattgtagtagtttaggtattggttgaaatgtcgggttatcgcgtgttggtggtgggcgatatggcggaattgggcgttgaaagcgaagtttgttatgtataggtgggcgaggcggtaaaagttgt

SEQ ID NO: 5844 - DNA, 572 bp, Artificial Sequence
  chemically treated genomic DNA (Homo sapiens) CpG-island No: 5844
acaacttttaccgcctcgcccacctatacataacaaacttcgctttcaacgcccaattccgccatatcgcccaccaccaacacgcgataacccgacatttcaaccaatacctaaactactacaatcattaaaccgacattaacgttataaaaatcgtcgaacaacaactaattttctaccaattaaataaaaaacaaacgacctaaaacaactttcaaatttaccaaccccgctttaataacatcaaacgttacgcccacgaacataaaaaacgcaacgactaccaacgcattcgcaatattataacgccccgacaacgacaacaaaacatcgacgctaccgattaaaatttataaaataaattccgtaccgtacgaaatcacataaatattaataacgataaaatcgctattaacgacattaaataaaaaacgccacactttacgtaaaccaattacgctctaccaattcaaccaatcgttattatccgcgttcataataacgataccgcctcctacacgcttactctaaaaatccccttattacctactaaaactccaacaatatacaaa

SEQ ID NO: 5845 - DNA, 1951 bp, Artificial Sequence
  chemically treated genomic DNA (Homo sapiens) CpG-island No: 5845
  unsure (1, 4, 8..9, 12, 14, 16, 18..19, 21..22, 31..32, 39, 42, 45)
  unsure (48..49, 54, 57..58, 66..67, 92, 94, 99, 104..105, 111..112)
  unsure (121, 128, 131..132, 147..148, 163, 166, 168..169, 172, 176)
  unsure (181, 186, 195, 202, 205, 217..218, 220, 223..224, 226, 228..229)
  unsure (231..232, 234, 239, 243..244, 247, 254, 256..257, 266, 281)
  unsure (285, 319, 322, 324, 329, 343..344, 348, 355..356, 391, 396)
  unsure (429, 447, 449, 456, 475, 485, 536, 546, 570, 572, 715, 739)
  unsure (1036, 1062, 1243, 1265, 1271, 1282, 1293, 1304, 1309, 1363)
  unsure (1368, 1382, 1384, 1388, 1391, 1437, 1440, 1454, 1467, 1555)
ncgncgtnngtngngntnntnncgcgtcgtnngcgtcgncgnttnganngcgtncgnncgcgtcgnngcgtcggcgcgtcgttcgcgcggtngntcgtngcgtnntcgttnngtttttcgntcgcgtnttnncggcgtcgggcgatnncgcgcggcgcgggtngtngnnttngttncgcgncggtngcgggcgtncgggcgngtncgcgcgcggcgnntnttnntntnntnnnngcgtncgtnnntntttcgtntnncgtcgcgtngtcgcgcggcgtcgntagntattagcgatagcgagtttcgcgcgacgacggtncgngngacgngtagtacgcgcgtnncgantacgcgnncgcgaatacgacgcgacgagcgacggcgtagcgangcggntagcgtacggcgacgtaagtaacgacgcgcgtnacgcgtagcgcgcgcgangngcgacgngagcgcgcgcgtagagtangcgcgtcgancgcgcgtcgattcgttcgcgcgcgcgcgcggcgagtacgtcgtacgcgtangcgcgcgcgntttcgttcgcgtagattcgcgcgngngtacgcgcgcgcgcgcgcgcgcgcgcgtacgcgcgcgtacgcgcgcgcgcgacgcgcgcgcgtagacgcgcgcgtacgagttcgcgcgcgcgcgcgcgcgcgcgcgcgcgcgcgcgcgcgcgcgcgcgtacgcgcgcgcgcgngcgcgcgcgcgcgcgcgcgcgcgngcgcgcgcgcgcgcgcgcgcgcgcgcgcgtatacgcgcgcgcgggcgcgcgcgcgcgtcgaggcgcgggcgcgcgcgcgcgcgcgcgcggacgcgcgcgcgtacgcgcgcgcgcgcgcgcgcgcgcgcgcgcgcgcgtacgtagcgcgcgcgagacgcgcgtagcgcgcgcgcgcgcgcgcgcgggcgcgtacgcgcgcgtacgcgcgggcgcgcgcgggcgcgcgcgcgcgcgcgcgcgcgtacgcgcgtacgcgcgcgcgcgcgcgcgcgcgcgcgcgcgcgcgcgcggacgcgngcgcgcgcgcgcgggcgcgcgcgagngcggcgcgcgcgtaggcgcgcgagcgcgcgcgcgcgcgcgcgcgcgtacgagcgcgcgcgcgcgcgcgcgcgcgcgcgcgcgcgcgcgtagcgagtacgaagtacgtagcgcgcgcgcgcgcgcgcgcgtacgcgcgcgcgcgtacgcgcgcgtacgcgcgatcgaagagcgcgcgcggangcgcgcgtagacgcgagcgcgnacgggngcgcgcgacgncgggagcggtngcgggcgcgtngcgangcgcgaagatacgcggatagcggagatagtcgacgcgtagatcgcgcgggcggngcgtngacgacgcgcgcgnangcgngtncgcggagcgtaggcgcgcgcgcggcgcgacggcggggcgcgggganggngcgcgcgcgtcgtnggcgtcgacgggngcgcgtagcgcgcgcgcgtagacgtatacgtatagggtatacggggcgcgggggggcgcggggacgcggacgcgtaagcgcgtcgatngcgcgggcgtttatgtttgtaggttcggcggtattagttattatggcggggattttcgaatcggcgttatatggcgtggcgattcgtttgaaacgttcgtttatcgttagttttattagcggttttatttgcggcgcggttgtcggtatggcggggtttgttagttatttaatggtagcgtcggggttatttattagcgtgtagtttttcgattcggcgaatttaatgagtatcgtttgggtgttcgcggttatggcgttggcggtggtgttgtcgtttatttttatattgttgttcggttttgaggatatttttgttgaggaagcggttgtttaggcgcgaaagtattagagcgtataatcgatcgtcgttaaagaagtaagttttaattgagga

SEQ ID NO: 5846 - DNA, 1951 bp, Artificial Sequence
  chemically treated genomic DNA (Homo sapiens) CpG-island No: 5846
  unsure (397, 485, 498, 512, 515, 561, 564, 568, 570, 584, 589, 643)
  unsure (648, 659, 670, 681, 687, 709, 890, 916, 1213, 1237, 1380)
  unsure (1382, 1406, 1416, 1467, 1477, 1496, 1503, 1505, 1523, 1556)
  unsure (1561, 1596..1597, 1604, 1608..1609, 1623, 1628, 1630, 1633)
  unsure (1667, 1671, 1686, 1695..1696, 1698, 1705, 1707..1708, 1713)
  unsure (1718..1719, 1721, 1723..1724, 1726, 1728..1729, 1732, 1734..1735)
  unsure (1747, 1750, 1757, 1766, 1771, 1776, 1780, 1783..1784, 1786)
  unsure (1789, 1804..1805, 1820..1821, 1824, 1831, 1840..1841, 1847..1848)
  unsure (1853, 1858, 1860, 1885..1886, 1894..1895, 1898, 1903..1904)
  unsure (1907, 1910, 1913, 1920..1921, 1930..1931, 1933..1934, 1936)
  unsure (1938, 1940, 1943..1944, 1948, 1951)
tcctcaattaaaacttacttctttaacgacgatcgattatacgctctaatactttcgcgcctaaacaaccgcttcctcaacaaaaatatcctcaaaaccgaacaacaatataaaaataaacgacaacaccaccgccaacgccataaccgcgaacacccaaacgatactcattaaattcgccgaatcgaaaaactacacgctaataaataaccccgacgctaccattaaataactaacaaaccccgccataccgacaaccgcgccgcaaataaaaccgctaataaaactaacgataaacgaacgtttcaaacgaatcgccacgccatataacgccgattcgaaaatccccgccataataactaataccgccgaacctacaaacataaacgcccgcgcnatcgacgcgcttacgcgtccgcgtccccgcgcccccccgcgccccgtataccctatacgtatacgtctacgcgcgcgcgctacgcgcncccgtcgacgccnacgacgcgcgcgcnccntccccgcgccccgccgtcgcgccgcgcgcgcgcctacgctccgcgnacncgcntncgcgcgcgtcgtcnacgcnccgcccgcgcgatctacgcgtcgactatctccgctatccgcgtatcttcgcgcntcgcnacgcgcccgcnaccgctcccgncgtcgcgcgcncccgtncgcgctcgcgtctacgcgcgcntccgcgcgcgctcttcgatcgcgcgtacgcgcgcgtacgcgcgcgcgcgtacgcgcgcgcgcgcgcgcgcgctacgtacttcgtactcgctacgcgcgcgcgcgcgcgcgcgcgcgcgcgcgcgcgcgctcgtacgcgcgcgcgcgcgcgcgcgcgctcgcgcgcctacgcgcgcgccgcnctcgcgcgcgcccgcgcgcgcgcgcncgcgtccgcgcgcgcgcgcgcgcgcgcgcgcgcgcgcgcgcgcgtacgcgcgtacgcgcgcgcgcgcgcgcgcgcgcccgcgcgcgcccgcgcgtacgcgcgcgtacgcgcccgcgcgcgcgcgcgcgcgcgctacgcgcgtctcgcgcgcgctacgtacgcgcgcgcgcgcgcgcgcgcgcgcgcgcgcgcgtacgcgcgcgcgtccgcgcgcgcgcgcgcgcgcgcccgcgcctcgacgcgcgcgcgcgcccgcgcgcgcgtatacgcgcgcgcgcgcgcgcgcgcgcgcgcgcncgcgcgcgcgcgcgcgcgcgcgcncgcgcgcgcgcgtacgcgcgcgcgcgcgcgcgcgcgcgcgcgcgcgcgcgcgcgcgcgcgaactcgtacgcgcgcgtctacgcgcgcgcgtcgcgcgcgcgcgtacgcgcgcgtacgcgcgcgcgcgcgcgcgcgcgcgtacncncgcgcgaatctacgcgaacgaaancgcgcgcgcntacgcgtacgacgtactcgccgcgcgcgcgcgcgaacgaatcgacgcgcgntcgacgcgcntactctacgcgcgcgctcncgtcgcncntcgcgcgcgctacgcgtnacgcgcgtcgttacttacgtcgccgtacgctanccgcntcgctacgccgtcgctcgtcgcgtcgtattcgcgnncgcgtantcgnnacgcgcgtactacncgtcncncgnaccgtcgtcgcgcgaaactcgctatcgctaatanctancgacgccgcgcgacnacgcgacgnnanacgaaanannnacgnacgcnnnnannanannaananncgccgcgcgcgnacncgcccgnacgcccgcnaccgncgcgnaacnaanncnacnacccgcgccgcgcgnnatcgcccgacgccgnnaanacgcgancgaaaaacnnaacgannacgcnacgancnaccgcgcgaacgacgcgccgacgcnncgacgcgnncgnacgcnntcnaancgncgacgcnnacgacgcgnnannancncnacnnacgncgn

SEQ ID NO: 5847 - DNA, 1951 bp, Artificial Sequence
  chemically treated genomic DNA (Homo sapiens) CpG-island No: 5847
  unsure (397, 485, 498, 512, 515, 561, 564, 568, 570, 584, 589, 643)
  unsure (648, 659, 670, 681, 687, 709, 890, 916, 1213, 1237, 1380)
  unsure (1382, 1406, 1416, 1467, 1477, 1496, 1503, 1505, 1523, 1556)
  unsure (1561, 1596..1597, 1604, 1608..1609, 1623, 1628, 1630, 1633)
  unsure (1667, 1671, 1686, 1695..1696, 1698, 1705, 1707..1708, 1713)
  unsure (1718..1719, 1721, 1723..1724, 1726, 1728..1729, 1732, 1734..1735)
  unsure (1747, 1750, 1757, 1766, 1771, 1776, 1780, 1783..1784, 1786)
  unsure (1789, 1804..1805, 1820..1821, 1824, 1831, 1840..1841, 1847..1848)
  unsure (1853, 1858, 1860, 1885..1886, 1894..1895, 1898, 1903..1904)
  unsure (1907, 1910, 1913, 1920..1921, 1930..1931, 1933..1934, 1936)
  unsure (1938, 1940, 1943..1944, 1948, 1951)
tttttaattaagatttatttttttggcgacggtcggttgtacgttttgatattttcgcgtttgggtagtcgtttttttaataggaatatttttaaagtcgagtaatagtgtgaggataaacgatagtattatcgttagcgttatgatcgcgaatatttagacgatgtttattggattcgtcggatcgaagaattgtacgttggtaaatagtttcggcgttgttattgagtggttggtaagtttcgttatatcggtaatcgcgtcgtaaataaaatcgttgataagattggcgataagcggacgttttaggcggatcgttacgttatataacgtcggttcggaaattttcgttataatggttgatgtcgtcggatttgtaggtatgggcgttcgcgtngtcggcgcgtttgcgcgttcgcgttttcgcgttttttcgcgtttcgtgtgttttgtgcgtgtgcgtttgcgcgcgcgcgttgcgcgtnttcgtcggcgttngcggcgcgcgcgtnttnttttcgcgtttcgtcgtcgcgtcgcgcgcgcgtttgcgtttcgcgngtncgtntncgcgcgcgtcgttngcgtntcgttcgcgcggtttgcgcgtcggttgttttcgttgttcgcgtgttttcgcgtntcgtngcgcgttcgtngtcgttttcgncgtcgcgcgtnttcgtncgcgttcgcgtttgcgcgcgtnttcgcgcgcgtttttcggtcgcgcgtgcgcgcgcgtgcgcgcgcgcgcgtgcgcgcgcgcgcgcgcgcgcgttgcgtgtttcgtgttcgttgcgcgcgcgcgcgcgcgcgcgcgcgcgcgcgcgcgcgttcgtgcgcgcgcgcgcgcgcgcgcgcgttcgcgcgtttgcgcgcgcgtcgtnttcgcgcgcgttcgcgcgcgcgcgtncgcgttcgcgcgcgcgcgcgcgcgcgcgcgcgcgcgcgcgcgcgtgcgcgcgtgcgcgcgcgcgcgcgcgcgcgcgttcgcgcgcgttcgcgcgtgcgcgcgcgtgcgcgttcgcgcgcgcgcgcgcgcgcgttgcgcgcgtttcgcgcgcgttgcgtgcgcgcgcgcgcgcgcgcgcgcgcgcgcgcgcgcgtgcgcgcgcgcgttcgcgcgcgcgcgcgcgcgcgttcgcgtttcggcgcgcgcgcgcgttcgcgcgcgcgtgtgcgcgcgcgcgcgcgcgcgcgcgcgcgcgtncgcgcgcgcgcgcgcgcgcgcgtncgcgcgcgcgcgtgcgcgcgcgcgcgcgcgcgcgcgcgcgcgcgcgcgcgcgcgcgcgcgggttcgtgcgcgcgcgtttgcgcgcgcgcgtcgcgcgcgcgcgtgcgcgcgcgtgcgcgcgcgcgcgcgcgcgcgcgcgtgtntncgcgcgggtttgcgcgggcggggncgcgcgcgtntgcgcgtgcggcgtgttcgtcgcgcgcgcgcgcgggcgggtcggcgcgcgntcggcgcgtntgttttgcgcgcgcgtttncgtcgtntntcgcgcgcgttgcgcgtngcgcgcgtcgttgtttgcgtcgtcgtgcgttgntcgtntcgttgcgtcgtcgttcgtcgcgtcgtgttcgcgnncgcgtgntcgnngcgcgcgtgttgtncgttntncgngtcgtcgtcgcgcggggttcgttgtcgttggtgnttgncggcgtcgcgcggtngcgcggcgnngngcggggngnnngcgngcgtnnnngnngngnnggngnncgtcgcgcgcgngtncgttcgngcgttcgtngtcgncgcgnggtnggnntngtngttcgcgtcgcgcgnngtcgttcggcgtcgnnggngcgcggncggggggtnnggcggnngcgtngcggntngtcgcgcgggcggcgcgtcggcgtnncggcgcgnncgngcgtnnttnggncgncggcgtnngcggcgcgnngnngntntngtnngcgncgn

SEQ ID NO: 5848 - DNA, 1951 bp, Artificial Sequence
  chemically treated genomic DNA (Homo sapiens) CpG-island No: 5848
  unsure (1, 4, 8..9, 12, 14, 16, 18..19, 21..22, 31..32, 39, 42, 45)
  unsure (48..49, 54, 57..58, 66..67, 92, 94, 99, 104..105, 111..112)
  unsure (121, 128, 131..132, 147..148, 163, 166, 168..169, 172, 176)
  unsure (181, 186, 195, 202, 205, 217..218, 220, 223..224, 226, 228..229)
  unsure (231..232, 234, 239, 243..244, 247, 254, 256..257, 266, 281)
  unsure (285, 319, 322, 324, 329, 343..344, 348, 355..356, 391, 396)
  unsure (429, 447, 449, 456, 475, 485, 536, 546, 570, 572, 715, 739)
  unsure (1036, 1062, 1243, 1265, 1271, 1282, 1293, 1304, 1309, 1363)
  unsure (1368, 1382, 1384, 1388, 1391, 1437, 1440, 1454, 1467, 1555)
ncgncgcnnacnanancnncnncgcgccgcnnacgccgncgnccnaannacgcncgnncgcgccgnnacgccgacgcgccgcccgcgcgacnanccgcnacgcnnccgccnnaccccccgnccgcgcnccnncgacgccgaacgacnncgcgcgacgcgaacnacnannccnaccncgcgncgacnacgaacgcncgaacgnacncgcgcgcgacgnncnccnncncnncnnnnacgcncgcnnncnccccgcncnncgccgcgcnaccgcgcgacgccgncaancaccaacgacaacgaaccccgcgcgacgacgacncgnanaacgnacaacacgcgcgcnncgancacgcgnncgcgaacacgacgcgacgaacgacgacgcaacganacgancaacgcacgacgacgcaaacaacgacgcgcgcnacgcgcaacgcgcgcgananacgacgnaaacgcgcgcgcaaaacanacgcgccgancgcgcgccgacccgcccgcgcgcgcgcgcgacgaacacgccgcacgcgcanacgcgcgcgnccccgcccgcgcaaacccgcgcgnanacacgcgcgcgcgcgcgcgcgcgcgcgcacgcgcgcgcacgcgcgcgcgcgacgcgcgcgcgcaaacgcgcgcgcacgaacccgcgcgcgcgcgcgcgcgcgcgcgcgcgcgcgcgcgcgcgcgcgcgcacgcgcgcgcgcgnacgcgcgcgcgcgcgcgcgcgcgnacgcgcgcgcgcgcgcgcgcgcgcgcgcgcacacgcgcgcgcgaacgcgcgcgcgcgccgaaacgcgaacgcgcgcgcgcgcgcgcgcgaacgcgcgcgcgcacgcgcgcgcgcgcgcgcgcgcgcgcgcgcgcgcgcacgcaacgcgcgcgaaacgcgcgcaacgcgcgcgcgcgcgcgcgcgaacgcgcacgcgcgcgcacgcgcgaacgcgcgcgaacgcgcgcgcgcgcgcgcgcgcgcacgcgcgcacgcgcgcgcgcgcgcgcgcgcgcgcgcgcgcgcgcgcgaacgcgnacgcgcgcgcgcgaacgcgcgcgaanacgacgcgcgcgcaaacgcgcgaacgcgcgcgcgcgcgcgcgcgcgcacgaacgcgcgcgcgcgcgcgcgcgcgcgcgcgcgcgcgcgcaacgaacacgaaacacgcaacgcgcgcgcgcgcgcgcgcgcacgcgcgcgcgcgcacgcgcgcgcacgcgcgaccgaaaaacgcgcgcgaanacgcgcgcaaacgcgaacgcgnacgaanacgcgcgacgncgaaaacgacnacgaacgcgcnacganacgcgaaaacacgcgaacaacgaaaacaaccgacgcgcaaaccgcgcgaacganacgcnaacgacgcgcgcgnanacgnacncgcgaaacgcaaacgcgcgcgcgacgcgacgacgaaacgcgaaaanaanacgcgcgcgccgcnaacgccgacgaanacgcgcaacgcgcgcgcgcaaacgcacacgcacaaaacacacgaaacgcgaaaaaacgcgaaaacgcgaacgcgcaaacgcgccgacnacgcgaacgcccatacctacaaatccgacgacatcaaccattataacgaaaatttccgaaccgacgttatataacgtaacgatccgcctaaaacgtccgcttatcgccaatcttatcaacgattttatttacgacgcgattaccgatataacgaaacttaccaaccactcaataacaacgccgaaactatttaccaacgtacaattcttcgatccgacgaatccaataaacatcgtctaaatattcgcgatcataacgctaacgataatactatcgtttatcctcacactattactcgactttaaaaatattcctattaaaaaaacgactacccaaacgcgaaaatatcaaaacgtacaaccgaccgtcgccaaaaaaataaatcttaattaaaaa

SEQ ID NO: 5849 - DNA, 594 bp, Artificial Sequence
  chemically treated genomic DNA (Homo sapiens) CpG-island No: 5849
gatgtcgtattatcgatgtggaacgtacgtatggttagttgtgtattcggtttatcgatggattgtgtcgcgataatatcgattgttttatttttgttgatgatgtggttacgcgttaggttacgatcgtagtagtgcgtatatatattaaagtcggtgttataagatataatagaacgtattttaatcgcgtcgatagagtttttttttagtaggttatattattgttcgtgtagtagcgtgttgcgcggaacgaggatattagtagtattcggttttagaacgtttttagtagttatacgatttagtacgcgatcgcgtagcggttttttaacgttattattttcgataatcggagttattatgatatttttatgggtattataatcgttttcggtaattattaggttttgcgttacgttaattagacgacgagttaggtaatcggagttcgtagtttttagtgcggtattcgttagatttttacgagtatcgtgggtggagatgaagtattggagtacgtttagatttttacggaagttcgcggtgattgggttaattttgtatgttttgtaggtttattaattaggtatg

SEQ ID NO: 5850 - DNA, 594 bp, Artificial Sequence
  chemically treated genomic DNA (Homo sapiens) CpG-island No: 5850
catacctaattaataaacctacaaaacatacaaaattaacccaatcaccgcgaacttccgtaaaaatctaaacgtactccaatacttcatctccacccacgatactcgtaaaaatctaacgaataccgcactaaaaactacgaactccgattacctaactcgtcgtctaattaacgtaacgcaaaacctaataattaccgaaaacgattataatacccataaaaatatcataataactccgattatcgaaaataataacgttaaaaaaccgctacgcgatcgcgtactaaatcgtataactactaaaaacgttctaaaaccgaatactactaatatcctcgttccgcgcaacacgctactacacgaacaataatataacctactaaaaaaaaactctatcgacgcgattaaaatacgttctattatatcttataacaccgactttaatatatatacgcactactacgatcgtaacctaacgcgtaaccacatcatcaacaaaaataaaacaatcgatattatcgcgacacaatccatcgataaaccgaatacacaactaaccatacgtacgttccacatcgataatacgacatc

SEQ ID NO: 5851 - DNA, 594 bp, Artificial Sequence
  chemically treated genomic DNA (Homo sapiens) CpG-island No: 5851
tatatttggttaatagatttgtagagtatgtaaggttgatttaattatcgcgaattttcgtgaaggtttgaacgtattttagtattttatttttatttacggtgttcgtaaaggtttggcggatatcgtattgaaaattgcgaatttcggttatttgattcgtcgtttggttgacgtggcgtaggatttggtggttatcgaagacgattgtggtatttatgaaggtattatgatgatttcggttatcgagggtggtgacgttaaagagtcgttgcgcgatcgcgtattgggtcgtgtaattgttgaagacgttttgaagtcgggtattgttgatattttcgtttcgcgtaatacgttgttgtacgaatagtggtgtgatttgttggaagagaattttgtcgacgcggttaaagtacgttttgttgtattttgtgatatcgattttggtgtatgtgcgtattgttacggtcgtgatttggcgcgtggttatattattaataagggtgaagtaatcggtgttatcgcggtatagtttatcggtgaatcgggtatatagttgattatgcgtacgttttatatcggtggtgcggtatt

SEQ ID NO: 5852 - DNA, 594 bp, Artificial Sequence
  chemically treated genomic DNA (Homo sapiens) CpG-island No: 5852
aataccgcaccaccgatataaaacgtacgcataatcaactatatacccgattcaccgataaactataccgcgataacaccgattacttcacccttattaataatataaccacgcgccaaatcacgaccgtaacaatacgcacatacaccaaaatcgatatcacaaaatacaacaaaacgtactttaaccgcgtcgacaaaattctcttccaacaaatcacaccactattcgtacaacaacgtattacgcgaaacgaaaatatcaacaatacccgacttcaaaacgtcttcaacaattacacgacccaatacgcgatcgcgcaacgactctttaacgtcaccaccctcgataaccgaaatcatcataataccttcataaataccacaatcgtcttcgataaccaccaaatcctacgccacgtcaaccaaacgacgaatcaaataaccgaaattcgcaattttcaatacgatatccgccaaacctttacgaacaccgtaaataaaaataaaatactaaaatacgttcaaaccttcacgaaaattcgcgataattaaatcaaccttacatactctacaaatctattaaccaaatata

SEQ ID NO: 5853 - DNA, 611 bp, Artificial Sequence
  chemically treated genomic DNA (Homo sapiens) CpG-island No: 5853
gttatagaggaggtttcggttaggtcggttacgttttcgacgtagagatagttttcgagtaggggttttacgcgggtggtgtttttttcgttttgttattttatagtggtttcgggcgttacgaggcgggcgttgggtcgtagtcgtaggtgtaggtttcggttaaagatcgtgatattgtagaagaggtgattgttaggttttttttcgttgttttcggggaagttcggggttcggatcggggcggttttgcgggttcgtatttttgttttggacgtagttgtcgatattacgtgggatattaagcggttttgggcgttagtgcgtacgggtatcgttaggatgcgtttcgtttcgtgttttaggggttcgtttgtaacgggaaggggcgttagatcggcggagattacggagttttagtgttttagagattcgtcggcgagttacgtttttttagatttcgttttattggcgaaggtaaggtgtattcggtaggcgaattttagagttaggttgtagttttttgcgtattgtatatagacgatatttttgcgagttcgtgatttgtttttttatttacgattatatattatttatatttttagacgtat

SEQ ID NO: 5854 - DNA, 611 bp, Artificial Sequence
  chemically treated genomic DNA (Homo sapiens) CpG-island No: 5854
atacgtctaaaaatataaataatatataatcgtaaataaaaaaacaaatcacgaactcgcaaaaatatcgtctatatacaatacgcaaaaaactacaacctaactctaaaattcgcctaccgaatacaccttaccttcgccaataaaacgaaatctaaaaaaacgtaactcgccgacgaatctctaaaacactaaaactccgtaatctccgccgatctaacgccccttcccgttacaaacgaacccctaaaacacgaaacgaaacgcatcctaacgatacccgtacgcactaacgcccaaaaccgcttaatatcccacgtaatatcgacaactacgtccaaaacaaaaatacgaacccgcaaaaccgccccgatccgaaccccgaacttccccgaaaacaacgaaaaaaaacctaacaatcacctcttctacaatatcacgatctttaaccgaaacctacacctacgactacgacccaacgcccgcctcgtaacgcccgaaaccactataaaataacaaaacgaaaaaaacaccacccgcgtaaaacccctactcgaaaactatctctacgtcgaaaacgtaaccgacctaaccgaaacctcctctataac

SEQ ID NO: 5855 - DNA, 611 bp, Artificial Sequence
  chemically treated genomic DNA (Homo sapiens) CpG-island No: 5855
gtgcgtttaaagatgtaggtggtgtgtagtcgtaagtgagaaggtagattacggattcgtaagagtatcgtttgtatgtagtgcgtaaagagttgtagtttggttttggggttcgtttgtcgaatgtattttgttttcgttagtggggcggggtttgggggggcgtggttcgtcggcgggtttttgaggtattggggtttcgtggttttcgtcgatttaacgttttttttcgttgtaggcgggtttttggggtacggagcggagcgtattttggcggtgttcgtgcgtattgacgtttagggtcgtttggtgttttacgtggtgtcggtagttacgtttagagtaggggtacgagttcgtagggtcgtttcggttcggatttcgagttttttcggaggtaacgaggaggagtttggtagttattttttttataatgttacggtttttggtcgagatttgtatttgcggttgcggtttaacgttcgtttcgtggcgttcggggttattatggagtggtagggcgagaagggtattattcgcgtggagtttttgttcgggagttgtttttacgtcggagacgtggtcggtttagtcgaagttttttttgtggt

SEQ ID NO: 5856 - DNA, 611 bp, Artificial Sequence
  chemically treated genomic DNA (Homo sapiens) CpG-island No: 5856
accacaaaaaaaacttcgactaaaccgaccacgtctccgacgtaaaaacaactcccgaacaaaaactccacgcgaataatacccttctcgccctaccactccataataaccccgaacgccacgaaacgaacgttaaaccgcaaccgcaaatacaaatctcgaccaaaaaccgtaacattataaaaaaaataactaccaaactcctcctcgttacctccgaaaaaactcgaaatccgaaccgaaacgaccctacgaactcgtacccctactctaaacgtaactaccgacaccacgtaaaacaccaaacgaccctaaacgtcaatacgcacgaacaccgccaaaatacgctccgctccgtaccccaaaaacccgcctacaacgaaaaaaaacgttaaatcgacgaaaaccacgaaaccccaatacctcaaaaacccgccgacgaaccacgcccccccaaaccccgccccactaacgaaaacaaaatacattcgacaaacgaaccccaaaaccaaactacaactctttacgcactacatacaaacgatactcttacgaatccgtaatctaccttctcacttacgactacacaccacctacatctttaaacgcac

SEQ ID NO: 5857 - DNA, 624 bp, Artificial Sequence
  chemically treated genomic DNA (Homo sapiens) CpG-island No: 5857
  unsure (543..544, 583, 587, 600, 602..603, 623)
tgtagttcggttgttatggattcgtcggcgggagtcgttcgtcgtttgttttgtttcgcgttgttgttgttgttgttgttgttgacgtcggcgtttttgtcgtcgtcggcgtcgttcgcgaacgttaggttcgtcgtcgtcgtcgattttttaggtaggtgcggttcggtttttatttttcgggattttcgtcggtttggttttgtttcgcgtgtttcgtcgttttttttttaggcgtcgtttagtttgatttgggtaaatttcgcgcgtttcgttcggggttaagttggttaatttcggggtcgggttggtcgcgtagggggcgtttcgtatcgttttcgagcgttttgggtcgggggagtttcggagtattggcggtttatgagtcgcggagggtggggacggagggtcgggaaaagtttcgcggttaagagcgtagagttagttttagcgggttcgaggggggagttagggcgaggcggcgtcggggttagcgttcggtaatttttcgttgggaagcgtacggtagtcgtattgatttgnnntacgagggttatacgtattcggaagttgcgcgattttnaatnttttcgcgttgananngatcgttttttttttttttnt

SEQ ID NO: 5858 - DNA, 624 bp, Artificial Sequence
  chemically treated genomic DNA (Homo sapiens) CpG-island No: 5858
  unsure (2, 22..23, 25, 38, 42, 80..)
anaaaaaaaaaaaaaacgatcnntntcaacgcgaaaanattnaaaatcgcgcaacttccgaatacgtataaccctcgtannncaaatcaatacgactaccgtacgcttcccaacgaaaaattaccgaacgctaaccccgacgccgcctcgccctaactcccccctcgaacccgctaaaactaactctacgctcttaaccgcgaaacttttcccgaccctccgtccccaccctccgcgactcataaaccgccaatactccgaaactcccccgacccaaaacgctcgaaaacgatacgaaacgccccctacgcgaccaacccgaccccgaaattaaccaacttaaccccgaacgaaacgcgcgaaatttacccaaatcaaactaaacgacgcctaaaaaaaaaacgacgaaacacgcgaaacaaaaccaaaccgacgaaaatcccgaaaaataaaaaccgaaccgcacctacctaaaaaatcgacgacgacgacgaacctaacgttcgcgaacgacgccgacgacgacaaaaacgccgacgtcaacaacaacaacaacaacaacaacgcgaaacaaaacaaacgacgaacgactcccgccgacgaatccataacaaccgaactaca

SEQ ID NO: 5859 - DNA, 624 bp, Artificial Sequence
  chemically treated genomic DNA (Homo sapiens) CpG-island No: 5859
  unsure (2, 22..23, 25, 38, 42, 80..)
anggggaggaggggagcgattnntnttagcgcggaganattnagagtcgcgtagttttcgggtacgtatgattttcgtgnnntagattagtacgattgtcgtacgttttttagcggagggttgtcggacgttagtttcggcgtcgtttcgttttggtttttttttcggattcgttggggttgattttgcgtttttggtcgcggggtttttttcggtttttcgtttttatttttcgcgatttatgagtcgttagtgtttcgaggttttttcggtttaaggcgttcgggggcggtgcggggcgttttttgcgcgattaattcggtttcgaagttggttaatttggtttcgggcggggcgcgcggagtttgtttaagttaggttggacgacgtttggggagggggcggcggggtacgcgggatagggttaggtcggcgggggtttcggggagtaggggtcgggtcgtatttatttggggggtcgacggcggcggcgagtttggcgttcgcgggcggcgtcggcggcggtaggagcgtcggcgttagtagtagtagtagtagtagtagcgcggggtagagtaggcggcgagcggttttcgtcggcggatttatggtagtcggattgta

SEQ ID NO: 5860 - DNA, 624 bp, Artificial Sequence
  chemically treated genomic DNA (Homo sapiens) CpG-island No: 5860
  unsure (543..544, 583, 587, 600, 602..603, 623)
tacaatccgactaccataaatccgccgacgaaaaccgctcgccgcctactctaccccgcgctactactactactactactactaacgccgacgctcctaccgccgccgacgccgcccgcgaacgccaaactcgccgccgccgtcgaccccccaaataaatacgacccgacccctactccccgaaacccccgccgacctaaccctatcccgcgtaccccgccgccccctccccaaacgtcgtccaacctaacttaaacaaactccgcgcgccccgcccgaaaccaaattaaccaacttcgaaaccgaattaatcgcgcaaaaaacgccccgcaccgcccccgaacgccttaaaccgaaaaaacctcgaaacactaacgactcataaatcgcgaaaaataaaaacgaaaaaccgaaaaaaaccccgcgaccaaaaacgcaaaatcaaccccaacgaatccgaaaaaaaaaccaaaacgaaacgacgccgaaactaacgtccgacaaccctccgctaaaaaacgtacgacaatcgtactaatctannncacgaaaatcatacgtacccgaaaactacgcgactctnaatntctccgcgctaanannaatcgctcccctcctccccnt

SEQ ID NO: 5861 - DNA, 748 bp, Artificial Sequence
  chemically treated genomic DNA (Homo sapiens) CpG-island No: 5861
  unsure (94)
gcgcggagggggtgggcgtaagtcgttttcgtttagcggttttcgtcgagtatggtgataatgagggtggggttagcgttggcggtagagcgtntggtggtttcggggttttttttcgtttttcgcgtttttttgcggcgcgtagtatagagagtttagtcgttttcgtagttgtcgttaaagtcggtagtcgttcgtttggaagaagaggtagacgaagggattgagaacgttgttggttatcgttattacgcgtagtacgtcgatagggttttttttttttattttttcgtaggttcggacgattacgttgtttttagtcggtcggtaaattagggtagttcgtagtttacgaatagtagttttagtagttggtttatttttaggttttgtattttggcgcggggtatcgcgttgggcgtacgggttttatttgggttcgtcgattaggtcgttgtattcgttggggtttttagtcggtgtcgttattagacggagagtaggtggttataagcgatatttatgattttaataggcgcgacgaagttcgcgacggttttatagaacgcgtatatttgtacgtgttagcgttgtaggagcgcgaagatttagtggtagcgacgtattttcggttaggttcgggcggagagtggcgcgtttggttgtagagacgttggtggaggaggaggaggaagaggagagggagagtattagcgtattataaatttcgattttcgcgttagtagta

SEQ ID NO: 5862 - DNA, 748 bp, Artificial Sequence
  chemically treated genomic DNA (Homo sapiens) CpG-island No: 5862
  unsure (655)
tactactaacgcgaaaatcgaaatttataatacgctaatactctccctctcctcttcctcctcctcctccaccaacgtctctacaaccaaacgcgccactctccgcccgaacctaaccgaaaatacgtcgctaccactaaatcttcgcgctcctacaacgctaacacgtacaaatatacgcgttctataaaaccgtcgcgaacttcgtcgcgcctattaaaatcataaatatcgcttataaccacctactctccgtctaataacgacaccgactaaaaaccccaacgaatacaacgacctaatcgacgaacccaaataaaacccgtacgcccaacgcgataccccgcgccaaaatacaaaacctaaaaataaaccaactactaaaactactattcgtaaactacgaactaccctaatttaccgaccgactaaaaacaacgtaatcgtccgaacctacgaaaaaataaaaaaaaaaaaccctatcgacgtactacgcgtaataacgataaccaacaacgttctcaatcccttcgtctacctcttcttccaaacgaacgactaccgactttaacgacaactacgaaaacgactaaactctctatactacgcgccgcaaaaaaacgcgaaaaacgaaaaaaaaccccgaaaccaccanacgctctaccgccaacgctaaccccaccctcattatcaccatactcgacgaaaaccgctaaacgaaaacgacttacgcccaccccctccgcgc

SEQ ID NO: 5863 - DNA, 748 bp, Artificial Sequence
  chemically treated genomic DNA (Homo sapiens) CpG-island No: 5863
  unsure (655)
tgttgttggcgcgggggtcggggtttgtggtgcgttagtattttttttttttttttttttttttttttttattaacgtttttgtagttaggcgcgttatttttcgttcgagtttggtcggggatgcgtcgttgttattggattttcgcgtttttgtagcgttggtacgtgtaggtgtacgcgttttatgaggtcgtcgcgggtttcgtcgcgtttgttaagattatgggtgtcgtttgtggttatttatttttcgtttggtggcggtatcggttgaaggttttagcgggtgtagcggtttggtcggcgagtttaggtggagttcgtgcgtttagcgcgatgtttcgcgttaaggtgtagagtttgaagatgagttagttgttggggttgttgttcgtgggttgcgagttgttttagtttgtcgatcggttggaggtagcgtggtcgttcgggtttgcgggagaatgggagggagaggttttgtcggcgtgttgcgcgtggtggcgatggttaatagcgtttttaattttttcgtttatttttttttttaggcgggcgattgtcggttttggcgatagttgcggaagcggttgggttttttgtgttgcgcgtcgtagggaggcgcggaggacgaggaggggtttcggggttattangcgttttatcgttaacgttggttttatttttattattattatgttcggcgggaatcgttggacgagggcggtttgcgtttatttttttcgcgt

SEQ ID NO: 5864 - DNA, 748 bp, Artificial Sequence
  chemically treated genomic DNA (Homo sapiens) CpG-island No: 5864
  unsure (94)
acgcgaaaaaaataaacgcaaaccgccctcgtccaacgattcccgccgaacataataataataaaaataaaaccaacgttaacgataaaacgcntaataaccccgaaacccctcctcgtcctccgcgcctccctacgacgcgcaacacaaaaaacccaaccgcttccgcaactatcgccaaaaccgacaatcgcccgcctaaaaaaaaaaataaacgaaaaaattaaaaacgctattaaccatcgccaccacgcgcaacacgccgacaaaacctctccctcccattctcccgcaaacccgaacgaccacgctacctccaaccgatcgacaaactaaaacaactcgcaacccacgaacaacaaccccaacaactaactcatcttcaaactctacaccttaacgcgaaacatcgcgctaaacgcacgaactccacctaaactcgccgaccaaaccgctacacccgctaaaaccttcaaccgataccgccaccaaacgaaaaataaataaccacaaacgacacccataatcttaacaaacgcgacgaaacccgcgacgacctcataaaacgcgtacacctacacgtaccaacgctacaaaaacgcgaaaatccaataacaacgacgcatccccgaccaaactcgaacgaaaaataacgcgcctaactacaaaaacgttaataaaaaaaaaaaaaaaaaaaaaaaaaaaaaatactaacgcaccacaaaccccgacccccgcgccaacaaca

SEQ ID NO: 5865 - DNA, 856 bp, Artificial Sequence
  chemically treated genomic DNA (Homo sapiens) CpG-island No: 5865
tttagttcgaggcgtcggatatgttgaagttcggagatttcggcggttcggttttttttaaagtggatttagtttatttgtagtattggtagtaattttttttttacggaggcgtaggttcgtttaagggtagcggcgtcgcgggttttttgagcgcgtcgtagtttttttagtcgtcgtcgtcgttttcgttttcggagcgcgttgagttttcgtcggatagtttgcgttcgcggttcgtttttttttttttcgtttcgtttacgtcggtttttttttttattttcgtttttttcgtttttttttgcgttgttgcggtcgttgtcgtcgcgttggttggtttttcggttttgtcggtgtcgtagttgtcggtgttcgcgtttttagtcgtcgttgtcgtcgtcgtcgagtcgttgttttttaaggaattgtgtttcggcgttattttcggtttcgggttcgttaagtgcggtggtggtggcggcggcggcggggagggtcgcggcgtttcgcgttttcgttgtagcgtagaggagttggattattatttgtatggttagtagcgtatggagattatttcgtttaattagtatattagcgattttaataatcgtacgtagtcgtagttcgcgcgttttttttcggggcgtcggcgtcggcgtcggcgggcgcgggtgtttgttagggaggcgggtcggataggagtgatacggggtcgggtgggtggggagtatttggttttggtcgttggttcgcgttttttcgatttttgtgataaaagttttttggcgttggagaaggaaagagaacggatgggacggtcggtggtattttggggtttttttttttttttttt

SEQ ID NO: 5866 - DNA, 856 bp, Artificial Sequence
  chemically treated genomic DNA (Homo sapiens) CpG-island No: 5866
aaaaaaaaaaaaaaaaaaccccaaaataccaccgaccgtcccatccgttctctttccttctccaacgccaaaaaacttttatcacaaaaatcgaaaaaacgcgaaccaacgaccaaaaccaaatactccccacccacccgaccccgtatcactcctatccgacccgcctccctaacaaacacccgcgcccgccgacgccgacgccgacgccccgaaaaaaaacgcgcgaactacgactacgtacgattattaaaatcgctaatatactaattaaacgaaataatctccatacgctactaaccatacaaataataatccaactcctctacgctacaacgaaaacgcgaaacgccgcgaccctccccgccgccgccgccaccaccaccgcacttaacgaacccgaaaccgaaaataacgccgaaacacaattccttaaaaaacaacgactcgacgacgacgacaacgacgactaaaaacgcgaacaccgacaactacgacaccgacaaaaccgaaaaaccaaccaacgcgacgacaacgaccgcaacaacgcaaaaaaaaacgaaaaaaacgaaaataaaaaaaaaaaccgacgtaaacgaaacgaaaaaaaaaaaaacgaaccgcgaacgcaaactatccgacgaaaactcaacgcgctccgaaaacgaaaacgacgacgacgactaaaaaaactacgacgcgctcaaaaaacccgcgacgccgctacccttaaacgaacctacgcctccgtaaaaaaaaaattactaccaatactacaaataaactaaatccactttaaaaaaaaccgaaccgccgaaatctccgaacttcaacatatccgacgcctcgaactaaa

SEQ ID NO: 5867 - DNA, 856 bp, Artificial Sequence
  chemically treated genomic DNA (Homo sapiens) CpG-island No: 5867
agagggagggagagggaattttaaagtgttatcggtcgttttattcgttttttttttttttttaacgttagaaaatttttgttatagagatcggggaggcgcgggttagcggttaggattaggtgttttttatttattcggtttcgtgttatttttattcgattcgtttttttgataggtattcgcgttcgtcggcgtcggcgtcggcgtttcgggagagagcgcgcgggttgcggttacgtacggttgttggggtcgttggtgtgttggttgagcgggatgatttttatgcgttgttggttatataggtaatagtttagtttttttgcgttgtagcggaagcgcggggcgtcgcgatttttttcgtcgtcgtcgttattattatcgtatttgacgggttcggggtcggaggtggcgtcgaggtatagttttttggggggtagcggttcggcggcgacggtagcggcggttagaggcgcgaatatcggtagttgcgatatcggtagggtcgagagattagttagcgcggcggtagcggtcgtagtagcgtaggaggaggcggaggaggcggaggtggaagaggaagtcggcgtggacgaggcggaggagagagaggcgggtcgcgggcgtaggttgttcggcggaggtttagcgcgtttcgggggcgggggcggcggcggcggttgaagaggttgcggcgcgtttaggagattcgcggcgtcgttgtttttgagcgggtttgcgttttcgtgagggaagagttgttgttagtgttgtaggtaggttgggtttattttgaggaaggtcgaatcgtcggggttttcgggttttagtatgttcggcgtttcgaattggg

SEQ ID NO: 5868 - DNA, 856 bp, Artificial Sequence
  chemically treated genomic DNA (Homo sapiens) CpG-island No: 5868
cccaattcgaaacgccgaacatactaaaacccgaaaaccccgacgattcgaccttcctcaaaataaacccaacctacctacaacactaacaacaactcttccctcacgaaaacgcaaacccgctcaaaaacaacgacgccgcgaatctcctaaacgcgccgcaacctcttcaaccgccgccgccgcccccgcccccgaaacgcgctaaacctccgccgaacaacctacgcccgcgacccgcctctctctcctccgcctcgtccacgccgacttcctcttccacctccgcctcctccgcctcctcctacgctactacgaccgctaccgccgcgctaactaatctctcgaccctaccgatatcgcaactaccgatattcgcgcctctaaccgccgctaccgtcgccgccgaaccgctaccccccaaaaaactatacctcgacgccacctccgaccccgaacccgtcaaatacgataataataacgacgacgacgaaaaaaatcgcgacgccccgcgcttccgctacaacgcaaaaaaactaaactattacctatataaccaacaacgcataaaaatcatcccgctcaaccaacacaccaacgaccccaacaaccgtacgtaaccgcaacccgcgcgctctctcccgaaacgccgacgccgacgccgacgaacgcgaatacctatcaaaaaaacgaatcgaataaaaataacacgaaaccgaataaataaaaaacacctaatcctaaccgctaacccgcgcctccccgatctctataacaaaaattttctaacgttaaaaaaaaaaaaaaaacgaataaaacgaccgataacactttaaaattccctctccctccctct

SEQ ID NO: 5869 - DNA, 884 bp, Artificial Sequence
  chemically treated genomic DNA (Homo sapiens) CpG-island No: 5869
gagaggagcggtgggtaacgtgtttgtgttcggcgaatgcgtatattttagttaggtcgttggttcggatttagaaatgtttcgttttttttagtgtttgttttcgtttaggtttcggttttttgtggttcggtcgacggttcgggagttgcgcgcggtcgcgtgcgggagggggcgggtgggaaggatttgtagtgcgacgatatacgaaggttgagtgtttcgttgcgtatcgaattaacgaaattgagatatttaggtgtcgtatcgcgagtacgaatcgagtatagagtatagattaaaggacgattttaatttttaataattcgggaagtcgcggttttttaagttttattagttttacgtgagtatttagcgtcgttgattcgggcgagggggagtcgttggcgacgggtagcgtttaggcggtttttttagagcgatttttttcggcgcgttgcggtttttgtttcgttcggtcgtttggcgttcgttagttgttagttttttggtgggtgtggacgggtgtttatttttttgtcgcgcggttagttatcgacgtggttttgttcggcggttttttcgttcgtcggtgggttgtatgtttttttggttgcgcggcgaggttttggagatttttcggggttcggttttcgtcgatcgggtagtttagtttagtcgcgtcgcggagttttgcgtttagtttttaagagtttattcgcgcggttgtttttttgtcgttcgcggttgtagttagttcgggaggagaagacggcgtggaattcgtttttttcgttttttttcgtcgatttttatttttttaggtggatttttttttgttttttggatagatgggttatcgtttttattgtggtttttttata

SEQ ID NO: 5870 - DNA, 884 bp, Artificial Sequence
  chemically treated genomic DNA (Homo sapiens) CpG-island No: 5870
tataaaaaaaccacaataaaaacgataacccatctatccaaaaaacaaaaaaaaatccacctaaaaaaataaaaatcgacgaaaaaaaacgaaaaaaacgaattccacgccgtcttctcctcccgaactaactacaaccgcgaacgacaaaaaaacaaccgcgcgaataaactcttaaaaactaaacgcaaaactccgcgacgcgactaaactaaactacccgatcgacgaaaaccgaaccccgaaaaatctccaaaacctcgccgcgcaaccaaaaaaacatacaacccaccgacgaacgaaaaaaccgccgaacaaaaccacgtcgataactaaccgcgcgacaaaaaaataaacacccgtccacacccaccaaaaaactaacaactaacgaacgccaaacgaccgaacgaaacaaaaaccgcaacgcgccgaaaaaaatcgctctaaaaaaaccgcctaaacgctacccgtcgccaacgactccccctcgcccgaatcaacgacgctaaatactcacgtaaaactaataaaacttaaaaaaccgcgacttcccgaattattaaaaattaaaatcgtcctttaatctatactctatactcgattcgtactcgcgatacgacacctaaatatctcaatttcgttaattcgatacgcaacgaaacactcaaccttcgtatatcgtcgcactacaaatccttcccacccgccccctcccgcacgcgaccgcgcgcaactcccgaaccgtcgaccgaaccacaaaaaaccgaaacctaaacgaaaacaaacactaaaaaaaacgaaacatttctaaatccgaaccaacgacctaactaaaatatacgcattcgccgaacacaaacacgttacccaccgctcctctc

SEQ ID NO: 5871 - DNA, 884 bp, Artificial Sequence
  chemically treated genomic DNA (Homo sapiens) CpG-island No: 5871
tatgagaggattatagtgaaaacggtagtttatttgtttaaagaatagaaagaagtttatttggaaagatgggagtcggcggaggggggcgagaagaacgagttttacgtcgtttttttttttcgggttaattgtagtcgcgggcggtaggaaggtagtcgcgcgggtgggtttttggggattgggcgtagggtttcgcggcgcggttgggttgggttgttcgatcggcgagggtcgggtttcgggaagtttttagggtttcgtcgcgtagttaggaaagtatgtagtttatcgacgggcggaggaatcgtcgggtaaagttacgtcggtggttgatcgcgcggtagggaggtgggtattcgtttatatttattaggaggttgatagttggcgagcgttaggcggtcgggcgggataagggtcgtagcgcgtcggagggggtcgttttgagaaagtcgtttgggcgttgttcgtcgttaacgattttttttcgttcggattagcggcgttggatatttacgtagggttggtagaatttggagagtcgcggtttttcgggttgttgaagattaggatcgttttttgatttatgttttgtgttcggttcgtattcgcggtgcggtatttgggtgttttagtttcgttggttcggtgcgtagcgaagtatttagttttcgtatatcgtcgtattgtagattttttttattcgttttttttcgtacgcgatcgcgcgtagttttcgagtcgtcggtcgggttataaggggtcggggtttgggcgggggtaggtattaaggaaagcgaaatatttttaggttcgagttagcggtttaattggagtgtgcgtattcgtcgagtatagatacgttgtttatcgtttttttt

SEQ ID NO: 5872 - DNA, 884 bp, Artificial Sequence
  chemically treated genomic DNA (Homo sapiens) CpG-island No: 5872
aaaaaaaacgataaacaacgtatctatactcgacgaatacgcacactccaattaaaccgctaactcgaacctaaaaatatttcgctttccttaatacctacccccgcccaaaccccgaccccttataacccgaccgacgactcgaaaactacgcgcgatcgcgtacgaaaaaaaacgaataaaaaaaatctacaatacgacgatatacgaaaactaaatacttcgctacgcaccgaaccaacgaaactaaaacacccaaataccgcaccgcgaatacgaaccgaacacaaaacataaatcaaaaaacgatcctaatcttcaacaacccgaaaaaccgcgactctccaaattctaccaaccctacgtaaatatccaacgccgctaatccgaacgaaaaaaaatcgttaacgacgaacaacgcccaaacgactttctcaaaacgaccccctccgacgcgctacgacccttatcccgcccgaccgcctaacgctcgccaactatcaacctcctaataaatataaacgaatacccacctccctaccgcgcgatcaaccaccgacgtaactttacccgacgattcctccgcccgtcgataaactacatactttcctaactacgcgacgaaaccctaaaaacttcccgaaacccgaccctcgccgatcgaacaacccaacccaaccgcgccgcgaaaccctacgcccaatccccaaaaacccacccgcgcgactaccttcctaccgcccgcgactacaattaacccgaaaaaaaaaaacgacgtaaaactcgttcttctcgcccccctccgccgactcccatctttccaaataaacttctttctattctttaaacaaataaactaccgttttcactataatcctctcata

SEQ ID NO: 5873 - DNA, 554 bp, Artificial Sequence
  chemically treated genomic DNA (Homo sapiens) CpG-island No: 5873
ggtttttacgttttattggagatacgtattttagtcgttacgacgtagcggtaaattttcgcgtagcgtcggttcgttaatttggatgatgttaattttagcggtttttagatcggttattttattacgtagcgttagcgtaatttgtttggcgatggttttacggttgatatttttacgcgggaacgattagtagagtatggtgatcggtttcgttagtattttttttatcggtttgtcggttagcgattgcgtatatttcgtttattttacggtaatcggtgtcgggcggttaatgttattaatgataatcggtggttttacgtagcgggaatcgtagttttgtatttaatcgttttgcgtaaagataaattcgtcgaagtgttcgttaaagtattttattatgttattacgttcgggttcgttatgtattagtatatttagttttaaacgtttttgtttaataatggtttgtttgatatgtttcgtaatgttcgtgcggtagttggttggcgtttagattgttttttttgaaatttagacgtagggtacga

SEQ ID NO: 5874 - DNA, 554 bp, Artificial Sequence
  chemically treated genomic DNA (Homo sapiens) CpG-island No: 5874
tcgtaccctacgtctaaatttcaaaaaaaacaatctaaacgccaaccaactaccgcacgaacattacgaaacatatcaaacaaaccattattaaacaaaaacgtttaaaactaaatatactaatacataacgaacccgaacgtaataacataataaaatactttaacgaacacttcgacgaatttatctttacgcaaaacgattaaatacaaaactacgattcccgctacgtaaaaccaccgattatcattaataacattaaccgcccgacaccgattaccgtaaaataaacgaaatatacgcaatcgctaaccgacaaaccgataaaaaaaatactaacgaaaccgatcaccatactctactaatcgttcccgcgtaaaaatatcaaccgtaaaaccatcgccaaacaaattacgctaacgctacgtaataaaataaccgatctaaaaaccgctaaaattaacatcatccaaattaacgaaccgacgctacgcgaaaatttaccgctacgtcgtaacgactaaaatacgtatctccaataaaacgtaaaaacc

SEQ ID NO: 5875 - DNA, 554 bp, Artificial Sequence
  chemically treated genomic DNA (Homo sapiens) CpG-island No: 5875
tcgtattttgcgtttggattttaaaaagggtaatttagacgttaattaattatcgtacgggtattgcggaatatattaagtaggttattgttgagtaggaacgtttgggattggatgtgttggtatatggcgagttcgagcgtaatgatatggtggaatattttggcgagtatttcgacggatttgtttttacgtaaaacggttgggtatagagttacggttttcgttgcgtgaagttatcgattgttattggtgatattagtcgttcggtatcgattatcgtggagtgggcgaagtatgcgtaatcgttgatcgataaatcggtgaaagggatgttgacggggtcggttattatattttgttggtcgttttcgcgtgaagatgttagtcgtgaaattatcgttaaatagattgcgttggcgttgcgtgatgaagtggtcgatttggaagtcgttggaattggtattatttagattgacgaatcggcgttgcgcgaaggtttatcgttgcgtcgtagcgattgggatgcgtatttttagtggggcgtagaggtt

SEQ ID NO: 5876 - DNA, 554 bp, Artificial Sequence
  chemically treated genomic DNA (Homo sapiens) CpG-island No: 5876
aacctctacgccccactaaaaatacgcatcccaatcgctacgacgcaacgataaaccttcgcgcaacgccgattcgtcaatctaaataataccaattccaacgacttccaaatcgaccacttcatcacgcaacgccaacgcaatctatttaacgataatttcacgactaacatcttcacgcgaaaacgaccaacaaaatataataaccgaccccgtcaacatccctttcaccgatttatcgatcaacgattacgcatacttcgcccactccacgataatcgataccgaacgactaatatcaccaataacaatcgataacttcacgcaacgaaaaccgtaactctatacccaaccgttttacgtaaaaacaaatccgtcgaaatactcgccaaaatattccaccatatcattacgctcgaactcgccatataccaacacatccaatcccaaacgttcctactcaacaataacctacttaatatattccgcaatacccgtacgataattaattaacgtctaaattaccctttttaaaatccaaacgcaaaatacga

SEQ ID NO: 5877 - DNA, 531 bp, Artificial Sequence
  chemically treated genomic DNA (Homo sapiens) CpG-island No: 5877
ggagcgcgtttcgatagttttgaatattttttatttaacggttgagagtcgttgggagtttaacgtttgtaatcgagtgagttcgagttcggttggggtcggatcgttggattttttcgttggttttttgttgtattttttcgcgttttgggttcgcgtaagttttttttgttacgcgttttaacggtcgtttatcggtatcgggttgaatacggtgcgttttatttcggagtttttattttattttaaggatttaatagcgtataagttgttttttacgggtaattatttttgtaagttttattttcggtttcgttacgtttcgtagggttttttgtttggtttggattatttcgttttttttgcgtttttttttttggtttagttagataagtgttttttacgatttagcgcgtttatcgttcggtttcgtcgtcgttaaggggtgggggtgtttgattcgttaggttttgcgtttttttttcggatttatttttaatgtttaggtaagatttttatatgaagtcggtg

SEQ ID NO: 5878 - DNA, 531 bp, Artificial Sequence
  chemically treated genomic DNA (Homo sapiens) CpG-island No: 5878
caccgacttcatataaaaatcttacctaaacattaaaaataaatccgaaaaaaaaacgcaaaacctaacgaatcaaacacccccaccccttaacgacgacgaaaccgaacgataaacgcgctaaatcgtaaaaaacacttatctaactaaaccaaaaaaaaaaacgcaaaaaaaacgaaataatccaaaccaaacaaaaaaccctacgaaacgtaacgaaaccgaaaataaaacttacaaaaataattacccgtaaaaaacaacttatacgctattaaatccttaaaataaaataaaaactccgaaataaaacgcaccgtattcaacccgataccgataaacgaccgttaaaacgcgtaacaaaaaaaacttacgcgaacccaaaacgcgaaaaaatacaacaaaaaaccaacgaaaaaatccaacgatccgaccccaaccgaactcgaactcactcgattacaaacgttaaactcccaacgactctcaaccgttaaataaaaaatattcaaaactatcgaaacgcgctcc

SEQ ID NO: 5879 - DNA, 531 bp, Artificial Sequence
  chemically treated genomic DNA (Homo sapiens) CpG-island No: 5879
tatcggttttatgtaagagttttgtttggatattgaggatggattcgagagagaagcgtagagtttgacggattagatatttttattttttagcggcgacgaaatcgagcggtaaacgcgttggatcgtgagaagtatttgtttagttaggttaaggagagaggcgtagggagagcgaggtgatttagattagatagggaattttgcggggcgtggcggggtcgggggtgaagtttgtagaggtagttgttcgtgaagagtagtttgtgcgttgttggatttttggagtggagtgggaatttcgaggtgaagcgtatcgtgtttagttcgatgtcggtgagcggtcgttggaacgcgtggtagagaaagtttgcgcgagtttagggcgcgaagaagtataataaagggttaacggggaggtttaacggttcgattttagtcggattcgagtttattcggttgtaggcgttaggtttttagcggtttttagtcgttaagtggagaatgtttaggattgtcgaggcgcgtttt

SEQ ID NO: 5880 - DNA, 531 bp, Artificial Sequence
  chemically treated genomic DNA (Homo sapiens) CpG-island No: 5880
aaaacgcgcctcgacaatcctaaacattctccacttaacgactaaaaaccgctaaaaacctaacgcctacaaccgaataaactcgaatccgactaaaatcgaaccgttaaacctccccgttaaccctttattatacttcttcgcgccctaaactcgcgcaaactttctctaccacgcgttccaacgaccgctcaccgacatcgaactaaacacgatacgcttcacctcgaaattcccactccactccaaaaatccaacaacgcacaaactactcttcacgaacaactacctctacaaacttcacccccgaccccgccacgccccgcaaaattccctatctaatctaaatcacctcgctctccctacgcctctctccttaacctaactaaacaaatacttctcacgatccaacgcgtttaccgctcgatttcgtcgccgctaaaaaataaaaatatctaatccgtcaaactctacgcttctctctcgaatccatcctcaatatccaaacaaaactcttacataaaaccgata

SEQ ID NO: 5881 - DNA, 673 bp, Artificial Sequence
  chemically treated genomic DNA (Homo sapiens) CpG-island No: 5881
tttcgttcggggcgttattattcgcgcggttaagagaatttttttcggagtttttgcggtttggcgcgtttagggcgtatttttcgttcgttcgttcgtcgcgtttttagttggggcgtcgttttttcgttcgtaggttttcgttttttcgttttgttgaatgttttgaagaagtcgtatttcgtcgtcgcggtaggtattttcggagggagagtttgaatttggttatatacggttattcgtaatgagttcgggagttttcggacgggagttatatttcgcgacgagttgattttttttcgttggtttgggtaaggagtttgttgtttttttcgtttttttttcggtttttcggcgtttgcggttgggggacggggtagcggacggagcgacgattttcgtttttgtttttgcgtttatggtcggggcgtcgtgggtgttttttatataaaagaaaagtcgagcgttttatattcggcggatttgattcggggttgcggggcggggtcgcggttggaagtgcgcgttcgcgggggatttcgtaggtcgatcggacgttaggacgtcggggtcgcgtttaaattcgtgcggtaggagggaggtgtagcgtttttagggttttttaaggtcggggagagtttcgaatttttattatttttttttttggtttttt

SEQ ID NO: 5882 - DNA, 673 bp, Artificial Sequence
  chemically treated genomic DNA (Homo sapiens) CpG-island No: 5882
aaaaaaccaaaaaaaaaaataataaaaattcgaaactctccccgaccttaaaaaaccctaaaaacgctacacctccctcctaccgcacgaatttaaacgcgaccccgacgtcctaacgtccgatcgacctacgaaatcccccgcgaacgcgcacttccaaccgcgaccccgccccgcaaccccgaatcaaatccgccgaatataaaacgctcgacttttcttttatataaaaaacacccacgacgccccgaccataaacgcaaaaacaaaaacgaaaatcgtcgctccgtccgctaccccgtcccccaaccgcaaacgccgaaaaaccgaaaaaaaaacgaaaaaaacaacaaactccttacccaaaccaacgaaaaaaaatcaactcgtcgcgaaatataactcccgtccgaaaactcccgaactcattacgaataaccgtatataaccaaattcaaactctccctccgaaaatacctaccgcgacgacgaaatacgacttcttcaaaacattcaacaaaacgaaaaaacgaaaacctacgaacgaaaaaacgacgccccaactaaaaacgcgacgaacgaacgaacgaaaaatacgccctaaacgcgccaaaccgcaaaaactccgaaaaaaattctcttaaccgcgcgaataataacgccccgaacgaaa

SEQ ID NO: 5883 - DNA, 673 bp, Artificial Sequence
  chemically treated genomic DNA (Homo sapiens) CpG-island No: 5883
aagagattagaaaaaggagtgatgggaattcgaggtttttttcggttttggaaaattttggaagcgttgtattttttttttgtcgtacggatttgagcgcggtttcgacgttttggcgttcgatcggtttgcggagtttttcgcgggcgcgtatttttagtcgcgatttcgtttcgtagtttcgggttagattcgtcgagtatgaagcgttcggttttttttttgtgtgaggagtatttacgacgtttcgattatgggcgtaggggtagaggcgaaggtcgtcgtttcgttcgttatttcgttttttagtcgtaagcgtcgaggagtcggaagagaggcggaaagggtagtaggttttttatttagattagcgaggggaggttagttcgtcgcggggtgtggttttcgttcggggattttcgagtttattacgggtggtcgtgtgtagttaagtttaagtttttttttcgggaatgtttgtcgcggcggcggaatacggtttttttaggatatttagtaaagcggggaggcggggatttgcgggcggaggagcgacgttttagttgggaacgcggcggacgggcgagcggggggtgcgttttgggcgcgttaggtcgtagaggtttcggggaaagtttttttggtcgcgcgagtggtggcgtttcgggcggga

SEQ ID NO: 5884 - DNA, 673 bp, Artificial Sequence
  chemically treated genomic DNA (Homo sapiens) CpG-island No: 5884
tcccgcccgaaacgccaccactcgcgcgaccaaaaaaactttccccgaaacctctacgacctaacgcgcccaaaacgcaccccccgctcgcccgtccgccgcgttcccaactaaaacgtcgctcctccgcccgcaaatccccgcctccccgctttactaaatatcctaaaaaaaccgtattccgccgccgcgacaaacattcccgaaaaaaaaacttaaacttaactacacacgaccacccgtaataaactcgaaaatccccgaacgaaaaccacaccccgcgacgaactaacctcccctcgctaatctaaataaaaaacctactaccctttccgcctctcttccgactcctcgacgcttacgactaaaaaacgaaataacgaacgaaacgacgaccttcgcctctacccctacgcccataatcgaaacgtcgtaaatactcctcacacaaaaaaaaaaccgaacgcttcatactcgacgaatctaacccgaaactacgaaacgaaatcgcgactaaaaatacgcgcccgcgaaaaactccgcaaaccgatcgaacgccaaaacgtcgaaaccgcgctcaaatccgtacgacaaaaaaaaaatacaacgcttccaaaattttccaaaaccgaaaaaaacctcgaattcccatcactcctttttctaatctctt

SEQ ID NO: 5885 - DNA, 579 bp, Artificial Sequence
  chemically treated genomic DNA (Homo sapiens) CpG-island No: 5885
gtcgtattcgatatgtttttttttaaattagaataatagcgttagttcgtcgataattatattagatattgttattatcgtttttgttagttataaggttttcgtcgggaacgttttgcgtagtataattagtgacggtaaatttattgtcgggagcgttattaataatgttagcgtcggagcggtttttatatttgttagtattatcgtttgtataatcggaatttttgttgtcgtgggaatgataaataagtattttgttatcgttatcgttattatttatattaggttgttatcgatagtattatcggtatgggggaataattagacgcgagcggtatttaatattagtattgtaaggatgtaaatcgggatcgtattttagaaaagcgtttatagcgttttgttttagcggttaaaaaattcgttttgtgttttcggtatgttaatttcgatcggtgtttgcgtttgcggtgttttacgtatttatttttgtattagcgtcgtaattagtaatattattattagttcggttattagacgaatcgtcgtaaaattttagtcgaggataaagtttat

SEQ ID NO: 5886 - DNA, 579 bp, Artificial Sequence
  chemically treated genomic DNA (Homo sapiens) CpG-island No: 5886
ataaactttatcctcgactaaaattttacgacgattcgtctaataaccgaactaataataatattactaattacgacgctaatacaaaaataaatacgtaaaacaccgcaaacgcaaacaccgatcgaaattaacataccgaaaacacaaaacgaattttttaaccgctaaaacaaaacgctataaacgcttttctaaaatacgatcccgatttacatccttacaatactaatattaaataccgctcgcgtctaattattcccccataccgataatactatcgataacaacctaatataaataataacgataacgataacaaaatacttatttatcattcccacgacaacaaaaattccgattatacaaacgataatactaacaaatataaaaaccgctccgacgctaacattattaataacgctcccgacaataaatttaccgtcactaattatactacgcaaaacgttcccgacgaaaaccttataactaacaaaaacgataataacaatatctaatataattatcgacgaactaacgctattattctaatttaaaaaaaaacatatcgaatacgac

SEQ ID NO: 5887 - DNA, 579 bp, Artificial Sequence
  chemically treated genomic DNA (Homo sapiens) CpG-island No: 5887
atgggttttgttttcggttggggttttgcggcgattcgtttggtggtcgggttggtgatggtgttgttgattgcgacgttggtgtaaaaatgggtgcgtgaaatatcgtaaacgtaggtatcggtcgaaattgatatatcggaagtatagggcgggttttttagtcgttggggtagggcgttatggacgtttttttggagtacgatttcggtttatatttttgtagtattggtgttgggtgtcgttcgcgtttggttatttttttatgtcgatggtgttgtcgataatagtttgatgtgggtggtggcgatggcggtagtaggatgtttgtttgttatttttacggtagtagaaatttcgattgtataaacgatgatgttggtaggtatgggaatcgtttcggcgttggtattgttgatgacgttttcggtagtgagtttgtcgttattgattatgttgcgtaaagcgttttcggcgaaagttttatggttgataggggcgatggtggtagtgtttggtgtgattgtcggcgggttggcgttgttgttttgatttgagggaaaatatgtcggatgcggt

SEQ ID NO: 5888 - DNA, 579 bp, Artificial Sequence
  chemically treated genomic DNA (Homo sapiens) CpG-island No: 5888
accgcatccgacatattttccctcaaatcaaaacaacaacgccaacccgccgacaatcacaccaaacactaccaccatcgcccctatcaaccataaaactttcgccgaaaacgctttacgcaacataatcaataacgacaaactcactaccgaaaacgtcatcaacaataccaacgccgaaacgattcccatacctaccaacatcatcgtttatacaatcgaaatttctactaccgtaaaaataacaaacaaacatcctactaccgccatcgccaccacccacatcaaactattatcgacaacaccatcgacataaaaaaataaccaaacgcgaacgacacccaacaccaatactacaaaaatataaaccgaaatcgtactccaaaaaaacgtccataacgccctaccccaacgactaaaaaacccgccctatacttccgatatatcaatttcgaccgatacctacgtttacgatatttcacgcacccatttttacaccaacgtcgcaatcaacaacaccatcaccaacccgaccaccaaacgaatcgccgcaaaaccccaaccgaaaacaaaacccat

SEQ ID NO: 5889 - DNA, 637 bp, Artificial Sequence
  chemically treated genomic DNA (Homo sapiens) CpG-island No: 5889
ttatcgatatcggtattcgttttcgtagatacgtgtacgaattggtttttatcgttttattttttcggtaggatgtcgtattgggagagttcgtttttaacgcgattcggattagtttttggtttatcgattttgtttattgtaattattatcggtatttgcgtcgttttcgcgtgttggattgtttcgatggtttgcggtattatatcgtcgtcggtagtaataattaggattacgatgttcgttgtttgcgtattacgagtacgtattgaagtaaacgcggcgtgtttcggggtgtttaggaaggtgattatgtcgtttttagttttaacgtggtatgtattaatgtgttgggtaatgtcgttcgtttcgttagaggttattttcgttgaacgaatgtagtttagtagagaggttttatcgtggttaacgtgatttatgatggttataatcggcgcgcgcggtttagtcgtagtattcgtgttacggtcgtttattatcgttttttttagttcgtttttacgacgtaggataattttatggtttatttttttagtaattagttgtgcggttttttgatcgataatttggttgatggttggtattgcgtttagtttttattattcgtttttggatg

SEQ ID NO: 5890 - DNA, 637 bp, Artificial Sequence
  chemically treated genomic DNA (Homo sapiens) CpG-island No: 5890
catccaaaaacgaataataaaaactaaacgcaataccaaccatcaaccaaattatcgatcaaaaaaccgcacaactaattactaaaaaaataaaccataaaattatcctacgtcgtaaaaacgaactaaaaaaaacgataataaacgaccgtaacacgaatactacgactaaaccgcgcgcgccgattataaccatcataaatcacgttaaccacgataaaacctctctactaaactacattcgttcaacgaaaataacctctaacgaaacgaacgacattacccaacacattaatacataccacgttaaaactaaaaacgacataatcaccttcctaaacaccccgaaacacgccgcgtttacttcaatacgtactcgtaatacgcaaacaacgaacatcgtaatcctaattattactaccgacgacgatataataccgcaaaccatcgaaacaatccaacacgcgaaaacgacgcaaataccgataataattacaataaacaaaatcgataaaccaaaaactaatccgaatcgcgttaaaaacgaactctcccaatacgacatcctaccgaaaaaataaaacgataaaaaccaattcgtacacgtatctacgaaaacgaataccgatatcgataa

SEQ ID NO: 5891 - DNA, 637 bp, Artificial Sequence
  chemically treated genomic DNA (Homo sapiens) CpG-island No: 5891
tatttaaaagcggatgatggaaattgggcgtaatgttaattattaattaggttatcgattaggaaatcgtatagttggttgttgaagagatgggttataaagttattttgcgtcgtgaaaacgagttggaagaggcggtaatgagcgatcgtgatacgggtgttgcggttgaatcgcgcgcgtcggttgtgattattatgggttacgttgattacggtaaaatttttttgttggattatattcgtttaacgaaagtggtttttggcgaagcgggcggtattatttagtatattggtgtatattacgttgaaattgaaaacggtatgattatttttttggatatttcggggtacgtcgcgtttattttaatgcgtgttcgtggtgcgtaggtaacggatatcgtagttttggttgttgttgtcgacgacggtgtgatgtcgtagattatcgaagtaatttagtacgcgaaagcggcgtaggtatcggtggtggttgtagtgaataagatcgataaattagaagttgattcggatcgcgttaagaacgaatttttttagtacggtattttgtcggaagagtggggcggtgaaagttagttcgtatacgtatttgcgaaagcgggtatcggtatcgatga

SEQ ID NO: 5892 - DNA, 637 bp, Artificial Sequence
  chemically treated genomic DNA (Homo sapiens) CpG-island No: 5892
tcatcgataccgatacccgctttcgcaaatacgtatacgaactaactttcaccgccccactcttccgacaaaataccgtactaaaaaaattcgttcttaacgcgatccgaatcaacttctaatttatcgatcttattcactacaaccaccaccgatacctacgccgctttcgcgtactaaattacttcgataatctacgacatcacaccgtcgtcgacaacaacaaccaaaactacgatatccgttacctacgcaccacgaacacgcattaaaataaacgcgacgtaccccgaaatatccaaaaaaataatcataccgttttcaatttcaacgtaatatacaccaatatactaaataataccgcccgcttcgccaaaaaccactttcgttaaacgaatataatccaacaaaaaaattttaccgtaatcaacgtaacccataataatcacaaccgacgcgcgcgattcaaccgcaacacccgtatcacgatcgctcattaccgcctcttccaactcgttttcacgacgcaaaataactttataacccatctcttcaacaaccaactatacgatttcctaatcgataacctaattaataattaacattacgcccaatttccatcatccgcttttaaata

SEQ ID NO: 5893 - DNA, 782 bp, Artificial Sequence
  chemically treated genomic DNA (Homo sapiens) CpG-island No: 5893
  unsure (753)
gttggattttagttttttcggttgaaaattttcgcggtaatattattcgtgataacggtatcgatattagacgcgtgttgaattcgttcgcgtttttgaaatcggtggtcgatacgttgatattaagtgtaagcgggcgttggattagacgggttttagcgattggttatggcgggcggcgtgagtgttaatcgtacgttacgggcgaagttggttgaaatgatgaaaaaacgtcgcggcgaagtgttttacgcgcgttcggaattttgtattgatacggcgcgatgatcgtttatgtcggaatggtgcggtttaaagtaggcgcgacggcggatttcggcgttagcgtgcgtcgcgttggtcgttggcggagttatcggttgcgtaaaattattgggtgtcggagagtaattttcggtatcgtttttatttaaagtaatattacgggtatttatagtaagtcggtaattattagtaatacgaggaatattagtttaaaaatcgtttttagtcgttagtaattcgtcgttggtagataattattgtcgtagtaaatcggattggggtcggtggcgtatggtgtaagaatgttttttagattaattgtcgtattaattattaggtagaatatcggtagcgggattttcggtatcgttagcgtagtagtaattattatcggtgcgagagcggaggtatacgtcgtggcgttggcgaaaaagtagcgtagtagataaaatattataattaacgttnatattattatcgttggcgaataaacgttt

SEQ ID NO: 5894 - DNA, 782 bp, Artificial Sequence
  chemically treated genomic DNA (Homo sapiens) CpG-island No: 5894
  unsure (30)
aaacgtttattcgccaacgataataatatnaacgttaattataatattttatctactacgctactttttcgccaacgccacgacgtatacctccgctctcgcaccgataataattactactacgctaacgataccgaaaatcccgctaccgatattctacctaataattaatacgacaattaatctaaaaaacattcttacaccatacgccaccgaccccaatccgatttactacgacaataattatctaccaacgacgaattactaacgactaaaaacgatttttaaactaatattcctcgtattactaataattaccgacttactataaatacccgtaatattactttaaataaaaacgataccgaaaattactctccgacacccaataattttacgcaaccgataactccgccaacgaccaacgcgacgcacgctaacgccgaaatccgccgtcgcgcctactttaaaccgcaccattccgacataaacgatcatcgcgccgtatcaatacaaaattccgaacgcgcgtaaaacacttcgccgcgacgttttttcatcatttcaaccaacttcgcccgtaacgtacgattaacactcacgccgcccgccataaccaatcgctaaaacccgtctaatccaacgcccgcttacacttaatatcaacgtatcgaccaccgatttcaaaaacgcgaacgaattcaacacgcgtctaatatcgataccgttatcacgaataatattaccgcgaaaattttcaaccgaaaaaactaaaatccaac

SEQ ID NO: 5895 - DNA, 782 bp, Artificial Sequence
  chemically treated genomic DNA (Homo sapiens) CpG-island No: 5895
  unsure (30)
aagcgtttattcgttaacgatggtgatgtnggcgttgattgtggtgttttatttattgcgttattttttcgttagcgttacggcgtatattttcgttttcgtatcgatgatgattgttgttgcgttggcgatgtcggaaatttcgttgtcggtgttttgtttgatggttggtgcggtaattggtttggggagtatttttatattatacgttatcggttttagttcgatttattacggtagtggttatttgttaacggcggattattggcgattgggggcgatttttgggttgatatttttcgtattgttggtgattatcggtttattgtggatgttcgtggtgttgttttaagtgaggacggtgtcggaaattgtttttcggtatttaatagttttacgtagtcggtaatttcgttagcggttagcgcgacgtacgttaacgtcgagattcgtcgtcgcgtttgttttaaatcgtattatttcggtataggcgattatcgcgtcgtattagtataaaatttcggacgcgcgtagaatatttcgtcgcggcgtttttttattattttagttagtttcgttcgtaacgtacggttagtatttacgtcgttcgttatgattagtcgttaaagttcgtttgatttagcgttcgtttgtatttaatattagcgtatcgattatcgattttaaaggcgcgggcgaatttagtacgcgtttggtgtcggtgtcgttgttacgaatggtattgtcgcgaaggtttttagtcggagaagttggaatttagt

SEQ ID NO: 5896 - DNA, 782 bp, Artificial Sequence
  chemically treated genomic DNA (Homo sapiens) CpG-island No: 5896
  unsure (753)
actaaattccaacttctccgactaaaaaccttcgcgacaataccattcgtaacaacgacaccgacaccaaacgcgtactaaattcgcccgcgcctttaaaatcgataatcgatacgctaatattaaatacaaacgaacgctaaatcaaacgaactttaacgactaatcataacgaacgacgtaaatactaaccgtacgttacgaacgaaactaactaaaataataaaaaaacgccgcgacgaaatattctacgcgcgtccgaaattttatactaatacgacgcgataatcgcctataccgaaataatacgatttaaaacaaacgcgacgacgaatctcgacgttaacgtacgtcgcgctaaccgctaacgaaattaccgactacgtaaaactattaaataccgaaaaacaatttccgacaccgtcctcacttaaaacaacaccacgaacatccacaataaaccgataatcaccaacaatacgaaaaatatcaacccaaaaatcgcccccaatcgccaataatccgccgttaacaaataaccactaccgtaataaatcgaactaaaaccgataacgtataatataaaaatactccccaaaccaattaccgcaccaaccatcaaacaaaacaccgacaacgaaatttccgacatcgccaacgcaacaacaatcatcatcgatacgaaaacgaaaatatacgccgtaacgctaacgaaaaaataacgcaataaataaaacaccacaatcaacgccnacatcaccatcgttaacgaataaacgctt

SEQ ID NO: 5897 - DNA, 572 bp, Artificial Sequence
  chemically treated genomic DNA (Homo sapiens) CpG-island No: 5897
ttattcgaaattggtaaaatagtcgatggtagaaagcgagttgttgtagggtacgttggagtcgattaacgagttttatgttattgttaaaatcgtcgggattaaattgtgcgaattatataatcgttagtacggacgcgattatcgtttagttatgtcgattaatttgtacgggttatacgataatttttattcgagtaattcgtatgtgattttagtattgttgcgtcgtttttacgaggcgacggtatagaatgcgtcggacgtggtggtatggggtagcggtatatcgatgcgcgaatttttgtacgtcgatgatatggcggcggcgagtatttatgttatggagttggcgtatgaagtttggttggagaatatttagtcgatgttgtagaatattaacgtcggtacgggcgttgattgtattattcgcgagttggcgtaaattatcgttaaagtggtgggttataaaggtcgggtggtttttgatgttagtaaatcggatggtacgtcgcgtaaattgttggatgtgattcgttaattatttatatgtttgtaggtcgatgttattt

SEQ ID NO: 5898 - DNA, 572 bp, Artificial Sequence
  chemically treated genomic DNA (Homo sapiens) CpG-island No: 5898
aaataacatcgacctacaaacatataaataattaacgaatcacatccaacaatttacgcgacgtaccatccgatttactaacatcaaaaaccacccgacctttataacccaccactttaacgataatttacgccaactcgcgaataatacaatcaacgcccgtaccgacgttaatattctacaacatcgactaaatattctccaaccaaacttcatacgccaactccataacataaatactcgccgccgccatatcatcgacgtacaaaaattcgcgcatcgatataccgctaccccataccaccacgtccgacgcattctataccgtcgcctcgtaaaaacgacgcaacaatactaaaatcacatacgaattactcgaataaaaattatcgtataacccgtacaaattaatcgacataactaaacgataatcgcgtccgtactaacgattatataattcgcacaatttaatcccgacgattttaacaataacataaaactcgttaatcgactccaacgtaccctacaacaactcgctttctaccatcgactattttaccaatttcgaataa

SEQ ID NO: 5899 - DNA, 572 bp, Artificial Sequence
  chemically treated genomic DNA (Homo sapiens) CpG-island No: 5899
agataatatcgatttgtaggtatgtaggtgattaacgagttatatttagtagtttgcgcggcgtgttattcggtttgttggtattaaaaattattcggtttttgtaatttattattttgacgatggtttgcgttagttcgcggatagtgtagttaacgttcgtgtcgacgttaatgttttataatatcggttgggtgttttttagttagattttatgcgttagttttatgatatgaatgttcgtcgtcgttatattatcgacgtgtagaaattcgcgtatcggtgtatcgttgttttatattattacgttcggcgtattttgtgtcgtcgtttcgtggaagcgacgtagtaatgttgggattatatgcgaattattcgggtggaagttgtcgtgtggttcgtataggttggtcggtatgattgagcggtaatcgcgttcgtattggcggttgtatgattcgtatagtttgatttcggcgattttggtaatagtataaggttcgttagtcggttttagcgtgttttgtaataattcgttttttgttatcggttgttttgttagtttcgggtag

SEQ ID NO: 5900 - DNA, 572 bp, Artificial Sequence
  chemically treated genomic DNA (Homo sapiens) CpG-island No: 5900
ctacccgaaactaacaaaacaaccgataacaaaaaacgaattattacaaaacacgctaaaaccgactaacgaaccttatactattaccaaaatcgccgaaatcaaactatacgaatcatacaaccgccaatacgaacgcgattaccgctcaatcataccgaccaacctatacgaaccacacgacaacttccacccgaataattcgcatataatcccaacattactacgtcgcttccacgaaacgacgacacaaaatacgccgaacgtaataatataaaacaacgatacaccgatacgcgaatttctacacgtcgataatataacgacgacgaacattcatatcataaaactaacgcataaaatctaactaaaaaacacccaaccgatattataaaacattaacgtcgacacgaacgttaactacactatccgcgaactaacgcaaaccatcgtcaaaataataaattacaaaaaccgaataatttttaataccaacaaaccgaataacacgccgcgcaaactactaaatataactcgttaatcacctacatacctacaaatcgatattatct

SEQ ID NO: 5901 - DNA, 786 bp, Artificial Sequence
  chemically treated genomic DNA (Homo sapiens) CpG-island No: 5901
tacgttaaaacgtaattattcggtttttagttattagtattaaatatggcggtttttatcgagtattatatttagattacgagatcgcgcgttgtcggagttagtttgtcggtttattggggcgcgtttatttttagattgattaataaacgcgaggcgtaaggtacgtttttttttttttcgttttcgttaataatttttcggttttttttataggatttaattatcgtttcggttttttttgaatgaaaaggtagcggtttagttagtagagtagtagttcgacgtaagaggtaggaagcgtagtaattcgtgtttgagcgttcggcggaaaaacgaagttggaagtgttttttagtagcgcgcggagaagaacggggagttaggtgagtagcggatttcgggcgcggggtcgcggtgtggggacgtttgaattgagagcgagaggacgaggggagacgttgggatttaaggggagggggagaaagggtcgcgagacggtgggggcggggcggttggtgtgttagagcgttgtgtgttggtcgttgggtatcggggcgtatgcgttaggggtgggttagtcgttggcgcgcggtgttcggggttcggggttcgtttttcggaggggttgttatggtttacggcgtttcgagttttatttggagtttgttagttcgttcgaatagatttcgcggcggtttggggttatttggagagggacgagggggtgacgtcggggtttggggtttgggtgggagaagttggagtttttagttgttaggggtt

SEQ ID NO: 5902 - DNA, 786 bp, Artificial Sequence
  chemically treated genomic DNA (Homo sapiens) CpG-island No: 5902
aacccctaacaactaaaaactccaacttctcccacccaaaccccaaaccccgacgtcaccccctcgtccctctccaaataaccccaaaccgccgcgaaatctattcgaacgaactaacaaactccaaataaaactcgaaacgccgtaaaccataacaacccctccgaaaaacgaaccccgaaccccgaacaccgcgcgccaacgactaacccacccctaacgcatacgccccgatacccaacgaccaacacacaacgctctaacacaccaaccgccccgcccccaccgtctcgcgaccctttctccccctccccttaaatcccaacgtctcccctcgtcctctcgctctcaattcaaacgtccccacaccgcgaccccgcgcccgaaatccgctactcacctaactccccgttcttctccgcgcgctactaaaaaacacttccaacttcgtttttccgccgaacgctcaaacacgaattactacgcttcctacctcttacgtcgaactactactctactaactaaaccgctaccttttcattcaaaaaaaaccgaaacgataattaaatcctataaaaaaaaccgaaaaattattaacgaaaacgaaaaaaaaaaaaacgtaccttacgcctcgcgtttattaatcaatctaaaaataaacgcgccccaataaaccgacaaactaactccgacaacgcgcgatctcgtaatctaaatataatactcgataaaaaccgccatatttaatactaataactaaaaaccgaataattacgttttaacgta

SEQ ID NO: 5903 - DNA, 786 bp, Artificial Sequence
  chemically treated genomic DNA (Homo sapiens) CpG-island No: 5903
aatttttgataattgaaagttttaattttttttatttaggttttagatttcggcgttattttttcgtttttttttaaatggttttaggtcgtcgcggggtttattcggacgaattgatagattttaagtggggttcggagcgtcgtaggttatgatagttttttcgagaagcgggtttcgagtttcgagtatcgcgcgttaacggttggtttatttttagcgtatgcgtttcggtgtttaacggttaatatatagcgttttgatatattaatcgtttcgtttttatcgtttcgcgattttttttttttttttttttagattttaacgttttttttcgttttttcgtttttagtttagacgtttttatatcgcggtttcgcgttcgggattcgttgtttatttggtttttcgttttttttcgcgcgttgttaagagatatttttaatttcgttttttcgtcgggcgtttagatacgagttgttgcgttttttgttttttgcgtcgggttgttgttttgttgattgggtcgttgtttttttatttaagagaggtcgaagcggtgattgggttttgtggaagggatcgggagattattggcggagacgggaagaaagagggcgtgttttacgtttcgcgtttattggttaatttaaaagtaggcgcgttttagtgagtcgatagattggtttcgatagcgcgcggtttcgtgatttgggtgtggtgttcggtgggagtcgttatgtttagtattgataattgaagatcggatgattgcgttttggcgtg

SEQ ID NO: 5904 - DNA, 786 bp, Artificial Sequence
  chemically treated genomic DNA (Homo sapiens) CpG-island No: 5904
cacgccaaaacgcaatcatccgatcttcaattatcaatactaaacataacgactcccaccgaacaccacacccaaatcacgaaaccgcgcgctatcgaaaccaatctatcgactcactaaaacgcgcctacttttaaattaaccaataaacgcgaaacgtaaaacacgccctctttcttcccgtctccgccaataatctcccgatcccttccacaaaacccaatcaccgcttcgacctctcttaaataaaaaaacaacgacccaatcaacaaaacaacaacccgacgcaaaaaacaaaaaacgcaacaactcgtatctaaacgcccgacgaaaaaacgaaattaaaaatatctcttaacaacgcgcgaaaaaaaacgaaaaaccaaataaacaacgaatcccgaacgcgaaaccgcgatataaaaacgtctaaactaaaaacgaaaaaacgaaaaaaaacgttaaaatctaaaaaaaaaaaaaaaaaaaatcgcgaaacgataaaaacgaaacgattaatatatcaaaacgctatatattaaccgttaaacaccgaaacgcatacgctaaaaataaaccaaccgttaacgcgcgatactcgaaactcgaaacccgcttctcgaaaaaactatcataacctacgacgctccgaaccccacttaaaatctatcaattcgtccgaataaaccccgcgacgacctaaaaccatttaaaaaaaaacgaaaaaataacgccgaaatctaaaacctaaataaaaaaaattaaaactttcaattatcaaaaatt

SEQ ID NO: 5905 - DNA, 943 bp, Artificial Sequence
  chemically treated genomic DNA (Homo sapiens) CpG-island No: 5905
cgcggcgttttgggtttttaatacgtcggtcgtgtcgtcgtcgggcgtttcgttcgcgttgtttattttttttatgacgttgggcgtcgtgtttaatttgttggcgttggcgttgttggcgtaggtcgcgggtcgtttgagacgtcgtcgtcggtcgttatatttttgttgttcgtggttagtttgttggttatcgatttggcgggttacgtgatttcgggcgcgttggtgttgcgtttgtatattgcggggcgcgtttcggtcggcggggtttgttattttttgggcggttgtatggtttttttcggtttgtgttcgttgttgttgggttgtggtatggtcgtggagcgttgcgtgggcgttacgcggtcgttgttttacgtcgcgcgggtttcggtcgttcgcgcgcgtttggcgttggtcgcggtggtcgcggtggttttggtcgtggcgttgttgtcgttggcgcgcgtgggtcgttatgagttgtagtattcgggtacgtggtgttttatcggtttgggtttttcgggcggttggcgttaggtattgtttgttggttttttcgttagtatcggtttggtcgcgtttttcgtcgcgttggtgtgtaatacgtttagcggtttggttttgttacgcgttcgttggcgacgtcgttttcgacggtttttttcggttttaggtttcgatagtcggcgtcgttggggggcgtacggatttcgttcggttttcgtatcgttcgtttcgtttatcgtttcggtttttattttttttggcggttttcggagtagcggttcggtacgtagagttcgcgtttacgacgtggagatggtgggttagtttgtcggtattatggtggagtcgtgtatttgttggagtttaatgttggtgaggggcgtatcggtttttcgagttacgttttttttcgttttttttgggtatt

SEQ ID NO: 5906 - DNA, 943 bp, Artificial Sequence
  chemically treated genomic DNA (Homo sapiens) CpG-island No: 5906
aatacccaaaaaaaacgaaaaaaaacgtaactcgaaaaaccgatacgcccctcaccaacattaaactccaacaaatacacgactccaccataataccgacaaactaacccaccatctccacgtcgtaaacgcgaactctacgtaccgaaccgctactccgaaaaccgccaaaaaaaataaaaaccgaaacgataaacgaaacgaacgatacgaaaaccgaacgaaatccgtacgccccccaacgacgccgactatcgaaacctaaaaccgaaaaaaaccgtcgaaaacgacgtcgccaacgaacgcgtaacaaaaccaaaccgctaaacgtattacacaccaacgcgacgaaaaacgcgaccaaaccgatactaacgaaaaaaccaacaaacaatacctaacgccaaccgcccgaaaaacccaaaccgataaaacaccacgtacccgaatactacaactcataacgacccacgcgcgccaacgacaacaacgccacgaccaaaaccaccgcgaccaccgcgaccaacgccaaacgcgcgcgaacgaccgaaacccgcgcgacgtaaaacaacgaccgcgtaacgcccacgcaacgctccacgaccataccacaacccaacaacaacgaacacaaaccgaaaaaaaccatacaaccgcccaaaaaataacaaaccccgccgaccgaaacgcgccccgcaatatacaaacgcaacaccaacgcgcccgaaatcacgtaacccgccaaatcgataaccaacaaactaaccacgaacaacaaaaatataacgaccgacgacgacgtctcaaacgacccgcgacctacgccaacaacgccaacgccaacaaattaaacacgacgcccaacgtcataaaaaaaataaacaacgcgaacgaaacgcccgacgacgacacgaccgacgtattaaaaacccaaaacgccgcg

SEQ ID NO: 5907 - DNA, 943 bp, Artificial Sequence
  chemically treated genomic DNA (Homo sapiens) CpG-island No: 5907
ggtgtttaaagggagcgggaaggagcgtggttcgaggggtcggtgcgttttttattagtattgggttttagtagatgtacgattttattatgatatcgataagttggtttattatttttacgtcgtgggcgcgagttttgcgtgtcgagtcgttgtttcgagagtcgttaaagaaggtggaggtcgaagcgatggacgaggcggacgatgcggaggtcgagcggggttcgtgcgttttttagcgacgtcggttgtcggggtttgaggtcgggggaggtcgtcgggagcggcgtcgttagcgggcgcgtagtagggttaggtcgttgagcgtgttgtatattagcgcggcgaggagcgcgattaggtcgatgttggcgaagaggttagtaagtagtgtttggcgttagtcgttcgggggatttaggtcgatgaagtattacgtgttcgggtattgtagtttatagcggtttacgcgcgttagcggtagtagcgttacggttaaggttatcgcggttatcgcggttagcgttaggcgcgcgcgggcgatcgagattcgcgcggcgtggagtagcggtcgcgtgacgtttacgtagcgttttacggttatgttatagtttagtagtagcgggtataggtcgaagaagattatgtagtcgtttaggaagtggtaggtttcgtcggtcggagcgcgtttcgtagtgtatagacgtagtattagcgcgttcgggattacgtggttcgttaggtcggtggttagtaggttggttacgaatagtaggaatgtggcggtcgacggcggcgttttaggcggttcgcggtttgcgttagtagcgttagcgttagtaggttggatacggcgtttagcgttatggagaagatgggtagcgcgggcgaagcgttcgacggcggtacggtcgacgtgttggggatttagggcgtcgcg

SEQ ID NO: 5908 - DNA, 943 bp, Artificial Sequence
  chemically treated genomic DNA (Homo sapiens) CpG-island No: 5908
cgcgacgccctaaatccccaacacgtcgaccgtaccgccgtcgaacgcttcgcccgcgctacccatcttctccataacgctaaacgccgtatccaacctactaacgctaacgctactaacgcaaaccgcgaaccgcctaaaacgccgccgtcgaccgccacattcctactattcgtaaccaacctactaaccaccgacctaacgaaccacgtaatcccgaacgcgctaatactacgtctatacactacgaaacgcgctccgaccgacgaaacctaccacttcctaaacgactacataatcttcttcgacctatacccgctactactaaactataacataaccgtaaaacgctacgtaaacgtcacgcgaccgctactccacgccgcgcgaatctcgatcgcccgcgcgcgcctaacgctaaccgcgataaccgcgataaccttaaccgtaacgctactaccgctaacgcgcgtaaaccgctataaactacaatacccgaacacgtaatacttcatcgacctaaatcccccgaacgactaacgccaaacactacttactaacctcttcgccaacatcgacctaatcgcgctcctcgccgcgctaatatacaacacgctcaacgacctaaccctactacgcgcccgctaacgacgccgctcccgacgacctcccccgacctcaaaccccgacaaccgacgtcgctaaaaaacgcacgaaccccgctcgacctccgcatcgtccgcctcgtccatcgcttcgacctccaccttctttaacgactctcgaaacaacgactcgacacgcaaaactcgcgcccacgacgtaaaaataataaaccaacttatcgatatcataataaaatcgtacatctactaaaacccaatactaataaaaaacgcaccgacccctcgaaccacgctccttcccgctccctttaaacacc

SEQ ID NO: 5909 - DNA, 719 bp, Artificial Sequence
  chemically treated genomic DNA (Homo sapiens) CpG-island No: 5909
gtcgttagggcgtcggcgtgttggtgttgatgcgttcgttcgattattcgtttaacgtttaggcgcgttttagttagaatttgttggattagggtagttattttattagcgaaaaattgttttcggtattgcgtttcgcgttcggttacgtcgttgacgtattggggattatcgagggggagaacgttatttatttgcgtattttgcgtcgtgttaacggcgtcgcgttttgtttaatcgattattatttcgcggattttattttttggtcgacgttgtaacgtttcgatagcggttcgttgtacgattttttgcgcgagtaaatcggaattgcgttgcgtcgtagttagacgcggattagcgttcgtcgcgtttaggttaaagagtgttagcgttttgaaatttcgaatatgtcgtcgttgttgtgcgtgcgtatttttaattatcgtgacggtgaaagtagttcggcggagtatttcgttagtttgacgcgcgtcgatatgattgaatttattatggagtattgaatgtacgtagatatcgcgatacggtagtattggatgttttaagatttaggaaagggttagggggataatcgagcggaggtagacgttacggacggaagcgtaggtagataaggagggagcgttacgtaggtcgagttcgggtataatatataggtaagaaattattattataagtaaaacggggtatagtag

SEQ ID NO: 5910 - DNA, 719 bp, Artificial Sequence
  chemically treated genomic DNA (Homo sapiens) CpG-island No: 5910
ctactataccccgttttacttataataataatttcttacctatatattatacccgaactcgacctacgtaacgctccctccttatctacctacgcttccgtccgtaacgtctacctccgctcgattatccccctaaccctttcctaaatcttaaaacatccaatactaccgtatcgcgatatctacgtacattcaatactccataataaattcaatcatatcgacgcgcgtcaaactaacgaaatactccgccgaactactttcaccgtcacgataattaaaaatacgcacgcacaacaacgacgacatattcgaaatttcaaaacgctaacactctttaacctaaacgcgacgaacgctaatccgcgtctaactacgacgcaacgcaattccgatttactcgcgcaaaaaatcgtacaacgaaccgctatcgaaacgttacaacgtcgaccaaaaaataaaatccgcgaaataataatcgattaaacaaaacgcgacgccgttaacacgacgcaaaatacgcaaataaataacgttctccccctcgataatccccaatacgtcaacgacgtaaccgaacgcgaaacgcaataccgaaaacaatttttcgctaataaaataactaccctaatccaacaaattctaactaaaacgcgcctaaacgttaaacgaataatcgaacgaacgcatcaacaccaacacgccgacgccctaacgac

SEQ ID NO: 5911 - DNA, 719 bp, Artificial Sequence
  chemically treated genomic DNA (Homo sapiens) CpG-island No: 5911
ttgttgtgtttcgttttgtttgtggtggtggttttttgtttgtgtgttgtgttcgggttcggtttgcgtggcgttttttttttgtttgtttgcgttttcgttcgtggcgtttgttttcgttcggttgtttttttggtttttttttgggttttgggatatttagtgttgtcgtgtcgcggtatttgcgtgtatttagtgttttatagtgaatttaattatgtcggcgcgcgttaggttgacggagtatttcgtcgggttgtttttatcgttacggtggttaagggtgcgtacgtatagtagcggcgatatattcgggattttaagacgttggtattttttggtttgggcgcggcgggcgttgattcgcgtttggttgcggcgtagcgtaatttcggtttgttcgcgtagaaaatcgtgtagcgagtcgttgtcgaagcgttgtagcgtcggttagagggtgaggttcgcgaagtagtggtcgattaaatagagcgcgacgtcgttgatacgacgtagggtgcgtaggtggatgacgttttttttttcggtaatttttagtgcgttagcgacgtggtcggacgcggggcgtaatatcgaaagtagtttttcgttggtgggatggttgttttgatttagtagattttggttaaaacgcgtttgggcgttgagcgggtaatcgaacgggcgtattagtattagtacgtcgacgttttgacggt

SEQ ID NO: 5912 - DNA, 719 bp, Artificial Sequence
  chemically treated genomic DNA (Homo sapiens) CpG-island No: 5912
accgtcaaaacgtcgacgtactaatactaatacgcccgttcgattacccgctcaacgcccaaacgcgttttaaccaaaatctactaaatcaaaacaaccatcccaccaacgaaaaactactttcgatattacgccccgcgtccgaccacgtcgctaacgcactaaaaattaccgaaaaaaaaaacgtcatccacctacgcaccctacgtcgtatcaacgacgtcgcgctctatttaatcgaccactacttcgcgaacctcaccctctaaccgacgctacaacgcttcgacaacgactcgctacacgattttctacgcgaacaaaccgaaattacgctacgccgcaaccaaacgcgaatcaacgcccgccgcgcccaaaccaaaaaataccaacgtcttaaaatcccgaatatatcgccgctactatacgtacgcacccttaaccaccgtaacgataaaaacaacccgacgaaatactccgtcaacctaacgcgcgccgacataattaaattcactataaaacactaaatacacgcaaataccgcgacacgacaacactaaatatcccaaaacccaaaaaaaaaccaaaaaaacaaccgaacgaaaacaaacgccacgaacgaaaacgcaaacaaacaaaaaaaaaacgccacgcaaaccgaacccgaacacaacacacaaacaaaaaaccaccaccacaaacaaaacgaaacacaacaa

SEQ ID NO: 5913 - DNA, 660 bp, Artificial Sequence
  chemically treated genomic DNA (Homo sapiens) CpG-island No: 5913
gcggtgttttacgatttcggtaatatttgttttatttttatggttggtaagtcggagtacgataaaattatttttacgtcgattgtgtttaatgcgttgaacgcgttcggcgttagcgtcgaagcgttcggacgtaacgatttggtggtgaaaatcgtcgaaggcgatcgtaaagttttaggttcggtttatcgcgaaattaaagatcgcggtttttattacggtattttgttatttaatgtcgattttagtcgtttggtaaattattttaattcggataaaaagaaattggcggcgaaaggtattacgtcggtacgttttcgcgtgattaattttatcgagttgttgtcggggattatttatgagtaggtttgcgaggttataatcgatgtttttttcgtttattatggcgagcgcgtgggaagcggaaattattttttcgaataaaacgttagatttgttaaatttcgtcgaaatttttgttcgttagagtagttgggaatggaatttcgggtagggttcggtattttcgtatttgttggatgaacgttttatttgggggcggcgtggaattgtatttcgacgttgaataaagggtatattacggggggaaatgtgggtggaggtaatattatgttgtagtcgatttagacgattttt

SEQ ID NO: 5914 - DNA, 660 bp, Artificial Sequence
  chemically treated genomic DNA (Homo sapiens) CpG-island No: 5914
aaaaatcgtctaaatcgactacaacataatattacctccacccacatttccccccgtaatataccctttattcaacgtcgaaatacaattccacgccgcccccaaataaaacgttcatccaacaaatacgaaaataccgaaccctacccgaaattccattcccaactactctaacgaacaaaaatttcgacgaaatttaacaaatctaacgttttattcgaaaaaataatttccgcttcccacgcgctcgccataataaacgaaaaaaacatcgattataacctcgcaaacctactcataaataatccccgacaacaactcgataaaattaatcacgcgaaaacgtaccgacgtaatacctttcgccgccaatttctttttatccgaattaaaataatttaccaaacgactaaaatcgacattaaataacaaaataccgtaataaaaaccgcgatctttaatttcgcgataaaccgaacctaaaactttacgatcgccttcgacgattttcaccaccaaatcgttacgtccgaacgcttcgacgctaacgccgaacgcgttcaacgcattaaacacaatcgacgtaaaaataattttatcgtactccgacttaccaaccataaaaataaaacaaatattaccgaaatcgtaaaacaccgc

SEQ ID NO: 5915 - DNA, 660 bp, Artificial Sequence
  chemically treated genomic DNA (Homo sapiens) CpG-island No: 5915
agggatcgtttagatcgattgtagtataatattgtttttatttatattttttttcgtgatatgttttttatttaacgtcgaaatgtagttttacgtcgtttttaggtaaagcgtttatttagtagatgcgagaatgtcgagttttgttcgaagttttatttttagttattttggcgggtaaaggtttcggcgaagtttggtaagtttggcgttttgttcggggagatgattttcgttttttacgcgttcgttataatgggcgaaaaaggtatcggttatggtttcgtaaatttgtttatgggtgattttcggtaatagttcggtgaggttggttacgcgggaacgtatcgacgtaatgtttttcgtcgttagtttttttttattcggattgagatagtttgttaggcggttgaggtcggtattgagtagtaaggtgtcgtggtggaagtcgcgatttttggtttcgcgataggtcgagtttgagattttgcggtcgttttcgacggtttttattattagatcgttacgttcggacgtttcggcgttgacgtcgagcgcgtttagcgtattgagtataatcgacgtggagatagttttatcgtatttcggtttgttagttataaaggtaaagtaggtattgtcgagatcgtggaatatcgt

SEQ ID NO: 5916 - DNA, 660 bp, Artificial Sequence
  chemically treated genomic DNA (Homo sapiens) CpG-island No: 5916
acgatattccacgatctcgacaatacctactttacctttataactaacaaaccgaaatacgataaaactatctccacgtcgattatactcaatacgctaaacgcgctcgacgtcaacgccgaaacgtccgaacgtaacgatctaataataaaaaccgtcgaaaacgaccgcaaaatctcaaactcgacctatcgcgaaaccaaaaatcgcgacttccaccacgacaccttactactcaataccgacctcaaccgcctaacaaactatctcaatccgaataaaaaaaaactaacgacgaaaaacattacgtcgatacgttcccgcgtaaccaacctcaccgaactattaccgaaaatcacccataaacaaatttacgaaaccataaccgatacctttttcgcccattataacgaacgcgtaaaaaacgaaaatcatctccccgaacaaaacgccaaacttaccaaacttcgccgaaacctttacccgccaaaataactaaaaataaaacttcgaacaaaactcgacattctcgcatctactaaataaacgctttacctaaaaacgacgtaaaactacatttcgacgttaaataaaaaacatatcacgaaaaaaaatataaataaaaacaatattatactacaatcgatctaaacgatccct

SEQ ID NO: 5917 - DNA, 676 bp, Artificial Sequence
  chemically treated genomic DNA (Homo sapiens) CpG-island No: 5917
cgttaacgtttaagttttcgtttttgttttagtaaagttatgaattggttattttaaatcgggttgagcggatgtagcgttttttgatttttaataaattttttagcggcgttaattattcgttgttgacgtaattcgcgtttattggcgggtaaatttttttcgttttttaatagacggtcgcgtatatgggtatcggttttcgttagttcgggtatcggcggttgatgggaaagtttatcggaatttaggaatagtacgcgtttattgagagtgttggtgaaacgtttaatggttttatttaatatgcgggtacgttggaaatcgggtagcggcgtggcgatatcgttgatgaatataggtagaattggtattttatttagtttatcgagtaggaattttagcggttgggcgaattcgtggtttatttgtatatagtaagaaacggtaagatcgatttcgttttttatgacggtatgcgtataggttttcgttagttttatatgtacgggtagtttttttgtcgtattgtcgaaattattaattgtcgtcgttgtaacgtttaaatagaaggtggtattacgttatagaaaaagtcgttgtagtgatttggcgtatatagtatattagtttatgggagaatgtcgtaatacgtttttcggtgttgtatcgtatt

SEQ ID NO: 5918 - DNA, 676 bp, Artificial Sequence
  chemically treated genomic DNA (Homo sapiens) CpG-island No: 5918
aatacgatacaacaccgaaaaacgtattacgacattctcccataaactaatatactatatacgccaaatcactacaacgactttttctataacgtaataccaccttctatttaaacgttacaacgacgacaattaataatttcgacaatacgacaaaaaaactacccgtacatataaaactaacgaaaacctatacgcataccgtcataaaaaacgaaatcgatcttaccgtttcttactatatacaaataaaccacgaattcgcccaaccgctaaaattcctactcgataaactaaataaaataccaattctacctatattcatcaacgatatcgccacgccgctacccgatttccaacgtacccgcatattaaataaaaccattaaacgtttcaccaacactctcaataaacgcgtactattcctaaattccgataaactttcccatcaaccgccgatacccgaactaacgaaaaccgatacccatatacgcgaccgtctattaaaaaacgaaaaaaatttacccgccaataaacgcgaattacgtcaacaacgaataattaacgccgctaaaaaatttattaaaaatcaaaaaacgctacatccgctcaacccgatttaaaataaccaattcataactttactaaaacaaaaacgaaaacttaaacgttaacg

SEQ ID NO: 5919 - DNA, 676 bp, Artificial Sequence
  chemically treated genomic DNA (Homo sapiens) CpG-island No: 5919
aatacggtatagtatcggagggcgtattgcggtatttttttatgaattggtgtgttgtatgcgttagattattataacggttttttttatgacgtgatgttattttttgtttaggcgttgtagcgacggtaattggtgatttcggtagtgcggtaggagagttgttcgtgtatgtggagttggcggaggtttgtgcgtatgtcgttatgaagagcgggatcgattttgtcgttttttattgtatgtaggtggattacgggttcgtttagtcgttggagtttttgttcggtgggttggataaggtgttagttttgtttgtgtttattaacggtgtcgttacgtcgttgttcggtttttagcgtattcgtatgttgggtgaagttattggacgttttattagtatttttaataaacgcgtgttgtttttgggtttcggtgggtttttttattagtcgtcggtgttcgaattggcgaaagtcgatgtttatatgcgcgatcgtttgttggggagcgggaaagatttattcgttagtgagcgcgaattgcgttagtaacgggtgattagcgtcgttgagaagtttgttgaggattagagaacgttgtattcgtttaattcgatttgggataattagtttatgattttgttggagtagggacggggatttggacgttaacg

SEQ ID NO: 5920 - DNA, 676 bp, Artificial Sequence
  chemically treated genomic DNA (Homo sapiens) CpG-island No: 5920
cgttaacgtccaaatccccgtccctactccaacaaaatcataaactaattatcccaaatcgaattaaacgaatacaacgttctctaatcctcaacaaacttctcaacgacgctaatcacccgttactaacgcaattcgcgctcactaacgaataaatctttcccgctccccaacaaacgatcgcgcatataaacatcgactttcgccaattcgaacaccgacgactaataaaaaaacccaccgaaacccaaaaacaacacgcgtttattaaaaatactaataaaacgtccaataacttcacccaacatacgaatacgctaaaaaccgaacaacgacgtaacgacaccgttaataaacacaaacaaaactaacaccttatccaacccaccgaacaaaaactccaacgactaaacgaacccgtaatccacctacatacaataaaaaacgacaaaatcgatcccgctcttcataacgacatacgcacaaacctccgccaactccacatacacgaacaactctcctaccgcactaccgaaatcaccaattaccgtcgctacaacgcctaaacaaaaaataacatcacgtcataaaaaaaaccgttataataatctaacgcatacaacacaccaattcataaaaaaataccgcaatacgccctccgatactataccgtatt

SEQ ID NO: 5921 - DNA, 558 bp, Artificial Sequence
  chemically treated genomic DNA (Homo sapiens) CpG-island No: 5921
  unsure (447, 465)
tttgtgtacgtttgagttttaggataatcgtcgtttgtacgattgggtattggataatattacgatttttgtttattcgcgttagtatgagttttcgcgtttgaatttggaatatatcgtgatgtttaagcgtaagttgaatttgttggtgatcgataagtacgttgaaggttgggatgattcgcgtatgtcgattattttcggtttgcgtcgtcgtggttatattgcggtttttattcgtgagttttgtaaacgtatcggcgtgattaagtaggataatattattgagatggcgtcgttggaattttgtattcgtgaagattttaacgaaaatgcgtcgcgcgtaatggcggttatcgattcggtgaaattggttatcgaaaattattagggcgaaggcgaaatggttattatgtcgaattattcgaataaatcggaaatgggtantcgttaggtgtcgtttancggtgagatttggattgatcgcgtcgattttcgttaagaagttagggttttcgcggcgagattattggtgtaggtttattttagaagattttt

SEQ ID NO: 5922 - DNA, 558 bp, Artificial Sequence
  chemically treated genomic DNA (Homo sapiens) CpG-island No: 5922
  unsure (94, 112)
aaaaatcttctaaaataaacctacaccaataatctcgccgcgaaaaccctaacttcttaacgaaaatcgacgcgatcaatccaaatctcaccgntaaacgacacctaacgantacccatttccgatttattcgaataattcgacataataaccatttcgccttcgccctaataattttcgataaccaatttcaccgaatcgataaccgccattacgcgcgacgcattttcgttaaaatcttcacgaatacaaaattccaacgacgccatctcaataatattatcctacttaatcacgccgatacgtttacaaaactcacgaataaaaaccgcaatataaccacgacgacgcaaaccgaaaataatcgacatacgcgaatcatcccaaccttcaacgtacttatcgatcaccaacaaattcaacttacgcttaaacatcacgatatattccaaattcaaacgcgaaaactcatactaacgcgaataaacaaaaatcgtaatattatccaatacccaatcgtacaaacgacgattatcctaaaactcaaacgtacacaaa

SEQ ID NO: 5923 - DNA, 558 bp, Artificial Sequence
  chemically treated genomic DNA (Homo sapiens) CpG-island No: 5923
  unsure (94, 112)
ggggattttttagagtagatttgtattagtaatttcgtcgcgaaaattttagttttttggcgaaaatcggcgcgattaatttaaattttatcgntaaacggtatttgacggntgtttattttcggtttgttcggatggttcggtatggtaattatttcgttttcgttttgatagttttcgataattagttttatcggatcgataatcgttattgcgcgcggcgtattttcgttgagatttttacggatgtaggattttagcgacgttattttaatggtgttgttttgtttggttacgtcgatgcgtttgtagaatttacgaatagaagtcgtagtgtaattacgacgacgtagatcggaaatggtcggtatacgcgggttattttagtttttaacgtgtttgtcggttattagtaggtttaatttacgtttggatattacggtgtattttagatttaggcgcgagaatttatattggcgcgggtgaataggaatcgtgatgttgtttagtatttagtcgtatagacgacggttgttttggaatttaagcgtatataga

SEQ ID NO: 5924 - DNA, 558 bp, Artificial Sequence
  chemically treated genomic DNA (Homo sapiens) CpG-island No: 5924
  unsure (447, 465)
tctatatacgcttaaattccaaaacaaccgtcgtctatacgactaaatactaaacaacatcacgattcctattcacccgcgccaatataaattctcgcgcctaaatctaaaatacaccgtaatatccaaacgtaaattaaacctactaataaccgacaaacacgttaaaaactaaaataacccgcgtataccgaccatttccgatctacgtcgtcgtaattacactacgacttctattcgtaaattctacaaacgcatcgacgtaaccaaacaaaacaacaccattaaaataacgtcgctaaaatcctacatccgtaaaaatctcaacgaaaatacgccgcgcgcaataacgattatcgatccgataaaactaattatcgaaaactatcaaaacgaaaacgaaataattaccataccgaaccatccgaacaaaccgaaaataaacanccgtcaaataccgtttancgataaaatttaaattaatcgcgccgattttcgccaaaaaactaaaattttcgcgacgaaattactaatacaaatctactctaaaaaatcccc

SEQ ID NO: 5925 - DNA, 696 bp, Artificial Sequence
  chemically treated genomic DNA (Homo sapiens) CpG-island No: 5925
atttatcgtttatttgatacgcgttaatcggtaatttagtacgtttacgtagtttacgtacgatgtcgaggtacgttttagtaggtttaattattaggtagtttgcgttttgggttttatttagtagtgatttacgaatcgttttacgacggtttattgggtttatttgatagtttttgcggtcgttttttaatgcgttttcggtagttttacggaacgggttataaaaggaggaggcgaatttggtcgaatacgatataatcgtcgtatttttaaatttcgtagcgtttagcgtttgacgaatcgtttgtatttggtcgtttatcgcggcggaaggggcgatgaagtttgtatttgtagtagttgtaattacggtttgtttgtttaaattttttagagtcgcggcgttgtcgacgttatgttcgtatagtaaaacgtagtgatcgtgagaagggtattatagaagtaggggttgatataacgattatttttggtacggtttgtttgtagatgcgcgatataaggcgtaatagtttattttttcgttaggtatcgttgtcggttttatcggtgttggtttttgattattgtcggtgtaaatttgattggtggttatgttgcgggtatgatggttgtgtcggataacgttatcgattcgttgatgttattggaagtttatggtcgcgtatttttgta

SEQ ID NO: 5926 - DNA, 696 bp, Artificial Sequence
  chemically treated genomic DNA (Homo sapiens) CpG-island No: 5926
tacaaaaatacgcgaccataaacttccaataacatcaacgaatcgataacgttatccgacacaaccatcatacccgcaacataaccaccaatcaaatttacaccgacaataatcaaaaaccaacaccgataaaaccgacaacgatacctaacgaaaaaataaactattacgccttatatcgcgcatctacaaacaaaccgtaccaaaaataatcgttatatcaacccctacttctataatacccttctcacgatcactacgttttactatacgaacataacgtcgacaacgccgcgactctaaaaaatttaaacaaacaaaccgtaattacaactactacaaatacaaacttcatcgccccttccgccgcgataaacgaccaaatacaaacgattcgtcaaacgctaaacgctacgaaatttaaaaatacgacgattatatcgtattcgaccaaattcgcctcctccttttataacccgttccgtaaaactaccgaaaacgcattaaaaaacgaccgcaaaaactatcaaataaacccaataaaccgtcgtaaaacgattcgtaaatcactactaaataaaacccaaaacgcaaactacctaataattaaacctactaaaacgtacctcgacatcgtacgtaaactacgtaaacgtactaaattaccgattaacgcgtatcaaataaacgataaat

SEQ ID NO: 5927 - DNA, 696 bp, Artificial Sequence
  chemically treated genomic DNA (Homo sapiens) CpG-island No: 5927
tgtaagaatacgcgattatagatttttagtgatattagcggatcggtaacgttattcggtatagttattatattcgtaatataattattaattaggtttgtatcggtagtggttaggaattagtatcgatgaaatcggtagcgatgtttggcgggaagatggattgttgcgttttatgtcgcgtatttgtaagtagatcgtgttagaaatgatcgttatgttagtttttgtttttgtgatattttttttacggttattgcgttttgttgtgcgagtatggcgtcgataacgtcgcgattttggaaaatttaggtaagtaagtcgtggttgtagttgttgtaggtgtagattttatcgtttttttcgtcgcgatggacggttaggtataggcgattcgttaggcgttggacgttgcgggatttaaagatacggcgattatgtcgtattcgattaagttcgttttttttttttatggttcgtttcgtgaagttgtcggaagcgtattaaaaggcgatcgtaaaagttattagatgaatttaatgaatcgtcgtgaggcgattcgtgaattattgttggatgaagtttagggcgtagattgtttgatggttaaatttgttggagcgtatttcgatatcgtgcgtgagttgcgtgaacgtattgaattgtcgattggcgcgtattaggtgagcggtgagt

SEQ ID NO: 5928 - DNA, 696 bp, Artificial Sequence
  chemically treated genomic DNA (Homo sapiens) CpG-island No: 5928
actcaccgctcacctaatacgcgccaatcgacaattcaatacgttcacgcaactcacgcacgatatcgaaatacgctccaacaaatttaaccatcaaacaatctacgccctaaacttcatccaacaataattcacgaatcgcctcacgacgattcattaaattcatctaataacttttacgatcgccttttaatacgcttccgacaacttcacgaaacgaaccataaaaaaaaaaaacgaacttaatcgaatacgacataatcgccgtatctttaaatcccgcaacgtccaacgcctaacgaatcgcctatacctaaccgtccatcgcgacgaaaaaaacgataaaatctacacctacaacaactacaaccacgacttacttacctaaattttccaaaatcgcgacgttatcgacgccatactcgcacaacaaaacgcaataaccgtaaaaaaaatatcacaaaaacaaaaactaacataacgatcatttctaacacgatctacttacaaatacgcgacataaaacgcaacaatccatcttcccgccaaacatcgctaccgatttcatcgatactaattcctaaccactaccgatacaaacctaattaataattatattacgaatataataactataccgaataacgttaccgatccgctaatatcactaaaaatctataatcgcgtattcttaca

SEQ ID NO: 5929 - DNA, 828 bp, Artificial Sequence
  chemically treated genomic DNA (Homo sapiens) CpG-island No: 5929
cgtcgtttggagtagatacgtcgtcgtcgcgtttttgggaacggttagggaagtaagtagaagtcgggaagtcgcgaaagatgcgagaaagtgcgattttttttttagattttcggtttttcgtcgaaatttttgtcggtcggttaaattttagataatggaagttttacgtttttatttttatttttttttataagttcggtcgcgggtttttttcggttcgggatttcggcgttagtttcggagtcggagtttgtacgatacgttttttttcgtcggggtaggatgataaacggatatcggtgattcgttgttgtttatataaatatgtgatatttgggcgggtatacggtatttcgatgtcggtgtatcgttaaggttggaggatcgagtaagaagaaagagtgtattatttcgcgatgaaatgcggggaggtaataatattggtgcggtattggggaagtaaggacggaagcgggcgggtttagtattgttgttgtgcggggaaagttagtgagcgagtggaaatgggagggtatgtggggcgatgtagtggagtacggtttcgtaggaggggaacgtacggtggtttcgtgcgtggttggagttttgagagtagtcgtgatagagacgggtaggtcgtgttatcgttttaaagagcgtggatgtagtgggtagtggagggtcgagttttgaattttcgagggagtttggacggtttaggggtgggagagtcgttaatatcgttgtgcggacgcgatttgtatgagaatatttttatttgggggcgaatatgtagaaggtatggggcggtaatgttattgagat

SEQ ID NO: 5930 - DNA, 828 bp, Artificial Sequence
  chemically treated genomic DNA (Homo sapiens) CpG-island No: 5930
atctcaataacattaccgccccataccttctacatattcgcccccaaataaaaatattctcatacaaatcgcgtccgcacaacgatattaacgactctcccacccctaaaccgtccaaactccctcgaaaattcaaaactcgaccctccactacccactacatccacgctctttaaaacgataacacgacctacccgtctctatcacgactactctcaaaactccaaccacgcacgaaaccaccgtacgttcccctcctacgaaaccgtactccactacatcgccccacataccctcccatttccactcgctcactaactttccccgcacaacaacaatactaaacccgcccgcttccgtccttacttccccaataccgcaccaatattattacctccccgcatttcatcgcgaaataatacactctttcttcttactcgatcctccaaccttaacgatacaccgacatcgaaataccgtatacccgcccaaatatcacatatttatataaacaacaacgaatcaccgatatccgtttatcatcctaccccgacgaaaaaaaacgtatcgtacaaactccgactccgaaactaacgccgaaatcccgaaccgaaaaaaacccgcgaccgaacttataaaaaaaaataaaaataaaaacgtaaaacttccattatctaaaatttaaccgaccgacaaaaatttcgacgaaaaaccgaaaatctaaaaaaaaaatcgcactttctcgcatctttcgcgacttcccgacttctacttacttccctaaccgttcccaaaaacgcgacgacgacgtatctactccaaacgacg

SEQ ID NO: 5931 - DNA, 828 bp, Artificial Sequence
  chemically treated genomic DNA (Homo sapiens) CpG-island No: 5931
gttttaatgatattgtcgttttatgttttttatatattcgtttttaaatagagatatttttatgtaaatcgcgttcgtataacggtattaacggtttttttatttttgggtcgtttagattttttcggaaatttaaaattcggttttttattgtttattatatttacgttttttgaggcgatggtacggtttgttcgtttttgttacggttgtttttaaaattttagttacgtacggggttatcgtgcgttttttttttacggggtcgtgttttattgtatcgttttatatgtttttttatttttattcgtttattggtttttttcgtataataataatattaggttcgttcgttttcgtttttatttttttaatatcgtattaatgttgttgttttttcgtattttatcgcggaatagtatattttttttttttattcggttttttagttttgacgatgtatcggtatcggggtgtcgtgtgttcgtttaagtgttatatgtttgtatgggtaatagcgggttatcgatattcgtttgttattttgtttcggcgggagggggcgtatcgtgtaggtttcgatttcggggttggcgtcggggtttcgggtcgaggggaattcgcgatcggatttgtgggggagaatgaggatgaaaacgtggagtttttattgtttagggtttgatcggtcgatagggatttcgacgggggatcggggatttggggagggggtcgtattttttcgtatttttcgcggtttttcggtttttgtttgtttttttgatcgtttttaggggcgcggcggcgacgtgtttgttttaggcggcg

SEQ ID NO: 5932 - DNA, 828 bp, Artificial Sequence
  chemically treated genomic DNA (Homo sapiens) CpG-island No: 5932
cgccgcctaaaacaaacacgtcgccgccgcgcccctaaaaacgatcaaaaaaacaaacaaaaaccgaaaaaccgcgaaaaatacgaaaaaatacgaccccctccccaaatccccgatcccccgtcgaaatccctatcgaccgatcaaaccctaaacaataaaaactccacgttttcatcctcattctcccccacaaatccgatcgcgaattcccctcgacccgaaaccccgacgccaaccccgaaatcgaaacctacacgatacgccccctcccgccgaaacaaaataacaaacgaatatcgataacccgctattacccatacaaacatataacacttaaacgaacacacgacaccccgataccgatacatcgtcaaaactaaaaaaccgaataaaaaaaaaaaatatactattccgcgataaaatacgaaaaaacaacaacattaatacgatattaaaaaaataaaaacgaaaacgaacgaacctaatattattattatacgaaaaaaaccaataaacgaataaaaataaaaaaacatataaaacgatacaataaaacacgaccccgtaaaaaaaaaacgcacgataaccccgtacgtaactaaaattttaaaaacaaccgtaacaaaaacgaacaaaccgtaccatcgcctcaaaaaacgtaaatataataaacaataaaaaaccgaattttaaatttccgaaaaaatctaaacgacccaaaaataaaaaaaccgttaataccgttatacgaacgcgatttacataaaaatatctctatttaaaaacgaatatataaaaaacataaaacgacaatatcattaaaac

SEQ ID NO: 5933 - DNA, 503 bp, Artificial Sequence
  chemically treated genomic DNA (Homo sapiens) CpG-island No: 5933
cgtgcgcgtttaatttggaggtagtcgttttcgtcgttgataggtgttgtttagagggcgtcgggtgcggtttttggcgtagttggacgcgtacgtttcggtgcgtgtagtttttcgagttcggttagagagaagagggagttagggcgcggtttgggggacgttagtggattggagtcgcggagtttcgagggaaaaattttgtaggcgtcgcggtcgggattcggttacggttttagtttattttagtaggtgcgggaggaagaggtagcgtcggagtttcgaggttagagagtttcggcggcggcggtcgtttttttttttcgagttggtttgaagtcgttgggtattttcggtttttgttgatgcgttcgttcgtcgtcgtcgtcgttatcgttagcgtcgcggggattcgggaggaggtgtagtcgaagagggaggagaagtaggaggaggaggacgattaggagcggagaggaggagtagggggtggaggatggagt

SEQ ID NO: 5934 - DNA, 503 bp, Artificial Sequence
  chemically treated genomic DNA (Homo sapiens) CpG-island No: 5934
actccatcctccaccccctactcctcctctccgctcctaatcgtcctcctcctcctacttctcctccctcttcgactacacctcctcccgaatccccgcgacgctaacgataacgacgacgacgacgaacgaacgcatcaacaaaaaccgaaaatacccaacgacttcaaaccaactcgaaaaaaaaaaacgaccgccgccgccgaaactctctaacctcgaaactccgacgctacctcttcctcccgcacctactaaaataaactaaaaccgtaaccgaatcccgaccgcgacgcctacaaaatttttccctcgaaactccgcgactccaatccactaacgtcccccaaaccgcgccctaactccctcttctctctaaccgaactcgaaaaactacacgcaccgaaacgtacgcgtccaactacgccaaaaaccgcacccgacgccctctaaacaacacctatcaacgacgaaaacgactacctccaaattaaacgcgcacg

SEQ ID NO: 5935 - DNA, 503 bp, Artificial Sequence
  chemically treated genomic DNA (Homo sapiens) CpG-island No: 5935
gttttattttttattttttgtttttttttttcgtttttggtcgtttttttttttttgtttttttttttttttcggttgtattttttttcgggttttcgcggcgttggcggtggcggcggcggcggcgggcgggcgtattagtagaaatcgggagtgtttagcgattttaggttagttcgggggaaagaagcggtcgtcgtcgtcgaggttttttggtttcgggatttcggcgttgtttttttttttcgtatttgttggggtgggttggagtcgtaatcgaatttcggtcgcggcgtttgtaaagtttttttttcgaagtttcgcggttttagtttattggcgttttttaggtcgcgttttggtttttttttttttttgatcgagttcgggaagttgtacgtatcggggcgtgcgcgtttagttgcgttagggatcgtattcggcgttttttgggtagtatttgttagcggcgggggcggttgtttttaaattgggcgcgtacg

SEQ ID NO: 5936 - DNA, 503 bp, Artificial Sequence
  chemically treated genomic DNA (Homo sapiens) CpG-island No: 5936
cgtacgcgcccaatttaaaaacaaccgcccccgccgctaacaaatactacccaaaaaacgccgaatacgatccctaacgcaactaaacgcgcacgccccgatacgtacaacttcccgaactcgatcaaaaaaaaaaaaaaaccaaaacgcgacctaaaaaacgccaataaactaaaaccgcgaaacttcgaaaaaaaaactttacaaacgccgcgaccgaaattcgattacgactccaacccaccccaacaaatacgaaaaaaaaaaacaacgccgaaatcccgaaaccaaaaaacctcgacgacgacgaccgcttctttcccccgaactaacctaaaatcgctaaacactcccgatttctactaatacgcccgcccgccgccgccgccgccaccgccaacgccgcgaaaacccgaaaaaaaatacaaccgaaaaaaaaaaaaaaacaaaaaaaaaaaaacgaccaaaaacgaaaaaaaaaaacaaaaaataaaaaataaaac

SEQ ID NO: 5937 - DNA, 600 bp, Artificial Sequence
  chemically treated genomic DNA (Homo sapiens) CpG-island No: 5937
ggggtataggtgcgcgtatgtaattagtgatggcgtttggtttaattgagttatgttcgttaacgcgtatattttaagtattacgttgtatttattagcgtaggtttattatgtcggtataggtggtatagtagtatgtatcgcgttaacgcgggtatatgtttaggggcgtggtgcgtatgtgatttacgggttgatgcgtttaattttggtaggaatttatgggcgttagtttcgcggttttttgttggtgatagtttttggtttgtatgagttttttttcgtttttgcgttggttatacgtttttcggaggtttggtattgtttcgtattggtcgtgtttttttgcgcggtcgtcgtggtttttattgggttttcgcgggtgtatcgatttatatgtttcggggttcgcgtcgtttcggttagtttttttgtatcgattttcgtttgttcggggtttcgttcggcggttatagttgtttatcggtattgtatttttgtcgcggtcgtttttgggttttttgatttgttttgttcgtttagtgtgtttgtttcgtttgtttacgttttgtgtgttgcgtgtgcgtgttgttttttttt

SEQ ID NO: 5938 - DNA, 600 bp, Artificial Sequence
  chemically treated genomic DNA (Homo sapiens) CpG-island No: 5938
aaaaaaaaacaacacgcacacgcaacacacaaaacgtaaacaaacgaaacaaacacactaaacgaacaaaacaaatcaaaaaacccaaaaacgaccgcgacaaaaatacaataccgataaacaactataaccgccgaacgaaaccccgaacaaacgaaaatcgatacaaaaaaactaaccgaaacgacgcgaaccccgaaacatataaatcgatacacccgcgaaaacccaataaaaaccacgacgaccgcgcaaaaaaacacgaccaatacgaaacaataccaaacctccgaaaaacgtataaccaacgcaaaaacgaaaaaaaactcatacaaaccaaaaactatcaccaacaaaaaaccgcgaaactaacgcccataaattcctaccaaaattaaacgcatcaacccgtaaatcacatacgcaccacgcccctaaacatatacccgcgttaacgcgatacatactactataccacctataccgacataataaacctacgctaataaatacaacgtaatacttaaaatatacgcgttaacgaacataactcaattaaaccaaacgccatcactaattacatacgcgcacctatacccc

SEQ ID NO: 5939 - DNA, 600 bp, Artificial Sequence
  chemically treated genomic DNA (Homo sapiens) CpG-island No: 5939
ggaaaggagtagtacgtatacgtaatatataaagcgtgaataaacgaggtaagtatattgagcgaataaaataaattagagggtttaggggcgatcgcgataggagtgtaatatcggtgagtagttgtagtcgtcgggcgaggtttcgagtaggcgggaatcgatatagggagattgatcgaaacgacgcgagtttcgggatatgtaaatcggtatattcgcgagaatttaatgagggttacggcgatcgcgtagaggagtacgattagtgcgaagtagtgttagattttcgaggagcgtgtgattagcgtaaaaacgggagaaagtttatataggttagagattattattagtagagaatcgcggagttgacgtttatgagtttttgttagggttaaacgtattagttcgtgggttatatacgtattacgtttttagatatgtgttcgcgttgacgcgatgtatgttgttgtgttatttgtgtcgatatggtaaatttgcgttggtaagtgtagcgtgatatttagaatatgcgcgttgacggatatggtttagttgagttaagcgttattattagttatatacgcgtatttatgtttt

SEQ ID NO: 5940 - DNA, 600 bp, Artificial Sequence
  chemically treated genomic DNA (Homo sapiens) CpG-island No: 5940
aaaacataaatacgcgtatataactaataataacgcttaactcaactaaaccatatccgtcaacgcgcatattctaaatatcacgctacacttaccaacgcaaatttaccatatcgacacaaataacacaacaacatacatcgcgtcaacgcgaacacatatctaaaaacgtaatacgtatataacccacgaactaatacgtttaaccctaacaaaaactcataaacgtcaactccgcgattctctactaataataatctctaacctatataaactttctcccgtttttacgctaatcacacgctcctcgaaaatctaacactacttcgcactaatcgtactcctctacgcgatcgccgtaaccctcattaaattctcgcgaatataccgatttacatatcccgaaactcgcgtcgtttcgatcaatctccctatatcgattcccgcctactcgaaacctcgcccgacgactacaactactcaccgatattacactcctatcgcgatcgcccctaaaccctctaatttattttattcgctcaatatacttacctcgtttattcacgctttatatattacgtatacgtactactcctttcc

SEQ ID NO: 5941 - DNA, 682 bp, Artificial Sequence
  chemically treated genomic DNA (Homo sapiens) CpG-island No: 5941
cgtaaagcggtattgaataaattcgtcgatttaatggaagtttacgtcgaatagttggtattgttggaaattttcgatatcggtaaatcgattcgttatagtttgcgtgatgatattttcggcgcggcgcgcgttattcgttggtacgtcgaagcgatcgataaagtgtatggcgaagtggcgattattagtagttatgagttggcgatgatcgtgcgtgaatcggtcggcgtgattgtcgttatcgtgtcgtggaatttttcgttgttgttgatttgttggaaattcggttcggcgttggcggcgggaaatagcgtgattttaaaatcggttgaaaaattatcgtttagtgcgattcgtttcgcggggttggcgatagaagtaggtttgtcggatggtgtgttgaacgtggtgacgggttttggttatgaagtcgggtaagcgttgacgggttataacgaaattaatattaatggttttatcgagtaatttttttcgggaaatagtggttgataaattcggcgaatagaatatgaatcgcgtttggttggaagtcgcgcgtaaaagggttaatatttgttttcggtgtttggttcgttttgttattagtcggtaagcgggtttttattatgatcggattatttttgtagatatttatagtagtagaattaaaaaaaattaa

SEQ ID NO: 5942 - DNA, 682 bp, Artificial Sequence
  chemically treated genomic DNA (Homo sapiens) CpG-island No: 5942
ttaattttttttaattctactactataaatatctacaaaaataatccgatcataataaaaacccgcttaccgactaataacaaaacgaaccaaacaccgaaaacaaatattaacccttttacgcgcgacttccaaccaaacgcgattcatattctattcgccgaatttatcaaccactatttcccgaaaaaaattactcgataaaaccattaatattaatttcgttataacccgtcaacgcttacccgacttcataaccaaaacccgtcaccacgttcaacacaccatccgacaaacctacttctatcgccaaccccgcgaaacgaatcgcactaaacgataatttttcaaccgattttaaaatcacgctatttcccgccgccaacgccgaaccgaatttccaacaaatcaacaacaacgaaaaattccacgacacgataacgacaatcacgccgaccgattcacgcacgatcatcgccaactcataactactaataatcgccacttcgccatacactttatcgatcgcttcgacgtaccaacgaataacgcgcgccgcgccgaaaatatcatcacgcaaactataacgaatcgatttaccgatatcgaaaatttccaacaataccaactattcgacgtaaacttccattaaatcgacgaatttattcaataccgctttacg

SEQ ID NO: 5943 - DNA, 682 bp, Artificial Sequence
  chemically treated genomic DNA (Homo sapiens) CpG-island No: 5943
ttgattttttttagttttgttattatgggtatttgtaggggtgattcgattataatgggggttcgtttgtcggttagtgataaaacggattaggtatcgaaaataaatgttggtttttttgcgcgcggtttttagttagacgcggtttatgttttgttcgtcggatttgttagttattgtttttcggaaggggttattcggtaaagttattggtgttgatttcgttatgattcgttagcgtttgttcggttttatgattaaaattcgttattacgtttaatatattattcggtaagtttgtttttatcgttagtttcgcgagacgaatcgtattgagcggtgattttttagtcggttttagaattacgttgtttttcgtcgttagcgtcgggtcgagtttttagtaagttagtaatagcgggaagttttacggtacgatggcggtaattacgtcgatcggtttacgtacgattatcgttagtttatggttattggtggtcgttatttcgttatatattttgtcgatcgtttcggcgtattagcgaatggcgcgcgtcgcgtcgggaatattattacgtagattgtgacgaatcggtttgtcggtgtcgagagtttttagtagtgttagttgttcggcgtgggtttttattaaatcggcgagtttatttagtatcgttttacg

SEQ ID NO: 5944 - DNA, 682 bp, Artificial Sequence
  chemically treated genomic DNA (Homo sapiens) CpG-island No: 5944
cgtaaaacgatactaaataaactcgccgatttaataaaaacccacgccgaacaactaacactactaaaaactctcgacaccgacaaaccgattcgtcacaatctacgtaataatattcccgacgcgacgcgcgccattcgctaatacgccgaaacgatcgacaaaatatataacgaaataacgaccaccaataaccataaactaacgataatcgtacgtaaaccgatcgacgtaattaccgccatcgtaccgtaaaacttcccgctattactaacttactaaaaactcgacccgacgctaacgacgaaaaacaacgtaattctaaaaccgactaaaaaatcaccgctcaatacgattcgtctcgcgaaactaacgataaaaacaaacttaccgaataatatattaaacgtaataacgaattttaatcataaaaccgaacaaacgctaacgaatcataacgaaatcaacaccaataactttaccgaataaccccttccgaaaaacaataactaacaaatccgacgaacaaaacataaaccgcgtctaactaaaaaccgcgcgcaaaaaaaccaacatttattttcgatacctaatccgttttatcactaaccgacaaacgaacccccattataatcgaatcacccctacaaatacccataataacaaaactaaaaaaaatcaa

SEQ ID NO: 5945 - DNA, 934 bp, Artificial Sequence
  chemically treated genomic DNA (Homo sapiens) CpG-island No: 5945
cgaaatcgattggttggtagttagaaatgggcgaagtcgaattggtgattatgttgacgttgggttatatcgttggagtcgatattgaagaaatcgattttatcgtagaagtggtcgatgatgtagtatatcgacggaatttttattatgattttaagcgtaatcgtttttgtatgacgtaggttatcgcgtttaagtttaacgatcgttttttggatttcgttttttatttataagatttgatcgaggttgtgaattatcgggattattaattgggcgttgtcgaaattggcggcgcgtaaaatggttcgtagttgagtgcggaataggttagtaaatttcgggtaaatacgtatcgcgcgatagtcgaggaacgggttttttttttggggaatatttagataaggaatgtttttatcgtcggcgatgtttatcgtgcggaagataatcggtttgtcgttcgtcgttagtagtatatgttggtaggttttaaattgtttttgttcgttcggcgcgttgtcgcgatttatatagagtatttcggtacggaatagttcgatatttttcgcgtcgttggtaaacgcgtttggcgtttttagagcggtgtcgatattcgtcgtaatattaatacgtttgttattacgggaataggttagttgcgcggtagtttgcgtttgttgtttttggcgtttattcgttagcgtttgcgcgatttgataataatcgtttatcgcgttattcgggttaatcgttagtacgtcgtattgggcgttaagtattgtaggttgttcggtataacgggtaatcgtatttagcggtaagttatttagtatcgggatcgtcgaggtacgggttagaattagtgtatgcgaggtgcgttcggttttttttagaattatgttcgtaagattttttaaattaaggtttaaaaata

SEQ ID NO: 5946 - DNA, 934 bp, Artificial Sequence
  chemically treated genomic DNA (Homo sapiens) CpG-island No: 5946
tatttttaaaccttaatttaaaaaatcttacgaacataattctaaaaaaaaccgaacgcacctcgcatacactaattctaacccgtacctcgacgatcccgatactaaataacttaccgctaaatacgattacccgttataccgaacaacctacaatacttaacgcccaatacgacgtactaacgattaacccgaataacgcgataaacgattattatcaaatcgcgcaaacgctaacgaataaacgccaaaaacaacaaacgcaaactaccgcgcaactaacctattcccgtaataacaaacgtattaatattacgacgaatatcgacaccgctctaaaaacgccaaacgcgtttaccaacgacgcgaaaaatatcgaactattccgtaccgaaatactctatataaatcgcgacaacgcgccgaacgaacaaaaacaatttaaaacctaccaacatatactactaacgacgaacgacaaaccgattatcttccgcacgataaacatcgccgacgataaaaacattccttatctaaatattccccaaaaaaaaaacccgttcctcgactatcgcgcgatacgtatttacccgaaatttactaacctattccgcactcaactacgaaccattttacgcgccgccaatttcgacaacgcccaattaataatcccgataattcacaacctcgatcaaatcttataaataaaaaacgaaatccaaaaaacgatcgttaaacttaaacgcgataacctacgtcatacaaaaacgattacgcttaaaatcataataaaaattccgtcgatatactacatcatcgaccacttctacgataaaatcgatttcttcaatatcgactccaacgatataacccaacgtcaacataatcaccaattcgacttcgcccatttctaactaccaaccaatcgatttcg

SEQ ID NO: 5947 - DNA, 934 bp, Artificial Sequence
  chemically treated genomic DNA (Homo sapiens) CpG-island No: 5947
tgtttttgagttttgatttgaaaaattttgcgggtatgattttggagaaaatcgggcgtatttcgtatatattgattttggttcgtgtttcggcgatttcggtattgagtggtttgtcgttggatgcgattgttcgttatgtcgggtaatttgtagtgtttgacgtttagtgcggcgtgttggcgattaattcgaatgacgcggtgagcggttattattaggtcgcgtagacgttggcggataaacgttaaaaataataggcgtaggttgtcgcgtagttggtttattttcgtgataataagcgtattgatattgcggcgaatatcggtatcgttttggaagcgttaggcgcgtttgttaacggcgcggaaggtgtcgggttgtttcgtatcgaaatgttttatatggatcgcgatagcgcgtcggacgagtaggagtaatttgaagtttattagtatgtgttattggcggcgggcgataagtcgattatttttcgtacgatggatatcgtcggcgataaaagtattttttatttgaatattttttaggaagagaattcgtttttcggttatcgcgcggtacgtatttattcggaatttgttggtttgtttcgtatttaattgcgggttattttgcgcgtcgttagtttcggtaacgtttagttgatgatttcgatggtttatagtttcgattagattttatgggtgaaaggcgagatttaaaaagcgatcgttgagtttaagcgcgatggtttgcgttatgtagagacgattacgtttgggattatggtggaagtttcgtcggtgtgttatattatcgattatttttgcgatgaggtcgatttttttagtatcggttttaacgatatgatttagcgttagtatgattattagttcgatttcgtttatttttgattgttagttaatcggtttcg

SEQ ID NO: 5948 - DNA, 934 bp, Artificial Sequence
  chemically treated genomic DNA (Homo sapiens) CpG-island No: 5948
cgaaaccgattaactaacaatcaaaaataaacgaaatcgaactaataatcatactaacgctaaatcatatcgttaaaaccgatactaaaaaaatcgacctcatcgcaaaaataatcgataatataacacaccgacgaaacttccaccataatcccaaacgtaatcgtctctacataacgcaaaccatcgcgcttaaactcaacgatcgctttttaaatctcgcctttcacccataaaatctaatcgaaactataaaccatcgaaatcatcaactaaacgttaccgaaactaacgacgcgcaaaataacccgcaattaaatacgaaacaaaccaacaaattccgaataaatacgtaccgcgcgataaccgaaaaacgaattctcttcctaaaaaatattcaaataaaaaatacttttatcgccgacgatatccatcgtacgaaaaataatcgacttatcgcccgccgccaataacacatactaataaacttcaaattactcctactcgtccgacgcgctatcgcgatccatataaaacatttcgatacgaaacaacccgacaccttccgcgccgttaacaaacgcgcctaacgcttccaaaacgataccgatattcgccgcaatatcaatacgcttattatcacgaaaataaaccaactacgcgacaacctacgcctattatttttaacgtttatccgccaacgtctacgcgacctaataataaccgctcaccgcgtcattcgaattaatcgccaacacgccgcactaaacgtcaaacactacaaattacccgacataacgaacaatcgcatccaacgacaaaccactcaataccgaaatcgccgaaacacgaaccaaaatcaatatatacgaaatacgcccgattttctccaaaatcatacccgcaaaatttttcaaatcaaaactcaaaaaca

SEQ ID NO: 5949 - DNA, 619 bp, Artificial Sequence
  chemically treated genomic DNA (Homo sapiens) CpG-island No: 5949
cgcgtttcgggttttaggattcgttttcgaggcgttgcgcgcggggaggggattcgggaatttaggcgttcggcgtttcgtttttcgttttcggggtagcgcggttatttgtatcgttcgagtcgtatttggcggaggtagaagttataaattcggcgagtttagagcggtggagcggagaggagggacggtattcggttgtagggaggagggaggcggtagcggtagcggcggcgtggagggcgtagcgcgtcgcgcggcggaggagggtagacggcggcggcggcggcgttcggttcgttttgttcggtcggttgggcgcgtattcgggttcgtatcgcgtcgttgcggacgtatatggtagcgtgagaggtcggcggcgggaggagcgggcggcgtcgggtcggggttgtagggtcgtatggatagcggcgttatttcggtcggtttttattagggttttttatttgcgggcgttatttttcggattatggtgtttcggcgtcgttcgggttaagagcggtcggttggagtcgttgagttttcgttgcggtcgggagttgtatgggggagcgtcggtagcgtttgggaagatgtttcggtcggagttgtttttgtt

SEQ ID NO: 5950 - DNA, 619 bp, Artificial Sequence
  chemically treated genomic DNA (Homo sapiens) CpG-island No: 5950
aacaaaaacaactccgaccgaaacatcttcccaaacgctaccgacgctcccccatacaactcccgaccgcaacgaaaactcaacgactccaaccgaccgctcttaacccgaacgacgccgaaacaccataatccgaaaaataacgcccgcaaataaaaaaccctaataaaaaccgaccgaaataacgccgctatccatacgaccctacaaccccgacccgacgccgcccgctcctcccgccgccgacctctcacgctaccatatacgtccgcaacgacgcgatacgaacccgaatacgcgcccaaccgaccgaacaaaacgaaccgaacgccgccgccgccgccgtctaccctcctccgccgcgcgacgcgctacgccctccacgccgccgctaccgctaccgcctccctcctccctacaaccgaataccgtccctcctctccgctccaccgctctaaactcgccgaatttataacttctacctccgccaaatacgactcgaacgatacaaataaccgcgctaccccgaaaacgaaaaacgaaacgccgaacgcctaaattcccgaatcccctccccgcgcgcaacgcctcgaaaacgaatcctaaaacccgaaacgcg

SEQ ID NO: 5951 - DNA, 619 bp, Artificial Sequence
  chemically treated genomic DNA (Homo sapiens) CpG-island No: 5951
gataggggtagtttcggtcggggtatttttttaagcgttgtcggcgtttttttatgtagttttcggtcgtagcgggggtttagcggttttagtcggtcgtttttagttcgggcggcgtcgaggtattatgattcggggggtggcgttcgtagatggggggttttagtaggggtcggtcggggtggcgtcgttgtttatgcggttttgtagtttcgattcggcgtcgttcgtttttttcgtcgtcggttttttacgttgttatgtgcgttcgtagcggcgcggtgcgagttcgggtgcgcgtttagtcggtcgggtagagcgagtcgagcgtcgtcgtcgtcgtcgtttgttttttttcgtcgcgcggcgcgttgcgttttttacgtcgtcgttgtcgttgtcgttttttttttttttgtagtcgggtgtcgtttttttttttcgttttatcgttttgagttcgtcgggtttgtgatttttgttttcgttaggtgcggttcgggcggtgtaggtaatcgcgttgtttcggaaacgggaggcggagcgtcgggcgtttgggttttcgggtttttttttcgcgcgtagcgtttcgagggcgggttttagggttcgagacgcg

SEQ ID NO: 5952 - DNA, 619 bp, Artificial Sequence
  chemically treated genomic DNA (Homo sapiens) CpG-island No: 5952
cgcgtctcgaaccctaaaacccgccctcgaaacgctacgcgcgaaaaaaaaacccgaaaacccaaacgcccgacgctccgcctcccgtttccgaaacaacgcgattacctacaccgcccgaaccgcacctaacgaaaacaaaaatcacaaacccgacgaactcaaaacgataaaacgaaaaaaaaaaacgacacccgactacaaaaaaaaaaaaaacgacaacgacaacgacgacgtaaaaaacgcaacgcgccgcgcgacgaaaaaaaacaaacgacgacgacgacgacgctcgactcgctctacccgaccgactaaacgcgcacccgaactcgcaccgcgccgctacgaacgcacataacaacgtaaaaaaccgacgacgaaaaaaacgaacgacgccgaatcgaaactacaaaaccgcataaacaacgacgccaccccgaccgacccctactaaaaccccccatctacgaacgccaccccccgaatcataatacctcgacgccgcccgaactaaaaacgaccgactaaaaccgctaaacccccgctacgaccgaaaactacataaaaaaacgccgacaacgcttaaaaaaataccccgaccgaaactacccctatc

SEQ ID NO: 5953 - DNA, 578 bp, Artificial Sequence
  chemically treated genomic DNA (Homo sapiens) CpG-island No: 5953
gcgtatttgtaggtcggataaggcgtttacgtcgtattcgatattaacgtttgatgcgacgtttgtcgcgttttattaggtttacgttagatagcgtaatagtttgatttagcgtgattttgtaggtcggataaggcgtttatgtcgtattcgatattaacgtttgatgcgacgtttaacgcgttttattaggtttacgttagatagcgtaatagtttgatttagcgtgattttgtaggtcggataaggcgtttacgtcgtattcgatattaatgtttgatgcgacgtttgtcgcgttttattaggtttataaatgtttttcgtaggtcggataaggcgtttacgtcgtattcggtaatcgtgtcgattagatagtgattattattttatcgttatcgataaaaattttgtcgtttgggtaaaattattattttttttttgttacgttacgttgtcgcgtagggatattcgttgattgatattgttcgtgatttttatttttattttatttcgttgttttatcgtatcgttattgatagtgttgttattttttttaattttcgtcgaatggggatcgt

SEQ ID NO: 5954 - DNA, 578 bp, Artificial Sequence
  chemically treated genomic DNA (Homo sapiens) CpG-island No: 5954
acgatccccattcgacgaaaattaaaaaaaataacaacactatcaataacgatacgataaaacaacgaaataaaataaaaataaaaatcacgaacaatatcaatcaacgaatatccctacgcgacaacgtaacgtaacaaaaaaaaaataataattttacccaaacgacaaaatttttatcgataacgataaaataataatcactatctaatcgacacgattaccgaatacgacgtaaacgccttatccgacctacgaaaaacatttataaacctaataaaacgcgacaaacgtcgcatcaaacattaatatcgaatacgacgtaaacgccttatccgacctacaaaatcacgctaaatcaaactattacgctatctaacgtaaacctaataaaacgcgttaaacgtcgcatcaaacgttaatatcgaatacgacataaacgccttatccgacctacaaaatcacgctaaatcaaactattacgctatctaacgtaaacctaataaaacgcgacaaacgtcgcatcaaacgttaatatcgaatacgacgtaaacgccttatccgacctacaaatacgc

SEQ ID NO: 5955 - DNA, 578 bp, Artificial Sequence
  chemically treated genomic DNA (Homo sapiens) CpG-island No: 5955
acgatttttattcgacggaaattgaagaggatggtagtattattagtgacgatgcggtgaagtaacggggtgaaataaaagtgggagttacgggtaatattagttagcgagtgtttttgcgcggtagcgtggcgtggtagaaagggagtgatgattttgtttagacggtagggtttttgtcgatgacggtgaaatggtaattattgtttagtcggtacggttgtcggatgcggcgtaaacgttttattcggtttacggggagtatttgtaggtttgataagacgcggtaagcgtcgtattaggtattgatgtcggatgcggcgtaaacgttttattcgatttataaaattacgttaaattaggttattgcgttgtttggcgtaggtttgataagacgcgttaagcgtcgtattaggcgttgatgtcggatgcggtataaacgttttattcgatttataaaattacgttaaattaggttattgcgttgtttggcgtaggtttgataagacgcggtaagcgtcgtattaggcgttgatgtcggatgcggcgtaaacgttttattcggtttataaatgcgt

SEQ ID NO: 5956 - DNA, 578 bp, Artificial Sequence
  chemically treated genomic DNA (Homo sapiens) CpG-island No: 5956
acgcatttataaaccgaataaaacgtttacgccgcatccgacatcaacgcctaatacgacgcttaccgcgtcttatcaaacctacgccaaacaacgcaataacctaatttaacgtaattttataaatcgaataaaacgtttataccgcatccgacatcaacgcctaatacgacgcttaacgcgtcttatcaaacctacgccaaacaacgcaataacctaatttaacgtaattttataaatcgaataaaacgtttacgccgcatccgacatcaatacctaatacgacgcttaccgcgtcttatcaaacctacaaatactccccgtaaaccgaataaaacgtttacgccgcatccgacaaccgtaccgactaaacaataattaccatttcaccgtcatcgacaaaaaccctaccgtctaaacaaaatcatcactccctttctaccacgccacgctaccgcgcaaaaacactcgctaactaatattacccgtaactcccacttttatttcaccccgttacttcaccgcatcgtcactaataatactaccatcctcttcaatttccgtcgaataaaaatcgt

SEQ ID NO: 5957 - DNA, 774 bp, Artificial Sequence
  chemically treated genomic DNA (Homo sapiens) CpG-island No: 5957
gaaagtcgttagtcgggagtgcgtgcgtttatagaattttttgtcggtggtgaagtgaaaacgtcggagtaattgatattagaataacgttagttttttgaataaatgtaggttgatatgcgttagtagttaacgtagttggttgaagtttcgtggaatgaatagacgtcggaatagcgttagtaaacgttatagcgttaacgttaggcgtagtaattagcggaatagtaacgtttggtttagtagtcgcgtacgattgaataaagttggtagtagtagacgcgtacgtcgtaagtcgtatcggtataggcgtaatcgcgttagtttaaatcggtttttttttagtagtcgtattaggatttgttgtaaatttttgcgtatacgattgcgtagtcgaagtcgtagtaagttgcgttagttgttcgtgtcgttgacgcgttaaaatcgacggcggagaaaaaagacgaacgtcgttggatggtgtagtgcggttcgtttagaggcgcggaataggtagagacggtacgtgtttagttggcgttcgaaggttttgattcgaaaattattattaataatggttggaatcgtgtggttattggttcggtgaaaggtaaagagaacgtagatagtatttttaatcggttgaagatggcgggttatataaattgtattcggttcgtcgtcgggggttgaaatttttaaaattttttttatttataattgtattatgtttcgtatttttgtacggggtttgtattttgtattcgtaattaa

SEQ ID NO: 5958 - DNA, 774 bp, Artificial Sequence
  chemically treated genomic DNA (Homo sapiens) CpG-island No: 5958
ttaattacgaatacaaaatacaaaccccgtacaaaaatacgaaacataatacaattataaataaaaaaaattttaaaaatttcaacccccgacgacgaaccgaatacaatttatataacccgccatcttcaaccgattaaaaatactatctacgttctctttacctttcaccgaaccaataaccacacgattccaaccattattaataataattttcgaatcaaaaccttcgaacgccaactaaacacgtaccgtctctacctattccgcgcctctaaacgaaccgcactacaccatccaacgacgttcgtcttttttctccgccgtcgattttaacgcgtcaacgacacgaacaactaacgcaacttactacgacttcgactacgcaatcgtatacgcaaaaatttacaacaaatcctaatacgactactaaaaaaaaaccgatttaaactaacgcgattacgcctataccgatacgacttacgacgtacgcgtctactactaccaactttattcaatcgtacgcgactactaaaccaaacgttactattccgctaattactacgcctaacgttaacgctataacgtttactaacgctattccgacgtctattcattccacgaaacttcaaccaactacgttaactactaacgcatatcaacctacatttattcaaaaaactaacgttattctaatatcaattactccgacgttttcacttcaccaccgacaaaaaattctataaacgcacgcactcccgactaacgactttc

SEQ ID NO: 5959 - DNA, 774 bp, Artificial Sequence
  chemically treated genomic DNA (Homo sapiens) CpG-island No: 5959
ttggttacgaatatagagtataaatttcgtataaaagtacggggtataatgtaattatagatgggggggattttgagggttttaattttcggcggcgagtcgaatgtagtttgtatgattcgttatttttaatcgattgagggtgttgtttgcgttttttttgttttttatcgggttaatgattatacgattttagttattgttggtggtgattttcgagttaaagttttcgaacgttagttgagtacgtatcgtttttgtttgtttcgcgtttttgaacgaatcgtattgtattatttagcggcgttcgtttttttttttcgtcgtcggttttggcgcgttagcggtacgagtaattggcgtagtttgttgcggtttcgattgcgtagtcgtgtgcgtaggagtttgtagtagattttggtacggttgttgagaagaagtcggtttagattggcgcggttgcgtttgtatcggtgcggtttgcgacgtacgcgtttgttgttgttagttttgtttagtcgtacgcgattgttgagttaggcgttgttgtttcgttaattgttgcgtttgacgttggcgttgtagcgtttgttgacgttgtttcggcgtttgtttattttacggaattttaattagttgcgttggttgttggcgtatattagtttgtatttgtttaagaagttgacgttgttttggtgttagttgtttcggcgtttttattttattatcggtagaaggttttgtgggcgtacgtattttcggttggcgattttt

SEQ ID NO: 5960 - DNA, 774 bp, Artificial Sequence
  chemically treated genomic DNA (Homo sapiens) CpG-island No: 5960
aaaaatcgccaaccgaaaatacgtacgcccacaaaaccttctaccgataataaaataaaaacgccgaaacaactaacaccaaaacaacgtcaacttcttaaacaaatacaaactaatatacgccaacaaccaacgcaactaattaaaattccgtaaaataaacaaacgccgaaacaacgtcaacaaacgctacaacgccaacgtcaaacgcaacaattaacgaaacaacaacgcctaactcaacaatcgcgtacgactaaacaaaactaacaacaacaaacgcgtacgtcgcaaaccgcaccgatacaaacgcaaccgcgccaatctaaaccgacttcttctcaacaaccgtaccaaaatctactacaaactcctacgcacacgactacgcaatcgaaaccgcaacaaactacgccaattactcgtaccgctaacgcgccaaaaccgacgacgaaaaaaaaaaacgaacgccgctaaataatacaatacgattcgttcaaaaacgcgaaacaaacaaaaacgatacgtactcaactaacgttcgaaaactttaactcgaaaatcaccaccaacaataactaaaatcgtataatcattaacccgataaaaaacaaaaaaaacgcaaacaacaccctcaatcgattaaaaataacgaatcatacaaactacattcgactcgccgccgaaaattaaaaccctcaaaatcccccccatctataattacattataccccgtacttttatacgaaatttatactctatattcgtaaccaa

SEQ ID NO: 5961 - DNA, 564 bp, Artificial Sequence
  chemically treated genomic DNA (Homo sapiens) CpG-island No: 5961
tcggattacgcgggtattatttaggggatgcgttttaataaagtggatatcgtttggtacggtaatttgtcggcgatggaagcggtggatcgcgttaatggttaggttttcgtttagacggtcgcggcggatggatcgtcgggttattggagcgtgttgatcgttaataaagatagttcgattaataatttgaacgatttgttggcgaagcggaaagattttatttttggtaatggcgattttaattttatttttggttttttcgttttcggttattacgttttcgttaaaaataatattttcgttagcgattttaagcgtatcgttaacgtcgggtatgaaattaacgcgttggtcgtcgttaataagtaggtggatgttgttattaataatatcgaaaatttcgataagttgaaaattttcgcgttagagaagttgaaagaattgaaggtgatttggaagtcgtcgttgattttaggcgattcgatcgtttggcgtaagaattttttcgaaattattaaagataagatttacgatttttttatgaattacggtaaaacgtcg

SEQ ID NO: 5962 - DNA, 564 bp, Artificial Sequence
  chemically treated genomic DNA (Homo sapiens) CpG-island No: 5962
cgacgttttaccgtaattcataaaaaaatcgtaaatcttatctttaataatttcgaaaaaattcttacgccaaacgatcgaatcgcctaaaatcaacgacgacttccaaatcaccttcaattctttcaacttctctaacgcgaaaattttcaacttatcgaaattttcgatattattaataacaacatccacctacttattaacgacgaccaacgcgttaatttcatacccgacgttaacgatacgcttaaaatcgctaacgaaaatattatttttaacgaaaacgtaataaccgaaaacgaaaaaaccaaaaataaaattaaaatcgccattaccaaaaataaaatctttccgcttcgccaacaaatcgttcaaattattaatcgaactatctttattaacgatcaacacgctccaataacccgacgatccatccgccgcgaccgtctaaacgaaaacctaaccattaacgcgatccaccgcttccatcgccgacaaattaccgtaccaaacgatatccactttattaaaacgcatcccctaaataatacccgcgtaatccga

SEQ ID NO: 5963 - DNA, 564 bp, Artificial Sequence
  chemically treated genomic DNA (Homo sapiens) CpG-island No: 5963
cggcgttttgtcgtagtttataaagaagtcgtagattttgtttttggtggtttcggaaagatttttgcgttagacgatcggatcgtttgggattagcggcgatttttagattatttttagtttttttagtttttttggcgcggaggtttttagtttgtcgaggttttcggtgttgttggtggtaatatttatttgtttgttggcgacggttagcgcgttggttttatgttcggcgttgacggtgcgtttgaagtcgttggcggagatattgtttttggcgaagacgtagtagtcggggacgaggaagttagaggtggagttaggatcgttattgttaaaggtgagattttttcgtttcgttagtagatcgtttaggttgttgatcggattgtttttgttgacgattaatacgttttagtaattcggcgatttattcgtcgcgatcgtttgggcgaagatttggttattggcgcgatttatcgtttttatcgtcgatagattgtcgtattaggcgatatttattttattgaagcgtattttttggataatgttcgcgtagttcgg

SEQ ID NO: 5964 - DNA, 564 bp, Artificial Sequence
  chemically treated genomic DNA (Homo sapiens) CpG-island No: 5964
ccgaactacgcgaacattatccaaaaaatacgcttcaataaaataaatatcgcctaatacgacaatctatcgacgataaaaacgataaatcgcgccaataaccaaatcttcgcccaaacgatcgcgacgaataaatcgccgaattactaaaacgtattaatcgtcaacaaaaacaatccgatcaacaacctaaacgatctactaacgaaacgaaaaaatctcacctttaacaataacgatcctaactccacctctaacttcctcgtccccgactactacgtcttcgccaaaaacaatatctccgccaacgacttcaaacgcaccgtcaacgccgaacataaaaccaacgcgctaaccgtcgccaacaaacaaataaatattaccaccaacaacaccgaaaacctcgacaaactaaaaacctccgcgccaaaaaaactaaaaaaactaaaaataatctaaaaatcgccgctaatcccaaacgatccgatcgtctaacgcaaaaatctttccgaaaccaccaaaaacaaaatctacgacttctttataaactacgacaaaacgccg

SEQ ID NO: 5965 - DNA, 559 bp, Artificial Sequence
  chemically treated genomic DNA (Homo sapiens) CpG-island No: 5965
attttgtcgggttagggaatttgtttttcgggcggtttggagtgtcgttatcgggatttttggtagtcgcgcgggtgagggcgatttgattcgcgtaggttggatcgcggcgtttttagcgtttattaggtgcgtgatgagtgtcgttgagtgcgttttgtatatatcgttacgtggttttgagtagttagaagtttgtgtagtagttatatgtagtcgaatagtgagcgtttattggcgtgagattgtttagagttgggtcggtgtggcgcggtggttggtcgtgttatgtttggtgataacgttttgggtggtggattgaaacgagttgtagaagttagagaagtttaaagtcgcgatttgatcgtcgttgtcgaatcgggatcgtttatattacggtgttgaaaaacgttggtatttttttgttatatttgtatttatcggttgattgcgttttagtttggtttttgagtgaagtaatcggacgtatgtttgggttaggaattatttttttaacggttaatattttgtaatttttggtcgcgggtgatatgaaata

SEQ ID NO: 5966 - DNA, 559 bp, Artificial Sequence
  chemically treated genomic DNA (Homo sapiens) CpG-island No: 5966
tatttcatatcacccgcgaccaaaaattacaaaatattaaccgttaaaaaaataattcctaacccaaacatacgtccgattacttcactcaaaaaccaaactaaaacgcaatcaaccgataaatacaaatataacaaaaaaataccaacgtttttcaacaccgtaatataaacgatcccgattcgacaacgacgatcaaatcgcgactttaaacttctctaacttctacaactcgtttcaatccaccacccaaaacgttatcaccaaacataacacgaccaaccaccgcgccacaccgacccaactctaaacaatctcacgccaataaacgctcactattcgactacatataactactacacaaacttctaactactcaaaaccacgtaacgatatatacaaaacgcactcaacgacactcatcacgcacctaataaacgctaaaaacgccgcgatccaacctacgcgaatcaaatcgccctcacccgcgcgactaccaaaaatcccgataacgacactccaaaccgcccgaaaaacaaattccctaacccgacaaaat

SEQ ID NO: 5967 - DNA, 559 bp, Artificial Sequence
  chemically treated genomic DNA (Homo sapiens) CpG-island No: 5967
tattttatgttattcgcgattagaaattgtagaatattggtcgttggggaagtgatttttaatttaaatatgcgttcggttgttttatttaggggttaggttaaagcgtaattaatcgatgagtatagatgtgataaagggatgttagcgttttttaatatcgtaatatgagcgatttcggttcggtagcggcggttaggtcgcgattttgagtttttttggtttttataattcgttttaatttattatttagagcgttattattaagtataatacggttaattatcgcgttatatcgatttaattttaaatagttttacgttaatagacgtttattgttcgattatatgtagttgttgtataggtttttgattatttagagttacgtggcgatgtgtgtagaacgtatttagcgatatttattacgtatttagtaaacgttgaaagcgtcgcgatttagtttgcgcgagttaagtcgtttttattcgcgcgattattaggggtttcggtggcgatattttaggtcgttcgggaggtagattttttgattcgatagaat

SEQ ID NO: 5968 - DNA, 559 bp, Artificial Sequence
  chemically treated genomic DNA (Homo sapiens) CpG-island No: 5968
attctatcgaatcaaaaaatctacctcccgaacgacctaaaatatcgccaccgaaacccctaataatcgcgcgaataaaaacgacttaactcgcgcaaactaaatcgcgacgctttcaacgtttactaaatacgtaataaatatcgctaaatacgttctacacacatcgccacgtaactctaaataatcaaaaacctatacaacaactacatataatcgaacaataaacgtctattaacgtaaaactatttaaaattaaatcgatataacgcgataattaaccgtattatacttaataataacgctctaaataataaattaaaacgaattataaaaaccaaaaaaactcaaaatcgcgacctaaccgccgctaccgaaccgaaatcgctcatattacgatattaaaaaacgctaacatccctttatcacatctatactcatcgattaattacgctttaacctaacccctaaataaaacaaccgaacgcatatttaaattaaaaatcacttccccaacgaccaatattctacaatttctaatcgcgaataacataaaata

SEQ ID NO: 5969 - DNA, 932 bp, Artificial Sequence
  chemically treated genomic DNA (Homo sapiens) CpG-island No: 5969
ttgtcggttcggtatcgtcgttatcgttgatatattttttattacgtagtgttagtattagagaattgaatatcgttttgtcgaagaatttcggcgcgttgatgtcgtgtagtacggagagacgttgcgcgacggtgcggttttttttttttagcgtatcgcggttgatcgacgggttggtatttaataattagaaggtgatggtataacgttgtagcgtttcgcgcgcgtttgcggttagtagttgtagcgtgcgagaatgcgtcgggttgatatgtaatttattattttgtagggtaattagtttttgacgttgtattttatttgttagcgtattaataacgttcggtaattcgtcgcgattttagcgtaggaatagtttcgtttttagtattgggtaaagtatattgtacgtgttttattaatacgtcgcgggagatgtggcgatgtatgggtgatagattgtcgatattagcgaaggtagattaaaatatgcgtaatgtgtagcgatagtaggttattagtatcgtttgttcgcgcggagaatgatgatgtcgcgaatgtgttttttcggattttattatttgtttatttgtagcgcgtgatcgataagttcgttggcgttggttgaaggaacggtagagttcgtggagtagggtacgttgcgtattagatttaggtagtagttgagttgttcggtaattgttcgcgggtgagtgagcgttgacgtgatgttagtagcgtagtatagtataggtttatggcgtttgtcgcgtttgcgttgttaatgcgtattattagatcggtagtaatattattgatcgtcggcgttaattatgtcggacgtatcgtttcgatgggatcgatagatttacgttagttaggtatatgttggttaaggtaggttattaacggtattggtttatcgaagt

SEQ ID NO: 5970 - DNA, 932 bp, Artificial Sequence
  chemically treated genomic DNA (Homo sapiens) CpG-island No: 5970
acttcgataaaccaataccgttaataacctaccttaaccaacatatacctaactaacgtaaatctatcgatcccatcgaaacgatacgtccgacataattaacgccgacgatcaataatattactaccgatctaataatacgcattaacaacgcaaacgcgacaaacgccataaacctatactatactacgctactaacatcacgtcaacgctcactcacccgcgaacaattaccgaacaactcaactactacctaaatctaatacgcaacgtaccctactccacgaactctaccgttccttcaaccaacgccaacgaacttatcgatcacgcgctacaaataaacaaataataaaatccgaaaaaacacattcgcgacatcatcattctccgcgcgaacaaacgatactaataacctactatcgctacacattacgcatattttaatctaccttcgctaatatcgacaatctatcacccatacatcgccacatctcccgcgacgtattaataaaacacgtacaatatactttacccaatactaaaaacgaaactattcctacgctaaaatcgcgacgaattaccgaacgttattaatacgctaacaaataaaatacaacgtcaaaaactaattaccctacaaaataataaattacatatcaacccgacgcattctcgcacgctacaactactaaccgcaaacgcgcgcgaaacgctacaacgttataccatcaccttctaattattaaataccaacccgtcgatcaaccgcgatacgctaaaaaaaaaaaaccgcaccgtcgcgcaacgtctctccgtactacacgacatcaacgcgccgaaattcttcgacaaaacgatattcaattctctaatactaacactacgtaataaaaaatatatcaacgataacgacgataccgaaccgacaa

SEQ ID NO: 5971 - DNA, 932 bp, Artificial Sequence
  chemically treated genomic DNA (Homo sapiens) CpG-island No: 5971
atttcggtgaattaatgtcgttgatgatttattttaattagtatgtatttgattggcgtgaatttatcgattttatcgaagcggtgcgttcggtatggttaacgtcgacggttaataatattgttgtcgatttgatggtacgtattaataacgtaggcgcggtaaacgttatgaatttgtgttgtattgcgttattggtattacgttagcgtttatttattcgcgagtagttatcgagtaatttaattgttatttggatttgatgcgtaacgtgttttattttacggattttatcgtttttttagttagcgttagcgagtttatcgattacgcgttgtaaatgaataagtggtgaagttcgagaagatatattcgcgatattattatttttcgcgcgagtaagcggtgttgatgatttattatcgttatatattgcgtatattttggtttgttttcgttgatgtcggtaatttgttatttatgtatcgttatatttttcgcgacgtattgatggagtacgtgtaatgtgttttatttaatgttgaaagcggagttgtttttgcgttgggatcgcgacgagttgtcggacgttattgatgcgttggtaaatgagatgtaacgttaggggttgattattttgtaagatgatgagttgtatattaattcggcgtattttcgtacgttatagttgttggtcgtaggcgcgcgcgaaacgttgtaacgttatgttattattttttggttgttgagtgttaattcgtcgattaatcgcggtacgttggagaaagagagtcgtatcgtcgcgtaacgttttttcgtgttgtacggtattaacgcgtcggagtttttcgataaggcggtgtttagttttttggtgttgatattgcgtgatgaagggtatattagcgatagcggcgatgtcgaatcggtag

SEQ ID NO: 5972 - DNA, 932 bp, Artificial Sequence
  chemically treated genomic DNA (Homo sapiens) CpG-island No: 5972
ctaccgattcgacatcgccgctatcgctaatatacccttcatcacgcaatatcaacaccaaaaaactaaacaccgccttatcgaaaaactccgacgcgttaataccgtacaacacgaaaaaacgttacgcgacgatacgactctctttctccaacgtaccgcgattaatcgacgaattaacactcaacaaccaaaaaataataacataacgttacaacgtttcgcgcgcgcctacgaccaacaactataacgtacgaaaatacgccgaattaatatacaactcatcatcttacaaaataatcaacccctaacgttacatctcatttaccaacgcatcaataacgtccgacaactcgtcgcgatcccaacgcaaaaacaactccgctttcaacattaaataaaacacattacacgtactccatcaatacgtcgcgaaaaatataacgatacataaataacaaattaccgacatcaacgaaaacaaaccaaaatatacgcaatatataacgataataaatcatcaacaccgcttactcgcgcgaaaaataataatatcgcgaatatatcttctcgaacttcaccacttattcatttacaacgcgtaatcgataaactcgctaacgctaactaaaaaaacgataaaatccgtaaaataaaacacgttacgcatcaaatccaaataacaattaaattactcgataactactcgcgaataaataaacgctaacgtaataccaataacgcaatacaacacaaattcataacgtttaccgcgcctacgttattaatacgtaccatcaaatcgacaacaatattattaaccgtcgacgttaaccataccgaacgcaccgcttcgataaaatcgataaattcacgccaatcaaatacatactaattaaaataaatcatcaacgacattaattcaccgaaat

SEQ ID NO: 5973 - DNA, 874 bp, Artificial Sequence
  chemically treated genomic DNA (Homo sapiens) CpG-island No: 5973
gcgataattacgttcggttcgtttatggtttttaataggcgacgaaaattgtgttgggtattttgtacgggaagtataaaagcggtttttagggttatgcgttgttttcgcgaattatcgtaaagaagtcgattcggttggcgtttatttcggtttggcgtgcggtaatgcgtgttatacggttagcgtttagcggggtaataagggtttttgataagttttgaaagtggcgagattgttgtattagcgcgttaattagcgcgtagcgttcggcgtgttgtttattacgtttttgtatttagttgtagtcgagcgtgtcgttagttaggcgtacggcggcgcgggttagcgtggcgtcgtcggtaaaaaaacgttcgtcggtgtcgtttattcgcgtttgaatttgtattaggttagttttagcggcgcggattattttatagtcggcggtgatgtttagcgcgtttaggcgtgttgttagtttagtcggttggttgtgcgttagtacggatatttagtgttggcgggtcgcggtatttgcgtgtatttagtgttttatagtgaatttaattatgtcggcgcgcgttaggttgacggagtatttcgtcgggttgtttttatcgttacggtggttaagggtgcgtacgtatagtagcggcgatatattcgggattttaagacgttggtattttttggtttggtgcgcggcgggcgttgattcgcgtttggttgcggcgtagcgtaatttcggtttgttcgcgtagaaaatcgtgtagcgagtcgttgtcgaagcgttgtagcgtcggttagagggtgaggttcgcgaagtagtggtcgattaaatagagcgcgacgtcgttgatacgacgtaggg

SEQ ID NO: 5974 - DNA, 874 bp, Artificial Sequence
  chemically treated genomic DNA (Homo sapiens) CpG-island No: 5974
ccctacgtcgtatcaacgacgtcgcgctctatttaatcgaccactacttcgcgaacctcaccctctaaccgacgctacaacgcttcgacaacgactcgctacacgattttctacgcgaacaaaccgaaattacgctacgccgcaaccaaacgcgaatcaacgcccgccgcgcaccaaaccaaaaaataccaacgtcttaaaatcccgaatatatcgccgctactatacgtacgcacccttaaccaccgtaacgataaaaacaacccgacgaaatactccgtcaacctaacgcgcgccgacataattaaattcactataaaacactaaatacacgcaaataccgcgacccgccaacactaaatatccgtactaacgcacaaccaaccgactaaactaacaacacgcctaaacgcgctaaacatcaccgccgactataaaataatccgcgccgctaaaactaacctaatacaaattcaaacgcgaataaacgacaccgacgaacgtttttttaccgacgacgccacgctaacccgcgccgccgtacgcctaactaacgacacgctcgactacaactaaatacaaaaacgtaataaacaacacgccgaacgctacgcgctaattaacgcgctaatacaacaatctcgccactttcaaaacttatcaaaaacccttattaccccgctaaacgctaaccgtataacacgcattaccgcacgccaaaccgaaataaacgccaaccgaatcgacttctttacgataattcgcgaaaacaacgcataaccctaaaaaccgcttttatacttcccgtacaaaatacccaacacaattttcgtcgcctattaaaaaccataaacgaaccgaacgtaattatcgc

SEQ ID NO: 5975 - DNA, 874 bp, Artificial Sequence
  chemically treated genomic DNA (Homo sapiens) CpG-island No: 5975
ttttgcgtcgtgttaacggcgtcgcgttttgtttaatcgattattatttcgcgggttttattttttggtcgacgttgtaacgtttcgatagcggttcgttgtacgattttttgcgcgagtaaatcggaattgcgttgcgtcgtagttagacgcggattagcgttcgtcgcgtattaggttaaagagtgttagcgttttgaaatttcgaatatgtcgtcgttgttgtgcgtgcgtatttttaattatcgtgacggtgaaagtagttcggcggagtatttcgttagtttgacgcgcgtcgatatgattgaatttattatggagtattgaatgtacgtagatatcgcgattcgttagtattggatgttcgtgttggcgtatagttaatcggttgaattggtagtacgtttgaacgcgttaaatattatcgtcgattatgaggtgattcgcgtcgttgaaattggtttggtatagatttaggcgcggatgggcggtatcggcgaacgtttttttgtcggcgacgttacgttgattcgcgtcgtcgtgcgtttgattgacggtacgttcggttatagttgggtgtaggggcgtgataaatagtacgtcgaacgttgcgcgttgattgacgcgttgatgtagtaatttcgttatttttaaaatttattagaaatttttattgtttcgttggacgttgatcgtatggtacgtattgtcgtacgttaggtcgaagtgaacgttagtcgggtcgatttttttacgatggttcgcggagataacgtatgattttggaaatcgtttttatgtttttcgtgtaggatgtttagtatagttttcgtcgtttgttaaaggttatgagcgagtcgggcgtgattgtcgt

SEQ ID NO: 5976 - DNA, 874 bp, Artificial Sequence
  chemically treated genomic DNA (Homo sapiens) CpG-island No: 5976
acgacaatcacgcccgactcgctcataacctttaacaaacgacgaaaactatactaaacatcctacacgaaaaacataaaaacgatttccaaaatcatacgttatctccgcgaaccatcgtaaaaaaatcgacccgactaacgttcacttcgacctaacgtacgacaatacgtaccatacgatcaacgtccaacgaaacaataaaaatttctaataaattttaaaaataacgaaattactacatcaacgcgtcaatcaacgcgcaacgttcgacgtactatttatcacgcccctacacccaactataaccgaacgtaccgtcaatcaaacgcacgacgacgcgaatcaacgtaacgtcgccgacaaaaaaacgttcgccgataccgcccatccgcgcctaaatctataccaaaccaatttcaacgacgcgaatcacctcataatcgacgataatatttaacgcgttcaaacgtactaccaattcaaccgattaactatacgccaacacgaacatccaatactaacgaatcgcgatatctacgtacattcaatactccataataaattcaatcatatcgacgcgcgtcaaactaacgaaatactccgccgaactactttcaccgtcacgataattaaaaatacgcacgcacaacaacgacgacatattcgaaatttcaaaacgctaacactctttaacctaatacgcgacgaacgctaatccgcgtctaactacgacgcaacgcaattccgatttactcgcgcaaaaaatcgtacaacgaaccgctatcgaaacgttacaacgtcgaccaaaaaataaaacccgcgaaataataatcgattaaacaaaacgcgacgccgttaacacgacgcaaaa

SEQ ID NO: 5977 - DNA, 608 bp, Artificial Sequence
  chemically treated genomic DNA (Homo sapiens) CpG-island No: 5977
tagtaatcgtttggttaatcggtgttaaaatttataacggcgcgttgggcgtcgatatttacgaaaaagattatttaacgattttggaaatggtaaaagtcgtaggtttggcgatcggtaacgtttttatcgtagagttgtaggatgttacgttcgttgcgttggtggtatatgtgatttcgcgtaaatgttacggttcgagcgcgattagtgaaaaatgttcgggtaacgttttggaaaaaggcggaaaaggatcgattatcgaatagttgtttaacgttcgtgtcgacgttacgtttggcggcggcgtaaaaatttttgttgaaacggtaatcgttggtgaatggtagggaaaaacgttgcgtgaataggtataggcgcgtggttattagttggtgagcgatgttgttttattgaattcggtgacggaagcgaattagtaaaaatttttgtttggtttgtttgttgacggtaatatgttagtgcgttggttaggatcgaaagtaacgtattatggtaatatcgataagttcgtagttatttgtacgttaaattcgtaacgtaatgatagtgtattaattttggcgtagatgatcgataaagttatt

SEQ ID NO: 5978 - DNA, 608 bp, Artificial Sequence
  chemically treated genomic DNA (Homo sapiens) CpG-island No: 5978
aataactttatcgatcatctacgccaaaattaatacactatcattacgttacgaatttaacgtacaaataactacgaacttatcgatattaccataatacgttactttcgatcctaaccaacgcactaacatattaccgtcaacaaacaaaccaaacaaaaatttttactaattcgcttccgtcaccgaattcaataaaacaacatcgctcaccaactaataaccacgcgcctatacctattcacgcaacgtttttccctaccattcaccaacgattaccgtttcaacaaaaatttttacgccgccgccaaacgtaacgtcgacacgaacgttaaacaactattcgataatcgatccttttccgcctttttccaaaacgttacccgaacatttttcactaatcgcgctcgaaccgtaacatttacgcgaaatcacatataccaccaacgcaacgaacgtaacatcctacaactctacgataaaaacgttaccgatcgccaaacctacgacttttaccatttccaaaatcgttaaataatctttttcgtaaatatcgacgcccaacgcgccgttataaattttaacaccgattaaccaaacgattacta

SEQ ID NO: 5979 - DNA, 608 bp, Artificial Sequence
  chemically treated genomic DNA (Homo sapiens) CpG-island No: 5979
aatggttttgtcggttatttgcgttagggttggtatattgttattacgttgcggatttggcgtataggtgattgcgggtttatcgatattgttatggtacgttgttttcggttttagttagcgtattggtatattgtcgttagtaaataggttaagtaggggtttttgttgattcgttttcgttatcgaatttagtgaggtagtatcgtttattaattgataattacgcgtttgtgtttgtttacgtagcgtttttttttgttatttattagcggttgtcgttttagtaaaggtttttgcgtcgtcgttaagcgtaacgtcggtacgagcgttaagtagttgttcggtaatcgattttttttcgtttttttttagagcgttattcggatattttttattggtcgcgttcggatcgtagtatttgcgcgaggttatatgtgttattagcgtagcgggcgtggtattttgtaattttgcggtagaaacgttatcggtcgttagatttgcggtttttgttatttttagaatcgttgggtgatttttttcgtgaatatcgacgtttagcgcgtcgttataggttttgatatcggttgattaggcggttgttg

SEQ ID NO: 5980 - DNA, 608 bp, Artificial Sequence
  chemically treated genomic DNA (Homo sapiens) CpG-island No: 5980
caacaaccgcctaatcaaccgatatcaaaacctataacgacgcgctaaacgtcgatattcacgaaaaaaatcacccaacgattctaaaaataacaaaaaccgcaaatctaacgaccgataacgtttctaccgcaaaattacaaaataccacgcccgctacgctaataacacatataacctcgcgcaaatactacgatccgaacgcgaccaataaaaaatatccgaataacgctctaaaaaaaaacgaaaaaaaatcgattaccgaacaactacttaacgctcgtaccgacgttacgcttaacgacgacgcaaaaacctttactaaaacgacaaccgctaataaataacaaaaaaaaacgctacgtaaacaaacacaaacgcgtaattatcaattaataaacgatactacctcactaaattcgataacgaaaacgaatcaacaaaaacccctacttaacctatttactaacgacaatataccaatacgctaactaaaaccgaaaacaacgtaccataacaatatcgataaacccgcaatcacctatacgccaaatccgcaacgtaataacaatataccaaccctaacgcaaataaccgacaaaaccatt

SEQ ID NO: 5981 - DNA, 841 bp, Artificial Sequence
  chemically treated genomic DNA (Homo sapiens) CpG-island No: 5981
cggatgtagttttttcgtgtttttgtgtacgaatagtgatatcggttattttaggtgcgttgacgggagatatattagttaggacggttagtaatatcgattcgatacgcgtttggttttagttcgggatttattgtacgttttgattttttttagtgattgcgtacgtagatttttttgatttatgttgacgattattgcggcgtcgcgcggaagatgatcggcgttttgtgacgttagtatacggatagttgtgttgtatttttttaacgtgtagtagcgcgtttttttttgtagtagcgtaacgacgatgtcgttcgttttgaagacgtttacgttattagcgtcggataagtgttcggtagataagtgtcgttcgggttaatcggttagcggtttttaggtcgtatttttgatcgattatatagtcgttcgggcgtggttaggcgcggtgtgaacggtatcggtatcggtatttagggtaacggatcgtcgaggattgtcggaacgtcgaagtttataaacggatgggtaaacgtagtagtttaagtttcgtattttttatcgtgtcgagaatggtgtaatggttacgtcgatacgttgtattacgtttttaattagatttttcgttagattacggtttgatcgtcgatttgtattagcgtatagtcgaaatttggtgtatagagattgcgcggttggtaggtagagtttacggcgtggtggtttagatatttagcgagattggttcgttaacgttgtttacggtaaatttcgttttagtgtattttgatcgattgtttggaaagtaacgtcgatggacggagaagttcgtcgtaat

SEQ ID NO: 5982 - DNA, 841 bp, Artificial Sequence
  chemically treated genomic DNA (Homo sapiens) CpG-island No: 5982
attacgacgaacttctccgtccatcgacgttactttccaaacaatcgatcaaaatacactaaaacgaaatttaccgtaaacaacgttaacgaaccaatctcgctaaatatctaaaccaccacgccgtaaactctacctaccaaccgcgcaatctctatacaccaaatttcgactatacgctaatacaaatcgacgatcaaaccgtaatctaacgaaaaatctaattaaaaacgtaatacaacgtatcgacgtaaccattacaccattctcgacacgataaaaaatacgaaacttaaactactacgtttacccatccgtttataaacttcgacgttccgacaatcctcgacgatccgttaccctaaataccgataccgataccgttcacaccgcgcctaaccacgcccgaacgactatataatcgatcaaaaatacgacctaaaaaccgctaaccgattaacccgaacgacacttatctaccgaacacttatccgacgctaataacgtaaacgtcttcaaaacgaacgacatcgtcgttacgctactacaaaaaaaaacgcgctactacacgttaaaaaaatacaacacaactatccgtatactaacgtcacaaaacgccgatcatcttccgcgcgacgccgcaataatcgtcaacataaatcaaaaaaatctacgtacgcaatcactaaaaaaaatcaaaacgtacaataaatcccgaactaaaaccaaacgcgtatcgaatcgatattactaaccgtcctaactaatatatctcccgtcaacgcacctaaaataaccgatatcactattcgtacacaaaaacacgaaaaaactacatccg

SEQ ID NO: 5983 - DNA, 841 bp, Artificial Sequence
  chemically treated genomic DNA (Homo sapiens) CpG-island No: 5983
attacgacgaattttttcgtttatcgacgttgttttttaggtagtcgattaggatgtattaaagcgaaatttgtcgtaagtaacgttgacgggttaatttcgttgggtatttggattattacgtcgtggattttgtttgttaatcgcgtaatttttatgtattagatttcgattatgcgttggtgtagatcgacggttaggtcgtgatttggcgaaagatttggttgaaagcgtaatgtagcgtatcggcgtgattattatattattttcggtacggtaaaaggtgcggagtttgagttgttgcgtttatttattcgtttatgggtttcgacgtttcggtaattttcggcgattcgttattttggatgtcggtatcggtgtcgtttatatcgcgtttggttacgttcggacgattatgtgatcggttagaaatacggtttggaaatcgttaatcggttggttcggacggtatttatttgtcgggtatttattcgacgttggtggcgtgaacgtttttaaagcgaacgatatcgtcgttgcgttgttgtagaaaaaggcgcgttgttgtacgttgagaaaatgtagtatagttattcgtgtgttggcgttataaaacgtcgattatttttcgcgcgacgtcgtagtggtcgttagtatggattagaaaggtttgcgtgcgtagttattgaaagagattaaggcgtgtagtggatttcggattggggttaggcgcgtatcgagtcgatgttgttaatcgttttgattggtgtatttttcgttagcgtatttggggtgatcgatgttattgttcgtgtataaagatacggaagagttgtattcg

SEQ ID NO: 5984 - DNA, 841 bp, Artificial Sequence
  chemically treated genomic DNA (Homo sapiens) CpG-island No: 5984
cgaatacaactcttccgtatctttatacacgaacaataacatcgatcaccccaaatacgctaacgaaaaatacaccaatcaaaacgattaacaacatcgactcgatacgcgcctaaccccaatccgaaatccactacacgccttaatctctttcaataactacgcacgcaaacctttctaatccatactaacgaccactacgacgtcgcgcgaaaaataatcgacgttttataacgccaacacacgaataactatactacattttctcaacgtacaacaacgcgcctttttctacaacaacgcaacgacgatatcgttcgctttaaaaacgttcacgccaccaacgtcgaataaatacccgacaaataaataccgtccgaaccaaccgattaacgatttccaaaccgtatttctaaccgatcacataatcgtccgaacgtaaccaaacgcgatataaacgacaccgataccgacatccaaaataacgaatcgccgaaaattaccgaaacgtcgaaacccataaacgaataaataaacgcaacaactcaaactccgcaccttttaccgtaccgaaaataatataataatcacgccgatacgctacattacgctttcaaccaaatctttcgccaaatcacgacctaaccgtcgatctacaccaacgcataatcgaaatctaatacataaaaattacgcgattaacaaacaaaatccacgacgtaataatccaaatacccaacgaaattaacccgtcaacgttacttacgacaaatttcgctttaatacatcctaatcgactacctaaaaaacaacgtcgataaacgaaaaaattcgtcgtaat

SEQ ID NO: 5985 - DNA, 932 bp, Artificial Sequence
  chemically treated genomic DNA (Homo sapiens) CpG-island No: 5985
  unsure (801, 851, 862)
ggtcgcggggaaggcgtttagcgtattaaacggttcgtcgagtaataatagttggggatcgtcgttagcgtacgagtaatttttattcgttgacgttgattatcggaagttgttagatgtagcgtttttttgcgttttttagttttattttttttatatttggtgcgcgatttttagtcgttgtattttttttatatttgttaatgtaggtcgaacgttacgttgttttgtatattgcgttacggtagtagtttttattttgaaaaattacgttacgttttgttttcggttttttaatacgttattcgttagttgaatgttgttatgttgataaggtataaaatcggtaatcgatttagtagggtggttttatcgtagtcggacggttttagtattattagagttcgtcgttttttagcgttaggttgatattttttagtgtcggtttgcgttataatcggcgtaaagatgagagatttgtagtatttgcgttttttttattgtacgaagcgcgaggtaacgtattggttgtaattattcgttatagcgggattttgttttgtttttttaaaaattgcgcggtgtcgatgatcgtttgtttatcggttcggttagttttgtcgtttgttgttgcggcgttagatagtatttttttttattagtttcggaacgttatttttaggtacgtcgtttaacgcgttagtttgttgatgtttttcggttgttttagttatacgtttgggtagtaatgtacggttgttgagtatcgatggcgtttttagcgaacgtttttcgattttnaggatgttttcggtaaaatttttgcgtattaattagaagttagcgttggngcgttttatgntcgatttgtttagattcgttatatttgtttttttttagggggtaacgcggtgttcgattaagttttaata

SEQ ID NO: 5986 - DNA, 932 bp, Artificial Sequence
  chemically treated genomic DNA (Homo sapiens) CpG-island No: 5986
  unsure (71, 82, 132)
tattaaaacttaatcgaacaccgcgttaccccctaaaaaaaaacaaatataacgaatctaaacaaatcgancataaaacgcnccaacgctaacttctaattaatacgcaaaaattttaccgaaaacatcctnaaaatcgaaaaacgttcgctaaaaacgccatcgatactcaacaaccgtacattactacccaaacgtataactaaaacaaccgaaaaacatcaacaaactaacgcgttaaacgacgtacctaaaaataacgttccgaaactaataaaaaaaaatactatctaacgccgcaacaacaaacgacaaaactaaccgaaccgataaacaaacgatcatcgacaccgcgcaatttttaaaaaaacaaaacaaaatcccgctataacgaataattacaaccaatacgttacctcgcgcttcgtacaataaaaaaaacgcaaatactacaaatctctcatctttacgccgattataacgcaaaccgacactaaaaaatatcaacctaacgctaaaaaacgacgaactctaataatactaaaaccgtccgactacgataaaaccaccctactaaatcgattaccgattttataccttatcaacataacaacattcaactaacgaataacgtattaaaaaaccgaaaacaaaacgtaacgtaatttttcaaaataaaaactactaccgtaacgcaatatacaaaacaacgtaacgttcgacctacattaacaaatataaaaaaaatacaacgactaaaaatcgcgcaccaaatataaaaaaaataaaactaaaaaacgcaaaaaaacgctacatctaacaacttccgataatcaacgtcaacgaataaaaattactcgtacgctaacgacgatccccaactattattactcgacgaaccgtttaatacgctaaacgccttccccgcgacc

SEQ ID NO: 5987 - DNA, 932 bp, Artificial Sequence
  chemically treated genomic DNA (Homo sapiens) CpG-island No: 5987
  unsure (71, 82, 132)
tattagggtttagtcgggtatcgcgttattttttggaaagaggtaggtgtgacgaatttgaataggtcggntatggggcgtnttaacgttaatttttggttggtgcgtaaagattttgtcgagaatattttngaggtcggaaagcgttcgttaaaagcgttatcgatgtttagtaatcgtatattgttatttagacgtgtggttgaaatagtcggaaaatattagtaaattggcgcgttaagcggcgtgtttgaaggtgacgtttcggggttggtgaaggggaatattatttgacgtcgtagtaataaacggtagaattgatcggatcggtgaataagcgattatcgatatcgcgtagtttttgaaagagtagggtaaggtttcgttgtagcgaatgattatagttagtacgttatttcgcgtttcgtgtaataaaggaggcgtagatgttgtaaattttttatttttacgtcgattatggcgtaaatcggtattggaagatattaatttgacgttggaaagcggcgagttttggtggtgttggggtcgttcggttgcggtaaaattattttgttgaatcgattgtcggttttgtgttttattagtatggtagtatttaattggcgggtagcgtattgagggatcgggagtagagcgtggcgtagttttttagaatgagggttattatcgtggcgtaatgtataggataacgtggcgttcggtttgtattggtaggtatagagaaaatgtagcgattggaaatcgcgtattagatgtgaaaaaagtggggttggaaggcgtagaaaaacgttatatttggtagttttcggtggttaacgttagcgggtggggattgttcgtgcgttggcggcgatttttagttgttattattcgacgaatcgtttggtgcgttggacgtttttttcgcgatt

SEQ ID NO: 5988 - DNA, 932 bp, Artificial Sequence
  chemically treated genomic DNA (Homo sapiens) CpG-island No: 5988
  unsure (801, 851, 862)
aatcgcgaaaaaaacgtccaacgcaccaaacgattcgtcgaataataacaactaaaaatcgccgccaacgcacgaacaatccccacccgctaacgttaaccaccgaaaactaccaaatataacgtttttctacgccttccaaccccacttttttcacatctaatacgcgatttccaatcgctacattttctctatacctaccaatacaaaccgaacgccacgttatcctatacattacgccacgataataaccctcattctaaaaaactacgccacgctctactcccgatccctcaatacgctacccgccaattaaatactaccatactaataaaacacaaaaccgacaatcgattcaacaaaataattttaccgcaaccgaacgaccccaacaccaccaaaactcgccgctttccaacgtcaaattaatatcttccaataccgatttacgccataatcgacgtaaaaataaaaaatttacaacatctacgcctcctttattacacgaaacgcgaaataacgtactaactataatcattcgctacaacgaaaccttaccctactctttcaaaaactacgcgatatcgataatcgcttattcaccgatccgatcaattctaccgtttattactacgacgtcaaataatattccccttcaccaaccccgaaacgtcaccttcaaacacgccgcttaacgcgccaatttactaatattttccgactatttcaaccacacgtctaaataacaatatacgattactaaacatcgataacgcttttaacgaacgctttccgacctcnaaaatattctcgacaaaatctttacgcaccaaccaaaaattaacgttaanacgccccatanccgacctattcaaattcgtcacacctacctctttccaaaaaataacgcgatacccgactaaaccctaata

SEQ ID NO: 5989 - DNA, 520 bp, Artificial Sequence
  chemically treated genomic DNA (Homo sapiens) CpG-island No: 5989
  unsure (124, 128, 378)
tgattaaggggtgacgcggcgaaagattaatttcgtgggtttggtttttacgttaggttgtttttatatcgttaatcggtggttagagacgagcggtatgcggtgaggagtagtttggggttgntttnggttattggatttatggtttagcgtcgagcggttaagtaaagtattttttttttcgttagcgtgggtaattattttcgttcggttgtgttgtcgtattttcggcgattgatcgcggcgttttagttttcgatgttattcgattattttgttttaattggttatgatcgatcgttttgtcgtcgagtttttcgtgcgacgtatgattgggatcgttaattatggtttcgggtgaataaatacgtcggtttntggggttaatcgatcggtttattagagttaagttacgaattggtatttattagatcgtcgcggtaatgtattatttgaagttatgaagagttgtagcgagtttgcgattataatggtaaatcgggtgtggttttattattaa

SEQ ID NO: 5990 - DNA, 520 bp, Artificial Sequence
  chemically treated genomic DNA (Homo sapiens) CpG-island No: 5990
  unsure (143, 393, 397)
ttaataataaaaccacacccgatttaccattataatcgcaaactcgctacaactcttcataacttcaaataatacattaccgcgacgatctaataaataccaattcgtaacttaactctaataaaccgatcgattaaccccanaaaccgacgtatttattcacccgaaaccataattaacgatcccaatcatacgtcgcacgaaaaactcgacgacaaaacgatcgatcataaccaattaaaacaaaataatcgaataacatcgaaaactaaaacgccgcgatcaatcgccgaaaatacgacaacacaaccgaacgaaaataattacccacgctaacgaaaaaaaaaatactttacttaaccgctcgacgctaaaccataaatccaataaccnaaancaaccccaaactactcctcaccgcataccgctcgtctctaaccaccgattaacgatataaaaacaacctaacgtaaaaaccaaacccacgaaattaatctttcgccgcgtcaccccttaatca

SEQ ID NO: 5991 - DNA, 520 bp, Artificial Sequence
  chemically treated genomic DNA (Homo sapiens) CpG-island No: 5991
  unsure (143, 393, 397)
ttgatgatggaattatattcggtttattattgtggtcgtagattcgttgtaattttttatggttttagatgatatattgtcgcgacgatttggtggatattaattcgtagtttggttttagtagatcggtcgattgattttanggatcgacgtgtttgtttattcggaattatagttggcgattttagttatgcgtcgtacgagaagttcggcgataggacgatcgattatgattagttgaagtaggataatcgagtggtatcggaggttgaaacgtcgcgattaatcgtcggagatacggtaatatagtcgaacggaaatgattatttacgttagcgaaagagaaggtattttatttggtcgttcgacgttaggttatgaatttagtagttnggantagttttagattgttttttatcgtatatcgttcgtttttagttatcgattggcggtatggagataatttggcgtgagaattaagtttacggggttgatttttcgtcgcgttattttttggtta

SEQ ID NO: 5992 - DNA, 520 bp, Artificial Sequence
  chemically treated genomic DNA (Homo sapiens) CpG-island No: 5992
  unsure (124, 128, 378)
taaccaaaaaataacgcgacgaaaaatcaaccccgtaaacttaattctcacgccaaattatctccataccgccaatcgataactaaaaacgaacgatatacgataaaaaacaatctaaaactantccnaactactaaattcataacctaacgtcgaacgaccaaataaaataccttctctttcgctaacgtaaataatcatttccgttcgactatattaccgtatctccgacgattaatcgcgacgtttcaacctccgataccactcgattatcctacttcaactaatcataatcgatcgtcctatcgccgaacttctcgtacgacgcataactaaaatcgccaactataattccgaataaacaaacacgtcgatccntaaaatcaatcgaccgatctactaaaaccaaactacgaattaatatccaccaaatcgtcgcgacaatatatcatctaaaaccataaaaaattacaacgaatctacgaccacaataataaaccgaatataattccatcatcaa

SEQ ID NO: 5993 - DNA, 669 bp, Artificial Sequence
  chemically treated genomic DNA (Homo sapiens) CpG-island No: 5993
cgttagcgtcgatattgtttgtttgtaggaagtgatgggcgcgtacgaagtttattcgttgtatgtggaaaattggttcgatatttcgtattacgagtttttcgtcgatattatgtggagcgattttgtttacggtcgtaatgtcgtatattcggaagggtattacggtaacgtcgtattgtcgcgttattttattgaatattatgagaatcgcgatgtttcggtcgatggtgcggaaaagcgcggcgtgttttattgtcgtattgtgtcgtcgatgatcggaaaagcgatttatgtgatgtgcgtatatttgggtttgcgtgaggcgtatcgttaggcgtagtttgcgatgttcgtcgaatgggtgaatgagttatcggacggcgaatcggtattggtggcgggtgattttaatgattggcggtaaaaagttaattattcgttaaaagtgtaggtttggattggatgagatttttattcgcgtttacgcgacgttcgggcgcgttacgttttttttttatgtgtttaagagttatatatagaatttgtgaagagtttttaataagcgtttttgcgtggcgatttttttcgtttcgtgcgtttttcgttattaaaattattatatcgatttttgatttaaatgtatgatggtatttattgaatagaata

SEQ ID NO: 5994 - DNA, 669 bp, Artificial Sequence
  chemically treated genomic DNA (Homo sapiens) CpG-island No: 5994
tattctattcaataaataccatcatacatttaaatcaaaaatcgatataataattttaataacgaaaaacgcacgaaacgaaaaaaatcgccacgcaaaaacgcttattaaaaactcttcacaaattctatatataactcttaaacacataaaaaaaaaacgtaacgcgcccgaacgtcgcgtaaacgcgaataaaaatctcatccaatccaaacctacacttttaacgaataattaactttttaccgccaatcattaaaatcacccgccaccaataccgattcgccgtccgataactcattcacccattcgacgaacatcgcaaactacgcctaacgatacgcctcacgcaaacccaaatatacgcacatcacataaatcgcttttccgatcatcgacgacacaatacgacaataaaacacgccgcgcttttccgcaccatcgaccgaaacatcgcgattctcataatattcaataaaataacgcgacaatacgacgttaccgtaatacccttccgaatatacgacattacgaccgtaaacaaaatcgctccacataatatcgacgaaaaactcgtaatacgaaatatcgaaccaattttccacatacaacgaataaacttcgtacgcgcccatcacttcctacaaacaaacaatatcgacgctaacg

SEQ ID NO: 5995 - DNA, 669 bp, Artificial Sequence
  chemically treated genomic DNA (Homo sapiens) CpG-island No: 5995
tgttttgtttaatgaatattattatatatttgaattaggagtcggtatgatgattttggtgacggggggcgtacggagcgggaagagtcgttacgtagaggcgtttattggggattttttataggttttgtatatagtttttaagtatatgaaaagaaaacgtggcgcgttcgggcgtcgcgtgggcgcgggtaaaaattttatttagtttaggtttgtatttttaacggatgattagttttttgtcgttagttattgaaattattcgttattaatatcggttcgtcgttcggtagtttatttatttattcggcgagtatcgtaagttgcgtttgacggtgcgttttacgtaggtttagatgtacgtatattatatgaatcgttttttcggttatcggcggtataatgcggtagtagagtacgtcgcgttttttcgtattatcgatcgaaatatcgcgatttttataatgtttaatgggataacgcgatagtacggcgttgtcgtgatgttttttcgggtatacggtattgcgatcgtaggtaaaatcgttttatatagtgtcggcgagaaattcgtagtgcgaggtatcgggttagttttttatatgtagcggatgaatttcgtgcgcgtttattattttttgtaggtaaataatatcggcgttgacg

SEQ ID NO: 5996 - DNA, 669 bp, Artificial Sequence
  chemically treated genomic DNA (Homo sapiens) CpG-island No: 5996
cgtcaacgccgatattatttacctacaaaaaataataaacgcgcacgaaattcatccgctacatataaaaaactaacccgatacctcgcactacgaatttctcgccgacactatataaaacgattttacctacgatcgcaataccgtatacccgaaaaaacatcacgacaacgccgtactatcgcgttatcccattaaacattataaaaatcgcgatatttcgatcgataatacgaaaaaacgcgacgtactctactaccgcattataccgccgataaccgaaaaaacgattcatataatatacgtacatctaaacctacgtaaaacgcaccgtcaaacgcaacttacgatactcgccgaataaataaataaactaccgaacgacgaaccgatattaataacgaataatttcaataactaacgacaaaaaactaatcatccgttaaaaatacaaacctaaactaaataaaatttttacccgcgcccacgcgacgcccgaacgcgccacgttttcttttcatatacttaaaaactatatacaaaacctataaaaaatccccaataaacgcctctacgtaacgactcttcccgctccgtacgccccccgtcaccaaaatcatcataccgactcctaattcaaatatataataatattcattaaacaaaaca

SEQ ID NO: 5997 - DNA, 654 bp, Artificial Sequence
  chemically treated genomic DNA (Homo sapiens) CpG-island No: 5997
gttcgtggggaatatatatcgttgcgtttattatttcgttggcgttgtttatggggatttatttgcgttatttgcgttcggggcgtattggcgaagtgtcggttatcggtttggtatttttgattttcgttattatttttggcggttgggtggtagaaagttcgatttgggtatcgtattttgattttatcggcgtgtagttgatttggatgttggtgggttacggttttgtggcggcggtgttgtcggtgtggttattgttggtttcgcgtgattatttttttatttttttgaaaatcgggattatcgtcggtttggcggtaggtattttgattatgcgttcgacgttgattatgtttgcgttgattaaatttgtcgatggtattggttcggtatggatcggtaatttgttttcgtttttgtttattattatcgtttgtggcgcggtgtttggtttttatgcgttgattttttgtgggattacgtcgaagatgttggcgaacgaaggtaggcgtggttttattcgtttcggtgggatgttaatggaatttttcgtggcgattatggcgttggttttcgattgtattatcgattcgggtagtgtgttttttttatgaatatatcgatgcggtgttattattttatttattttaa

SEQ ID NO: 5998 - DNA, 654 bp, Artificial Sequence
  chemically treated genomic DNA (Homo sapiens) CpG-island No: 5998
ttaaaataaataaaataataacaccgcatcgatatattcataaaaaaaacacactacccgaatcgataatacaatcgaaaaccaacgccataatcgccacgaaaaattccattaacatcccaccgaaacgaataaaaccacgcctaccttcgttcgccaacatcttcgacgtaatcccacaaaaaatcaacgcataaaaaccaaacaccgcgccacaaacgataataataaacaaaaacgaaaacaaattaccgatccataccgaaccaataccatcgacaaatttaatcaacgcaaacataatcaacgtcgaacgcataatcaaaatacctaccgccaaaccgacgataatcccgattttcaaaaaaataaaaaaataatcacgcgaaaccaacaataaccacaccgacaacaccgccgccacaaaaccgtaacccaccaacatccaaatcaactacacgccgataaaatcaaaatacgatacccaaatcgaactttctaccacccaaccgccaaaaataataacgaaaatcaaaaataccaaaccgataaccgacacttcgccaatacgccccgaacgcaaataacgcaaataaatccccataaacaacgccaacgaaataataaacgcaacgatatatattccccacgaac

SEQ ID NO: 5999 - DNA, 654 bp, Artificial Sequence
  chemically treated genomic DNA (Homo sapiens) CpG-island No: 5999
ttggggtggataaggtgatagtatcgtatcggtgtgtttatgggaaaaatatattgttcggatcgatgatatagtcggaaattagcgttataatcgttacgaaggattttattaatattttatcgaagcggataaagttacgtttgttttcgttcgttagtattttcggcgtggttttataagagattagcgtatggaagttagatatcgcgttataggcgatggtgataaataggaacgggaataggttatcggtttatatcgggttagtgttatcgataaatttggttagcgtaggtatggttagcgtcgggcgtataattaaaatgtttatcgttagatcgacgatagtttcgatttttaggaaggtagagaggtagttacgcggggttagtagtaattatatcggtagtatcgtcgttataaaatcgtaatttattagtatttaggttaattgtacgtcggtaaagttaaagtacggtgtttaggtcggattttttgttatttagtcgttagagataatggcgaaaattaggaatattagatcgatgatcgatatttcgttaatacgtttcggacgtagatagcgtaggtagatttttataaatagcgttagcggaatggtgaacgtaacggtatatgttttttacgggt

SEQ ID NO: 6000 - DNA, 654 bp, Artificial Sequence
  chemically treated genomic DNA (Homo sapiens) CpG-island No: 6000
acccgtaaaaaacatataccgttacgttcaccattccgctaacgctatttataaaaatctacctacgctatctacgtccgaaacgtattaacgaaatatcgatcatcgatctaatattcctaattttcgccattatctctaacgactaaataacaaaaaatccgacctaaacaccgtactttaactttaccgacgtacaattaacctaaatactaataaattacgattttataacgacgatactaccgatataattactactaaccccgcgtaactacctctctaccttcctaaaaatcgaaactatcgtcgatctaacgataaacattttaattatacgcccgacgctaaccatacctacgctaaccaaatttatcgataacactaacccgatataaaccgataacctattcccgttcctatttatcaccatcgcctataacgcgatatctaacttccatacgctaatctcttataaaaccacgccgaaaatactaacgaacgaaaacaaacgtaactttatccgcttcgataaaatattaataaaatccttcgtaacgattataacgctaatttccgactatatcatcgatccgaacaatatatttttcccataaacacaccgatacgatactatcaccttatccaccccaa

SEQ ID NO: 6001 - DNA, 581 bp, Artificial Sequence
  chemically treated genomic DNA (Homo sapiens) CpG-island No: 6001
  unsure (486)
cgtttttattgttcggggatggggagtaagtttagttagtcgttgttttcgggtgtcgcgtgcgtagttgtacgttatttttagacgaatcgatgattggatggatggtcgtcgtagtcgttatattgatgatacggatgtgttttttcgtatatattatgttatcggagagttgttaacgtatggttatcgtcgggtatgggcgttgtttcgtagataggtagaatttgatggtatgtttgcgattaatgttaaacgtgtttatcggattatgcgttagaatgcgttggtgtttgagcgaaaatttgttgtatcgatatcgtaacgggtatatataggtagagtggtcgtgaaagaagtaattagcgatggtgttttgacgggttcgagtttttgttgtgataacggagagagattgcgtgttacgttcgcgttggattgttgtgatcggatgtattgtattgggcgggtattattgttggtttnattaggaaatagtttaggcgttttgtttggaatcgtggaatgttcgttcggtaacgatttttaggattatgacgttttattttacggcgttttaa

SEQ ID NO: 6002 - DNA, 581 bp, Artificial Sequence
  chemically treated genomic DNA (Homo sapiens) CpG-island No: 6002
  unsure (96)
ttaaaacgccgtaaaataaaacgtcataatcctaaaaatcgttaccgaacgaacattccacgattccaaacaaaacgcctaaactatttcctaatnaaaccaacaataatacccgcccaatacaatacatccgatcacaacaatccaacgcgaacgtaacacgcaatctctctccgttatcacaacaaaaactcgaacccgtcaaaacaccatcgctaattacttctttcacgaccactctacctatatatacccgttacgatatcgatacaacaaattttcgctcaaacaccaacgcattctaacgcataatccgataaacacgtttaacattaatcgcaaacataccatcaaattctacctatctacgaaacaacgcccatacccgacgataaccatacgttaacaactctccgataacataatatatacgaaaaaacacatccgtatcatcaatataacgactacgacgaccatccatccaatcatcgattcgtctaaaaataacgtacaactacgcacgcgacacccgaaaacaacgactaactaaacttactccccatccccgaacaataaaaacg

SEQ ID NO: 6003 - DNA, 581 bp, Artificial Sequence
  chemically treated genomic DNA (Homo sapiens) CpG-island No: 6003
  unsure (96)
ttagagcgtcgtagaataaggcgttataattttaagaatcgttgtcgagcgggtattttacggttttaagtaagacgtttagattgttttttggtnaagttagtagtagtgttcgtttagtatagtgtattcgattatagtagtttagcgcgaacgtgatacgtagttttttttcgttattataataagaattcgaattcgttagagtattatcgttgattgttttttttacggttattttgtttgtatgtgttcgttacgatgtcggtatagtaggttttcgtttaagtattagcgtattttggcgtatgattcggtaaatacgtttggtattgatcgtaggtatattattaagttttgtttgtttgcgaagtagcgtttatattcgacgataattatacgttggtagtttttcgataatatggtgtatacggagaagtatattcgtattattagtgtgacgattgcggcggttatttatttagttatcggttcgtttgagaatgacgtgtaattgcgtacgcgatattcggagataacggttgattaagtttattttttattttcgggtaataagggcg

SEQ ID NO: 6004 - DNA, 581 bp, Artificial Sequence
  chemically treated genomic DNA (Homo sapiens) CpG-island No: 6004
  unsure (486)
cgcccttattacccgaaaataaaaaataaacttaatcaaccgttatctccgaatatcgcgtacgcaattacacgtcattctcaaacgaaccgataactaaataaataaccgccgcaatcgtcacactaataatacgaatatacttctccgtatacaccatattatcgaaaaactaccaacgtataattatcgtcgaatataaacgctacttcgcaaacaaacaaaacttaataatatacctacgatcaataccaaacgtatttaccgaatcatacgccaaaatacgctaatacttaaacgaaaacctactataccgacatcgtaacgaacacatacaaacaaaataaccgtaaaaaaaacaatcaacgataatactctaacgaattcgaattcttattataataacgaaaaaaaactacgtatcacgttcgcgctaaactactataatcgaatacactatactaaacgaacactactactaacttnaccaaaaaacaatctaaacgtcttacttaaaaccgtaaaatacccgctcgacaacgattcttaaaattataacgccttattctacgacgctctaa

SEQ ID NO: 6005 - DNA, 529 bp, Artificial Sequence
  chemically treated genomic DNA (Homo sapiens) CpG-island No: 6005
cgtaggggttaggtagtagttaggcgttgacgtaggtgcgtcgttgggatagtgtttgttagaaattattcgatgttaatttggcgttgattttagtggttggcgagtatgcggcggagttggtaaattaggcgttggatcgtaattttaacgtgatgatgtttttcgataacgttacgttggaagatgaaatttaatttaaaattcgcgcgcgggaaaaaggtttgttggtgatggggtcggattgcggtacgtcgatgattgtcggtatatcgttggtttttgttaacgtgatgtcggaaggtaatattggcgttattggcgttttcggtatcgggatttaggagttgtgttcgtagattgcgttggtaggggagggaattatttacgcgattggttttggcgggcgcgattttagtcgtgaagtgggcggtattagtgcgttaatagcgttggaaatgtttagtgtagacgagaaaagcgaagtgttgtatttgttttaaaatatttgtcgaagttgtgcgtttga

SEQ ID NO: 6006 - DNA, 529 bp, Artificial Sequence
  chemically treated genomic DNA (Homo sapiens) CpG-island No: 6006
tcaaacgcacaacttcgacaaatattttaaaacaaatacaacacttcgcttttctcgtctacactaaacatttccaacgctattaacgcactaataccgcccacttcacgactaaaatcgcgcccgccaaaaccaatcgcgtaaataattccctcccctaccaacgcaatctacgaacacaactcctaaatcccgataccgaaaacgccaataacgccaatattaccttccgacatcacgttaacaaaaaccaacgatataccgacaatcatcgacgtaccgcaatccgaccccatcaccaacaaacctttttcccgcgcgcgaattttaaattaaatttcatcttccaacgtaacgttatcgaaaaacatcatcacgttaaaattacgatccaacgcctaatttaccaactccgccgcatactcgccaaccactaaaatcaacgccaaattaacatcgaataatttctaacaaacactatcccaacgacgcacctacgtcaacgcctaactactacctaacccctacg

SEQ ID NO: 6007 - DNA, 529 bp, Artificial Sequence
  chemically treated genomic DNA (Homo sapiens) CpG-island No: 6007
ttagacgtatagtttcggtaggtgttttgaaataaatgtagtatttcgtttttttcgtttgtattgagtatttttagcgttgttagcgtattgatgtcgtttattttacggttgaggtcgcgttcgttaaggttaatcgcgtgagtaatttttttttttgttagcgtaatttgcgaatatagtttttgaatttcggtatcggaagcgttaatgacgttaatattgtttttcggtattacgttagtaaaagttagcggtgtgtcggtaattatcgacgtatcgtagttcggttttattattagtaagtttttttttcgcgcgcgggttttaagttggattttattttttagcgtgacgttatcggagaatattattacgttgaggttgcgatttagcgtttggtttgttagtttcgtcgtatattcgttagttattgaaattagcgttagattggtatcgggtaatttttgataggtattgttttagcgacgtatttgcgttaacgtttggttgttgtttgatttttgcg

SEQ ID NO: 6008 - DNA, 529 bp, Artificial Sequence
  chemically treated genomic DNA (Homo sapiens) CpG-island No: 6008
cgcaaaaatcaaacaacaaccaaacgttaacgcaaatacgtcgctaaaacaatacctatcaaaaattacccgataccaatctaacgctaatttcaataactaacgaatatacgacgaaactaacaaaccaaacgctaaatcgcaacctcaacgtaataatattctccgataacgtcacgctaaaaaataaaatccaacttaaaacccgcgcgcgaaaaaaaaacttactaataataaaaccgaactacgatacgtcgataattaccgacacaccgctaacttttactaacgtaataccgaaaaacaatattaacgtcattaacgcttccgataccgaaattcaaaaactatattcgcaaattacgctaacaaaaaaaaaaattactcacgcgattaaccttaacgaacgcgacctcaaccgtaaaataaacgacatcaatacgctaacaacgctaaaaatactcaatacaaacgaaaaaaacgaaatactacatttatttcaaaacacctaccgaaactatacgtctaa

SEQ ID NO: 6009 - DNA, 609 bp, Artificial Sequence
  chemically treated genomic DNA (Homo sapiens) CpG-island No: 6009
aacgtttcgttcgagtttttttcgtcgcgtattagtgaaatggagtagattttgtggaattttatcgatcgttttagtagtttgaaatcgaagtttgtatcggtgatttatggcgcgaatttcggcgagcgcgatcgtacgtatagtattattaaaggtattaaagatcgtattggtttggaagcggtatcgtattttatttgtattgatgcgacgttcgacgagttgcgtattattgtacgcgattattggaataacggtattcgttatatcggggcgttgcgtggcgatttgtcgtcgggaagtggtaagttagaaatgtatgtttttgatttggggacgttgttaaaagaagtggtagatttcgatattttcgtggcggcgtattcggaagtttttcggaaggtaaaagcgtttagcggatttgtttaatttgaacgtaaagtggtgtcggagtttatcgcgcgattatttattttttttcgatgcgaaaagtttttgcgtttcgggattgttcgtgtatgcgtttagagatgcgttttaagattgcgtaggatatcgattaattcgtcgattttttttcgttttcggaagagatgttcgtaaatg

SEQ ID NO: 6010 - DNA, 609 bp, Artificial Sequence
  chemically treated genomic DNA (Homo sapiens) CpG-island No: 6010
catttacgaacatctcttccgaaaacgaaaaaaaatcgacgaattaatcgatatcctacgcaatcttaaaacgcatctctaaacgcatacacgaacaatcccgaaacgcaaaaacttttcgcatcgaaaaaaaataaataatcgcgcgataaactccgacaccactttacgttcaaattaaacaaatccgctaaacgcttttaccttccgaaaaacttccgaatacgccgccacgaaaatatcgaaatctaccacttcttttaacaacgtccccaaatcaaaaacatacatttctaacttaccacttcccgacgacaaatcgccacgcaacgccccgatataacgaataccgttattccaataatcgcgtacaataatacgcaactcgtcgaacgtcgcatcaatacaaataaaatacgataccgcttccaaaccaatacgatctttaatacctttaataatactatacgtacgatcgcgctcgccgaaattcgcgccataaatcaccgatacaaacttcgatttcaaactactaaaacgatcgataaaattccacaaaatctactccatttcactaatacgcgacgaaaaaaactcgaacgaaacgtt

SEQ ID NO: 6011 - DNA, 609 bp, Artificial Sequence
  chemically treated genomic DNA (Homo sapiens) CpG-island No: 6011
tatttgcgggtatttttttcgaaagcgagagaagatcgacggattgatcgatattttgcgtaattttagagcgtatttttaagcgtatgtacgaatagtttcgaaacgtaggagtttttcgtatcgaagaagagtgagtaatcgcgcggtgggtttcggtattattttgcgtttagattaagtaaattcgttgagcgtttttgtttttcggggaattttcggatacgtcgttacggagatatcgaaatttgttattttttttaatagcgtttttaggttagaagtatatatttttggtttattatttttcggcggtagatcgttacgtagcgtttcgatatgacgaatatcgttattttagtagtcgcgtgtaatggtgcgtagttcgtcgggcgtcgtattaatgtaagtaagatgcggtgtcgtttttagattagtgcgatttttaatgtttttaataatgttgtgcgtacggtcgcgttcgtcggagttcgcgttataggttatcgatataaatttcggttttaggttgttaaggcgatcgatggagttttatagggtttgttttattttattggtacgcggcgggaaaaattcgaacgaaacgtt

SEQ ID NO: 6012 - DNA, 609 bp, Artificial Sequence
  chemically treated genomic DNA (Homo sapiens) CpG-island No: 6012
aacgtttcgttcgaatttttcccgccgcgtaccaataaaataaaacaaaccctataaaactccatcgatcgccttaacaacctaaaaccgaaatttatatcgataacctataacgcgaactccgacgaacgcgaccgtacgcacaacattattaaaaacattaaaaatcgcactaatctaaaaacgacaccgcatcttacttacattaatacgacgcccgacgaactacgcaccattacacgcgactactaaaataacgatattcgtcatatcgaaacgctacgtaacgatctaccgccgaaaaataataaaccaaaaatatatacttctaacctaaaaacgctattaaaaaaaataacaaatttcgatatctccgtaacgacgtatccgaaaattccccgaaaaacaaaaacgctcaacgaatttacttaatctaaacgcaaaataataccgaaacccaccgcgcgattactcactcttcttcgatacgaaaaactcctacgtttcgaaactattcgtacatacgcttaaaaatacgctctaaaattacgcaaaatatcgatcaatccgtcgatcttctctcgctttcgaaaaaaatacccgcaaata

SEQ ID NO: 6013 - DNA, 653 bp, Artificial Sequence
  chemically treated genomic DNA (Homo sapiens) CpG-island No: 6013
cggtttttcggaagcgttattattttcggcgaacgttcgaattgtggtcgattggtgttcgacgaaagaacgtggtattgttttcgttatttttaattcggcgtaatatttttcgttggcgtttttttcgtcgttgtttgcgtagttggtttttgtttggggttggggatacgtttttatcgttatgggcgtggatgggtgttgggttatcgcggttgtgatttagttggttttattatttattttatcgtatgataaatcgtaataaatttaaaggtggcggttattatcggcgtcgcgttaaatttagatgtataatttattcgtttcggtttttttgtcgtggtttttatcgtatatatcgtatcgtttgattgcgggtatattagcgttttagtagaaaatacgtaatttacgtcgagtttatttttattgttttttattacgttaaaatcgttttttaggcgttcgcgtaatttcgtcgttagcgggttttgaatcgttttcgttagatcggtaatttgaatttgcgtcggattaatttgtttattcgcgttatcggttgtgattagtgggattttattgcgtcgataataagtaattagcgtcgttttgggtcggtatattatttatggtaattaattacgtacgaa

SEQ ID NO: 6014 - DNA, 653 bp, Artificial Sequence
  chemically treated genomic DNA (Homo sapiens) CpG-island No: 6014
ttcgtacgtaattaattaccataaataatataccgacccaaaacgacgctaattacttattatcgacgcaataaaatcccactaatcacaaccgataacgcgaataaacaaattaatccgacgcaaattcaaattaccgatctaacgaaaacgattcaaaacccgctaacgacgaaattacgcgaacgcctaaaaaacgattttaacgtaataaaaaacaataaaaataaactcgacgtaaattacgtattttctactaaaacgctaatatacccgcaatcaaacgatacgatatatacgataaaaaccacgacaaaaaaaccgaaacgaataaattatacatctaaatttaacgcgacgccgataataaccgccacctttaaatttattacgatttatcatacgataaaataaataataaaaccaactaaatcacaaccgcgataacccaacacccatccacgcccataacgataaaaacgtatccccaaccccaaacaaaaaccaactacgcaaacaacgacgaaaaaaacgccaacgaaaaatattacgccgaattaaaaataacgaaaacaataccacgttctttcgtcgaacaccaatcgaccacaattcgaacgttcgccgaaaataataacgcttccgaaaaaccg

SEQ ID NO: 6015 - DNA, 653 bp, Artificial Sequence
  chemically treated genomic DNA (Homo sapiens) CpG-island No: 6015
ttcgtacgtgattgattgttatagatagtgtatcggtttaaagcggcgttgattgtttattgtcggcgtaataaaattttattggttataatcggtggcgcgggtgggtagattgattcgacgtagatttaggttatcgatttggcgaaaacgatttaggattcgttggcggcgaagttgcgcgagcgtttgaaaagcgattttggcgtagtgaaaaatagtaaaggtaagttcggcgtggattgcgtgttttttattgaagcgttggtgtattcgtagttagacggtacggtgtgtgcgatgaaagttacggtagaagggtcgaagcggatggattgtgtatttggatttggcgcggcgtcgatggtgatcgttatttttgggtttgttgcggtttgttatgcggtgaagtagatgatggaattaattggattatagtcgcggtagtttaatatttatttacgtttataacggtaaagacgtgtttttagttttaggtaaaagttagttacgtaagtagcggcgaaagaggcgttagcgagaaatattgcgtcgagttaaaaatggcgaagatagtattacgttttttcgtcggatattagtcggttataattcgggcgttcgtcgggaatgatggcgttttcgagaagtcg

SEQ ID NO: 6016 - DNA, 653 bp, Artificial Sequence
  chemically treated genomic DNA (Homo sapiens) CpG-island No: 6016
cgacttctcgaaaacgccatcattcccgacgaacgcccgaattataaccgactaatatccgacgaaaaaacgtaatactatcttcgccatttttaactcgacgcaatatttctcgctaacgcctctttcgccgctacttacgtaactaacttttacctaaaactaaaaacacgtctttaccgttataaacgtaaataaatattaaactaccgcgactataatccaattaattccatcatctacttcaccgcataacaaaccgcaacaaacccaaaaataacgatcaccatcgacgccgcgccaaatccaaatacacaatccatccgcttcgacccttctaccgtaactttcatcgcacacaccgtaccgtctaactacgaatacaccaacgcttcaataaaaaacacgcaatccacgccgaacttacctttactatttttcactacgccaaaatcgcttttcaaacgctcgcgcaacttcgccgccaacgaatcctaaatcgttttcgccaaatcgataacctaaatctacgtcgaatcaatctacccacccgcgccaccgattataaccaataaaattttattacgccgacaataaacaatcaacgccgctttaaaccgatacactatctataacaatcaatcacgtacgaa

SEQ ID NO: 6017 - DNA, 726 bp, Artificial Sequence
  chemically treated genomic DNA (Homo sapiens) CpG-island No: 6017
atgtcgggtaagtagatggcgattgacgtcgattttaacgtcggattgattggtgaagatgaggcgaaaaaacgtcgtttcgaagtgatttaggaagtcgatttttacggtttaatggacggggtaagtaagtttgttcgcggcgatgttatcgtcgggatttttattatggttattaatattgtcggcgggttgttggtcggcgtgttgtaatatggtatgagtatgggatacgcggcggaaagttatacgttattgattattggcgacggtttggtggtataaatttcggcgttggtgatttttatcgtcgcgggggttatcgttacgcgtgttagtatcgattaagatgtgtggcgagtaaatggggaattagttttttaatgatttaagcgttatgttgggtaagcgtcgtcgtgttttggttattcggtttggtgttttgggatgtcgatatttggatttgtgttgggtattgtcggattgatttggtttggtttggggattttcggacgcgaaataaaagagattggtcgatattattatgacgtagaattagattatttacgatcgttttaacgtgacgttgattcgtgatgacgtgatgggcgaaagtttttataattcgatgttgttaggaattgtggcggattttaaagttaaaggtttggtagtagaaagcgaaggggcgatcgtcgtattttttgatgagtttaaaaataagga

SEQ ID NO: 6018 - DNA, 726 bp, Artificial Sequence
  chemically treated genomic DNA (Homo sapiens) CpG-island No: 6018
tccttatttttaaactcatcaaaaaatacgacgatcgccccttcgctttctactaccaaacctttaactttaaaatccgccacaattcctaacaacatcgaattataaaaactttcgcccatcacgtcatcacgaatcaacgtcacgttaaaacgatcgtaaataatctaattctacgtcataataatatcgaccaatctcttttatttcgcgtccgaaaatccccaaaccaaaccaaatcaatccgacaatacccaacacaaatccaaatatcgacatcccaaaacaccaaaccgaataaccaaaacacgacgacgcttacccaacataacgcttaaatcattaaaaaactaattccccatttactcgccacacatcttaatcgatactaacacgcgtaacgataacccccgcgacgataaaaatcaccaacgccgaaatttataccaccaaaccgtcgccaataatcaataacgtataactttccgccgcgtatcccatactcataccatattacaacacgccgaccaacaacccgccgacaatattaataaccataataaaaatcccgacgataacatcgccgcgaacaaacttacttaccccgtccattaaaccgtaaaaatcgacttcctaaatcacttcgaaacgacgttttttcgcctcatcttcaccaatcaatccgacgttaaaatcgacgtcaatcgccatctacttacccgacat

SEQ ID NO: 6019 - DNA, 726 bp, Artificial Sequence
  chemically treated genomic DNA (Homo sapiens) CpG-island No: 6019
tttttgtttttaaatttattaaggaatacgacggtcgttttttcgttttttattgttagatttttggttttgagattcgttataatttttggtagtatcgggttgtagaggttttcgtttattacgttattacgggttagcgttacgttgagacgatcgtaggtgatttggttttgcgttatggtgatgtcgattagttttttttgtttcgcgttcgagaatttttaagttaagttagattaattcggtagtatttagtataaatttaagtgtcggtattttagggtattagatcgagtaattagagtacggcggcgtttatttaatataacgtttgggttattgaaaagttgattttttatttgttcgttatatattttgatcggtgttgatacgcgtaacgatgattttcgcggcggtagaaattattagcgtcggaatttgtgttattagatcgtcgttaatggttaatagcgtataatttttcgtcgcgtgttttatgtttatgttatgttgtagtacgtcgattagtaattcgtcgataatgttaatgattatgatgaggatttcggcgatggtatcgtcgcgaataaatttatttgtttcgtttattgagtcgtaaaaatcggttttttgagttatttcggagcggcgttttttcgttttatttttattaattaattcggcgttaaggtcggcgttaatcgttatttgtttattcggtat

SEQ ID NO: 6020 - DNA, 726 bp, Artificial Sequence
  chemically treated genomic DNA (Homo sapiens) CpG-island No: 6020
ataccgaataaacaaataacgattaacgccgaccttaacgccgaattaattaataaaaataaaacgaaaaaacgccgctccgaaataactcaaaaaaccgatttttacgactcaataaacgaaacaaataaatttattcgcgacgataccatcgccgaaatcctcatcataatcattaacattatcgacgaattactaatcgacgtactacaacataacataaacataaaacacgcgacgaaaaattatacgctattaaccattaacgacgatctaataacacaaattccgacgctaataatttctaccgccgcgaaaatcatcgttacgcgtatcaacaccgatcaaaatatataacgaacaaataaaaaatcaacttttcaataacccaaacgttatattaaataaacgccgccgtactctaattactcgatctaataccctaaaataccgacacttaaatttatactaaatactaccgaattaatctaacttaacttaaaaattctcgaacgcgaaacaaaaaaaactaatcgacatcaccataacgcaaaaccaaatcacctacgatcgtctcaacgtaacgctaacccgtaataacgtaataaacgaaaacctctacaacccgatactaccaaaaattataacgaatctcaaaaccaaaaatctaacaataaaaaacgaaaaaacgaccgtcgtattccttaataaatttaaaaacaaaaa

SEQ ID NO: 6021 - DNA, 631 bp, Artificial Sequence
  chemically treated genomic DNA (Homo sapiens) CpG-island No: 6021
ggttggtacgttgggtatgttaagtaaagtaatgcggattttacgttagtaggaagttacggttttgcgtatttatttgtaaattcgtatcggtttgtatgcggcgtttaatgtttgtgaagagatgtgttaacgcgtggcgttggagcgttaattggatagcgaagaacgcgtattattgattgaacgttcgtaaacggttattcgttagggtcgcgattttttttacgtttgggatgttatttggaattcggcgtaggcgttggataacgtattatagtcggatagagtaggttagtttgtcgacgttttggagaaatacgttgtcggtttggtaatcgtatttagtcgttttttttaaataacgtttgaagagatattcgttttttaggttattttgtttattttattaaaataggagtaatacgtttgttagtttttcgttcgtttgttagattggatagtttcggtattaacgttcgttacggaataggtataaggagttacgtaatgattaatcgttatttttacgtttgttggtgtgtagtattttcggtagtacgacgttgattttcggttgtgtttttgttacgtaaggattttgtatttaataataagttaaaacgggaat

SEQ ID NO: 6022 - DNA, 631 bp, Artificial Sequence
  chemically treated genomic DNA (Homo sapiens) CpG-island No: 6022
attcccgttttaacttattattaaatacaaaatccttacgtaacaaaaacacaaccgaaaatcaacgtcgtactaccgaaaatactacacaccaacaaacgtaaaaataacgattaatcattacgtaactccttatacctattccgtaacgaacgttaataccgaaactatccaatctaacaaacgaacgaaaaactaacaaacgtattactcctattttaataaaataaacaaaataacctaaaaaacgaatatctcttcaaacgttatttaaaaaaaacgactaaatacgattaccaaaccgacaacgtatttctccaaaacgtcgacaaactaacctactctatccgactataatacgttatccaacgcctacgccgaattccaaataacatcccaaacgtaaaaaaaatcgcgaccctaacgaataaccgtttacgaacgttcaatcaataatacgcgttcttcgctatccaattaacgctccaacgccacgcgttaacacatctcttcacaaacattaaacgccgcatacaaaccgatacgaatttacaaataaatacgcaaaaccgtaacttcctactaacgtaaaatccgcattactttacttaacatacccaacgtaccaacc

SEQ ID NO: 6023 - DNA, 631 bp, Artificial Sequence
  chemically treated genomic DNA (Homo sapiens) CpG-island No: 6023
gttttcgttttaatttgttattaggtgtagaatttttacgtaataggggtatagtcggaaattagcgtcgtgttgtcgagaatgttgtatattagtagacgtgaaagtgacgattgattattgcgtggttttttgtgtttgtttcgtggcgggcgttaatgtcggggttgtttagtttggtaagcgggcgaaaagttggtagacgtgttgtttttgttttaataaggtgggtaggatggtttgagaggcgggtgtttttttaagcgttatttgaggagaacggttgagtgcggttgttagatcggtagcgtatttttttagggcgtcggtaaattgatttgttttgttcggttgtagtgcgttatttagcgtttgcgtcgagttttaggtggtattttaggcgtgaagaagatcgcggttttgacgaataatcgtttgcgaacgtttaattagtaatgcgcgtttttcgttgtttagttgacgttttagcgttacgcgttggtatatttttttataggtattaaacgtcgtatgtagatcgatacgaatttgtagataagtgcgtagagtcgtgattttttgttggcgtgggattcgtattattttatttaatatatttagcgtgttagtt

SEQ ID NO: 6024 - DNA, 631 bp, Artificial Sequence
  chemically treated genomic DNA (Homo sapiens) CpG-island No: 6024
aactaacacgctaaatatattaaataaaataatacgaatcccacgccaacaaaaaatcacgactctacgcacttatctacaaattcgtatcgatctacatacgacgtttaatacctataaaaaaatataccaacgcgtaacgctaaaacgtcaactaaacaacgaaaaacgcgcattactaattaaacgttcgcaaacgattattcgtcaaaaccgcgatcttcttcacgcctaaaataccacctaaaactcgacgcaaacgctaaataacgcactacaaccgaacaaaacaaatcaatttaccgacgccctaaaaaaatacgctaccgatctaacaaccgcactcaaccgttctcctcaaataacgcttaaaaaaacacccgcctctcaaaccatcctacccaccttattaaaacaaaaacaacacgtctaccaacttttcgcccgcttaccaaactaaacaaccccgacattaacgcccgccacgaaacaaacacaaaaaaccacgcaataatcaatcgtcactttcacgtctactaatatacaacattctcgacaacacgacgctaatttccgactatacccctattacgtaaaaattctacacctaataacaaattaaaacgaaaac

SEQ ID NO: 6025 - DNA, 670 bp, Artificial Sequence
  chemically treated genomic DNA (Homo sapiens) CpG-island No: 6025
gtggttagagcgtatcggaatcggtatcgtttgatcgtcgtatgttcggtaagaaaatgcgttacgtcggcgatcgtgttgttgcggtcgtcgtagaaagtgaagaaattgcggtttcgagtattggagttttatcgacgatggatatgaagtgttttagttcgggatggcgatcgacggagttattggcgggaagagcgttcgtcgtgtacgatgaatcggtggtggttgttgttgggcgttagatatcggatattgcggttgattacggtttaatgcgcgtggttttgaagttatattggtaatcggtttgttggttgtagtcgttgttgtatttgatgttaggcgtgtcggtgtcgtatttttaaacggtgatgtcggacgcgattttacgggtttgatatcgcgttttggttgtttttgtattttttttatcggtttcggttttggtttaggtttcggtttcggttttttaatgattatcggtgttttttttggcggttcggggatcggtttaagtttcggttttggttttattatcggtttcggtggcggttgaacggtttgtggcggttcgagattagtaagcgtaattatcgtgatagaaatcggttgcgtaagcgtaggtagtttaataatttgatgtatcggaaatgatcgtgcgatgtaa

SEQ ID NO: 6026 - DNA, 670 bp, Artificial Sequence
  chemically treated genomic DNA (Homo sapiens) CpG-island No: 6026
ttacatcgcacgatcatttccgatacatcaaattattaaactacctacgcttacgcaaccgatttctatcacgataattacgcttactaatctcgaaccgccacaaaccgttcaaccgccaccgaaaccgataataaaaccaaaaccgaaacttaaaccgatccccgaaccgccaaaaaaaacaccgataatcattaaaaaaccgaaaccgaaacctaaaccaaaaccgaaaccgataaaaaaaatacaaaaacaaccaaaacgcgatatcaaacccgtaaaatcgcgtccgacatcaccgtttaaaaatacgacaccgacacgcctaacatcaaatacaacaacgactacaaccaacaaaccgattaccaatataacttcaaaaccacgcgcattaaaccgtaatcaaccgcaatatccgatatctaacgcccaacaacaaccaccaccgattcatcgtacacgacgaacgctcttcccgccaataactccgtcgatcgccatcccgaactaaaacacttcatatccatcgtcgataaaactccaatactcgaaaccgcaatttcttcactttctacgacgaccgcaacaacacgatcgccgacgtaacgcattttcttaccgaacatacgacgatcaaacgataccgattccgatacgctctaaccac

SEQ ID NO: 6027 - DNA, 670 bp, Artificial Sequence
  chemically treated genomic DNA (Homo sapiens) CpG-island No: 6027
ttgtatcgtacggttattttcggtatattaggttattgaattatttgcgtttgcgtagtcgatttttgttacgatggttacgtttgttgatttcgaatcgttataagtcgtttagtcgttatcggagtcggtggtagagttagaatcggaatttgagtcgattttcgaatcgttaaaagaagtatcggtggttattgaaaagtcgaagtcgaaatttaagttaaaatcgaagtcggtgaaaaaggtataggagtagttaaaacgcgatgttaaattcgtagagtcgcgttcggtattatcgtttgaaaatacggtatcggtacgtttgatattaagtatagtaacggttgtaattagtaagtcggttattagtgtggttttaggattacgcgtattaagtcgtaattagtcgtagtattcggtatttggcgtttagtaataattattatcggtttatcgtgtacgacgggcgtttttttcgttagtggtttcgtcgatcgttatttcgggttaaagtattttatatttatcgtcgatgaggttttagtgttcggagtcgtaatttttttattttttgcgacgatcgtagtaatacgatcgtcgacgtgacgtatttttttgtcgaatatacggcggttaagcggtgtcggtttcggtgcgttttgattat

SEQ ID NO: 6028 - DNA, 670 bp, Artificial Sequence
  chemically treated genomic DNA (Homo sapiens) CpG-island No: 6028
ataatcaaaacgcaccgaaaccgacaccgcttaaccgccgtatattcgacaaaaaaatacgtcacgtcgacgatcgtattactacgatcgtcgcaaaaaataaaaaaattacgactccgaacactaaaacctcatcgacgataaatataaaatactttaacccgaaataacgatcgacgaaaccactaacgaaaaaaacgcccgtcgtacacgataaaccgataataattattactaaacgccaaataccgaatactacgactaattacgacttaatacgcgtaatcctaaaaccacactaataaccgacttactaattacaaccgttactatacttaatatcaaacgtaccgataccgtattttcaaacgataataccgaacgcgactctacgaatttaacatcgcgttttaactactcctatacctttttcaccgacttcgattttaacttaaatttcgacttcgacttttcaataaccaccgatacttcttttaacgattcgaaaatcgactcaaattccgattctaactctaccaccgactccgataacgactaaacgacttataacgattcgaaatcaacaaacgtaaccatcgtaacaaaaatcgactacgcaaacgcaaataattcaataacctaatataccgaaaataaccgtacgatacaa

SEQ ID NO: 6029 - DNA, 567 bp, Artificial Sequence
  chemically treated genomic DNA (Homo sapiens) CpG-island No: 6029
  unsure (349, 430, 479)
ttttcgggttgttgacgtggtaaacgtgtagacggtaattagtaattttcgttagatatagtacgcggcgaattgtttttatttcggtaaatatcggacgcgaagttatatagttatgagcggttacgcgatttttacgtttcgcgtttttcgtttagttcgttataaattagcgcgttttcgtagtgtattagtatcgggttgatttagttcgtttagtttttgcgtatttttgaagaattgttagtcgtttatattatcgaagtcggtggcgatatcgcgaatcgtataggtcgttacgaaatatgtgaagtcgataacgtttaattttatttatttgatgtagatngcgcgatgttgtaagatattaagtcgatcgagttgtggcgtattaaatattaacgttgttttttacggcgatcgaattttnattttattgaaacgcgggtatcggtgttagtagttggtgagcggtattncgattatttttagtcgtcgtatagagttgtgttggaaatgcgcgatttggggtaggaattaaagtatattgttatcgtaggcgtatta

SEQ ID NO: 6030 - DNA, 567 bp, Artificial Sequence
  chemically treated genomic DNA (Homo sapiens) CpG-island No: 6030
  unsure (89, 138, 219)
taatacgcctacgataacaatatactttaattcctaccccaaatcgcgcatttccaacacaactctatacgacgactaaaaataatcgnaataccgctcaccaactactaacaccgatacccgcgtttcaataaaatnaaaattcgatcgccgtaaaaaacaacgttaatatttaatacgccacaactcgatcgacttaatatcttacaacatcgcgcnatctacatcaaataaataaaattaaacgttatcgacttcacatatttcgtaacgacctatacgattcgcgatatcgccaccgacttcgataatataaacgactaacaattcttcaaaaatacgcaaaaactaaacgaactaaatcaacccgatactaatacactacgaaaacgcgctaatttataacgaactaaacgaaaaacgcgaaacgtaaaaatcgcgtaaccgctcataactatataacttcgcgtccgatatttaccgaaataaaaacaattcgccgcgtactatatctaacgaaaattactaattaccgtctacacgtttaccacgtcaacaacccgaaaa

SEQ ID NO: 6031 - DNA, 567 bp, Artificial Sequence
  chemically treated genomic DNA (Homo sapiens) CpG-island No: 6031
  unsure (89, 138, 219)
taatacgtttgcgataataatatgttttggtttttgttttagatcgcgtatttttagtataattttatacggcggttgaagatgatcgnaatgtcgtttattagttgttggtatcggtgttcgcgttttaatggaatngaagttcgatcgtcgtaaagggtaacgttgatatttgatgcgttataattcggtcggtttggtgttttatagtatcgcgtngtttgtattaagtagatgaagttgggcgttgtcggttttatatgtttcgtggcgatttgtgcgattcgcggtatcgttatcgatttcggtgatgtaaacgattggtagttttttaaaggtgcgtagaagttgggcgaattgggttagttcggtgttggtgtattgcgaaaacgcgttgatttgtgacgaattgggcgaagaacgcgaagcgtgaaggtcgcgtaatcgtttatgattatgtggtttcgcgttcggtatttatcgaagtgaaagtaattcgtcgcgtattgtatttggcgaaagttgttggttgtcgtttgtacgtttgttacgttagtagttcggaag

SEQ ID NO: 6032 - DNA, 567 bp, Artificial Sequence
  chemically treated genomic DNA (Homo sapiens) CpG-island No: 6032
  unsure (349, 430, 479)
cttccgaactactaacgtaacaaacgtacaaacgacaaccaacaactttcgccaaatacaatacgcgacgaattactttcacttcgataaataccgaacgcgaaaccacataatcataaacgattacgcgaccttcacgcttcgcgttcttcgcccaattcgtcacaaatcaacgcgttttcgcaatacaccaacaccgaactaacccaattcgcccaacttctacgcacctttaaaaaactaccaatcgtttacatcaccgaaatcgataacgataccgcgaatcgcacaaatcgccacgaaacatataaaaccgacaacgcccaacttcatctacttaatacaaacnacgcgatactataaaacaccaaaccgaccgaattataacgcatcaaatatcaacgttaccctttacgacgatcgaacttcnattccattaaaacgcgaacaccgataccaacaactaataaacgacattncgatcatcttcaaccgccgtataaaattatactaaaaatacgcgatctaaaacaaaaaccaaaacatattattatcgcaaacgtatta

SEQ ID NO: 6033 - DNA, 822 bp, Artificial Sequence
  chemically treated genomic DNA (Homo sapiens) CpG-island No: 6033
aagggattgttggcgtgtttggcgtgtcgtttgtggtgttgttggtaacgttgggtatcgtaggtattcgttggaagattggcgttattgttgggttgatcgtatttcgaatgcgcggttgtttgacgagggggtaatgcgttgtcggttgtgatgttaggggatataattgtttgtcgtatgcgttttaaggatgcgtgtacgtgcgttggatgcgtaaaattagttaatagaaatcgttaatgtcgggtagcgtatcgcgtttaatatcgcgggtgatgcggaaaaagagtagattaatcgtggcgattggttgtttgtcgatgtgtcgttagagtcgtttatacgggtgattgtcgagttttaaatttatatatcgttgatttagtggtagtcgttgtatatttattacgtcgttagttacgttacgggacgcgttttattgttggaagataattttgttgaattggttttcgatatttcgttatggttggtagataacgatcgtttggtattgcgcgatatttttgttcgtaatacgttggtcggagcgcgcgtcgcgatgtttaattcgtcgcgtcgcggtaaacgtaagtcggaatatttggtatggttggcgttttttgtacgggcgtagagcgagtcgatgcgttatttggttttcggaacgcggggcggtttatttcgcggatttcgtttgggcgcgttagtttaacggagaagggatgcgcgaattgttgtaatagttttgattatatttagtttggttatagtttgatggatgttttcgttgtcgttagttgttacggaatatttcgtttg

SEQ ID NO: 6034 - DNA, 822 bp, Artificial Sequence
  chemically treated genomic DNA (Homo sapiens) CpG-island No: 6034
caaacgaaatattccgtaacaactaacgacaacgaaaacatccatcaaactataaccaaactaaatataatcaaaactattacaacaattcgcgcatcccttctccgttaaactaacgcgcccaaacgaaatccgcgaaataaaccgccccgcgttccgaaaaccaaataacgcatcgactcgctctacgcccgtacaaaaaacgccaaccataccaaatattccgacttacgtttaccgcgacgcgacgaattaaacatcgcgacgcgcgctccgaccaacgtattacgaacaaaaatatcgcgcaataccaaacgatcgttatctaccaaccataacgaaatatcgaaaaccaattcaacaaaattatcttccaacaataaaacgcgtcccgtaacgtaactaacgacgtaataaatatacaacgactaccactaaatcaacgatatataaatttaaaactcgacaatcacccgtataaacgactctaacgacacatcgacaaacaaccaatcgccacgattaatctactctttttccgcatcacccgcgatattaaacgcgatacgctacccgacattaacgatttctattaactaattttacgcatccaacgcacgtacacgcatccttaaaacgcatacgacaaacaattatatcccctaacatcacaaccgacaacgcattaccccctcgtcaaacaaccgcgcattcgaaatacgatcaacccaacaataacgccaatcttccaacgaatacctacgatacccaacgttaccaacaacaccacaaacgacacgccaaacacgccaacaatccctt

SEQ ID NO: 6035 - DNA, 822 bp, Artificial Sequence
  chemically treated genomic DNA (Homo sapiens) CpG-island No: 6035
taaacgagatatttcgtggtaattggcggtaacgggggtatttattaagttataattaagttgaatataattaaggttgttgtagtaattcgcgtatttttttttcgttgagttggcgcgtttaggcgaaattcgcgaggtaaatcgtttcgcgtttcgaaggttagataacgtatcggttcgttttgcgttcgtgtaagagacgttagttatgttagatatttcggtttacgtttatcgcgacgcggcgggttaagtatcgcgacgcgcgtttcggttagcgtgttgcgggtagagatatcgcgtaatattaggcggtcgttatttgttagttataacggggtgtcgaagattagtttagtaaggttattttttagtagtgaaacgcgtttcgtgacgtggttggcggcgtggtgaatatgtagcggttgttattgggttagcggtgtatgggtttgaagttcgataattattcgtgtgaacggttttggcggtatatcggtaagtagttagtcgttacggttaatttgtttttttttcgtattattcgcgatgttaagcgcgatacgttgttcggtattggcggtttttgttggttggttttgcgtatttagcgtacgtatacgtatttttagagcgtatgcgataggtaattgtgttttttggtattatagtcggtagcgtattattttttcgttaggtagtcgcgtattcgagatacggttaatttagtaataacgttagttttttagcgaatatttacggtatttagcgttgttagtaatattataaacgatacgttaggtacgttagtaatttttt

SEQ ID NO: 6036 - DNA, 822 bp, Artificial Sequence
  chemically treated genomic DNA (Homo sapiens) CpG-island No: 6036
aaaaaattactaacgtacctaacgtatcgtttataatattactaacaacgctaaataccgtaaatattcgctaaaaaactaacgttattactaaattaaccgtatctcgaatacgcgactacctaacgaaaaaataatacgctaccgactataataccaaaaaacacaattacctatcgcatacgctctaaaaatacgtatacgtacgctaaatacgcaaaaccaaccaacaaaaaccgccaataccgaacaacgtatcgcgcttaacatcgcgaataatacgaaaaaaaaacaaattaaccgtaacgactaactacttaccgatataccgccaaaaccgttcacacgaataattatcgaacttcaaacccatacaccgctaacccaataacaaccgctacatattcaccacgccgccaaccacgtcacgaaacgcgtttcactactaaaaaataaccttactaaactaatcttcgacaccccgttataactaacaaataacgaccgcctaatattacgcgatatctctacccgcaacacgctaaccgaaacgcgcgtcgcgatacttaacccgccgcgtcgcgataaacgtaaaccgaaatatctaacataactaacgtctcttacacgaacgcaaaacgaaccgatacgttatctaaccttcgaaacgcgaaacgatttacctcgcgaatttcgcctaaacgcgccaactcaacgaaaaaaaaatacgcgaattactacaacaaccttaattatattcaacttaattataacttaataaatacccccgttaccgccaattaccacgaaatatctcgttta

SEQ ID NO: 6037 - DNA, 1022 bp, Artificial Sequence
  chemically treated genomic DNA (Homo sapiens) CpG-island No: 6037
tagttattaaacgtcgtatgtgtcgggtaagcgtgataatagttggtttatacgcgtttagtttgtatgtcgcgttttattttataggttagattatcgttgcggttttagacgttcgcgtttaggttatattgcgtatcgttcgttagttttagcgttttttttatcgttttgaaggtggttatcgttagtatcgggttaaaaatttttttttggaatattcgtatattgttttgattaaatagaatcgtcggttcgaggtagtagtcgttttttagtttattttttagtagtttgcgtcgttcgtttgtgagtacgttagcgtttttttttttatcgatattaatgtagttgaggatggtttttagttgttcgtgagaaatttgcgcgtttatttgcgttacgttgtcgagcgggttatcgttacgaatgttttcgatacggcggatggcgcgttttataaagcgttcgtagatagatttttgtattaaagtacgattcggataggtgttaatttcgttttgattaaagcgaatagtgtaaattttgagggaggtcgagacgattttataggttttaagtatcgtcggtcgggcggttgttggcgttaggtttgataacgatattgggttttgtgaaatgcgcgcgcggtagtggcgcgacggtagtaagagtgtcgtgtttttggcgtagttttttaattggatcgaatttaagtgtacgtagcgggtaggattcgatatatatgggttgttttttttcggcgacgcgcgaataataattatcgtatttcgttatgtgtttttttttagtattgtattgtggcgcgtcgtacggataagttatgtggtagtagcggtagtcgatataaatatttttattaattattataaagttatttttacgtttatgtattgcgtcgttggggtagatttttgtatatgcggggttatcgtaatggttataggagatggagagataataagcgaatacgttttggtgttagacgttattattttttt

SEQ ID NO: 6038 - DNA, 1022 bp, Artificial Sequence
  chemically treated genomic DNA (Homo sapiens) CpG-island No: 6038
aaaaaaataataacgtctaacaccaaaacgtattcgcttattatctctccatctcctataaccattacgataaccccgcatatacaaaaatctaccccaacgacgcaatacataaacgtaaaaataactttataataattaataaaaatatttatatcgactaccgctactaccacataacttatccgtacgacgcgccacaatacaatactaaaaaaaaacacataacgaaatacgataattattattcgcgcgtcgccgaaaaaaaacaacccatatatatcgaatcctacccgctacgtacacttaaattcgatccaattaaaaaactacgccaaaaacacgacactcttactaccgtcgcgccactaccgcgcgcgcatttcacaaaacccaatatcgttatcaaacctaacgccaacaaccgcccgaccgacgatacttaaaacctataaaatcgtctcgacctccctcaaaatttacactattcgctttaatcaaaacgaaattaacacctatccgaatcgtactttaatacaaaaatctatctacgaacgctttataaaacgcgccatccgccgtatcgaaaacattcgtaacgataacccgctcgacaacgtaacgcaaataaacgcgcaaatttctcacgaacaactaaaaaccatcctcaactacattaatatcgataaaaaaaaaaacgctaacgtactcacaaacgaacgacgcaaactactaaaaaataaactaaaaaacgactactacctcgaaccgacgattctatttaatcaaaacaatatacgaatattccaaaaaaaaatttttaacccgatactaacgataaccaccttcaaaacgataaaaaaaacgctaaaactaacgaacgatacgcaatataacctaaacgcgaacgtctaaaaccgcaacgataatctaacctataaaataaaacgcgacatacaaactaaacgcgtataaaccaactattatcacgcttacccgacacatacgacgtttaataacta

SEQ ID NO: 6039 - DNA, 1022 bp, Artificial Sequence
  chemically treated genomic DNA (Homo sapiens) CpG-island No: 6039
aggaagataatggcgtttggtattagaacgtgttcgtttattatttttttattttttgtaattattgcgatgatttcgtatgtataaaagtttgttttagcggcgtaatgtataagcgtgaagatggttttgtggtggttgatgaagatgtttgtatcggttgtcgttattgttatatggtttgttcgtacggcgcgttatagtataatgttgaaaaagggtatatgacgaagtgcgatggttgttattcgcgcgtcgtcgaggggaaataatttatatgtgtcgaattttgttcgttgcgtgtatttgagttcggtttaattgaagagttgcgttagaagtacggtatttttgttgtcgtcgcgttattgtcgcgcgcgtattttataaaatttaatatcgttattaaatttaacgttagtagtcgttcgatcggcgatatttagagtttataggatcgtttcgattttttttagggtttgtattgttcgttttaattagggcgaagttggtatttgttcgagtcgtgttttagtgtaggaatttatttacgaacgttttatggaacgcgttattcgtcgtgtcgaaagtattcgtagcggtaattcgttcgatagcgtgacgtaaatgggcgcgtaggttttttacgggtaattggaaattatttttaattatattgatatcggtaaaaaagagggcgttgacgtgtttataggcgggcggcgtaagttgttggaaggtgaattgaaagacggttattatttcgaatcgacgattttgtttggttagaataatatgcgggtgttttaggaggagatttttggttcggtgttggcggtgattatttttaaaacgatggaagaagcgttggagttggcgaacgatacgtaatatggtttgggcgcgggcgtttggagtcgtaacggtaatttggtttataagatggggcgcggtatataggttgggcgcgtgtggattaattgttattacgtttattcggtatatgcggcgtttggtggtta

SEQ ID NO: 6040 - DNA, 1022 bp, Artificial Sequence
  chemically treated genomic DNA (Homo sapiens) CpG-island No: 6040
taaccaccaaacgccgcatataccgaataaacgtaataacaattaatccacacgcgcccaacctatataccgcgccccatcttataaaccaaattaccgttacgactccaaacgcccgcgcccaaaccatattacgtatcgttcgccaactccaacgcttcttccatcgttttaaaaataatcaccgccaacaccgaaccaaaaatctcctcctaaaacacccgcatattattctaaccaaacaaaatcgtcgattcgaaataataaccgtctttcaattcaccttccaacaacttacgccgcccgcctataaacacgtcaacgccctcttttttaccgatatcaatataattaaaaataatttccaattacccgtaaaaaacctacgcgcccatttacgtcacgctatcgaacgaattaccgctacgaatactttcgacacgacgaataacgcgttccataaaacgttcgtaaataaattcctacactaaaacacgactcgaacaaataccaacttcgccctaattaaaacgaacaatacaaaccctaaaaaaaatcgaaacgatcctataaactctaaatatcgccgatcgaacgactactaacgttaaatttaataacgatattaaattttataaaatacgcgcgcgacaataacgcgacgacaacaaaaataccgtacttctaacgcaactcttcaattaaaccgaactcaaatacacgcaacgaacaaaattcgacacatataaattatttcccctcgacgacgcgcgaataacaaccatcgcacttcgtcatataccctttttcaacattatactataacgcgccgtacgaacaaaccatataacaataacgacaaccgatacaaacatcttcatcaaccaccacaaaaccatcttcacgcttatacattacgccgctaaaacaaacttttatacatacgaaatcatcgcaataattacaaaaaataaaaaaataataaacgaacacgttctaataccaaacgccattatcttcct

SEQ ID NO: 6041 - DNA, 686 bp, Artificial Sequence
  chemically treated genomic DNA (Homo sapiens) CpG-island No: 6041
gcgtttggcgtttcgattattatcgtagatgaaattcgtaaaaattcggttgttcgcgatgtgtcgaagattattcgtattatgttaggcgttaatttgatcggtaattttattagtggttagcgtgggaataatcgatagattgatattcgcggtatgggttcggaaaatacgttgattttgattgacggtaagtcggtaagtagtcgtaattcggtgcgttagggttggcgtggcgagcgcgatattcgtggtgatattttttgggtgttatttgaaatgattgaacgtattgaagttttgcgtggttcggtagttgcgcgttatggtaacggcgcggcgggcggcgtggttaatattattattaaaaaaggtagcggcgagtggtacggtttttgcgacgtatatttaatgcgttagaatataaagaggaaggtgttattaaacgtattaattttagtttgatcggttcgttgggcgacgaatttagttttcggtttgtatggtaatttcgataaaatttaagttgacgcgtgggatattaattaggttattaatcgcgcgtgtcgaacgttgttacgagttattagtcggcgcgaatgggtaattagtaagatattatggcgtgggcgttgtgattttcgttattgaatcgttggattgtttgatgacgtatcgttattgtg

SEQ ID NO: 6042 - DNA, 686 bp, Artificial Sequence
  chemically treated genomic DNA (Homo sapiens) CpG-island No: 6042
cacaataacgatacgtcatcaaacaatccaacgattcaataacgaaaatcacaacgcccacgccataatatcttactaattacccattcgcgccgactaataactcgtaacaacgttcgacacgcgcgattaataacctaattaatatcccacgcgtcaacttaaattttatcgaaattaccatacaaaccgaaaactaaattcgtcgcccaacgaaccgatcaaactaaaattaatacgtttaataacaccttcctctttatattctaacgcattaaatatacgtcgcaaaaaccgtaccactcgccgctaccttttttaataataatattaaccacgccgcccgccgcgccgttaccataacgcgcaactaccgaaccacgcaaaacttcaatacgttcaatcatttcaaataacacccaaaaaatatcaccacgaatatcgcgctcgccacgccaaccctaacgcaccgaattacgactacttaccgacttaccgtcaatcaaaatcaacgtattttccgaacccataccgcgaatatcaatctatcgattattcccacgctaaccactaataaaattaccgatcaaattaacgcctaacataatacgaataatcttcgacacatcgcgaacaaccgaatttttacgaatttcatctacgataataatcgaaacgccaaacgc

SEQ ID NO: 6043 - DNA, 686 bp, Artificial Sequence
  chemically treated genomic DNA (Homo sapiens) CpG-island No: 6043
tatagtagcgatacgttattaaatagtttagcgatttaatggcgaaaattatagcgtttacgttataatattttgttgattatttattcgcgtcggttggtaattcgtggtaacgttcggtacgcgcgattgatggtttggttgatattttacgcgttagtttgggttttgtcgaggttgttatataaatcgaaagttgaattcgtcgtttagcggatcggttaggttagagttagtgcgtttggtggtatttttttttttatgttttggcgtattaaatatgcgtcgtaggagtcgtgttattcgtcgttgttttttttggtaatgatgttaattacgtcgttcgtcgcgtcgttgttataacgcgtagttgtcggattacgtagaattttaatacgtttaattattttaggtggtatttaggaagtattattacgggtatcgcgttcgttacgttagttttgacgtatcgagttacggttgtttatcggtttgtcgttaattaaaattagcgtgtttttcggatttatatcgcgaatattaatttgtcggttatttttacgttgattattggtggagttatcggttaggttaacgtttggtatggtacggatgattttcgatatatcgcgggtaatcgggtttttgcggattttatttgcggtgatggtcgaaacgttaggcgt

SEQ ID NO: 6044 - DNA, 686 bp, Artificial Sequence
  chemically treated genomic DNA (Homo sapiens) CpG-island No: 6044
acgcctaacgtttcgaccatcaccgcaaataaaatccgcaaaaacccgattacccgcgatatatcgaaaatcatccgtaccataccaaacgttaacctaaccgataactccaccaataatcaacgtaaaaataaccgacaaattaatattcgcgatataaatccgaaaaacacgctaattttaattaacgacaaaccgataaacaaccgtaactcgatacgtcaaaactaacgtaacgaacgcgatacccgtaataatacttcctaaataccacctaaaataattaaacgtattaaaattctacgtaatccgacaactacgcgttataacaacgacgcgacgaacgacgtaattaacatcattaccaaaaaaaacaacgacgaataacacgactcctacgacgcatatttaatacgccaaaacataaaaaaaaaaataccaccaaacgcactaactctaacctaaccgatccgctaaacgacgaattcaactttcgatttatataacaacctcgacaaaacccaaactaacgcgtaaaatatcaaccaaaccatcaatcgcgcgtaccgaacgttaccacgaattaccaaccgacgcgaataaataatcaacaaaatattataacgtaaacgctataattttcgccattaaatcgctaaactatttaataacgtatcgctactata

SEQ ID NO: 6045 - DNA, 720 bp, Artificial Sequence
  chemically treated genomic DNA (Homo sapiens) CpG-island No: 6045
tgaatcgcgttatagaagttttttagttgcgcgatatcgcgtatatttgtcggtttgtcgttaagttgacgataaatttgcgttagcgtcgttgcgtttagcgcgttattgtttttgtttaaattaattagtagtagtgcgttattttcggtagaaagttgcggcgtgatggtgtgacgtatattttttacgcgggtaaatgtagaaattattagcgatagcggcgacgttatttcgcgtttttcgttatttttttgttagcgggtttttatcgatatggagtttttatttatcgggatcgttaggtttagcgtcggataaagtttttcgtttacggttttaacggtttttatataggttcgtatttttattagggtggtttgtcgtcgttatttagttggcgggaaagtgtgatgcgtttgatatcgttaatttgtgttgcggcgatgttgggtaacgttttatcgatcgttagacgggttagggtcgttgaaatttagtagcgttattagcgtacgttcgttaatcgttatcgttttatcgtagtagttgtcgagttggcggtatgatcgcgtaggtagcgattgtatttgttacgggttattatttgatgcgcgttttatgtcggtacgttgggacggtattggtataagatggttttttttttaacgggaaagttagtacgtttttacgaattattttaagtattcgttttatacg

SEQ ID NO: 6046 - DNA, 720 bp, Artificial Sequence
  chemically treated genomic DNA (Homo sapiens) CpG-island No: 6046
cgtataaaacgaatacttaaaataattcgtaaaaacgtactaactttcccgttaaaaaaaaaaccatcttataccaataccgtcccaacgtaccgacataaaacgcgcatcaaataataacccgtaacaaatacaatcgctacctacgcgatcataccgccaactcgacaactactacgataaaacgataacgattaacgaacgtacgctaataacgctactaaatttcaacgaccctaacccgtctaacgatcgataaaacgttacccaacatcgccgcaacacaaattaacgatatcaaacgcatcacactttcccgccaactaaataacgacgacaaaccaccctaataaaaatacgaacctatataaaaaccgttaaaaccgtaaacgaaaaactttatccgacgctaaacctaacgatcccgataaataaaaactccatatcgataaaaacccgctaacaaaaaaataacgaaaaacgcgaaataacgtcgccgctatcgctaataatttctacatttacccgcgtaaaaaatatacgtcacaccatcacgccgcaactttctaccgaaaataacgcactactactaattaatttaaacaaaaacaataacgcgctaaacgcaacgacgctaacgcaaatttatcgtcaacttaacgacaaaccgacaaatatacgcgatatcgcgcaactaaaaaacttctataacgcgattca

SEQ ID NO: 6047 - DNA, 720 bp, Artificial Sequence
  chemically treated genomic DNA (Homo sapiens) CpG-island No: 6047
cgtataaaacgaatgtttagagtgattcgtgagaacgtgttagttttttcgttgggggaaaaattattttgtgttaatgtcgttttagcgtatcggtatggagcgcgtattaaatggtggttcgtggtaggtgtagtcgttatttgcgcggttatatcgttagttcgatagttattacggtgaagcgatggcgattggcgagcgtgcgttggtagcgttgttggattttagcggttttagttcgtttggcggtcggtgaagcgttatttaatatcgtcgtaatatagattggcgatattaaacgtattatattttttcgttaattggatggcggcggtaggttattttggtgaagatgcgggtttgtatagaggtcgttaaagtcgtgggcgaagagttttgttcggcgttgggtttgacgatttcggtgggtaaagattttatgtcgatgaaaattcgttggtaggaaggtaacgaagagcgcgaaatgacgtcgtcgttgtcgttggtgatttttgtatttgttcgcgtggaagatgtacgttatattattacgtcgtagttttttatcgaagataacgtattgttgttgattgatttgggtaaaggtaataacgcgttgggcgtaacggcgttggcgtaggtttatcgttagtttggcgataaatcggtagatgtacgcgatgtcgcgtaattgaaaggtttttatgacgcgattta

SEQ ID NO: 6048 - DNA, 720 bp, Artificial Sequence
  chemically treated genomic DNA (Homo sapiens) CpG-island No: 6048
taaatcgcgtcataaaaacctttcaattacgcgacatcgcgtacatctaccgatttatcgccaaactaacgataaacctacgccaacgccgttacgcccaacgcgttattacctttacccaaatcaatcaacaacaatacgttatcttcgataaaaaactacgacgtaataatataacgtacatcttccacgcgaacaaatacaaaaatcaccaacgacaacgacgacgtcatttcgcgctcttcgttaccttcctaccaacgaattttcatcgacataaaatctttacccaccgaaatcgtcaaacccaacgccgaacaaaactcttcgcccacgactttaacgacctctatacaaacccgcatcttcaccaaaataacctaccgccgccatccaattaacgaaaaaatataatacgtttaatatcgccaatctatattacgacgatattaaataacgcttcaccgaccgccaaacgaactaaaaccgctaaaatccaacaacgctaccaacgcacgctcgccaatcgccatcgcttcaccgtaataactatcgaactaacgatataaccgcgcaaataacgactacacctaccacgaaccaccatttaatacgcgctccataccgatacgctaaaacgacattaacacaaaataatttttcccccaacgaaaaaactaacacgttctcacgaatcactctaaacattcgttttatacg

SEQ ID NO: 6049 - DNA, 504 bp, Artificial Sequence
  chemically treated genomic DNA (Homo sapiens) CpG-island No: 6049
atcgggtattggtagttaggcgcgaatggataggtcggtttcgttcgttggtgttaagttttagtatttcgttatggttattttcgatacgttgtataattgttagttttaatttcgtgtcgttaatggtgcgcgtattgtcgtcgcggataaacggttggaataggtgtttacgttgtttcggcgtaattttcggatcgttattttttatttggaattaggcgcgattcggtttcgtttcgttgttgattttgatttagttattgttataacgggcggcgttgattattatattcgttatcgcgcgtttgatcgatagcgggtgtatttttattttaatgttgtcggggtaaagcgcggttttaatttttcgtttatagttattttcggtagtaattattttatcgagtattgtattaagattcgttatttttatcggtattttttgttcggtgcgtaggtagtcgataaattgtttaatgatggcgttgtatttttcgatat

SEQ ID NO: 6050 - DNA, 504 bp, Artificial Sequence
  chemically treated genomic DNA (Homo sapiens) CpG-island No: 6050
atatcgaaaaatacaacgccatcattaaacaatttatcgactacctacgcaccgaacaaaaaataccgataaaaataacgaatcttaatacaatactcgataaaataattactaccgaaaataactataaacgaaaaattaaaaccgcgctttaccccgacaacattaaaataaaaatacacccgctatcgatcaaacgcgcgataacgaatataataatcaacgccgcccgttataacaataactaaatcaaaatcaacaacgaaacgaaaccgaatcgcgcctaattccaaataaaaaataacgatccgaaaattacgccgaaacaacgtaaacacctattccaaccgtttatccgcgacgacaatacgcgcaccattaacgacacgaaattaaaactaacaattatacaacgtatcgaaaataaccataacgaaatactaaaacttaacaccaacgaacgaaaccgacctatccattcgcgcctaactaccaatacccgat

SEQ ID NO: 6051 - DNA, 504 bp, Artificial Sequence
  chemically treated genomic DNA (Homo sapiens) CpG-island No: 6051
atatcgaagagtgtaacgttattattgagtagtttatcgattatttgcgtatcgggtaggagatgtcgatggaaatggcggattttaatgtagtattcggtgaggtgattgttgtcgaaagtggttatgagcgggaaattgaaatcgcgttttatttcggtagtattgaagtgaaaatgtattcgttgtcgattaaacgcgcggtggcgaatatggtggttaacgtcgttcgttatggtaatggttggattaaagttagtagcggaacggagtcgaatcgcgtttggttttaggtggaagatgacggttcgggaattgcgtcggaataacgtaagtatttgttttagtcgtttgttcgcggcgatagtgcgcgtattattagcggtacgggattagggttggtaattgtgtagcgtatcggggataattataacgggatgttggaatttggtattagcgagcggggtcggtttgtttattcgcgtttggttgttagtgttcggt

SEQ ID NO: 6052 - DNA, 504 bp, Artificial Sequence
  chemically treated genomic DNA (Homo sapiens) CpG-island No: 6052
accgaacactaacaaccaaacgcgaataaacaaaccgaccccgctcgctaataccaaattccaacatcccgttataattatccccgatacgctacacaattaccaaccctaatcccgtaccgctaataatacgcgcactatcgccgcgaacaaacgactaaaacaaatacttacgttattccgacgcaattcccgaaccgtcatcttccacctaaaaccaaacgcgattcgactccgttccgctactaactttaatccaaccattaccataacgaacgacgttaaccaccatattcgccaccgcgcgtttaatcgacaacgaatacattttcacttcaatactaccgaaataaaacgcgatttcaatttcccgctcataaccactttcgacaacaatcacctcaccgaatactacattaaaatccgccatttccatcgacatctcctacccgatacgcaaataatcgataaactactcaataataacgttacactcttcgatat

SEQ ID NO: 6053 - DNA, 1342 bp, Artificial Sequence
  chemically treated genomic DNA (Homo sapiens) CpG-island No: 6053
  unsure (848)
tttcggggttaagttttgattcgttagattcggaaagttgtataggattatcggtagggtgacgttacgggcgatttgttggtaatagcgttaagattcgtggggcgatttgttatagtagggttgatgggtacgatttattagcgtcgtagttgcgtattatgcgttattgatcgttcgttaggggaggggatcgagtttattaaatcgtattgttcgtgttaatggtttagtttgttatcgtttcggttaagatcgtttgtgtggttttttttttgaggattagacgtatcgattttttttgaattatgtcgtcgttgatttgcggtagttttaaggcgcgttgtaatagtttgcggttgttttcgtgtggattggttattagaaagttgcgttcggttatggtttgtgttagggtttttggttttttttgatatagtaattcgttttcgtttattagtaatacgttacggtattgttcggtttcgtcgagatacgaggtattttagaggattaatattttttcgttcgttagtttatgtattatttgttatagttcgcgtcgtgagatagggttaacgtcgacgtcgggtttatcgagtagtaatattttcggttcgtttattagggtataggttagatcgagtttttgttttattttatcggagagtttgttcgttaggcgtttcggtaaacggtttaagagacgtaaattttagtaggcgagtaaaagtttgtttacgtgtttcgtcggtgacgttgcgtaaattcgcgtatagattgagggtttttattatcgggagatttttatatagattaaatttgtgcggtatatatcgagtcggggngtagcgcgtcgtcgttttgatcggattttgagtggcgtttaaaggggattttttcgcggttggtagcgtgttattaatttgcgttggagtttcgattattttatttagggtgaaattattaatattacgatgttgttttattttggggtgatgattagtcgtacgcgttttcgtggtggtttgatgttaatttggggcgattcgtaacgttattttatcgattattttaatacggtttggggtttagatgtcgattttttcgttttttaggcgtagaacgtttggattcgtatattgtacgatcgttatcgttttgttatacgcggtacgttgggttggattgaaatcggtgatttcgataaagtatcgtcggatttgcgttttttcgtcgggggcgatcgtagtattcgtggttataaatataaatttatcgtttcgaaatacgttaacggtgatttgaaaggggtttcgaagttgataatcggatcgttgga

SEQ ID NO: 6054 - DNA, 1342 bp, Artificial Sequence
  chemically treated genomic DNA (Homo sapiens) CpG-island No: 6054
  unsure (495)
tccaacgatccgattatcaacttcgaaacccctttcaaatcaccgttaacgtatttcgaaacgataaatttatatttataaccacgaatactacgatcgcccccgacgaaaaaacgcaaatccgacgatactttatcgaaatcaccgatttcaatccaacccaacgtaccgcgtataacaaaacgataacgatcgtacaatatacgaatccaaacgttctacgcctaaaaaacgaaaaaatcgacatctaaaccccaaaccgtattaaaataatcgataaaataacgttacgaatcgccccaaattaacatcaaaccaccacgaaaacgcgtacgactaatcatcaccccaaaataaaacaacatcgtaatattaataatttcaccctaaataaaataatcgaaactccaacgcaaattaataacacgctaccaaccgcgaaaaaatcccctttaaacgccactcaaaatccgatcaaaacgacgacgcgctacnccccgactcgatatataccgcacaaatttaatctatataaaaatctcccgataataaaaaccctcaatctatacgcgaatttacgcaacgtcaccgacgaaacacgtaaacaaacttttactcgcctactaaaatttacgtctcttaaaccgtttaccgaaacgcctaacgaacaaactctccgataaaataaaacaaaaactcgatctaacctataccctaataaacgaaccgaaaatattactactcgataaacccgacgtcgacgttaaccctatctcacgacgcgaactataacaaataatacataaactaacgaacgaaaaaatattaatcctctaaaatacctcgtatctcgacgaaaccgaacaataccgtaacgtattactaataaacgaaaacgaattactatatcaaaaaaaaccaaaaaccctaacacaaaccataaccgaacgcaactttctaataaccaatccacacgaaaacaaccgcaaactattacaacgcgccttaaaactaccgcaaatcaacgacgacataattcaaaaaaaatcgatacgtctaatcctcaaaaaaaaaaccacacaaacgatcttaaccgaaacgataacaaactaaaccattaacacgaacaatacgatttaataaactcgatcccctcccctaacgaacgatcaataacgcataatacgcaactacgacgctaataaatcgtacccatcaaccctactataacaaatcgccccacgaatcttaacgctattaccaacaaatcgcccgtaacgtcaccctaccgataatcctatacaactttccgaatctaacgaatcaaaacttaaccccgaaa

SEQ ID NO: 6055 - DNA, 1342 bp, Artificial Sequence
  chemically treated genomic DNA (Homo sapiens) CpG-island No: 6055
  unsure (495)
tttagcgattcggttattaatttcgaggttttttttaggttatcgttggcgtatttcggagcgatagatttgtatttgtagttacgaatattgcggtcgttttcggcgaagaaacgtagattcggcggtattttgtcgaaattatcggttttaatttagtttagcgtgtcgcgtgtaataaaacgatggcgatcgtatagtgtgcggatttagacgttttgcgtttggaaaacggagaaatcgatatttgaattttaggtcgtgttggagtagtcgatagagtagcgttgcgagtcgttttaggttggtattaggttattacgagaacgcgtgcggttaattattattttaggataaaatagtatcgtggtattggtaattttattttgagtaaagtggtcgagattttagcgtaggttaatggtacgttgttagtcgcggagaggttttttttgagcgttatttaagattcgattaaaacgacggcgcgttgtntttcggttcggtatatgtcgtataaatttggtttgtatgaagatttttcggtgatggagatttttaatttgtacgcggatttgcgtagcgttatcggcgaggtacgtaagtaaatttttgttcgtttgttggagtttacgttttttgggtcgtttatcgggacgtttggcgggtaagtttttcggtgggatgaaataaaaattcggtttggtttgtattttggtgggcgaatcgaaagtgttgttgttcgatgaattcggcgtcggcgttgattttattttacggcgcgaattgtggtagatggtgtatgagttggcgggcgaagggatgttaattttttggagtatttcgtatttcgacgaagtcgagtagtgtcgtgacgtgttattgatgaacgaaggcgagttgttgtattagggagaattaaaagttttgatataaattatggtcggacgtagttttttgatgattagtttatacgagggtaatcgtaaattgttgtaacgcgttttgaaattgtcgtaggttagcgacggtatgatttaggggaaatcggtacgtttgatttttaaaaaagaggttatatagacgattttagtcgaggcgatgataaattgaattattggtacgggtagtgcggtttaataggttcggtttttttttttggcgagcggttaatggcgtatgatgcgtagttacggcgttgatggatcgtatttattaattttattatagtaagtcgttttacgaattttgacgttattattagtagatcgttcgtagcgttattttatcggtgattttgtataatttttcggatttgacgggttaggatttaatttcggaa

SEQ ID NO: 6056 - DNA, 1342 bp, Artificial Sequence
  chemically treated genomic DNA (Homo sapiens) CpG-island No: 6056
  unsure (848)
ttccgaaattaaatcctaacccgtcaaatccgaaaaattatacaaaatcaccgataaaataacgctacgaacgatctactaataataacgtcaaaattcgtaaaacgacttactataataaaattaataaatacgatccatcaacgccgtaactacgcatcatacgccattaaccgctcgccaaaaaaaaaaaccgaacctattaaaccgcactacccgtaccaataattcaatttatcatcgcctcgactaaaatcgtctatataacctcttttttaaaaatcaaacgtaccgatttcccctaaatcataccgtcgctaacctacgacaatttcaaaacgcgttacaacaatttacgattaccctcgtataaactaatcatcaaaaaactacgtccgaccataatttatatcaaaacttttaattctccctaatacaacaactcgccttcgttcatcaataacacgtcacgacactactcgacttcgtcgaaatacgaaatactccaaaaaattaacatcccttcgcccgccaactcatacaccatctaccacaattcgcgccgtaaaataaaatcaacgccgacgccgaattcatcgaacaacaacactttcgattcgcccaccaaaatacaaaccaaaccgaatttttatttcatcccaccgaaaaacttacccgccaaacgtcccgataaacgacccaaaaaacgtaaactccaacaaacgaacaaaaatttacttacgtacctcgccgataacgctacgcaaatccgcgtacaaattaaaaatctccatcaccgaaaaatcttcatacaaaccaaatttatacgacatataccgaaccgaaanacaacgcgccgtcgttttaatcgaatcttaaataacgctcaaaaaaaacctctccgcgactaacaacgtaccattaacctacgctaaaatctcgaccactttactcaaaataaaattaccaataccacgatactattttatcctaaaataataattaaccgcacgcgttctcgtaataacctaataccaacctaaaacgactcgcaacgctactctatcgactactccaacacgacctaaaattcaaatatcgatttctccgttttccaaacgcaaaacgtctaaatccgcacactatacgatcgccatcgttttattacacgcgacacgctaaactaaattaaaaccgataatttcgacaaaataccgccgaatctacgtttcttcgccgaaaacgaccgcaatattcgtaactacaaatacaaatctatcgctccgaaatacgccaacgataacctaaaaaaaacctcgaaattaataaccgaatcgctaaa

SEQ ID NO: 6057 - DNA, 671 bp, Artificial Sequence
  chemically treated genomic DNA (Homo sapiens) CpG-island No: 6057
ttcgtcgtcgttgttattaatttagtaatcggtaggtaggtttagaagtttaagtcgtaatagtgattgagtagcgtaaaagtgtaagcgtcgatggcgtaaaaatcgtcgtattttagtattagtagattagaaagattaataattacgtttagttcgagatcgaggataatgtagattatggttagggtggtaatatttatcgtttcgcgtgaaattataaacggttacgttatcgtaagtattaatagcgttacgaggaatagtttttgttttatcgtggagttattaatggcgggtagaataaatttcggttcggaaacgttttttaattttttttggaaagtcggtcgtaaaagttggaagaaaaagattatcgtcgtgtcgataaatatttattgttaacggatattcgaagtcgtgtcgattattagtttggtgttatttagttttagttgtacgtttataaagacgttcgttagtataaagaatatcgcggtagagagtagcgttattgtaatatgtatcggttttatattttttttatttgcgggcgatttagaatatcggtcggtattattagtagtattagaattagtagggcgaatgagatatatttttatattcgatttagatagtagaagaaacgtttcgtaaattttagattaggt

SEQ ID NO: 6058 - DNA, 671 bp, Artificial Sequence
  chemically treated genomic DNA (Homo sapiens) CpG-island No: 6058
acctaatctaaaatttacgaaacgtttcttctactatctaaatcgaatataaaaatatatctcattcgccctactaattctaatactactaataataccgaccgatattctaaatcgcccgcaaataaaaaaaatataaaaccgatacatattacaataacgctactctctaccgcgatattctttatactaacgaacgtctttataaacgtacaactaaaactaaataacaccaaactaataatcgacacgacttcgaatatccgttaacaataaatatttatcgacacgacgataatctttttcttccaacttttacgaccgactttccaaaaaaaattaaaaaacgtttccgaaccgaaatttattctacccgccattaataactccacgataaaacaaaaactattcctcgtaacgctattaatacttacgataacgtaaccgtttataatttcacgcgaaacgataaatattaccaccctaaccataatctacattatcctcgatctcgaactaaacgtaattattaatctttctaatctactaatactaaaatacgacgatttttacgccatcgacgcttacacttttacgctactcaatcactattacgacttaaacttctaaacctacctaccgattactaaattaataacaacgacgacgaa

SEQ ID NO: 6059 - DNA, 671 bp, Artificial Sequence
  chemically treated genomic DNA (Homo sapiens) CpG-island No: 6059
gtttgatttgggatttgcgaggcgttttttttgttatttgagtcgaatataaagatgtgttttattcgttttgttgattttggtgttgttggtgatgtcgatcggtattttgggtcgttcgtaggtagagaaagtatgaaatcgatgtatattgtaatggcgttgttttttgtcgcgatgttttttgtgttggcgggcgtttttatgggcgtgtaattggagttggatggtattaaattggtggtcgatacggtttcggatgttcgttggtagtgggtgtttatcggtacggcggtggttttttttttttagtttttgcgatcggttttttagaaagggttgaaaagcgttttcggatcgaagtttattttgttcgttattgatggttttacggtgaagtagaaattgtttttcgtggcgttgttggtgtttgcggtggcgtggtcgtttatggttttacgcgggacggtggatattgttattttgattatgatttatattattttcggtttcgggttgaacgtggttgttggtttttttggtttgttggtgttggggtacggcggtttttacgttatcggcgtttatatttttgcgttgtttaattattattacggtttgggtttttggatttgtttgtcgattgttggattaatggtagcggcggcggg

SEQ ID NO: 6060 - DNA, 671 bp, Artificial Sequence
  chemically treated genomic DNA (Homo sapiens) CpG-island No: 6060
cccgccgccgctaccattaatccaacaatcgacaaacaaatccaaaaacccaaaccgtaataataattaaacaacgcaaaaatataaacgccgataacgtaaaaaccgccgtaccccaacaccaacaaaccaaaaaaaccaacaaccacgttcaacccgaaaccgaaaataatataaatcataatcaaaataacaatatccaccgtcccgcgtaaaaccataaacgaccacgccaccgcaaacaccaacaacgccacgaaaaacaatttctacttcaccgtaaaaccatcaataacgaacaaaataaacttcgatccgaaaacgcttttcaaccctttctaaaaaaccgatcgcaaaaactaaaaaaaaaaaaccaccgccgtaccgataaacacccactaccaacgaacatccgaaaccgtatcgaccaccaatttaataccatccaactccaattacacgcccataaaaacgcccgccaacacaaaaaacatcgcgacaaaaaacaacgccattacaatatacatcgatttcatactttctctacctacgaacgacccaaaataccgatcgacatcaccaacaacaccaaaatcaacaaaacgaataaaacacatctttatattcgactcaaataacaaaaaaaacgcctcgcaaatcccaaatcaaac

SEQ ID NO: 6061 - DNA, 534 bp, Artificial Sequence
  chemically treated genomic DNA (Homo sapiens) CpG-island No: 6061
gtcgatcgtgagtttcgtagcgatttttattatcgtttgaacgtattttcgatttatttgtcgttattacgcgagcgttcggaagatatttcgttgttggcgaaagtttttatttttaaaattgttcgtcgtttggggcgtaatatcgatagtatttttgtcgagacgttgcgtattttgagtaatatggagtggtcgggtaacgtacgcgaattggaaaacgttattgagcgcgcggtattgttaatacgcggtaacgtgttgtagttgttattgttagatattgttttatcggaatttgaaacgtcgtttgtcgtaacggttgtcgttttggagggcgaagatgaatattaggtgattgtgcgcgtgttgaaagaaattaacggcgtggttgtcgggtttaaaggcgttgcgtaacgtttggggttgaaacgtacgattttgttgttacggatgaagcggttggaattgataaatcggtattgatttaattgtaaattggtcggatagatttgtttgttcggtagtatttat

SEQ ID NO: 6062 - DNA, 534 bp, Artificial Sequence
  chemically treated genomic DNA (Homo sapiens) CpG-island No: 6062
ataaatactaccgaacaaacaaatctatccgaccaatttacaattaaatcaataccgatttatcaattccaaccgcttcatccgtaacaacaaaatcgtacgtttcaaccccaaacgttacgcaacgcctttaaacccgacaaccacgccgttaatttctttcaacacgcgcacaatcacctaatattcatcttcgccctccaaaacgacaaccgttacgacaaacgacgtttcaaattccgataaaacaatatctaacaataacaactacaacacgttaccgcgtattaacaataccgcgcgctcaataacgttttccaattcgcgtacgttacccgaccactccatattactcaaaatacgcaacgtctcgacaaaaatactatcgatattacgccccaaacgacgaacaattttaaaaataaaaactttcgccaacaacgaaatatcttccgaacgctcgcgtaataacgacaaataaatcgaaaatacgttcaaacgataataaaaatcgctacgaaactcacgatcgac

SEQ ID NO: 6063 - DNA, 534 bp, Artificial Sequence
  chemically treated genomic DNA (Homo sapiens) CpG-island No: 6063
ataggtattgtcggataggtagatttgttcggttaatttgtagttaaattaatgtcgatttattaattttagtcgttttattcgtgatagtagggtcgtgcgttttagttttagacgttgcgtagcgtttttaggttcggtaattacgtcgttggttttttttagtacgcgtataattatttgatatttattttcgttttttagggcgataatcgttgcggtaggcggcgttttaggtttcggtaaaataatatttggtaatgatagttgtagtacgttatcgcgtgttagtaatatcgcgcgtttaatgacgttttttagttcgcgtacgttattcggttattttatgttgtttaaggtgcgtagcgtttcggtaggaatgttgtcgatattgcgttttagacgacgggtaattttgaaggtaaaggttttcgttagtagcggaatatttttcggacgttcgcgtagtggcggtaggtgaatcgggaatacgtttaggcggtaatagagatcgttacggaatttacggtcggt

SEQ ID NO: 6064 - DNA, 534 bp, Artificial Sequence
  chemically treated genomic DNA (Homo sapiens) CpG-island No: 6064
accgaccgtaaattccgtaacgatctctattaccgcctaaacgtattcccgattcacctaccgccactacgcgaacgtccgaaaaatattccgctactaacgaaaacctttaccttcaaaattacccgtcgtctaaaacgcaatatcgacaacattcctaccgaaacgctacgcaccttaaacaacataaaataaccgaataacgtacgcgaactaaaaaacgtcattaaacgcgcgatattactaacacgcgataacgtactacaactatcattaccaaatattattttaccgaaacctaaaacgccgcctaccgcaacgattatcgccctaaaaaacgaaaataaatatcaaataattatacgcgtactaaaaaaaaccaacgacgtaattaccgaacctaaaaacgctacgcaacgtctaaaactaaaacgcacgaccctactatcacgaataaaacgactaaaattaataaatcgacattaatttaactacaaattaaccgaacaaatctacctatccgacaatacctat

SEQ ID NO: 6065 - DNA, 673 bp, Artificial Sequence
  chemically treated genomic DNA (Homo sapiens) CpG-island No: 6065
ttagtatcgatcgtttggcggcgtataaagacgttgatgtgttttgttttgattacgataatagtaaagatatggatgcgttaatggtaacgtcgttgtggtaggttatgtcgtttgttcgcgtcggacgtttttagcgcgtatttgtagtttggttttatggtgcgacgttttcggtaatgtattttgtgcgcgttttggataacgttatcggaggtaaagcgtgagtaaacgaattgcgtttttttcggcgttattgttggcgttgttagtgattgtcgttacggcgtttatttggatgaatttttcgtaggcgttgtcgcgtagttagtgggcgtaggttgtttggtcgtcggatattgacgttatcgagtagatgattttttattatagtttgttgtcgcgtttggcgatttcgttgttggtgggcgcgggtttggggttggtgggcgtgttgttttagtaagtgttgggtaatttgttggcggagtcgacgacgtttggcgttgttataggcgcgtaattgggttgaagttgttttaaattttcgagtttagttgcgcgtttttacgtattataaagtgggtgaaaacgatcgttttttgattcgttttagggagtttataaaaataggttatcggtatatgtattttatagtttacgtcgtttattt

SEQ ID NO: 6066 - DNA, 673 bp, Artificial Sequence
  chemically treated genomic DNA (Homo sapiens) CpG-island No: 6066
aaataaacgacgtaaactataaaatacatataccgataacctatttttataaactccctaaaacgaatcaaaaaacgatcgttttcacccactttataatacgtaaaaacgcgcaactaaactcgaaaatttaaaacaacttcaacccaattacgcgcctataacaacgccaaacgtcgtcgactccgccaacaaattacccaacacttactaaaacaacacgcccaccaaccccaaacccgcgcccaccaacaacgaaatcgccaaacgcgacaacaaactataataaaaaatcatctactcgataacgtcaatatccgacgaccaaacaacctacgcccactaactacgcgacaacgcctacgaaaaattcatccaaataaacgccgtaacgacaatcactaacaacgccaacaataacgccgaaaaaaacgcaattcgtttactcacgctttacctccgataacgttatccaaaacgcgcacaaaatacattaccgaaaacgtcgcaccataaaaccaaactacaaatacgcgctaaaaacgtccgacgcgaacaaacgacataacctaccacaacgacgttaccattaacgcatccatatctttactattatcgtaatcaaaacaaaacacatcaacgtctttatacgccgccaaacgatcgatactaa

SEQ ID NO: 6067 - DNA, 673 bp, Artificial Sequence
  chemically treated genomic DNA (Homo sapiens) CpG-island No: 6067
aagtgggcggcgtaggttatgaagtgtatatgtcgatgatttgtttttatgaattttttgaagcgggttaggaagcgatcgtttttatttattttgtggtgcgtgaagacgcgtaattaagttcggaagtttgagatagttttaatttagttgcgcgtttgtagtaacgttaagcgtcgtcggtttcgttagtaggttatttagtatttgttgaaatagtacgtttattagttttagattcgcgtttattagtagcgaaatcgttagacgcggtaataagttgtagtgaaaaattatttgttcgatgacgttaatattcggcgattaggtagtttgcgtttattggttacgcggtagcgtttgcgagaagtttatttaggtgagcgtcgtagcgataattattaatagcgttagtaataacgtcgggaaaagcgtaattcgtttatttacgttttattttcgatggcgttatttagaacgcgtataaagtgtattgtcgagagcgtcgtattataaaattagattgtaggtacgcgttgaaagcgttcggcgcggataaacggtatggtttgttatagcggcgttgttattagcgtatttatgtttttgttgttgtcgtgattaaaatagagtatattaacgtttttatacgtcgttagacgatcgatattga

SEQ ID NO: 6068 - DNA, 673 bp, Artificial Sequence
  chemically treated genomic DNA (Homo sapiens) CpG-island No: 6068
tcaatatcgatcgtctaacgacgtataaaaacgttaatatactctattttaatcacgacaacaacaaaaacataaatacgctaataacaacgccgctataacaaaccataccgtttatccgcgccgaacgctttcaacgcgtacctacaatctaattttataatacgacgctctcgacaatacactttatacgcgttctaaataacgccatcgaaaataaaacgtaaataaacgaattacgcttttcccgacgttattactaacgctattaataattatcgctacgacgctcacctaaataaacttctcgcaaacgctaccgcgtaaccaataaacgcaaactacctaatcgccgaatattaacgtcatcgaacaaataatttttcactacaacttattaccgcgtctaacgatttcgctactaataaacgcgaatctaaaactaataaacgtactatttcaacaaatactaaataacctactaacgaaaccgacgacgcttaacgttactacaaacgcgcaactaaattaaaactatctcaaacttccgaacttaattacgcgtcttcacgcaccacaaaataaataaaaacgatcgcttcctaacccgcttcaaaaaattcataaaaacaaatcatcgacatatacacttcataacctacgccgcccactt

SEQ ID NO: 6069 - DNA, 696 bp, Artificial Sequence
  chemically treated genomic DNA (Homo sapiens) CpG-island No: 6069
cgacggttatcgtttggcggtttgtttaatgttaattggttaatttttgttaagttattcggtgatcgtatcgcgtaaaggcgtgattgaattgatgcgtatgttcgacggcggcgataattcgttgcgcgtatagattggtagtaataatattcgcgtttacgttggcgattttatttttatttttaaattggtggatggtcgtttttcggattatcgtcgcgttttgtcgaagaattcggataaatatttggaagttggttgcgatttgtttaagtaggcgtttgttcgcgcggcgattttttttaacgagaaatttcgcggcgtacgtttttatgttagcgaaaattagttgaaaattatcgttaataattcggaataggaagaagcggaagagattttcgacgttatttatagcggtgcggagatggaaatcggttttaacgttagttatgtgttggatgttttgaacgcgttgaaatgcgaaaacgttcgtatgatgttgatcggatcgggttttagcgtgttaaatggagatgcgggttgttagagcgcggtttatggtggtatgtttatgagattggaaggttttttatcgtttggtaatttcgaattttaaaagatattatcgttttgtgttttgtatatcgttttgtgttttaaagttaggtattatataggacgatatttcggatt

SEQ ID NO: 6070 - DNA, 696 bp, Artificial Sequence
  chemically treated genomic DNA (Homo sapiens) CpG-island No: 6070
aatccgaaatatcgtcctatataatacctaactttaaaacacaaaacgatatacaaaacacaaaacgataatatcttttaaaattcgaaattaccaaacgataaaaaaccttccaatctcataaacataccaccataaaccgcgctctaacaacccgcatctccatttaacacgctaaaacccgatccgatcaacatcatacgaacgttttcgcatttcaacgcgttcaaaacatccaacacataactaacgttaaaaccgatttccatctccgcaccgctataaataacgtcgaaaatctcttccgcttcttcctattccgaattattaacgataattttcaactaattttcgctaacataaaaacgtacgccgcgaaatttctcgttaaaaaaaatcgccgcgcgaacaaacgcctacttaaacaaatcgcaaccaacttccaaatatttatccgaattcttcgacaaaacgcgacgataatccgaaaaacgaccatccaccaatttaaaaataaaaataaaatcgccaacgtaaacgcgaatattattactaccaatctatacgcgcaacgaattatcgccgccgtcgaacatacgcatcaattcaatcacgcctttacgcgatacgatcaccgaataacttaacaaaaattaaccaattaacattaaacaaaccgccaaacgataaccgtcg

SEQ ID NO: 6071 - DNA, 696 bp, Artificial Sequence
  chemically treated genomic DNA (Homo sapiens) CpG-island No: 6071
agttcgagatatcgttttgtgtggtgtttggttttagagtatagggcgatatatagagtatagggcgatgatattttttggaattcgggattattaagcggtggagaattttttagttttatgggtatgttattataagtcgcgttttggtagttcgtatttttatttggtacgttggaattcgattcggttagtattatgcggacgttttcgtattttagcgcgtttagaatatttagtatataattgacgttgaagtcgatttttattttcgtatcgttataggtaacgtcgaggatttttttcgtttttttttgtttcgggttgttggcggtgatttttagttggttttcgttgatataaagacgtacgtcgcggaatttttcgttagagagaatcgtcgcgcgagtaaacgtttgtttgagtagatcgtagttagtttttagatgtttgttcgggtttttcggtagaacgcggcgataattcgggaagcgattatttattagtttggaggtgaagataaagtcgttaacgtgggcgcgaatgttgttgttgttaatttgtacgcgtagcggattgtcgtcgtcgtcgagtatacgtattagtttaattacgtttttacgcggtacgattatcgaatggtttggtaaagattgattaattggtattgaatagatcgttagacggtggtcgtcg

SEQ ID NO: 6072 - DNA, 696 bp, Artificial Sequence
  chemically treated genomic DNA (Homo sapiens) CpG-island No: 6072
cgacgaccaccgtctaacgatctattcaataccaattaatcaatctttaccaaaccattcgataatcgtaccgcgtaaaaacgtaattaaactaatacgtatactcgacgacgacgacaatccgctacgcgtacaaattaacaacaacaacattcgcgcccacgttaacgactttatcttcacctccaaactaataaataatcgcttcccgaattatcgccgcgttctaccgaaaaacccgaacaaacatctaaaaactaactacgatctactcaaacaaacgtttactcgcgcgacgattctctctaacgaaaaattccgcgacgtacgtctttatatcaacgaaaaccaactaaaaatcaccgccaacaacccgaaacaaaaaaaaacgaaaaaaatcctcgacgttacctataacgatacgaaaataaaaatcgacttcaacgtcaattatatactaaatattctaaacgcgctaaaatacgaaaacgtccgcataatactaaccgaatcgaattccaacgtaccaaataaaaatacgaactaccaaaacgcgacttataataacatacccataaaactaaaaaattctccaccgcttaataatcccgaattccaaaaaatatcatcgccctatactctatatatcgccctatactctaaaaccaaacaccacacaaaacgatatctcgaact

SEQ ID NO: 6073 - DNA, 578 bp, Artificial Sequence
  chemically treated genomic DNA (Homo sapiens) CpG-island No: 6073
aaacgtacggcgcggtttaacggcgtcgtttattagcgtggtgaataattggtcggtagtaatcgtatttttaacggtaacgcgtagtatacgacgatttttcgggtttatagtggttttttatagttgtttcgggtttatttcgtttagatttttataacgttggatggagaggtcgcgacgggatttttttattagttagtttagcgtttgttcgaagttggttatcggttgacgacgttcgttacgttcgataaacgtatttttttttagtaagttacgtagttttttatttagcgtgtagatacgacgatattcgttatcggtgataaattcgtgatttagcggatagttagtatttatatcgtgggtacgtacgcgaataatcggttcgaataggttttgtttagtattggtgtgaatattaaatttttattggttgtcgtgttgttttttgtcggttagttcgttgattagcgcgtttatttagcgggtaatcgtttgtttattagaaagttaattttcgttaattcggttgatagatagtttttttagtatgttttcggatacgacgtttt

SEQ ID NO: 6074 - DNA, 578 bp, Artificial Sequence
  chemically treated genomic DNA (Homo sapiens) CpG-island No: 6074
aaaacgtcgtatccgaaaacatactaaaaaaactatctatcaaccgaattaacgaaaattaactttctaataaacaaacgattacccgctaaataaacgcgctaatcaacgaactaaccgacaaaaaacaacacgacaaccaataaaaatttaatattcacaccaatactaaacaaaacctattcgaaccgattattcgcgtacgtacccacgatataaatactaactatccgctaaatcacgaatttatcaccgataacgaatatcgtcgtatctacacgctaaataaaaaactacgtaacttactaaaaaaaaatacgtttatcgaacgtaacgaacgtcgtcaaccgataaccaacttcgaacaaacgctaaactaactaataaaaaaatcccgtcgcgacctctccatccaacgttataaaaatctaaacgaaataaacccgaaacaactataaaaaaccactataaacccgaaaaatcgtcgtatactacgcgttaccgttaaaaatacgattactaccgaccaattattcaccacgctaataaacgacgccgttaaaccgcgccgtacgttt

SEQ ID NO: 6075 - DNA, 578 bp, Artificial Sequence
  chemically treated genomic DNA (Homo sapiens) CpG-island No: 6075
gaagcgtcgtattcgaaagtatgttgaaagagttatttattagtcgagttgacgaaagttgattttttgatgagtagacggttattcgttgggtggacgcgttggttagcgaattgatcgataaagaatagtacggtagttagtggaagtttgatgtttatattaatgttgagtaaaatttgttcgagtcgattgttcgcgtgcgtatttacggtgtggatattgattattcgttggattacgagtttattatcggtggcgaatatcgtcgtatttgtacgttgggtgagaaattgcgtggtttgttggaagaagatgcgtttatcgaacgtggcgagcgtcgttagtcggtagttagtttcgagtaggcgttggattggttggtgaaagagtttcgtcgcggtttttttatttagcgttataaaggtttgggcgagatgaattcggaatagttgtgggaaattattatggattcggaaagtcgtcgtatgttgcgcgttatcgttaaagatgcgattgttgtcgattagttgtttattacgttgatgggcgacgtcgttgaatcgcgtcgtgcgttt

SEQ ID NO: 6076 - DNA, 578 bp, Artificial Sequence
  chemically treated genomic DNA (Homo sapiens) CpG-island No: 6076
aaacgcacgacgcgattcaacgacgtcgcccatcaacgtaataaacaactaatcgacaacaatcgcatctttaacgataacgcgcaacatacgacgactttccgaatccataataatttcccacaactattccgaattcatctcgcccaaacctttataacgctaaataaaaaaaccgcgacgaaactctttcaccaaccaatccaacgcctactcgaaactaactaccgactaacgacgctcgccacgttcgataaacgcatcttcttccaacaaaccacgcaatttctcacccaacgtacaaatacgacgatattcgccaccgataataaactcgtaatccaacgaataatcaatatccacaccgtaaatacgcacgcgaacaatcgactcgaacaaattttactcaacattaatataaacatcaaacttccactaactaccgtactattctttatcgatcaattcgctaaccaacgcgtccacccaacgaataaccgtctactcatcaaaaaatcaactttcgtcaactcgactaataaataactctttcaacatactttcgaatacgacgcttc

SEQ ID NO: 6077 - DNA, 527 bp, Artificial Sequence
  chemically treated genomic DNA (Homo sapiens) CpG-island No: 6077
  unsure (5, 11)
atcgncgtcgncgttcgtcgtttcggtttttttatcgttatcgtcgtcgattacgtgttggtcgtcggcgttgttatttttgagtcgtttatgggttcggtcgtttttattgtcgtcgtcgtagtagcggatagcggcgatttcgtcgatcgtcggcggtatttttacgatagttttcgatcgtttgcgttgttcgttcggttgttgtttttgttttagtcgtcgacgtcgttttttcgttcggggtagtagttttcgcgatatggcggtgtaaaattcgttttttttcgttttttattgggggagggatacgttcgttattcgtcgtttttattcgatagggggagttattggtttcgtcgcggggggagggtaagtcgttatatattttgcgcgtttattggatattgtttacgtcgttttgtaagagggttcgtttttggttgtttgagatattttttataggtggtcgttttttgttagttttttcgtcgatttcgttattttaaaataaaatttaatttgat

SEQ ID NO: 6078 - DNA, 527 bp, Artificial Sequence
  chemically treated genomic DNA (Homo sapiens) CpG-island No: 6078
  unsure (517, 523)
atcaaattaaattttattttaaaataacgaaatcgacgaaaaaactaacaaaaaacgaccacctataaaaaatatctcaaacaaccaaaaacgaaccctcttacaaaacgacgtaaacaatatccaataaacgcgcaaaatatataacgacttaccctccccccgcgacgaaaccaataactccccctatcgaataaaaacgacgaataacgaacgtatccctcccccaataaaaaacgaaaaaaaacgaattttacaccgccatatcgcgaaaactactaccccgaacgaaaaaacgacgtcgacgactaaaacaaaaacaacaaccgaacgaacaacgcaaacgatcgaaaactatcgtaaaaataccgccgacgatcgacgaaatcgccgctatccgctactacgacgacgacaataaaaacgaccgaacccataaacgactcaaaaataacaacgccgacgaccaacacgtaatcgacgacgataacgataaaaaaaccgaaacgacgaacgncgacgncgat

SEQ ID NO: 6079 - DNA, 527 bp, Artificial Sequence
  chemically treated genomic DNA (Homo sapiens) CpG-island No: 6079
  unsure (517, 523)
attaaattggattttattttaaggtggcggggtcgacggaaagattggtagaaagcgattatttataaggagtgttttagataattaagggcgggtttttttgtagaacggcgtgggtaatgtttaataagcgcgtaaggtgtgtggcggtttatttttttttcgcggcgggattagtggttttttttatcgggtgggggcggcgggtgacgggcgtgttttttttttaatgagagacggggggaggcgggttttgtatcgttatgtcgcggaggttgttgtttcgggcggagaagcggcgtcggcggttggagtagaggtagtagtcggacgagtagcgtaggcggtcgggagttatcgtgaagatgtcgtcggcggtcggcggagtcgtcgttgttcgttattacggcggcggtagtgagggcggtcgggtttataagcggtttaagaatgataacgtcggcgattagtacgtagtcggcgacggtggcggtgaagaagtcgggacggcgggcgncggcgncggt

SEQ ID NO: 6080 - DNA, 527 bp, Artificial Sequence
  chemically treated genomic DNA (Homo sapiens) CpG-island No: 6080
  unsure (5, 11)
accgncgccgncgcccgccgtcccgacttcttcaccgccaccgtcgccgactacgtactaatcgccgacgttatcattcttaaaccgcttataaacccgaccgccctcactaccgccgccgtaataacgaacaacgacgactccgccgaccgccgacgacatcttcacgataactcccgaccgcctacgctactcgtccgactactacctctactccaaccgccgacgccgcttctccgcccgaaacaacaacctccgcgacataacgatacaaaacccgcctccccccgtctctcattaaaaaaaaaacacgcccgtcacccgccgcccccacccgataaaaaaaaccactaatcccgccgcgaaaaaaaaataaaccgccacacaccttacgcgcttattaaacattacccacgccgttctacaaaaaaacccgcccttaattatctaaaacactccttataaataatcgctttctaccaatctttccgtcgaccccgccaccttaaaataaaatccaatttaat

SEQ ID NO: 6081 - DNA, 1021 bp, Artificial Sequence
  chemically treated genomic DNA (Homo sapiens) CpG-island No: 6081
taagttggcgcgttatttagacgttagttttttatttttcggacgtttcgttttaggagtaaaattttagtgattttgggttcgttttcgtgagagtggagggcggtcgatgagggcggttttgaagggaataagattaatgagacgagttcggggcggggcgcggggtcggagggtggggcgggtggcggcggtggtagttcgaggtttggtttcgcgtagtatatgatagtacgttagtagcgggatggttttagtagtggcggcggttgtagaagtttaagtagtcgcggtcgtagtggaggttagagtcgaagcggcggcggcggcggtatttcggggagtttaagatggcggcgggggggatagggggtttgcgggaggagtagcgttatgggttgtcgtgcggacggttggggtaggataatattatcgtattgtatgtgaagtttatcgagacggcgattcgggcgttcgagatttattagagttataaggtgagcgggtcggtcggtaggttgggtttagagaggtagagcgtattttttacggtttggtcgcgttcgggtgcggggtcggcggagtcgtggttggtagttgttatcgttagcgttcgtagcggttaggtagggtagggtcgggtagggtggttgacgtcgcgttttcgggttagtttgggcgttggggaagcgggtagtcgggcggtttttggcggcggggtcgaggtagtcgtagttttgggtcggttgcgttgtcgttgcgggatttttcgatagttttcgaggaatttttggtttgttgggttttaagagggagagaggttcgataagagaagtgagatgattacgttattttcggcggggaaggagggtagcgagtagcgtatgggtaaggaattagggacgattcgcgggtattagttgttcgcgttttttagttatataggtacggtggatttttagagataggatataggcgtttcgcgtgtgggggtgggattttgtatttttagggatttggg

SEQ ID NO: 6082 - DNA, 1021 bp, Artificial Sequence
  chemically treated genomic DNA (Homo sapiens) CpG-island No: 6082
cccaaatccctaaaaatacaaaatcccacccccacacgcgaaacgcctatatcctatctctaaaaatccaccgtacctatataactaaaaaacgcgaacaactaatacccgcgaatcgtccctaattccttacccatacgctactcgctaccctccttccccgccgaaaataacgtaatcatctcacttctcttatcgaacctctctccctcttaaaacccaacaaaccaaaaattcctcgaaaactatcgaaaaatcccgcaacgacaacgcaaccgacccaaaactacgactacctcgaccccgccgccaaaaaccgcccgactacccgcttccccaacgcccaaactaacccgaaaacgcgacgtcaaccaccctacccgaccctaccctacctaaccgctacgaacgctaacgataacaactaccaaccacgactccgccgaccccgcacccgaacgcgaccaaaccgtaaaaaatacgctctacctctctaaacccaacctaccgaccgacccgctcaccttataactctaataaatctcgaacgcccgaatcgccgtctcgataaacttcacatacaatacgataatattatcctaccccaaccgtccgcacgacaacccataacgctactcctcccgcaaaccccctatcccccccgccgccatcttaaactccccgaaataccgccgccgccgccgcttcgactctaacctccactacgaccgcgactacttaaacttctacaaccgccgccactactaaaaccatcccgctactaacgtactatcatatactacgcgaaaccaaacctcgaactaccaccgccgccacccgccccaccctccgaccccgcgccccgccccgaactcgtctcattaatcttattcccttcaaaaccgccctcatcgaccgccctccactctcacgaaaacgaacccaaaatcactaaaattttactcctaaaacgaaacgtccgaaaaataaaaaactaacgtctaaataacgcgccaactta

SEQ ID NO: 6083 - DNA, 1021 bp, Artificial Sequence
  chemically treated genomic DNA (Homo sapiens) CpG-island No: 6083
tttaagtttttgggaatataaggttttatttttatacgcggagcgtttgtgttttgtttttgaggatttatcgtgtttatgtaattggaaaacgcgggtagttggtgttcgcgagtcgtttttggttttttgtttatacgttgttcgttatttttttttttcgtcgagggtagcgtggttattttattttttttatcgggttttttttttttttgggatttaataagttaggaatttttcgggggttgtcggaaagtttcgtagcggtagcgtagtcgatttagggttgcggttgtttcggtttcgtcgttaggggtcgttcgattgttcgtttttttaacgtttaggttagttcgggagcgcggcgttagttattttgttcggttttgttttgtttggtcgttgcgggcgttgacggtagtagttgttagttacggtttcgtcggtttcgtattcgggcgcggttaggtcgtgaggggtgcgttttgtttttttgagtttagtttgtcggtcggttcgtttattttgtggttttggtaagtttcgagcgttcggatcgtcgtttcggtgagttttatatgtagtacggtgatgttgttttgttttagtcgttcgtacgatagtttatagcgttgtttttttcgtaggttttttgtttttttcgtcgttattttaaatttttcggggtgtcgtcgtcgtcgtcgtttcggttttagtttttattgcggtcgcggttgtttgggtttttgtagtcgtcgttattgttagggttatttcgttgttgacgtattgttatatattgcgcggagttagatttcggattgttatcgtcgttattcgttttatttttcggtttcgcgtttcgtttcgggttcgttttattggttttgttttttttagaatcgtttttatcggtcgttttttatttttacgggggcgggtttaaagttattagagttttgtttttgggacgggacgttcgagaggtaagaggttgacgtttaggtgacgcgttaattta

SEQ ID NO: 6084 - DNA, 1021 bp, Artificial Sequence
  chemically treated genomic DNA (Homo sapiens) CpG-island No: 6084
taaattaacgcgtcacctaaacgtcaacctcttacctctcgaacgtcccgtcccaaaaacaaaactctaataactttaaacccgcccccgtaaaaataaaaaacgaccgataaaaacgattctaaaaaaaacaaaaccaataaaacgaacccgaaacgaaacgcgaaaccgaaaaataaaacgaataacgacgataacaatccgaaatctaactccgcgcaatatataacaatacgtcaacaacgaaataaccctaacaataacgacgactacaaaaacccaaacaaccgcgaccgcaataaaaactaaaaccgaaacgacgacgacgacgacaccccgaaaaatttaaaataacgacgaaaaaaacaaaaaacctacgaaaaaaacaacgctataaactatcgtacgaacgactaaaacaaaacaacatcaccgtactacatataaaactcaccgaaacgacgatccgaacgctcgaaacttaccaaaaccacaaaataaacgaaccgaccgacaaactaaactcaaaaaaacaaaacgcacccctcacgacctaaccgcgcccgaatacgaaaccgacgaaaccgtaactaacaactactaccgtcaacgcccgcaacgaccaaacaaaacaaaaccgaacaaaataactaacgccgcgctcccgaactaacctaaacgttaaaaaaacgaacaatcgaacgacccctaacgacgaaaccgaaacaaccgcaaccctaaatcgactacgctaccgctacgaaactttccgacaacccccgaaaaattcctaacttattaaatcccaaaaaaaaaaaaaacccgataaaaaaaataaaataaccacgctaccctcgacgaaaaaaaaaaataacgaacaacgtataaacaaaaaaccaaaaacgactcgcgaacaccaactacccgcgttttccaattacataaacacgataaatcctcaaaaacaaaacacaaacgctccgcgtataaaaataaaaccttatattcccaaaaacttaaa

SEQ ID NO: 6085 - DNA, 701 bp, Artificial Sequence
  chemically treated genomic DNA (Homo sapiens) CpG-island No: 6085
gagagcgcgtttttatgtgattaacgcgggcgaatatcgttcgcgaatgtggtttggcggttcgtattaatatcgttatgtagtggttttattttatttgacgtagattttgtttggcgattgcgttttcgcgaattgtcgggtgcgattgttaaaagttatagtagtaaaggttaggatcggtggaacgtaattggtaggttttggcgttggcgcgtgaattcgtagaaaagtttcgttgtaatcggtaaattcgtatagcgttaatcgatcgttagtgttttcgatgtcgtttttgatttcgtgaaaatcgtaatcgttgcgatgtcgtcgggtttggtgacgtttttttcgtttcggcgttgtcgttagacggttttggtcgatgggtattacgcgttgggaaaaacgtaatatcgtcgaagaatttttatttggaaagaggaattttgtatttaatgtaattattgcgttgcgtttgtttatatttagttattcgcgtaaaagtggtgtcgtttgaagcgtggaaaacgtttttgttagtttgtattcgttggatgtgaaatcgcgtgaatgcgcgggtagaaatatgttttgtaggtggtatcggaagattgtatcgttgtaatttgtgcgtcgaagtttgttcggcgaaagatcgttagaatttaagattaaagttattaatatgatgtttcgtt

SEQ ID NO: 6086 - DNA, 701 bp, Artificial Sequence
  chemically treated genomic DNA (Homo sapiens) CpG-island No: 6086
aacgaaacatcatattaataactttaatcttaaattctaacgatctttcgccgaacaaacttcgacgcacaaattacaacgatacaatcttccgataccacctacaaaacatatttctacccgcgcattcacgcgatttcacatccaacgaatacaaactaacaaaaacgttttccacgcttcaaacgacaccacttttacgcgaataactaaatataaacaaacgcaacgcaataattacattaaatacaaaattcctctttccaaataaaaattcttcgacgatattacgtttttcccaacgcgtaatacccatcgaccaaaaccgtctaacgacaacgccgaaacgaaaaaaacgtcaccaaacccgacgacatcgcaacgattacgattttcacgaaatcaaaaacgacatcgaaaacactaacgatcgattaacgctatacgaatttaccgattacaacgaaacttttctacgaattcacgcgccaacgccaaaacctaccaattacgttccaccgatcctaacctttactactataacttttaacaatcgcacccgacaattcgcgaaaacgcaatcgccaaacaaaatctacgtcaaataaaataaaaccactacataacgatattaatacgaaccgccaaaccacattcgcgaacgatattcgcccgcgttaatcacataaaaacgcgctctc

SEQ ID NO: 6087 - DNA, 701 bp, Artificial Sequence
  chemically treated genomic DNA (Homo sapiens) CpG-island No: 6087
ggcgagatattatattgatggttttaattttggattttgacggtttttcgtcgggtaaatttcgacgtataggttataacggtgtaatttttcggtgttatttgtaagatatatttttgttcgcgtatttacgcgattttatatttagcgaatgtaggttggtaggggcgttttttacgttttaggcggtattatttttgcgcgaatagttgagtgtgggtaagcgtaacgtagtggttatattgggtatagagtttttttttttagatggggatttttcggcgatattgcgttttttttagcgcgtagtgtttatcggttagggtcgtttggcggtagcgtcgaaacggggagggcgttattaagttcggcggtatcgtagcggttacggtttttacgaaattaggggcggtatcggaaatattggcggtcgattggcgttgtgcggatttatcggttgtaacggaatttttttacggatttacgcgttagcgttagagtttgttagttgcgttttatcgattttggtttttgttattgtaatttttggtaatcgtattcggtaattcgcgagggcgtaatcgttagatagaatttgcgttagatggaataaagttattgtatgacggtattaatacggatcgttaggttatattcgcggacgatattcgttcgcgttaattatatagaagcgcgttttt

SEQ ID NO: 6088 - DNA, 701 bp, Artificial Sequence
  chemically treated genomic DNA (Homo sapiens) CpG-island No: 6088
aaaaacgcgcttctatataattaacgcgaacgaatatcgtccgcgaatataacctaacgatccgtattaataccgtcatacaataactttattccatctaacgcaaattctatctaacgattacgccctcgcgaattaccgaatacgattaccaaaaattacaataacaaaaaccaaaatcgataaaacgcaactaacaaactctaacgctaacgcgtaaatccgtaaaaaaattccgttacaaccgataaatccgcacaacgccaatcgaccgccaatatttccgataccgcccctaatttcgtaaaaaccgtaaccgctacgataccgccgaacttaataacgccctccccgtttcgacgctaccgccaaacgaccctaaccgataaacactacgcgctaaaaaaaacgcaatatcgccgaaaaatccccatctaaaaaaaaaaactctatacccaatataaccactacgttacgcttacccacactcaactattcgcgcaaaaataataccgcctaaaacgtaaaaaacgcccctaccaacctacattcgctaaatataaaatcgcgtaaatacgcgaacaaaaatatatcttacaaataacaccgaaaaattacaccgttataacctatacgtcgaaatttacccgacgaaaaaccgtcaaaatccaaaattaaaaccatcaatataatatctcgcc

SEQ ID NO: 6089 - DNA, 512 bp, Artificial Sequence
  chemically treated genomic DNA (Homo sapiens) CpG-island No: 6089
tgtcggcgtgtgttagtcgtttgcgcgaggcgttataggagagggcgcgtttttgtcgttttgtcgtttttagaagtttttcgggaatcgattttattgattcgttttttcgcgttttacgcgtggtagtttaagtttagtttttagattggaggagatcgcggagggaattttgttggggtttgggttcggggttacgcggttcgagtagatcgagggtcgattttttcgagaattcgttttttggtttcggttttttttttgcgttcgtttttttacgtggggtttaggtttgggaattagcgttcgggggtggttggggataatcgagaacgagtttttttttcggtacgcgggcggaatggttgagtttagtttggaagttttcgttaggtttttgggggcgggcgggcgcgcgaagtatagggcggagatagtcgggagtttagtttttcgggttgggtcgtttttttttttttcgcgttcggtcggggatgggggtgtggttttaa

SEQ ID NO: 6090 - DNA, 512 bp, Artificial Sequence
  chemically treated genomic DNA (Homo sapiens) CpG-island No: 6090
ttaaaaccacacccccatccccgaccgaacgcgaaaaaaaaaaaaacgacccaacccgaaaaactaaactcccgactatctccgccctatacttcgcgcgcccgcccgcccccaaaaacctaacgaaaacttccaaactaaactcaaccattccgcccgcgtaccgaaaaaaaaactcgttctcgattatccccaaccacccccgaacgctaattcccaaacctaaaccccacgtaaaaaaacgaacgcaaaaaaaaaaccgaaaccaaaaaacgaattctcgaaaaaatcgaccctcgatctactcgaaccgcgtaaccccgaacccaaaccccaacaaaattccctccgcgatctcctccaatctaaaaactaaacttaaactaccacgcgtaaaacgcgaaaaaacgaatcaataaaatcgattcccgaaaaacttctaaaaacgacaaaacgacaaaaacgcgccctctcctataacgcctcgcgcaaacgactaacacacgccgaca

SEQ ID NO: 6091 - DNA, 512 bp, Artificial Sequence
  chemically treated genomic DNA (Homo sapiens) CpG-island No: 6091
ttgggattatatttttattttcggtcgggcgcggggaaggggagggcggtttagttcgggaggttgggttttcggttgttttcgttttgtgtttcgcgcgttcgttcgtttttaaggatttgacgggggtttttaggttgggtttagttatttcgttcgcgtgtcggggaagaagttcgttttcggttgtttttagttattttcgagcgttgatttttagatttgggttttacgtgggagggcgggcgtaagggaggagtcgaggttagagagcgagttttcggaggggtcggttttcgatttgttcgggtcgcgtggtttcgggtttagattttagtagggtttttttcgcggttttttttaatttggaggttgagtttaggttgttacgcgtggggcgcggaggggcgagttagtggagtcggttttcgggaaatttttgggggcggtagagcgataggagcgcgtttttttttgtggcgtttcgcgtaggcggttggtatacgtcgata

SEQ ID NO: 6092 - DNA, 512 bp, Artificial Sequence
  chemically treated genomic DNA (Homo sapiens) CpG-island No: 6092
tatcgacgtataccaaccgcctacgcgaaacgccacaaaaaaaaacgcgctcctatcgctctaccgcccccaaaaatttcccgaaaaccgactccactaactcgcccctccgcgccccacgcgtaacaacctaaactcaacctccaaattaaaaaaaaccgcgaaaaaaaccctactaaaatctaaacccgaaaccacgcgacccgaacaaatcgaaaaccgacccctccgaaaactcgctctctaacctcgactcctcccttacgcccgccctcccacgtaaaacccaaatctaaaaatcaacgctcgaaaataactaaaaacaaccgaaaacgaacttcttccccgacacgcgaacgaaataactaaacccaacctaaaaacccccgtcaaatccttaaaaacgaacgaacgcgcgaaacacaaaacgaaaacaaccgaaaacccaacctcccgaactaaaccgccctccccttccccgcgcccgaccgaaaataaaaatataatcccaa

SEQ ID NO: 6093 - DNA, 638 bp, Artificial Sequence
  chemically treated genomic DNA (Homo sapiens) CpG-island No: 6093
gataatcgtatattatagtagtacgatttagcgcgcgataagcgtagtagagtatacgtatgtacgatagagtatacgatagaagcgttataagcgtatgtattaaatacgttttcggcgcgtagcgtcgatataagatattatcgattatagtagtcgacgtaatagttagtatatagcgttattagcgatatagatgaataattatatacggacgtagtaatataggataatagagtataagattttttatgcgtataagacgtcgataattagagtagagttacgtattatagcgatgaatagcgattatttaagcgtcgggcgtagtatcgttcgacgcggcgcgtacgttaacgtaggacggatatagtagtagtagcgtcgtttgtagtgagtttacgtatagtatcgaatagacggtcgtatagaagtagtatgtaagtatataaagacgacgtatcgaaacgttatacgagaattagtgatcgattcgaagaagatgagagtacgataataagagcgttttttaagttacgattagttcgatagataatcgtaaaattacgaagcgataagttcgtaacgtaagatatagatacgtacggaatatttaagaataatagagataatagata

SEQ ID NO: 6094 - DNA, 638 bp, Artificial Sequence
  chemically treated genomic DNA (Homo sapiens) CpG-island No: 6094
tatctattatctctattattcttaaatattccgtacgtatctatatcttacgttacgaacttatcgcttcgtaattttacgattatctatcgaactaatcgtaacttaaaaaacgctcttattatcgtactctcatcttcttcgaatcgatcactaattctcgtataacgtttcgatacgtcgtctttatatacttacatactacttctatacgaccgtctattcgatactatacgtaaactcactacaaacgacgctactactactatatccgtcctacgttaacgtacgcgccgcgtcgaacgatactacgcccgacgcttaaataatcgctattcatcgctataatacgtaactctactctaattatcgacgtcttatacgcataaaaaatcttatactctattatcctatattactacgtccgtatataattattcatctatatcgctaataacgctatatactaactattacgtcgactactataatcgataatatcttatatcgacgctacgcgccgaaaacgtatttaatacatacgcttataacgcttctatcgtatactctatcgtacatacgtatactctactacgcttatcgcgcgctaaatcgtactactataatatacgattatc

SEQ ID NO: 6095 - DNA, 638 bp, Artificial Sequence
  chemically treated genomic DNA (Homo sapiens) CpG-island No: 6095
tgtttgttgtttttgttgtttttgggtgtttcgtgcgtatttgtgttttacgttgcgagtttgtcgtttcgtggttttgcggttgtttgtcgagttagtcgtggtttgggaagcgtttttgttgtcgtgtttttatttttttcgagtcggttattggttttcgtgtggcgtttcggtgcgtcgtttttgtatgtttgtatgttgtttttatgcggtcgtttgttcggtgttgtgcgtaggtttattgtaggcggcgttgttgttgttgtgttcgttttgcgttggcgtgcgcgtcgcgtcgggcggtgttgcgttcggcgtttgagtggtcgttgtttatcgttgtggtgcgtggttttgttttggttgtcggcgttttgtgcgtatgggggattttgtgttttgttgttttgtgttgttgcgttcgtgtgtggttgtttatttgtgtcgttggtggcgttgtgtgttggttgttgcgtcggttgttgtagtcggtggtgttttgtgtcggcgttgcgcgtcggaggcgtgtttggtgtatgcgtttgtggcgtttttgtcgtgtgttttgtcgtgtatgcgtgtgttttgttgcgtttgtcgcgcgttgggtcgtgttgttgtgatgtacgattgtt

SEQ ID NO: 6096 - DNA, 638 bp, Artificial Sequence
  chemically treated genomic DNA (Homo sapiens) CpG-island No: 6096
aacaatcgtacatcacaacaacacgacccaacgcgcgacaaacgcaacaaaacacacgcatacacgacaaaacacacgacaaaaacgccacaaacgcatacaccaaacacgcctccgacgcgcaacgccgacacaaaacaccaccgactacaacaaccgacgcaacaaccaacacacaacgccaccaacgacacaaataaacaaccacacacgaacgcaacaacacaaaacaacaaaacacaaaatcccccatacgcacaaaacgccgacaaccaaaacaaaaccacgcaccacaacgataaacaacgaccactcaaacgccgaacgcaacaccgcccgacgcgacgcgcacgccaacgcaaaacgaacacaacaacaacaacgccgcctacaataaacctacgcacaacaccgaacaaacgaccgcataaaaacaacatacaaacatacaaaaacgacgcaccgaaacgccacacgaaaaccaataaccgactcgaaaaaaataaaaacacgacaacaaaaacgcttcccaaaccacgactaactcgacaaacaaccgcaaaaccacgaaacgacaaactcgcaacgtaaaacacaaatacgcacgaaacacccaaaaacaacaaaaacaacaaaca

SEQ ID NO: 6097 - DNA, 637 bp, Artificial Sequence
  chemically treated genomic DNA (Homo sapiens) CpG-island No: 6097
gtgcgcggggtggtgataaatagaaaatcgttaattagtttgtcgttcggcgatatcgtttgcgttcgtatatcggcgggttagggttggagatcgtttaacgaaagtcggggataatatttttgtattagtcgtcgttgtcgtttttgtatagcgagttttttatttcgtttagttttgagcgtagatagttttgtagtattcggcgaattttcgacgagtttaaaatttttagcgtgtcgttaatgagaagtcgcgtttgcgatagttttcgcgtttgaaagttagtatcgcgtttggttcgacggttacgttgtcgtcgattatgcgggtgagatgaacgtttaaaaacggtattgtcgggtcgggaatggggtaaattaggtggttaataattttggttatgtttcggcgtaaggcggaaatattcgttacggaacgggtagatataaagttcggttcgagttcgagtatttttattagtcggttagttattagttcggaatagttaattagcgttgatgttttatattcgtcgttttgacgggtacgtattattacgtcgtttttatgtttattatagttcgttgatttcggcgttatagattattttatcgtttttggattggaagatttt

SEQ ID NO: 6098 - DNA, 637 bp, Artificial Sequence
  chemically treated genomic DNA (Homo sapiens) CpG-island No: 6098
aaaatcttccaatccaaaaacgataaaataatctataacgccgaaatcaacgaactataataaacataaaaacgacgtaataatacgtacccgtcaaaacgacgaatataaaacatcaacgctaattaactattccgaactaataactaaccgactaataaaaatactcgaactcgaaccgaactttatatctacccgttccgtaacgaatatttccgccttacgccgaaacataaccaaaattattaaccacctaatttaccccattcccgacccgacaataccgtttttaaacgttcatctcacccgcataatcgacgacaacgtaaccgtcgaaccaaacgcgatactaactttcaaacgcgaaaactatcgcaaacgcgacttctcattaacgacacgctaaaaattttaaactcgtcgaaaattcgccgaatactacaaaactatctacgctcaaaactaaacgaaataaaaaactcgctatacaaaaacgacaacgacgactaatacaaaaatattatccccgactttcgttaaacgatctccaaccctaacccgccgatatacgaacgcaaacgatatcgccgaacgacaaactaattaacgattttctatttatcaccaccccgcgcac

SEQ ID NO: 6099 - DNA, 637 bp, Artificial Sequence
  chemically treated genomic DNA (Homo sapiens) CpG-island No: 6099
aaaattttttagtttagaggcggtgaaatagtttataacgtcgaagttagcgggttgtaatgagtataaaaacggcgtggtgatacgtattcgttagggcggcgaatatgaagtattaacgttgattagttgtttcgggttgatggttgatcggttggtgaaaatgttcggattcgaatcgggttttatatttgttcgtttcgtggcgagtattttcgttttgcgtcggagtataattaagattgttaattatttgatttattttattttcgattcggtaatgtcgtttttgggcgtttattttattcgtatgatcgacggtagcgtgatcgtcgggttaaacgcggtgttggtttttaaacgcgaaggttatcgtaagcgcgattttttattagcgatacgttggagattttgggttcgtcggggattcgtcgggtgttgtaaaattatttacgtttaggattgggcgagatgaaaaattcgttgtgtaaaagcggtagcggcggttggtgtaaaagtattgttttcggttttcgttaagcgatttttagttttggttcgtcggtgtgcgggcgtaggcggtatcgtcggacggtaagttgattgacgattttttgtttgttattatttcgcgtat

SEQ ID NO: 6100 - DNA, 637 bp, Artificial Sequence
  chemically treated genomic DNA (Homo sapiens) CpG-island No: 6100
atacgcgaaataataacaaacaaaaaatcgtcaatcaacttaccgtccgacgataccgcctacgcccgcacaccgacgaaccaaaactaaaaatcgcttaacgaaaaccgaaaacaatacttttacaccaaccgccgctaccgcttttacacaacgaatttttcatctcgcccaatcctaaacgtaaataattttacaacacccgacgaatccccgacgaacccaaaatctccaacgtatcgctaataaaaaatcgcgcttacgataaccttcgcgtttaaaaaccaacaccgcgtttaacccgacgatcacgctaccgtcgatcatacgaataaaataaacgcccaaaaacgacattaccgaatcgaaaataaaataaatcaaataattaacaatcttaattatactccgacgcaaaacgaaaatactcgccacgaaacgaacaaatataaaacccgattcgaatccgaacattttcaccaaccgatcaaccatcaacccgaaacaactaatcaacgttaatacttcatattcgccgccctaacgaatacgtatcaccacgccgtttttatactcattacaacccgctaacttcgacgttataaactatttcaccgcctctaaactaaaaaatttt

SEQ ID NO: 6101 - DNA, 580 bp, Artificial Sequence
  chemically treated genomic DNA (Homo sapiens) CpG-island No: 6101
tattgattagtaaacgggttgtttatttgtcgtggtttatttttttagttaatttaaagaattattatgtttttcgttcgtgggaacggtcgaagaggtaaattattgatggtaatagtgacgcgtggtcggtgtcgtattgatattttttgttagatgttgtgtcgttttttcgagtaaattatttagtaataacgttatcgtttgcgggttttttatacggtaggtatcgttaaatgttttttatcgtaatttttttagaacgatataatagcgtttaggtaacgattaggcgttatacgttttattacgttagcgggtaataaattgttcgttttgattatttgtttgtattagtatgtttcgttgcgttaacgttttttttttttatcgataacgggttgaaaattatttatataaggcggttatttgttgggggaatttcgggaaagtatagtgttggcggtgatttatttttgtattatcgttaatgttggcgatttgcgtaagtgttagattatcggatttatttcgtcgttagttttttattatgttaaaattcgggttaatttgaattcga

SEQ ID NO: 6102 - DNA, 580 bp, Artificial Sequence
  chemically treated genomic DNA (Homo sapiens) CpG-island No: 6102
tcgaattcaaattaacccgaattttaacataataaaaaactaacgacgaaataaatccgataatctaacacttacgcaaatcgccaacattaacgataatacaaaaataaatcaccgccaacactatactttcccgaaattcccccaacaaataaccgccttatataaataattttcaacccgttatcgataaaaaaaaaaaacgttaacgcaacgaaacatactaatacaaacaaataatcaaaacgaacaatttattacccgctaacgtaataaaacgtataacgcctaatcgttacctaaacgctattatatcgttctaaaaaaattacgataaaaaacatttaacgatacctaccgtataaaaaacccgcaaacgataacgttattactaaataatttactcgaaaaaacgacacaacatctaacaaaaaatatcaatacgacaccgaccacgcgtcactattaccatcaataatttacctcttcgaccgttcccacgaacgaaaaacataataattctttaaattaactaaaaaaataaaccacgacaaataaacaacccgtttactaatcaata

SEQ ID NO: 6103 - DNA, 580 bp, Artificial Sequence
  chemically treated genomic DNA (Homo sapiens) CpG-island No: 6103
tcgaatttaagttagttcgggttttaatatggtgaaaaattggcggcgaagtggattcggtaatttggtatttacgtagatcgttagtattggcggtgatgtaaaaatggattatcgttagtattgtgttttttcgaggtttttttagtaaatagtcgttttgtatgagtggtttttagttcgttgtcgatggaaggaaaaggcgttaacgtaacgaggtatattggtgtaggtaggtgattagagcgagtaatttattattcgttggcgtgatggggcgtataacgtttggtcgttgtttgggcgttgttatatcgttttggaggagttgcgatggggggtatttggcgatgtttgtcgtgtgggaagttcgtaagcggtggcgttgttgttgggtgatttgttcgagaaagcgatataatatttggtagagagtattaatgcggtatcgattacgcgttattattattattagtggtttgttttttcgatcgtttttacgggcggggagtatgatgattttttaagttggttgggaaagtggattacggtagataaataattcgtttgttggttagtg

SEQ ID NO: 6104 - DNA, 580 bp, Artificial Sequence
  chemically treated genomic DNA (Homo sapiens) CpG-island No: 6104
cactaaccaacaaacgaattatttatctaccgtaatccactttcccaaccaacttaaaaaatcatcatactccccgcccgtaaaaacgatcgaaaaaacaaaccactaataataataataacgcgtaatcgataccgcattaatactctctaccaaatattatatcgctttctcgaacaaatcacccaacaacaacgccaccgcttacgaacttcccacacgacaaacatcgccaaataccccccatcgcaactcctccaaaacgatataacaacgcccaaacaacgaccaaacgttatacgccccatcacgccaacgaataataaattactcgctctaatcacctacctacaccaatatacctcgttacgttaacgccttttccttccatcgacaacgaactaaaaaccactcatacaaaacgactatttactaaaaaaacctcgaaaaaacacaatactaacgataatccatttttacatcaccgccaatactaacgatctacgtaaataccaaattaccgaatccacttcgccgccaatttttcaccatattaaaacccgaactaacttaaattcga

SEQ ID NO: 6105 - DNA, 742 bp, Artificial Sequence
  chemically treated genomic DNA (Homo sapiens) CpG-island No: 6105
agaatgtttatttgtttaacgatacggtttaatcggatattcggcggtagcgttttttatagtcgcgttagcgtatggtcgttcggttggaaagttcgcgttatttataggagcggttggcgtattacgttgtatagggggtaaattaatacgcgtttatgatcggcgtgtaggttttgcgcgaggcgattgtttagaaaacggaacgtttgtatggttattaattagatgtcgatagcgatattatcgtaacggtaggggcgacggaagcgttatacgcggcgattatcgtattggtgcgtaatggcgatgaagtgatttgttttgattttagttatgatagttacgttttcgttatcgcgttttttgggggaatagtgaagcgtatggtattgtaattatcgtattttcgcgttgattggtaggaatttgtcgtattattaagcgagcgtattagattggtgatttttaatatttcgtataattttagtgtaattgtttggtagtaggttgatttcgtcgttttgtggtaggcgatcgtcgggtacgagatttttgttattagcgatgaagtttacgagtatattaattttttataatagggttatgttagtgtgttggcgtattcgtaattgcgtgagcgggtagtggcggtttttttttttttatggtaattcgttgtttgtaggtttcgttatttgtatgttattgtatacgattcgtaatattttaatttgtagta

SEQ ID NO: 6106 - DNA, 742 bp, Artificial Sequence
  chemically treated genomic DNA (Homo sapiens) CpG-island No: 6106
tactacaaattaaaatattacgaatcgtatacaataacatacaaataacgaaacctacaaacaacgaattaccataaaaaaaaaaaaaccgccactacccgctcacgcaattacgaatacgccaacacactaacataaccctattataaaaaattaatatactcgtaaacttcatcgctaataacaaaaatctcgtacccgacgatcgcctaccacaaaacgacgaaatcaacctactaccaaacaattacactaaaattatacgaaatattaaaaatcaccaatctaatacgctcgcttaataatacgacaaattcctaccaatcaacgcgaaaatacgataattacaataccatacgcttcactattcccccaaaaaacgcgataacgaaaacgtaactatcataactaaaatcaaaacaaatcacttcatcgccattacgcaccaatacgataatcgccgcgtataacgcttccgtcgcccctaccgttacgataatatcgctatcgacatctaattaataaccatacaaacgttccgttttctaaacaatcgcctcgcgcaaaacctacacgccgatcataaacgcgtattaatttaccccctatacaacgtaatacgccaaccgctcctataaataacgcgaactttccaaccgaacgaccatacgctaacgcgactataaaaaacgctaccgccgaatatccgattaaaccgtatcgttaaacaaataaacattct

SEQ ID NO: 6107 - DNA, 742 bp, Artificial Sequence
  chemically treated genomic DNA (Homo sapiens) CpG-island No: 6107
tattataaattagagtattgcgaatcgtatgtaatggtatgtaaatgacgggatttgtaggtagcgagttgttatgggggagaagaaatcgttattgttcgtttacgtagttgcggatgcgttagtatattggtatggttttgttgtgaaaagttgatgtgttcgtagattttatcgttaatgataaaaatttcgtgttcggcgatcgtttgttataaagcggcgaaattagtttgttgttagatagttgtattggggttatgcggagtgttgaggattattagtttggtgcgttcgtttaataatgcggtaaatttttgttagttaacgcgaaaatgcggtggttgtagtgttatacgttttattatttttttagaaagcgcgatggcgggggcgtaattgttatagttgggattaaaataaattattttatcgttattgcgtattagtgcggtaatcgtcgcgtataacgttttcgtcgtttttgtcgttacggtgatatcgttatcggtatttggttgatagttatataaacgtttcgttttttgagtaatcgtttcgcgtaaggtttgtacgtcggttatgggcgcgtattggtttgttttttgtgtaacgtggtgcgttagtcgtttttgtaaatagcgcggattttttagtcggacggttatacgttggcgcggttgtggggggcgttgtcgtcggatattcggttaagtcgtatcgttaaatagatggatatttt

SEQ ID NO: 6108 - DNA, 742 bp, Artificial Sequence
  chemically treated genomic DNA (Homo sapiens) CpG-island No: 6108
aaaatatccatctatttaacgatacgacttaaccgaatatccgacgacaacgccccccacaaccgcgccaacgtataaccgtccgactaaaaaatccgcgctatttacaaaaacgactaacgcaccacgttacacaaaaaacaaaccaatacgcgcccataaccgacgtacaaaccttacgcgaaacgattactcaaaaaacgaaacgtttatataactatcaaccaaataccgataacgatatcaccgtaacgacaaaaacgacgaaaacgttatacgcgacgattaccgcactaatacgcaataacgataaaataatttattttaatcccaactataacaattacgcccccgccatcgcgctttctaaaaaaataataaaacgtataacactacaaccaccgcattttcgcgttaactaacaaaaatttaccgcattattaaacgaacgcaccaaactaataatcctcaacactccgcataaccccaatacaactatctaacaacaaactaatttcgccgctttataacaaacgatcgccgaacacgaaatttttatcattaacgataaaatctacgaacacatcaacttttcacaacaaaaccataccaatatactaacgcatccgcaactacgtaaacgaacaataacgatttcttctcccccataacaactcgctacctacaaatcccgtcatttacataccattacatacgattcgcaatactctaatttataata

SEQ ID NO: 6109 - DNA, 672 bp, Artificial Sequence
  chemically treated genomic DNA (Homo sapiens) CpG-island No: 6109
gcggttgtcgttggagaacgatattattaaagatgggcggattgttgatgcgtagtagttggttaaaacgttgttatcgtggagtcgcgaattgtcgtagcgttattatattatgttggcgtttttcgttagtcgtatattatagcggttattttcgcgttcgtcgatgttttttggtgagcgggagtaaacggtttggttgttagggacgatggttcgcgagttggatatggattcggattttttgcgtttcgattatagcgaagatttatttagtttcgtttataacgtgattgtcgcgtaaagtaaagagttggtaacgttgtttattttggtagaaaggttgcgtgtttatgtgagcgcgattatttcggatgttagtgtattatagcgatttttgttttttttatttttttattagtaatgtttggtttggcgtgataacgaatagtggttgtggcgacgcgttatagttgggggcgtaaattggcggtggggatgattagcgcgaaggagttggcggtagcgttattcgttgatttcgaaagcgtcgcgatatgtggcgaaggcggatttgatttttgggaggtcgtttttgttcgttagtcgtcgttatcgtcgttaggtggagattttgttatcgcgttggggttggcgtttgggaaggcgtat

SEQ ID NO: 6110 - DNA, 672 bp, Artificial Sequence
  chemically treated genomic DNA (Homo sapiens) CpG-island No: 6110
atacgccttcccaaacgccaaccccaacgcgataacaaaatctccacctaacgacgataacgacgactaacgaacaaaaacgacctcccaaaaatcaaatccgccttcgccacatatcgcgacgctttcgaaatcaacgaataacgctaccgccaactccttcgcgctaatcatccccaccgccaatttacgcccccaactataacgcgtcgccacaaccactattcgttatcacgccaaaccaaacattactaataaaaaaataaaaaaaacaaaaatcgctataatacactaacatccgaaataatcgcgctcacataaacacgcaacctttctaccaaaataaacaacgttaccaactctttactttacgcgacaatcacgttataaacgaaactaaataaatcttcgctataatcgaaacgcaaaaaatccgaatccatatccaactcgcgaaccatcgtccctaacaaccaaaccgtttactcccgctcaccaaaaaacatcgacgaacgcgaaaataaccgctataatatacgactaacgaaaaacgccaacataatataataacgctacgacaattcgcgactccacgataacaacgttttaaccaactactacgcatcaacaatccgcccatctttaataatatcgttctccaacgacaaccgc

SEQ ID NO: 6111 - DNA, 672 bp, Artificial Sequence
  chemically treated genomic DNA (Homo sapiens) CpG-island No: 6111
gtacgtttttttaagcgttagttttagcgcgatggtaaagtttttatttggcggcggtagcggcggttgacgaatagaaacggttttttagggattaaattcgttttcgttatatatcgcgacgttttcgggattaacggataacgttgtcgttagttttttcgcgttagttatttttatcgttagtttgcgtttttagttatagcgcgtcgttatagttattgttcgttattacgttaggttagatattgttgatgagaaggtaaaaaaggtaggaatcgttgtaatgtattggtattcggggtgatcgcgtttatatgaatacgtaatttttttgttagagtaagtagcgttgttagttttttgttttgcgcggtagttacgttataggcgggattgagtgagttttcgttgtaatcgaagcgtagggagttcggatttatatttagttcgcgggttatcgtttttgatagttaggtcgtttgttttcgtttattaagggatatcgacgggcgcggaaatgatcgttgtaatgtgcgattggcgggaaacgttaatataatgtgatgacgttgcggtagttcgcgattttacggtaataacgttttagttagttgttgcgtattaataattcgtttatttttgataatgtcgttttttagcggtaatcgt

SEQ ID NO: 6112 - DNA, 672 bp, Artificial Sequence
  chemically treated genomic DNA (Homo sapiens) CpG-island No: 6112
acgattaccgctaaaaaacgacattatcaaaaataaacgaattattaatacgcaacaactaactaaaacgttattaccgtaaaatcgcgaactaccgcaacgtcatcacattatattaacgtttcccgccaatcgcacattacaacgatcatttccgcgcccgtcgatatcccttaataaacgaaaacaaacgacctaactatcaaaaacgataacccgcgaactaaatataaatccgaactccctacgcttcgattacaacgaaaactcactcaatcccgcctataacgtaactaccgcgcaaaacaaaaaactaacaacgctacttactctaacaaaaaaattacgtattcatataaacgcgatcaccccgaataccaatacattacaacgattcctaccttttttaccttctcatcaacaatatctaacctaacgtaataacgaacaataactataacgacgcgctataactaaaaacgcaaactaacgataaaaataactaacgcgaaaaaactaacgacaacgttatccgttaatcccgaaaacgtcgcgatatataacgaaaacgaatttaatccctaaaaaaccgtttctattcgtcaaccgccgctaccgccgccaaataaaaactttaccatcgcgctaaaactaacgcttaaaaaaacgtac

SEQ ID NO: 6113 - DNA, 503 bp, Artificial Sequence
  chemically treated genomic DNA (Homo sapiens) CpG-island No: 6113
  unsure (185, 254, 261, 267..268, 270, 306, 410)
cgtttgatcgtgggtggtgtcggcggttacgttttatgttagaagagagttttttcgtgggtaggagcggcgtgggatttttaaaatttatttttcgcgttgagtttgggcgtttatttcgtttatcgtttttttttagttattttatttagtttatattcgagaaagtagtggggggatcgtangttggagttttcggggcgtgaattttacgcgagaagttcgggttcggatgtttttgttgtcgggttttntgttagnttttanntnttacgttttttttcgttaaggggtacgtcggattgntagtaagcgggattttcgggttttaatttttcggttgggattataggcgtcggtttttcggtttcggtttgcgagattgaaggtcgcgattttggcggcggtanagggagaattataattcggggtggatagtttcgtttacgtcggtgaaaaggaattgagtgtatcggtggttttgagtaaagagtttttttttt

SEQ ID NO: 6114 - DNA, 503 bp, Artificial Sequence
  chemically treated genomic DNA (Homo sapiens) CpG-island No: 6114
  unsure (94, 198, 234, 236..237, 243, 250, 319)
aaaaaaaaaactctttactcaaaaccaccgatacactcaattccttttcaccgacgtaaacgaaactatccaccccgaattataattctccctntaccgccgccaaaatcgcgaccttcaatctcgcaaaccgaaaccgaaaaaccgacgcctataatcccaaccgaaaaattaaaacccgaaaatcccgcttactancaatccgacgtaccccttaacgaaaaaaaacgtaananntaaaanctaacanaaaacccgacaacaaaaacatccgaacccgaacttctcgcgtaaaattcacgccccgaaaactccaacntacgatccccccactactttctcgaatataaactaaataaaataactaaaaaaaaacgataaacgaaataaacgcccaaactcaacgcgaaaaataaattttaaaaatcccacgccgctcctacccacgaaaaaactctcttctaacataaaacgtaaccgccgacaccacccacgatcaaacg

SEQ ID NO: 6115 - DNA, 503 bp, Artificial Sequence
  chemically treated genomic DNA (Homo sapiens) CpG-island No: 6115
  unsure (94, 198, 234, 236..237, 243, 250, 319)
aaaggagaaattttttgtttagagttatcgatatatttaatttttttttatcggcgtgggcgggattatttatttcgggttgtaattttttttntatcgtcgttaaggtcgcggtttttagtttcgtaggtcgagatcgaggggtcggcgtttatgattttagtcgggggattaggattcggaagtttcgtttgttgntagttcggcgtgttttttagcggggaagggcgtggngnntggganttggtangaggttcggtagtaagagtattcgggttcgaatttttcgcgtggggtttacgtttcgggggttttagtntgcggtttttttattgttttttcgagtataggttagatggaatggttgaaagggagcgatgggcggggtgggcgtttaggtttagcgcgaagagtgagttttgaaggttttacgtcgtttttgtttacgaaggggtttttttttgatatgaggcgtggtcgtcgatattatttacgattagacg

SEQ ID NO: 6116 - DNA, 503 bp, Artificial Sequence
  chemically treated genomic DNA (Homo sapiens) CpG-island No: 6116
  unsure (185, 254, 261, 267..268, 270, 306, 410)
cgtctaatcgtaaataatatcgacgaccacgcctcatatcaaaaaaaaaccccttcgtaaacaaaaacgacgtaaaaccttcaaaactcactcttcgcgctaaacctaaacgcccaccccgcccatcgctccctttcaaccattccatctaacctatactcgaaaaaacaataaaaaaaccgcanactaaaacccccgaaacgtaaaccccacgcgaaaaattcgaacccgaatactcttactaccgaacctcntaccaantcccanncnccacgcccttccccgctaaaaaacacgccgaactancaacaaacgaaacttccgaatcctaatcccccgactaaaatcataaacgccgacccctcgatctcgacctacgaaactaaaaaccgcgaccttaacgacgatanaaaaaaaattacaacccgaaataaataatcccgcccacgccgataaaaaaaaattaaatatatcgataactctaaacaaaaaatttctccttt

SEQ ID NO: 6117 - DNA, 687 bp, Artificial Sequence
  chemically treated genomic DNA (Homo sapiens) CpG-island No: 6117
  unsure (654)
tttcgatcgatattttcgacgtttaggatgaggaatatcgggagtcggtgttgttttttaacgttgcggttcgcgtggcggtggaagtaggtattgtcgattattggtataagtatgttggtttgaaaggggtaattgtcgggatgacgggttacggggaatttgtttcggcggataagttgttttcgttttttggttttatcgtcgagaatattgtggtaaaagcgtataaggtgttgggagtgaaaggtgtttgatggtgattgtcggatgttgattgtcggatgcgacgttgacgcgttttattcggtttatagcgttttattcggtttatatgtttcgttattttgttaaacgggtgatttataacgtgggtttagcgtttggtttatgttagttatcgtaggggggttcgaggcgtaagtattagggaaaagttgaacgttaaaggttaggcgttggatgtataacggtaatcgcgttttcggtaggatagtttcgtattttttagtgcgtttatttagattcgatcgataagttatgaagatcgatcgggaaatgggtttataacgagtagggagcgttagaattcggataaagagatattagtaggtatatatatcgtgtggttttcgcgcggaaatatatttgtgngggagtagacgtatagatatatataaggggata

SEQ ID NO: 6118 - DNA, 687 bp, Artificial Sequence
  chemically treated genomic DNA (Homo sapiens) CpG-island No: 6118
  unsure (34)
tatccccttatatatatctatacgtctactcccncacaaatatatttccgcgcgaaaaccacacgatatatatacctactaatatctctttatccgaattctaacgctccctactcgttataaacccatttcccgatcgatcttcataacttatcgatcgaatctaaataaacgcactaaaaaatacgaaactatcctaccgaaaacgcgattaccgttatacatccaacgcctaacctttaacgttcaacttttccctaatacttacgcctcgaacccccctacgataactaacataaaccaaacgctaaacccacgttataaatcacccgtttaacaaaataacgaaacatataaaccgaataaaacgctataaaccgaataaaacgcgtcaacgtcgcatccgacaatcaacatccgacaatcaccatcaaacacctttcactcccaacaccttatacgcttttaccacaatattctcgacgataaaaccaaaaaacgaaaacaacttatccgccgaaacaaattccccgtaacccgtcatcccgacaattacccctttcaaaccaacatacttataccaataatcgacaatacctacttccaccgccacgcgaaccgcaacgttaaaaaacaacaccgactcccgatattcctcatcctaaacgtcgaaaatatcgatcgaaa

SEQ ID NO: 6119 - DNA, 687 bp, Artificial Sequence
  chemically treated genomic DNA (Homo sapiens) CpG-island No: 6119
  unsure (34)
tgtttttttgtgtgtgtttgtgcgtttgtttttntataagtgtattttcgcgcgagagttatacggtgtgtgtgtttattgatgtttttttattcgggttttggcgttttttgttcgttgtgaatttatttttcggtcggtttttataatttgtcggtcgagtttggatgagcgtattggggagtgcgggattgttttatcgaaggcgcgattatcgttgtgtatttagcgtttggtttttgacgtttagtttttttttggtgtttacgtttcggatttttttgcgataattggtatgggttagacgttgggtttacgttgtggattattcgtttaataaaatggcgggatatgtaggtcggataagacgttgtaggtcggataagacgcgttagcgtcgtattcggtaattagtattcggtaattattattaggtattttttatttttagtattttatgcgtttttgttataatattttcggcggtaaagttaaagaacgggaatagtttattcgtcggagtagatttttcgtaattcgttatttcgataattgttttttttagattaatatatttgtattagtaatcggtaatatttgtttttatcgttacgcgagtcgtaacgttagaaggtaatatcgattttcgatattttttattttgggcgtcgaaaatatcggtcgagg

SEQ ID NO: 6120 - DNA, 687 bp, Artificial Sequence
  chemically treated genomic DNA (Homo sapiens) CpG-island No: 6120
  unsure (654)
cctcgaccgatattttcgacgcccaaaataaaaaatatcgaaaatcgatattaccttctaacgttacgactcgcgtaacgataaaaacaaatattaccgattactaatacaaatatattaatctaaaaaaaacaattatcgaaataacgaattacgaaaaatctactccgacgaataaactattcccgttctttaactttaccgccgaaaatattataacaaaaacgcataaaatactaaaaataaaaaatacctaataataattaccgaatactaattaccgaatacgacgctaacgcgtcttatccgacctacaacgtcttatccgacctacatatcccgccattttattaaacgaataatccacaacgtaaacccaacgtctaacccataccaattatcgcaaaaaaatccgaaacgtaaacaccaaaaaaaaactaaacgtcaaaaaccaaacgctaaatacacaacgataatcgcgccttcgataaaacaatcccgcactccccaatacgctcatccaaactcgaccgacaaattataaaaaccgaccgaaaaataaattcacaacgaacaaaaaacgccaaaacccgaataaaaaaacatcaataaacacacacaccgtataactctcgcgcgaaaatacacttatanaaaaacaaacgcacaaacacacacaaaaaaaca

SEQ ID NO: 6121 - DNA, 961 bp, Artificial Sequence
  chemically treated genomic DNA (Homo sapiens) CpG-island No: 6121
  unsure (14, 92)
ggaaaatcgtattncggtcgcgcggtgttggaggtgtagcggtgttagtagatgtcgatgatgatatcgtataatttacgttagcgtgcgtntgtttatgatgtttatcgaggagtgcgcggggttttggattatgtttatcgtattggttttaaagattgttggatgtgtagagttttgatagttatgttgcgtaatcgttggttcgtaattttaattatatcgaaattagcgttaattagtacgttaattggggttcgaaaggcgtatcggttgatcgtttcgacgtggtggtattgagcgcgttggaaattgatatttagtttaacgttaacgtgttgatcggttttgacggcgtattgcgtggtgttttcggtggttattgcgatatcgcgattgtttttgcgttttttattatcgtcgcgtcgttggtacgcggtcgtatttcgattttggtggataacgtattgatttgtattattttaggttttagtgtcgatattttggttatagattacggtatcgtagttaattcggtacgttcggaattggtagaacgtttgtaggaagcgggtattaaagtggtttttattgagtggttgcgcgaacgtgcgcgtttgttgatcggtgaattatagtcgattgaatttatagatcgcgtcgttgtcgttgtgcgttatcgcgatggttcggtgatcgatgttgtgtattaagtgaaggaataagttatgtatttgttttttgaattcgttagttattatgcggtattaattttcgagttgttcgttagatcggatgaaaagtaagtacggtaatacgtttggtttaagcgttattttgttttattgtttttttttatcgtgggtgcgtttgggtcgattaaagatagcgaggttatacgtcgaatttttattatgcgtgatagtttgcgtgttttatcgaaaaatttattattagtata

SEQ ID NO: 6122 - DNA, 961 bp, Artificial Sequence
  chemically treated genomic DNA (Homo sapiens) CpG-island No: 6122
  unsure (870, 948)
tatactaataataaatttttcgataaaacacgcaaactatcacgcataataaaaattcgacgtataacctcgctatctttaatcgacccaaacgcacccacgataaaaaaaaacaataaaacaaaataacgcttaaaccaaacgtattaccgtacttacttttcatccgatctaacgaacaactcgaaaattaataccgcataataactaacgaattcaaaaaacaaatacataacttattccttcacttaatacacaacatcgatcaccgaaccatcgcgataacgcacaacgacaacgacgcgatctataaattcaatcgactataattcaccgatcaacaaacgcgcacgttcgcgcaaccactcaataaaaaccactttaatacccgcttcctacaaacgttctaccaattccgaacgtaccgaattaactacgataccgtaatctataaccaaaatatcgacactaaaacctaaaataatacaaatcaatacgttatccaccaaaatcgaaatacgaccgcgtaccaacgacgcgacgataataaaaaacgcaaaaacaatcgcgatatcgcaataaccaccgaaaacaccacgcaatacgccgtcaaaaccgatcaacacgttaacgttaaactaaatatcaatttccaacgcgctcaataccaccacgtcgaaacgatcaaccgatacgcctttcgaaccccaattaacgtactaattaacgctaatttcgatataattaaaattacgaaccaacgattacgcaacataactatcaaaactctacacatccaacaatctttaaaaccaatacgataaacataatccaaaaccccgcgcactcctcgataaacatcataaacanacgcacgctaacgtaaattatacgatatcatcatcgacatctactaacaccgctacacctccaacaccgcgcgaccgnaatacgattttcc

SEQ ID NO: 6123 - DNA, 961 bp, Artificial Sequence
  chemically treated genomic DNA (Homo sapiens) CpG-island No: 6123
  unsure (870, 948)
tatgttagtagtagatttttcggtaaggtacgtaagttgttacgtatgataaaaattcggcgtgtgatttcgttgtttttaatcggtttaggcgtatttacggtaaagaagagtagtggaataggatggcgtttgagttagacgtgttgtcgtgtttgttttttattcggtttgacgagtagttcggaaattgatatcgtatggtggttggcgagtttaggaagtaggtgtatggtttatttttttatttgatgtataatatcgattatcgagttatcgcggtaacgtataacggtaacgacgcggtttgtgaatttaatcggttgtggtttatcggttagtagacgcgtacgttcgcgtagttatttaatggaaattattttaatgttcgttttttgtagacgttttgttagtttcggacgtgtcgggttaattgcgatatcgtggtttgtgattagaatatcgatattggagtttggggtgatgtaggttagtacgttatttattagagtcggaatacgatcgcgtattagcggcgcgacgatgatggaaagcgtagaggtaatcgcggtatcgtagtgattatcggaagtattacgtagtacgtcgttagagtcggttagtacgttaacgttgaattgggtgttaatttttagcgcgtttagtattattacgtcgagacgattaatcgatgcgtttttcgaattttagttagcgtattggttggcgttgatttcgatgtgattggggttacgggttagcgattgcgtagtatggttgttaaagttttgtatatttagtagtttttagagttagtgcgatgaatataatttaaaatttcgcgtatttttcggtgaatattatgggtanacgtacgttgacgtgggttatgcgatattattatcgatatttgttggtatcgttatatttttaatatcgcgcgatcgnggtacggtttttt

SEQ ID NO: 6124 - DNA, 961 bp, Artificial Sequence
  chemically treated genomic DNA (Homo sapiens) CpG-island No: 6124
  unsure (14, 92)
aaaaaaccgtaccncgatcgcgcgatattaaaaatataacgataccaacaaatatcgataataatatcgcataacccacgtcaacgtacgtntacccataatattcaccgaaaaatacgcgaaattttaaattatattcatcgcactaactctaaaaactactaaatatacaaaactttaacaaccatactacgcaatcgctaacccgtaaccccaatcacatcgaaatcaacgccaaccaatacgctaactaaaattcgaaaaacgcatcgattaatcgtctcgacgtaataatactaaacgcgctaaaaattaacacccaattcaacgttaacgtactaaccgactctaacgacgtactacgtaatacttccgataatcactacgataccgcgattacctctacgctttccatcatcgtcgcgccgctaatacgcgatcgtattccgactctaataaataacgtactaacctacatcaccccaaactccaatatcgatattctaatcacaaaccacgatatcgcaattaacccgacacgtccgaaactaacaaaacgtctacaaaaaacgaacattaaaataatttccattaaataactacgcgaacgtacgcgtctactaaccgataaaccacaaccgattaaattcacaaaccgcgtcgttaccgttatacgttaccgcgataactcgataatcgatattatacatcaaataaaaaaataaaccatacacctacttcctaaactcgccaaccaccatacgatatcaatttccgaactactcgtcaaaccgaataaaaaacaaacacgacaacacgtctaactcaaacgccatcctattccactactcttctttaccgtaaatacgcctaaaccgattaaaaacaacgaaatcacacgccgaatttttatcatacgtaacaacttacgtaccttaccgaaaaatctactactaacata

SEQ ID NO: 6125 - DNA, 839 bp, Artificial Sequence
  chemically treated genomic DNA (Homo sapiens) CpG-island No: 6125
  unsure (201, 211)
agtaacgattataattattaaattaataagtatcggtatcggagtgcgttttacgattttaatagcgagattttcgttattcggttatcgtaacgattacgttagaacggcgaaagggtttcgttaaggtttgacgtttgtattatcgggatagttaaaagtttagaggttcgttttgattcgatagtattttataggttnaaagggtcgnaattcgtagttggtagaagttggggatgatattgttacgttcgtaagcgattgtggtggtttcggtttattggtttattcgtggaataggagtgatcgcgatggagacgtcgtttacgatttatgattttggtggtttttcgtaggcgttgtacgatacgtattattttgtttcgggttcgtttgcgttggtatagcgtttggttgagttgttagcgtcgatttcggtgacgttggataaagaagtttggggttttgattacggttcgtggggcgtgttgattaagatgtattttgacgttgatatttcgatggtgtagttgagtatcgatagtagtaaatttgtcgtttggtatttcgaaatggggcgtaaattggtagcgttgcgagatgaaggaataatgttggtcgttagcggtaacgtggtgtataatttgcgtatagcgaagtggtacggtgatagtttatcgtattcgggggcgacgtcgtttaatgagtatgtgaaagcgaatttgacgtggcgagggttagtggaataatattttttggtgaattatttcgattatgagaggggtacgttatcgaatttaacggttagatattatttgtcggtgttgtatgtgttacgg

SEQ ID NO: 6126 - DNA, 839 bp, Artificial Sequence
  chemically treated genomic DNA (Homo sapiens) CpG-island No: 6126
  unsure (629, 639)
ccgtaacacatacaacaccgacaaataatatctaaccgttaaattcgataacgtacccctctcataatcgaaataattcaccaaaaaatattattccactaaccctcgccacgtcaaattcgctttcacatactcattaaacgacgtcgcccccgaatacgataaactatcaccgtaccacttcgctatacgcaaattatacaccacgttaccgctaacgaccaacattattccttcatctcgcaacgctaccaatttacgccccatttcgaaataccaaacgacaaatttactactatcgatactcaactacaccatcgaaatatcaacgtcaaaatacatcttaatcaacacgccccacgaaccgtaatcaaaaccccaaacttctttatccaacgtcaccgaaatcgacgctaacaactcaaccaaacgctataccaacgcaaacgaacccgaaacaaaataatacgtatcgtacaacgcctacgaaaaaccaccaaaatcataaatcgtaaacgacgtctccatcgcgatcactcctattccacgaataaaccaataaaccgaaaccaccacaatcgcttacgaacgtaacaatatcatccccaacttctaccaactacgaattncgaccctttnaacctataaaatactatcgaatcaaaacgaacctctaaacttttaactatcccgataatacaaacgtcaaaccttaacgaaaccctttcgccgttctaacgtaatcgttacgataaccgaataacgaaaatctcgctattaaaatcgtaaaacgcactccgataccgatacttattaatttaataattataatcgttact

SEQ ID NO: 6127 - DNA, 839 bp, Artificial Sequence
  chemically treated genomic DNA (Homo sapiens) CpG-island No: 6127
  unsure (629, 639)
tcgtaatatatataatatcggtaaataatgtttggtcgttgggttcgataacgtgttttttttatggtcgaggtaatttattagaggatgttgttttattggttttcgttacgttagattcgtttttatatatttattaaacgacgtcgttttcggatacggtgaattattatcgtgttatttcgttgtgcgtaggttatgtattacgttatcgttggcgattaatattatttttttatttcgtagcgttgttagtttgcgttttatttcgaaatgttaggcggtaggtttgttattgtcgatatttaattgtattatcgggatattagcgttaggatatattttaattagtacgttttacgagtcgtggttaaagttttaggtttttttatttagcgttatcgggatcggcgttaatagtttaattagacgttgtgttagcgtaggcgaattcggagtaggataatgcgtatcgtatagcgtttgcgggaagttattaaagttatgaatcgtgggcggcgtttttatcgcggttatttttgttttacgggtaaattagtgagtcgaaattattataatcgtttgcgggcgtggtaatgttatttttaatttttgttagttgcgggttncggttttttnggtttgtgggatgttgtcgagttaggacgagtttttgaatttttgattatttcgatggtgtaggcgttaaattttgacgggattttttcgtcgttttggcgtagtcgttgcggtggtcggatggcgaagatttcgttgttgaagtcgtaaaacgtatttcggtatcggtgtttgttggtttggtgattgtaatcgttgtt

SEQ ID NO: 6128 - DNA, 839 bp, Artificial Sequence
  chemically treated genomic DNA (Homo sapiens) CpG-island No: 6128
  unsure (201, 211)
aacaacgattacaatcaccaaaccaacaaacaccgataccgaaatacgttttacgacttcaacaacgaaatcttcgccatccgaccaccgcaacgactacgccaaaacgacgaaaaaatcccgtcaaaatttaacgcctacaccatcgaaataatcaaaaattcaaaaactcgtcctaactcgacaacatcccacaaaccnaaaaaaccgnaacccgcaactaacaaaaattaaaaataacattaccacgcccgcaaacgattataataatttcgactcactaatttacccgtaaaacaaaaataaccgcgataaaaacgccgcccacgattcataactttaataacttcccgcaaacgctatacgatacgcattatcctactccgaattcgcctacgctaacacaacgtctaattaaactattaacgccgatcccgataacgctaaataaaaaaacctaaaactttaaccacgactcgtaaaacgtactaattaaaatatatcctaacgctaatatcccgataatacaattaaatatcgacaataacaaacctaccgcctaacatttcgaaataaaacgcaaactaacaacgctacgaaataaaaaaataatattaatcgccaacgataacgtaatacataacctacgcacaacgaaataacacgataataattcaccgtatccgaaaacgacgtcgtttaataaatatataaaaacgaatctaacgtaacgaaaaccaataaaacaacatcctctaataaattacctcgaccataaaaaaaacacgttatcgaacccaacgaccaaacattatttaccgatattatatatattacga

SEQ ID NO: 6129 - DNA, 632 bp, Artificial Sequence
  chemically treated genomic DNA (Homo sapiens) CpG-island No: 6129
aatttcggcggcgaaagttcggatggcgtaatttgatagtcgtgagtgtcgtaagttgtttaattaggtaatggtttgtcgtatttcgttggaagtagaatatttgttggcgtaatttcgtatgatttaataagacgtatcgttggttatcgtcgagtgtattatattggaaagcgattggcgtagtaaagaagaagtgtttaaaggtatgatcgataatttgttgttggcgggtcgttgtcgttattcgcgtaaattggaagtcgatttgtgggcgcgcgaggtcgttttttttatcggtttgggttttagttttgttattttatatagtaaattagaatatattgagtaatttattattagcgtggcgcgtttgtaagcgtcggtgcgttggggcgatgatgaagcgtaatttattattatgttaattttgaataaatacgttgcgggcgattagtatatgcgtattttttcgcgtttcgttcgtcgtattatgtacgaagaatttcgtaacgcgttggttaacgtcgtttttgtcgacgttatcgttagtttgttgaatatgaattggattgtaaaggaatattatgaattgttttgatatcgtaacgtgtaaaatcgacgtttgtcgt

SEQ ID NO: 6130 - DNA, 632 bp, Artificial Sequence
  chemically treated genomic DNA (Homo sapiens) CpG-island No: 6130
acgacaaacgtcgattttacacgttacgatatcaaaacaattcataatattcctttacaatccaattcatattcaacaaactaacgataacgtcgacaaaaacgacgttaaccaacgcgttacgaaattcttcgtacataatacgacgaacgaaacgcgaaaaaatacgcatatactaatcgcccgcaacgtatttattcaaaattaacataataataaattacgcttcatcatcgccccaacgcaccgacgcttacaaacgcgccacgctaataataaattactcaatatattctaatttactatataaaataacaaaactaaaacccaaaccgataaaaaaaacgacctcgcgcgcccacaaatcgacttccaatttacgcgaataacgacaacgacccgccaacaacaaattatcgatcatacctttaaacacttcttctttactacgccaatcgctttccaatataatacactcgacgataaccaacgatacgtcttattaaatcatacgaaattacgccaacaaatattctacttccaacgaaatacgacaaaccattacctaattaaacaacttacgacactcacgactatcaaattacgccatccgaactttcgccgccgaaatt

SEQ ID NO: 6131 - DNA, 632 bp, Artificial Sequence
  chemically treated genomic DNA (Homo sapiens) CpG-island No: 6131
gcggtagacgtcgattttgtacgttacggtgttagaatagtttatgatgtttttttatagtttagtttatgtttagtaggttggcgatagcgtcggtagaggcggcgttaattagcgcgttacggaatttttcgtgtatgatgcggcgagcgaggcgcgagaaaatgcgtatatgttgatcgttcgtagcgtgtttgtttagggttaatataatgatgaattgcgttttattatcgttttagcgtatcggcgtttgtagacgcgttacgttgatggtggattgtttaatgtgttttgatttgttgtgtggaatggtaaaattaaagtttagatcggtagagaaaacggtttcgcgcgtttataagtcggtttttagtttacgcggatagcggtagcggttcgttagtagtaggttatcggttatgtttttgagtattttttttttgttgcgttagtcgttttttagtgtgatgtattcggcggtgattagcggtgcgttttgttgggttatgcggaattgcgttagtaggtgttttatttttagcgaagtacggtaggttattgtttggttgagtaatttgcggtatttacggttattaagttgcgttattcgagttttcgtcgtcggaatt

SEQ ID NO: 6132 - DNA, 632 bp, Artificial Sequence
  chemically treated genomic DNA (Homo sapiens) CpG-island No: 6132
aattccgacgacgaaaactcgaataacgcaacttaataaccgtaaataccgcaaattactcaaccaaacaataacctaccgtacttcgctaaaaataaaacacctactaacgcaattccgcataacccaacaaaacgcaccgctaatcaccgccgaatacatcacactaaaaaacgactaacgcaacaaaaaaaaaatactcaaaaacataaccgataacctactactaacgaaccgctaccgctatccgcgtaaactaaaaaccgacttataaacgcgcgaaaccgttttctctaccgatctaaactttaattttaccattccacacaacaaatcaaaacacattaaacaatccaccatcaacgtaacgcgtctacaaacgccgatacgctaaaacgataataaaacgcaattcatcattatattaaccctaaacaaacacgctacgaacgatcaacatatacgcattttctcgcgcctcgctcgccgcatcatacacgaaaaattccgtaacgcgctaattaacgccgcctctaccgacgctatcgccaacctactaaacataaactaaactataaaaaaacatcataaactattctaacaccgtaacgtacaaaatcgacgtctaccgc

SEQ ID NO: 6133 - DNA, 516 bp, Artificial Sequence
  chemically treated genomic DNA (Homo sapiens) CpG-island No: 6133
tttggcgatcgcgattcgttgcgcgcgtttggttataaatttttcgtgaggcggtttttagcggtattggtatatgtagttggttggcgatattaagggcgatgttaagatttttatgggtaagatcgattatgaaggcgggagaaagattttcgttgaggattttgtttggttaggaagtggtgaagtgatttttatcggcggcggtatcgtttattattttgacggtaatatcgaagggaagatttagggtttcgtataaaacggcggtttttgtcgaaagcgtattgagcgcgatgtttatgtagttgttgatgagtttaacgcggatttttatgttcggatcgttagcgttgattaatttattgtttatcgttattaggatcggtgtggtacgtttaatttgtttagcggtgtcgttagttagtagtaatagagtatcggtaatggtatttgtagaagtacggtttatcggaatatttattatgttgaagtttttggtttgtatatcggtaa

SEQ ID NO: 6134 - DNA, 516 bp, Artificial Sequence
  chemically treated genomic DNA (Homo sapiens) CpG-island No: 6134
ttaccgatatacaaaccaaaaacttcaacataataaatattccgataaaccgtacttctacaaataccattaccgatactctattactactaactaacgacaccgctaaacaaattaaacgtaccacaccgatcctaataacgataaacaataaattaatcaacgctaacgatccgaacataaaaatccgcgttaaactcatcaacaactacataaacatcgcgctcaatacgctttcgacaaaaaccgccgttttatacgaaaccctaaatcttcccttcgatattaccgtcaaaataataaacgataccgccgccgataaaaatcacttcaccacttcctaaccaaacaaaatcctcaacgaaaatctttctcccgccttcataatcgatcttacccataaaaatcttaacatcgcccttaatatcgccaaccaactacatataccaataccgctaaaaaccgcctcacgaaaaatttataaccaaacgcgcgcaacgaatcgcgatcgccaaa

SEQ ID NO: 6135 - DNA, 516 bp, Artificial Sequence
  chemically treated genomic DNA (Homo sapiens) CpG-island No: 6135
ttgtcgatatgtaagttaaaggttttagtatgatggatgtttcggtaggtcgtatttttgtaaatgttattatcggtattttgttattgttggttggcggtatcgttgaataagttgaacgtgttatatcgattttgatggcgatgggtagtgagttgattaacgttggcggttcgggtatggggattcgcgttaagtttattaataattatatgagtatcgcgtttaatgcgttttcggtagaagtcgtcgttttgtgcgaagttttgaatttttttttcgatgttgtcgttaaagtgatgagcggtatcgtcgtcggtaaaggttattttattattttttggttaaataaagtttttagcggagatttttttttcgtttttatgatcgattttgtttataaggattttggtatcgtttttgatgtcgttaattagttgtatgtgttaatgtcgttgggggtcgttttacgggaggtttatagttaggcgcgcgtagcgggtcgcggtcgttagg

SEQ ID NO: 6136 - DNA, 516 bp, Artificial Sequence
  chemically treated genomic DNA (Homo sapiens) CpG-island No: 6136
cctaacgaccgcgacccgctacgcgcgcctaactataaacctcccgtaaaacgacccccaacgacattaacacatacaactaattaacgacatcaaaaacgataccaaaatccttataaacaaaatcgatcataaaaacgaaaaaaaaatctccgctaaaaactttatttaaccaaaaaataataaaataacctttaccgacgacgataccgctcatcactttaacgacaacatcgaaaaaaaaattcaaaacttcgcacaaaacgacgacttctaccgaaaacgcattaaacgcgatactcatataattattaataaacttaacgcgaatccccatacccgaaccgccaacgttaatcaactcactacccatcgccatcaaaatcgatataacacgttcaacttattcaacgataccgccaaccaacaataacaaaataccgataataacatttacaaaaatacgacctaccgaaacatccatcatactaaaacctttaacttacatatcgacaa

SEQ ID NO: 6137 - DNA, 672 bp, Artificial Sequence
  chemically treated genomic DNA (Homo sapiens) CpG-island No: 6137
ttcgcgcgttttttattagcgtagggattttcgggttatagtttagagaatcggaaggtttttttttttttttcgagcgttgttattggggtcgaggtttttagtaagaattcgcgtgtttttgcgtacgtatatacggtgtatacgttagttcggcgttttttcgtgtttcgatttacgtaggttttttcgcgcgttcgtaatacgttcgtaggtttttgtgtttgttgtcggggtagcggggttcggaagggtaagaacgcggttcgttagcgggatggggattttggttcggtttggacgttgtttcgggcggggtttgggggcggagcgcgtcgggtcgggcgcgtagtagggatgttggttcgcgtttgcgtcgttcgcgtcgtttcgttttttgttttagcgttcggttcgtttcgttttttgttcggttttttttttcgcgtgtattttcggcgtatcgtttcgattcggcgtatatttcgtagtagcgtagcgaaagatttcgttttttcgttttgacgttgggtttgttttgggatttgaggatgtttaggagatcggtagggtttcgtttttgttttgatggtatttatcgttatcgttttttgatcggcgtatgaattttttcgtgttttagaattattagaaaaaaggatattagtaggt

SEQ ID NO: 6138 - DNA, 672 bp, Artificial Sequence
  chemically treated genomic DNA (Homo sapiens) CpG-island No: 6138
acctactaatatccttttttctaataattctaaaacacgaaaaaattcatacgccgatcaaaaaacgataacgataaataccatcaaaacaaaaacgaaaccctaccgatctcctaaacatcctcaaatcccaaaacaaacccaacgtcaaaacgaaaaaacgaaatctttcgctacgctactacgaaatatacgccgaatcgaaacgatacgccgaaaatacacgcgaaaaaaaaaaccgaacaaaaaacgaaacgaaccgaacgctaaaacaaaaaacgaaacgacgcgaacgacgcaaacgcgaaccaacatccctactacgcgcccgacccgacgcgctccgcccccaaaccccgcccgaaacaacgtccaaaccgaaccaaaatccccatcccgctaacgaaccgcgttcttacccttccgaaccccgctaccccgacaacaaacacaaaaacctacgaacgtattacgaacgcgcgaaaaaacctacgtaaatcgaaacacgaaaaaacgccgaactaacgtatacaccgtatatacgtacgcaaaaacacgcgaattcttactaaaaacctcgaccccaataacaacgctcgaaaaaaaaaaaaaaaccttccgattctctaaactataacccgaaaatccctacgctaataaaaaacgcgcgaa

SEQ ID NO: 6139 - DNA, 672 bp, Artificial Sequence
  chemically treated genomic DNA (Homo sapiens) CpG-island No: 6139
atttattaatgtttttttttttggtggttttagagtacggggggatttatacgtcggttaaagagcgatagcgatagatattattaaggtaggagcgaggttttgtcggttttttaggtatttttaagttttagggtaggtttagcgttagagcgaagaagcggggtttttcgttgcgttattacgagatgtgcgtcgggtcgaggcggtacgtcgggggtgtacgcgaaggagggagtcgagtagggagcggagcgaatcgagcgttagggtaaaggacggggcggcgcgaacggcgtaggcgcggattagtatttttattgcgcgttcggttcggcgcgtttcgtttttaggtttcgttcgggatagcgtttaggtcgggttagggtttttatttcgttagcgagtcgcgtttttattttttcgggtttcgttgtttcggtagtagatataggagtttgcgggcgtgttgcgggcgcgcgggaggatttgcgtgagtcggggtacggggaggcgtcggattgacgtgtgtatcgtgtgtgcgtgcgtagggatacgcgggtttttgttggaaatttcggttttagtggtagcgttcgggaagggggaggaggtttttcgattttttgagttgtggttcggaggtttttgcgttaatggaagacgcgcggg

SEQ ID NO: 6140 - DNA, 672 bp, Artificial Sequence
  chemically treated genomic DNA (Homo sapiens) CpG-island No: 6140
cccgcgcgtcttccattaacgcaaaaacctccgaaccacaactcaaaaaatcgaaaaacctcctcccccttcccgaacgctaccactaaaaccgaaatttccaacaaaaacccgcgtatccctacgcacgcacacacgatacacacgtcaatccgacgcctccccgtaccccgactcacgcaaatcctcccgcgcgcccgcaacacgcccgcaaactcctatatctactaccgaaacaacgaaacccgaaaaaataaaaacgcgactcgctaacgaaataaaaaccctaacccgacctaaacgctatcccgaacgaaacctaaaaacgaaacgcgccgaaccgaacgcgcaataaaaatactaatccgcgcctacgccgttcgcgccgccccgtcctttaccctaacgctcgattcgctccgctccctactcgactccctccttcgcgtacacccccgacgtaccgcctcgacccgacgcacatctcgtaataacgcaacgaaaaaccccgcttcttcgctctaacgctaaacctaccctaaaacttaaaaatacctaaaaaaccgacaaaacctcgctcctaccttaataatatctatcgctatcgctctttaaccgacgtataaatccccccgtactctaaaaccaccaaaaaaaaaaacattaataaat

SEQ ID NO: 6141 - DNA, 583 bp, Artificial Sequence
  chemically treated genomic DNA (Homo sapiens) CpG-island No: 6141
  unsure (348, 446, 484)
tttaagtcgattttcggtcggcgcgtttcgttttagaaggttttggtataggcgggcggtgtcgggcgttagtttttgcgggcgtgggtcggttagggcgcgtgggtttggggattcggggttacggtcgttacgtgagtttattttcgaggcggtagcgtggtcggtattcgttcgttggtttggttcggcgagcgtgggcggcgaacgggttttcgtcggatgtacgttggtgggatttagggttagagggcgtcgtcggggaaggttatttagacgcgcggttcgtcgggtttttacgcggtttgttttgattttcgttcgtaagttcgggttcgttttcgtcgntaggcggaggcgtatttggatttttgggttcgcgcgttttagattaaatttgttcgggatttcgttgtgttgatttttttggtcggtcgtttattaantaaggtcgcgttcggcggtcgcgattttttttcgcggncggtttgcgggggtttttttcgtttttttttagggtttttttttagtttttagggcgagaattttgacgtatataatagagaaaaatagagaataatat

SEQ ID NO: 6142 - DNA, 583 bp, Artificial Sequence
  chemically treated genomic DNA (Homo sapiens) CpG-island No: 6142
  unsure (100, 138, 236)
atattattctctatttttctctattatatacgtcaaaattctcgccctaaaaactaaaaaaaaaccctaaaaaaaaacgaaaaaaacccccgcaaaccgnccgcgaaaaaaaatcgcgaccgccgaacgcgaccttanttaataaacgaccgaccaaaaaaatcaacacaacgaaatcccgaacaaatttaatctaaaacgcgcgaacccaaaaatccaaatacgcctccgcctancgacgaaaacgaacccgaacttacgaacgaaaatcaaaacaaaccgcgtaaaaacccgacgaaccgcgcgtctaaataaccttccccgacgacgccctctaaccctaaatcccaccaacgtacatccgacgaaaacccgttcgccgcccacgctcgccgaaccaaaccaacgaacgaataccgaccacgctaccgcctcgaaaataaactcacgtaacgaccgtaaccccgaatccccaaacccacgcgccctaaccgacccacgcccgcaaaaactaacgcccgacaccgcccgcctataccaaaaccttctaaaacgaaacgcgccgaccgaaaatcgacttaaa

SEQ ID NO: 6143 - DNA, 583 bp, Artificial Sequence
  chemically treated genomic DNA (Homo sapiens) CpG-island No: 6143
  unsure (100, 138, 236)
gtattgttttttatttttttttattatatacgttaaagttttcgttttgggaattagaaggaggttttaaggaagagcggggagggttttcgtaagtcgntcgcggggagggatcgcgatcgtcgggcgcggttttgnttggtgagcggtcggttagaaaagttagtatagcggggtttcgaataggtttggtttgggacgcgcgagtttaagggtttagatacgttttcgtttgncggcgagagcgggttcgggtttgcgggcgaaagttaaggtaggtcgcgtggaggttcggcgggtcgcgcgtttaggtgatttttttcggcggcgttttttggttttggattttattagcgtgtattcggcggggattcgttcgtcgtttacgttcgtcggattaggttagcgggcgggtgtcggttacgttgtcgtttcggggatgagtttacgtgacgatcgtggtttcgagtttttaggtttacgcgttttggtcggtttacgttcgtagaagttggcgttcggtatcgttcgtttgtgttagagttttttagagcggaacgcgtcggtcgagagtcgatttagg

SEQ ID NO: 6144 - DNA, 583 bp, Artificial Sequence
  chemically treated genomic DNA (Homo sapiens) CpG-island No: 6144
  unsure (348, 446, 484)
cctaaatcgactctcgaccgacgcgttccgctctaaaaaactctaacacaaacgaacgataccgaacgccaacttctacgaacgtaaaccgaccaaaacgcgtaaacctaaaaactcgaaaccacgatcgtcacgtaaactcatccccgaaacgacaacgtaaccgacacccgcccgctaacctaatccgacgaacgtaaacgacgaacgaatccccgccgaatacacgctaataaaatccaaaaccaaaaaacgccgccgaaaaaaatcacctaaacgcgcgacccgccgaacctccacgcgacctaccttaactttcgcccgcaaacccgaacccgctctcgccgncaaacgaaaacgtatctaaacccttaaactcgcgcgtcccaaaccaaacctattcgaaaccccgctatactaacttttctaaccgaccgctcaccaancaaaaccgcgcccgacgatcgcgatccctccccgcgancgacttacgaaaaccctccccgctcttccttaaaacctccttctaattcccaaaacgaaaactttaacgtatataataaaaaaaaataaaaaacaatac

SEQ ID NO: 6145 - DNA, 507 bp, Artificial Sequence
  chemically treated genomic DNA (Homo sapiens) CpG-island No: 6145
gtttcgggtcgcggtcgttttttttacggtttcgtagttacgcgggatagcgcgggagcgtcgcgggaatcggacgttcggtttcgtttttcgtttcggattttttttcgtggtttcgggtcgaggttcgggtagtgattgtttttttttcgcgtaaagaggcggtaacgcggtagcgatttttttagggattagacgtttttttggggtcgcgaggaggacgcgtaggttttgtttgaggtattgacgtagcgggggcgatcgggcgggttgcggggacggcggggcggggtcgtttttttttttttcggtgggcgcggcgggttgagtcgggatgggcgtttcgtattcgggatgcgtcggtttgcgcgtggtcgtttttgtgggcgattgggagacgtggaggagagcgatttcggtcggtatgggggtggggatttttttgttacggggtttaggtcggatcggattaggtttttttttttcgtggggatcgggtttcggttt

SEQ ID NO: 6146 - DNA, 507 bp, Artificial Sequence
  chemically treated genomic DNA (Homo sapiens) CpG-island No: 6146
aaaccgaaacccgatccccacgaaaaaaaaaaacctaatccgatccgacctaaaccccgtaacaaaaaaatccccacccccataccgaccgaaatcgctctcctccacgtctcccaatcgcccacaaaaacgaccacgcgcaaaccgacgcatcccgaatacgaaacgcccatcccgactcaacccgccgcgcccaccgaaaaaaaaaaaaacgaccccgccccgccgtccccgcaacccgcccgatcgcccccgctacgtcaatacctcaaacaaaacctacgcgtcctcctcgcgaccccaaaaaaacgtctaatccctaaaaaaatcgctaccgcgttaccgcctctttacgcgaaaaaaaaacaatcactacccgaacctcgacccgaaaccacgaaaaaaaatccgaaacgaaaaacgaaaccgaacgtccgattcccgcgacgctcccgcgctatcccgcgtaactacgaaaccgtaaaaaaaacgaccgcgacccgaaac

SEQ ID NO: 6147 - DNA, 507 bp, Artificial Sequence
  chemically treated genomic DNA (Homo sapiens) CpG-island No: 6147
ggatcgaggttcggtttttacggaggggagggatttggttcggttcggtttggatttcgtaatagaggggtttttatttttatgtcgatcgaggtcgtttttttttacgttttttagtcgtttataaaggcggttacgcgtaggtcggcgtatttcgagtgcggggcgtttatttcgatttagttcgtcgcgtttatcgaggagaggagaggcgatttcgtttcgtcgttttcgtagttcgttcggtcgttttcgttgcgttagtgttttaggtagggtttgcgcgtttttttcgcgattttaaaggaacgtttggtttttagaagggtcgttgtcgcgttatcgtttttttgcgcggggaagaggtagttattgttcgaatttcggttcgaagttacgagagggagttcggggcggggagcggggtcgggcgttcgattttcgcggcgttttcgcgttgtttcgcgtggttgcgggatcgtggggagggcggtcgcggttcggagt

SEQ ID NO: 6148 - DNA, 507 bp, Artificial Sequence
  chemically treated genomic DNA (Homo sapiens) CpG-island No: 6148
actccgaaccgcgaccgccctccccacgatcccgcaaccacgcgaaacaacgcgaaaacgccgcgaaaatcgaacgcccgaccccgctccccgccccgaactccctctcgtaacttcgaaccgaaattcgaacaataactacctcttccccgcgcaaaaaaacgataacgcgacaacgacccttctaaaaaccaaacgttcctttaaaatcgcgaaaaaaacgcgcaaaccctacctaaaacactaacgcaacgaaaacgaccgaacgaactacgaaaacgacgaaacgaaatcgcctctcctctcctcgataaacgcgacgaactaaatcgaaataaacgccccgcactcgaaatacgccgacctacgcgtaaccgcctttataaacgactaaaaaacgtaaaaaaaaacgacctcgatcgacataaaaataaaaacccctctattacgaaatccaaaccgaaccgaaccaaatccctcccctccgtaaaaaccgaacctcgatcc

SEQ ID NO: 6149 - DNA, 565 bp, Artificial Sequence
  chemically treated genomic DNA (Homo sapiens) CpG-island No: 6149
ggttcggtcgacgatagtttttcggtaggggttcggggtagatcggcgtttttagtttaggttttcggacgtttgtttgcgggcggaggcgcggagaggttgcggcgtcgggattcgcggacggcgttgaggaggcggttcgggcgggcgcggtatttatcgttatatcgttggttgtttttcggagtttttttcgtcggtttcgagtggggttttgttcgttcggacgttggggttttttcgtgggttttttcgtgggtttcgtgggtttcgttggcgtttcgcggcgttttacgttttcgttcgttcggtttttagtttttataattcgtagtttttcgagaggtggcggggaaggtggcggggaaggggtcggtgttttttttcgtttcgatttgtttttatgtggttttacggattgttcgtttgtattatacgtacgaggtatttcgagatattttcgaatgttagattttaggggttagtgtgagggggttcgtatgggtgttcggtttttttacggttttcgtgtgtcgggcgttgtatacgttggggttttcgggcg

SEQ ID NO: 6150 - DNA, 565 bp, Artificial Sequence
  chemically treated genomic DNA (Homo sapiens) CpG-island No: 6150
cgcccgaaaaccccaacgtatacaacgcccgacacacgaaaaccgtaaaaaaaccgaacacccatacgaaccccctcacactaacccctaaaatctaacattcgaaaatatctcgaaatacctcgtacgtataatacaaacgaacaatccgtaaaaccacataaaaacaaatcgaaacgaaaaaaaacaccgaccccttccccgccaccttccccgccacctctcgaaaaactacgaattataaaaactaaaaaccgaacgaacgaaaacgtaaaacgccgcgaaacgccaacgaaacccacgaaacccacgaaaaaacccacgaaaaaaccccaacgtccgaacgaacaaaaccccactcgaaaccgacgaaaaaaactccgaaaaacaaccaacgatataacgataaataccgcgcccgcccgaaccgcctcctcaacgccgtccgcgaatcccgacgccgcaacctctccgcgcctccgcccgcaaacaaacgtccgaaaacctaaactaaaaacgccgatctaccccgaacccctaccgaaaaactatcgtcgaccgaacc

SEQ ID NO: 6151 - DNA, 565 bp, Artificial Sequence
  chemically treated genomic DNA (Homo sapiens) CpG-island No: 6151
cgttcgggagttttagcgtatataacgttcgatatacgggaatcgtgggaagatcgaatatttatacgggtttttttatattggtttttggggtttaatattcgagggtgtttcgggatgtttcgtacgtgtggtatagacgaataattcgtggggttatatgggagtagatcgggacgggaggaagtatcgatttttttttcgttatttttttcgttatttttcggagggttacgggttataagggttggaggtcgagcggacgggagcgtggagcgtcgcggagcgttaacggagtttacggagtttacggaggagtttacggaggagttttagcgttcgaacgggtagaattttattcgaggtcgacgaagagagtttcgagaagtagttaacgatgtgacggtgagtgtcgcgttcgttcgagtcgtttttttaacgtcgttcgcgggtttcggcgtcgtagttttttcgcgttttcgttcgtaagtaggcgttcgaggatttggattgggggcgtcgatttgtttcgggtttttatcgaggggttgtcgtcggtcgggtt

SEQ ID NO: 6152 - DNA, 565 bp, Artificial Sequence
  chemically treated genomic DNA (Homo sapiens) CpG-island No: 6152
aacccgaccgacgacaacccctcgataaaaacccgaaacaaatcgacgcccccaatccaaatcctcgaacgcctacttacgaacgaaaacgcgaaaaaactacgacgccgaaacccgcgaacgacgttaaaaaaacgactcgaacgaacgcgacactcaccgtcacatcgttaactacttctcgaaactctcttcgtcgacctcgaataaaattctacccgttcgaacgctaaaactcctccgtaaactcctccgtaaactccgtaaactccgttaacgctccgcgacgctccacgctcccgtccgctcgacctccaacccttataacccgtaaccctccgaaaaataacgaaaaaaataacgaaaaaaaaatcgatacttcctcccgtcccgatctactcccatataaccccacgaattattcgtctataccacacgtacgaaacatcccgaaacaccctcgaatattaaaccccaaaaaccaatataaaaaaacccgtataaatattcgatcttcccacgattcccgtatatcgaacgttatatacgctaaaactcccgaacg

SEQ ID NO: 6153 - DNA, 568 bp, Artificial Sequence
  chemically treated genomic DNA (Homo sapiens) CpG-island No: 6153
tagagcgagggttcgtattatcgcgttttcggaattcgcgtgatttttgtttttgtcgcgtttttatttgagtgataggtttgttttagagtttcgtagatttttaagtttggtttttattttgcgtggagagaacgttcgggtttggcggagagacgagaaaatcgaggttttcggaggtagataaggattttgttaaaatcggacgtcgcggcggtggtagaattcgattttgggatttgtcgcggagttcgagtttgaaggcgagggtttcgtaggttgtgaacgaagttggaggcgttttaggaagtttcgattttattcgcgtcgagttgttttttttttagatttgtttcgcgttgtaggttcgcgagggattcgggggtttttacgtttggggtcggaattcgattttttagtgaggtattaaggttcgcgttttttcgttttggttttcggtcgtttttttcgttttttttgtattttgggtttttcgtttttcgaggaaggttacgagaatcggtttaacgtttgcgtattttgaagttttttttttttttaaaaaaat

SEQ ID NO: 6154 - DNA, 568 bp, Artificial Sequence
  chemically treated genomic DNA (Homo sapiens) CpG-island No: 6154
atttttttaaaaaaaaaaaaaacttcaaaatacgcaaacgttaaaccgattctcgtaaccttcctcgaaaaacgaaaaacccaaaatacaaaaaaaacgaaaaaaacgaccgaaaaccaaaacgaaaaaacgcgaaccttaatacctcactaaaaaatcgaattccgaccccaaacgtaaaaacccccgaatccctcgcgaacctacaacgcgaaacaaatctaaaaaaaaaacaactcgacgcgaataaaatcgaaacttcctaaaacgcctccaacttcgttcacaacctacgaaaccctcgccttcaaactcgaactccgcgacaaatcccaaaatcgaattctaccaccgccgcgacgtccgattttaacaaaatccttatctacctccgaaaacctcgattttctcgtctctccgccaaacccgaacgttctctccacgcaaaataaaaaccaaacttaaaaatctacgaaactctaaaacaaacctatcactcaaataaaaacgcgacaaaaacaaaaatcacgcgaattccgaaaacgcgataatacgaaccctcgctcta

SEQ ID NO: 6155 - DNA, 568 bp, Artificial Sequence
  chemically treated genomic DNA (Homo sapiens) CpG-island No: 6155
atttttttaagaaaaaaaaaaattttaaagtgcgtaaacgttgggtcggttttcgtgatttttttcgggagacgaggggtttagagtgtagggggaacgggagggacggtcgggaattagggcggagaaacgcgggttttggtgttttattggggggtcggatttcgattttaggcgtaggaattttcgggtttttcgcgggtttgtagcgcgaggtagatttggggagggggtagttcggcgcgggtggggtcggggttttttggggcgtttttagtttcgtttataatttgcggaattttcgtttttaagttcgggtttcgcggtaaattttagggtcgaattttgttatcgtcgcggcgttcggttttggtagagtttttgtttgttttcgggagtttcggttttttcgttttttcgttaagttcgggcgttttttttacgtagggtgagggttaggtttagaggtttgcggagttttgaaataagtttgttatttagataggagcgcggtaggaataggggttacgcgggtttcggaagcgcgatgatgcggattttcgttttg

SEQ ID NO: 6156 - DNA, 568 bp, Artificial Sequence
  chemically treated genomic DNA (Homo sapiens) CpG-island No: 6156
caaaacgaaaatccgcatcatcgcgcttccgaaacccgcgtaacccctattcctaccgcgctcctatctaaataacaaacttatttcaaaactccgcaaacctctaaacctaaccctcaccctacgtaaaaaaaacgcccgaacttaacgaaaaaacgaaaaaaccgaaactcccgaaaacaaacaaaaactctaccaaaaccgaacgccgcgacgataacaaaattcgaccctaaaatttaccgcgaaacccgaacttaaaaacgaaaattccgcaaattataaacgaaactaaaaacgccccaaaaaaccccgaccccacccgcgccgaactaccccctccccaaatctacctcgcgctacaaacccgcgaaaaacccgaaaattcctacgcctaaaatcgaaatccgaccccccaataaaacaccaaaacccgcgtttctccgccctaattcccgaccgtccctcccgttccccctacactctaaacccctcgtctcccgaaaaaaatcacgaaaaccgacccaacgtttacgcactttaaaatttttttttttcttaaaaaaat

SEQ ID NO: 6157 - DNA, 694 bp, Artificial Sequence
  chemically treated genomic DNA (Homo sapiens) CpG-island No: 6157
  unsure (569)
aatttgggggtgaaaacggttatcgttacgcgcggatcgttgatttttgtttagagtttttcggcgaatgttagttataacgagtattagtatgttattgtgtaggttcgcgttgtcgggtttatcgataaggtgtattcgtttatcgtgggcgataaagtataaaagggtatatcgtttttcgatttgattatttttgattgggtggaagcgtagagtgagtatttattgttgcgcgaaatcggcggtacggcgatttagattgaaggtatttttgagcggttgcgattggcgggaatgtcggaggcggatattcgtcgtttgatcgttacgtaaaaaatttagattcgttttacgtttaaagcgtttattgatggcgtgattatcgcgtttgatttgcgcgcgggaatgaatatcgttaaagataacgtggtagcgaaaatttagggtatggattcggtgtgggttattgttgcgatttcggagtttatcgtttggttggtgaaagatgtttcgtagtttatttttatcgttttcgcgcgatcggataaaatatttattattcgtanatggacgttgttatttggcgtggatgtcgcgatcgtacgttgtattgcgtttggagtcgataacgcgacgagcgttaaaatcggtatgagtttatgtgttttaaagaatattttttgtattttat

SEQ ID NO: 6158 - DNA, 694 bp, Artificial Sequence
  chemically treated genomic DNA (Homo sapiens) CpG-island No: 6158
  unsure (126)
ataaaatacaaaaaatattctttaaaacacataaactcataccgattttaacgctcgtcgcgttatcgactccaaacgcaatacaacgtacgatcgcgacatccacgccaaataacaacgtccatntacgaataataaatattttatccgatcgcgcgaaaacgataaaaataaactacgaaacatctttcaccaaccaaacgataaactccgaaatcgcaacaataacccacaccgaatccataccctaaattttcgctaccacgttatctttaacgatattcattcccgcgcgcaaatcaaacgcgataatcacgccatcaataaacgctttaaacgtaaaacgaatctaaattttttacgtaacgatcaaacgacgaatatccgcctccgacattcccgccaatcgcaaccgctcaaaaataccttcaatctaaatcgccgtaccgccgatttcgcgcaacaataaatactcactctacgcttccacccaatcaaaaataatcaaatcgaaaaacgatatacccttttatactttatcgcccacgataaacgaatacaccttatcgataaacccgacaacgcgaacctacacaataacatactaatactcgttataactaacattcgccgaaaaactctaaacaaaaatcaacgatccgcgcgtaacgataaccgttttcacccccaaatt

SEQ ID NO: 6159 - DNA, 694 bp, Artificial Sequence
  chemically treated genomic DNA (Homo sapiens) CpG-island No: 6159
  unsure (126)
gtgaggtatagaggatgttttttagagtatatgggtttatgtcggttttagcgttcgtcgcgttgtcgattttagacgtagtgtagcgtgcggtcgcggtatttacgttaggtagtagcgtttatntgcggatggtgagtgttttattcggtcgcgcgggagcggtgagggtaaattgcgaggtattttttattagttaggcgatagatttcgggatcgtagtagtgatttatatcgggtttatattttgaattttcgttattacgttatttttggcgatatttattttcgcgcgtagattaaacgcggtgattacgttattaatgggcgttttgagcgtaaagcgagtttggattttttgcgtggcgattaggcggcgaatattcgttttcggtattttcgttagtcgtagtcgtttaagaatgtttttagtttgggtcgtcgtatcgtcggtttcgcgtagtagtaaatatttattttgcgtttttatttagttaggaatggttaggtcgagaagcggtgtgtttttttgtattttatcgtttacggtaagcggatatattttgtcgataaattcggtagcgcgagtttgtataatggtatattgatattcgttgtaattgatattcgtcgggaaattttgggtaaaagttagcggttcgcgcgtgacggtagtcgtttttatttttagatt

SEQ ID NO: 6160 - DNA, 694 bp, Artificial Sequence
  chemically treated genomic DNA (Homo sapiens) CpG-island No: 6160
  unsure (569)
aatctaaaaataaaaacgactaccgtcacgcgcgaaccgctaacttttacccaaaatttcccgacgaatatcaattacaacgaatatcaatataccattatacaaactcgcgctaccgaatttatcgacaaaatatatccgcttaccgtaaacgataaaatacaaaaaaacacaccgcttctcgacctaaccattcctaactaaataaaaacgcaaaataaatatttactactacgcgaaaccgacgatacgacgacccaaactaaaaacattcttaaacgactacgactaacgaaaataccgaaaacgaatattcgccgcctaatcgccacgcaaaaaatccaaactcgctttacgctcaaaacgcccattaataacgtaatcaccgcgtttaatctacgcgcgaaaataaatatcgccaaaaataacgtaataacgaaaattcaaaatataaacccgatataaatcactactacgatcccgaaatctatcgcctaactaataaaaaatacctcgcaatttaccctcaccgctcccgcgcgaccgaataaaacactcaccatccgcanataaacgctactacctaacgtaaataccgcgaccgcacgctacactacgtctaaaatcgacaacgcgacgaacgctaaaaccgacataaacccatatactctaaaaaacatcctctatacctcac

SEQ ID NO: 6161 - DNA, 882 bp, Artificial Sequence
  chemically treated genomic DNA (Homo sapiens) CpG-island No: 6161
  unsure (206)
agggttgagttagtatcgcgtatacgatagtcgtggatagttaattgtcgtgaaagatacgtagggttatgaaacgcggtatgaatataatatcgtcggtgatttgatcgtcgttattgtttcggacggtagtagaaacgggatatagtacgatgcgtggggaaaggtcgttcgtattacgtagggcggttttgacgcgtagtatnggaatacgattgttgtcggacgggttattcgtttgattagtgaaaacggtagttatattatttttcgttacgatgtatttgatcggttgatataggaaatcggttttgacggtcgtatatagcgttattattacgatttgatcggtaaatttattcgtagcgaggatgagggtttggttatttattggtattatgacgaagtagatcgttttacgtatcgtatcgtgaagggtgaaatcgtagagcggtggtagtatgacgaacgtggttggttgatagatattagttatattagcgaagggtatcgggtggcggtgtattataggtatgatgagaaaggtcggttgatcggtgagcgttagacggtgtattattcgtagacggaagtattgttttggtagtatgagattagatatgcgtataacgcgtaggggttggcgaatcgttgtatatcggatagtttgttcgtcgtggaatggttgatttacggtagcggttatttggtaggtatgaaattcggcgatatatcgttggtggagtatattcgcgatcgtttgtatcgggaaacgttgcgtagtttcggtcgttatgaatttattatcgtttatatttttgtcgggtagttatagagttagtatttgaatagtttgttgatttataggtatgtaaatttcgt

SEQ ID NO: 6162 - DNA, 882 bp, Artificial Sequence
  chemically treated genomic DNA (Homo sapiens) CpG-island No: 6162
  unsure (677)
acgaaatttacatacctataaatcaacaaactattcaaatactaactctataactacccgacaaaaatataaacgataataaattcataacgaccgaaactacgcaacgtttcccgatacaaacgatcgcgaatatactccaccaacgatatatcgccgaatttcatacctaccaaataaccgctaccgtaaatcaaccattccacgacgaacaaactatccgatatacaacgattcgccaacccctacgcgttatacgcatatctaatctcatactaccaaaacaatacttccgtctacgaataatacaccgtctaacgctcaccgatcaaccgacctttctcatcatacctataatacaccgccacccgatacccttcgctaatataactaatatctatcaaccaaccacgttcgtcatactaccaccgctctacgatttcacccttcacgatacgatacgtaaaacgatctacttcgtcataataccaataaataaccaaaccctcatcctcgctacgaataaatttaccgatcaaatcgtaataataacgctatatacgaccgtcaaaaccgatttcctatatcaaccgatcaaatacatcgtaacgaaaaataatataactaccgttttcactaatcaaacgaataacccgtccgacaacaatcgtattccnatactacgcgtcaaaaccgccctacgtaatacgaacgacctttccccacgcatcgtactatatcccgtttctactaccgtccgaaacaataacgacgatcaaatcaccgacgatattatattcataccgcgtttcataaccctacgtatctttcacgacaattaactatccacgactatcgtatacgcgatactaactcaaccct

SEQ ID NO: 6163 - DNA, 882 bp, Artificial Sequence
  chemically treated genomic DNA (Homo sapiens) CpG-island No: 6163
  unsure (677)
gcgaagtttgtatgtttgtaggttagtaggttgtttaggtgttggttttgtaattgttcggtaggggtataagcggtggtgagtttataacggtcgaagttgcgtagcgtttttcggtgtaggcggtcgcgggtgtattttattagcggtgtgtcgtcgagttttatgtttgttaggtaatcgttgtcgtaggttagttattttacggcgggtaggttgttcggtatatagcggttcgttagtttttgcgcgttgtacgtatgtttggttttatgttgttagagtagtgttttcgtttgcgggtgatgtatcgtttgacgtttatcggttagtcggttttttttattatatttgtaatgtatcgttattcggtgtttttcgttgatatggttgatgtttgttagttagttacgttcgttatattgttatcgttttgcggttttattttttacggtgcggtgcgtgaggcggtttgtttcgttatagtgttagtgggtgattagatttttattttcgttgcggataagtttgtcggttaggtcgtggtgataacgttgtgtgcggtcgttaaagtcggttttttgtattagtcggttaagtatatcgtaacggaaggtggtgtggttgtcgtttttattggttaggcggatgattcgttcggtagtagtcgtattttnatattgcgcgttagggtcgttttgcgtggtacggacggtttttttttacgtatcgtattgtgtttcgtttttgttgtcgttcggggtaatgacggcggttaggttatcggcgatgttgtatttatatcgcgttttatggttttgcgtgttttttacggtaattaattgtttacggttgtcgtatgcgcggtattgatttagtttt

SEQ ID NO: 6164 - DNA, 882 bp, Artificial Sequence
  chemically treated genomic DNA (Homo sapiens) CpG-island No: 6164
  unsure (206)
aaaactaaatcaataccgcgcatacgacaaccgtaaacaattaattaccgtaaaaaacacgcaaaaccataaaacgcgatataaatacaacatcgccgataacctaaccgccgtcattaccccgaacgacaacaaaaacgaaacacaatacgatacgtaaaaaaaaaccgtccgtaccacgcaaaacgaccctaacgcgcaatatnaaaatacgactactaccgaacgaatcatccgcctaaccaataaaaacgacaaccacaccaccttccgttacgatatacttaaccgactaatacaaaaaaccgactttaacgaccgcacacaacgttatcaccacgacctaaccgacaaacttatccgcaacgaaaataaaaatctaatcacccactaacactataacgaaacaaaccgcctcacgcaccgcaccgtaaaaaataaaaccgcaaaacgataacaatataacgaacgtaactaactaacaaacatcaaccatatcaacgaaaaacaccgaataacgatacattacaaatataataaaaaaaaccgactaaccgataaacgtcaaacgatacatcacccgcaaacgaaaacactactctaacaacataaaaccaaacatacgtacaacgcgcaaaaactaacgaaccgctatataccgaacaacctacccgccgtaaaataactaacctacgacaacgattacctaacaaacataaaactcgacgacacaccgctaataaaatacacccgcgaccgcctacaccgaaaaacgctacgcaacttcgaccgttataaactcaccaccgcttatacccctaccgaacaattacaaaaccaacacctaaacaacctactaacctacaaacatacaaacttcgc

SEQ ID NO: 6165 - DNA, 726 bp, Artificial Sequence
  chemically treated genomic DNA (Homo sapiens) CpG-island No: 6165
tggtggcgcgtatgtcgtatgttgtaagtagatcgtgttagaaatgatcgttatgttagatatttgtttttgtgaatatattttttacggttattgcggtgtgttgtgcgagtatggttcgataacgatcgattttggaaaatttaggtaagtaagtcgtggttgtagttgttgtaggtgtagattttatcgtttttttcgtcgcgatggacggttaggtataggcgattcgttaggcgttggacgttgcgggatttaaagatacggcgattatgtcgtattcgattaagttcgttttttttttttatggttcgtttcgtgaagttgtcggaagcgtattaaaaggcgatcgtaaaagttattagatgaatttaatgaatcgtcgtgaggcgattcgtgaattattgttggatgaagtttagggcgtagattgtttgatggttagatttgttggagcgtatttcgatatcgtgcgtgattggcgtggacgtattggattgttcgtggcgtatattaggtgaatcgtgggtatgcggtgatttagttttcgcgttgttttcgtgtttgtaggtttttatttttgtcgaatcgcgatttgtgttggcgatagtgagtgttcggcggtatgggttcgtaatttgcggtgattttggcggtaattttgttggtggtgtcgcgcgagttgatgcgtgattttaacgaatatagtatgttaatgttcggtgg

SEQ ID NO: 6166 - DNA, 726 bp, Artificial Sequence
  chemically treated genomic DNA (Homo sapiens) CpG-island No: 6166
ccaccgaacattaacatactatattcgttaaaatcacgcatcaactcgcgcgacaccaccaacaaaattaccgccaaaatcaccgcaaattacgaacccataccgccgaacactcactatcgccaacacaaatcgcgattcgacaaaaataaaaacctacaaacacgaaaacaacgcgaaaactaaatcaccgcatacccacgattcacctaatatacgccacgaacaatccaatacgtccacgccaatcacgcacgatatcgaaatacgctccaacaaatctaaccatcaaacaatctacgccctaaacttcatccaacaataattcacgaatcgcctcacgacgattcattaaattcatctaataacttttacgatcgccttttaatacgcttccgacaacttcacgaaacgaaccataaaaaaaaaaaacgaacttaatcgaatacgacataatcgccgtatctttaaatcccgcaacgtccaacgcctaacgaatcgcctatacctaaccgtccatcgcgacgaaaaaaacgataaaatctacacctacaacaactacaaccacgacttacttacctaaattttccaaaatcgatcgttatcgaaccatactcgcacaacacaccgcaataaccgtaaaaaatatattcacaaaaacaaatatctaacataacgatcatttctaacacgatctacttacaacatacgacatacgcgccacca

SEQ ID NO: 6167 - DNA, 726 bp, Artificial Sequence
  chemically treated genomic DNA (Homo sapiens) CpG-island No: 6167
ttatcgagtattaatatgttgtattcgttgaaattacgtattaattcgcgcgatattattagtaaaattgtcgttagaattatcgtaaattgcgagtttatatcgtcgagtatttattatcgttagtataaatcgcgattcggtaaaggtgaagatttgtaaatacgagagtagcgcgggaattaaattatcgtatatttacggtttatttgatatgcgttacgggtaatttagtacgtttacgttagttacgtacgatgtcgaggtacgttttagtaggtttaattattaggtagtttgcgttttgggttttatttagtagtgatttacgaatcgttttacgacggtttattgggtttatttgatagtttttgcggtcgttttttaatgcgttttcggtagttttacggaacgggttataaaaggaggaggcgaatttggtcgaatacgatataatcgtcgtatttttaaatttcgtagcgtttagcgtttgacgaatcgtttgtatttggtcgtttatcgcggcggaaggggcgatgaagtttgtatttgtagtagttgtaattacggtttgtttgtttaaattttttagagtcggtcgttgtcgagttatgttcgtatagtatatcgtagtgatcgtgagaagtgtatttatagaagtaggtgtttgatataacgattatttttggtacggtttgtttgtagtatgcgatatacgcgttatta

SEQ ID NO: 6168 - DNA, 726 bp, Artificial Sequence
  chemically treated genomic DNA (Homo sapiens) CpG-island No: 6168
taataacgcgtatatcgcatactacaaacaaaccgtaccaaaaataatcgttatatcaaacacctacttctataaatacacttctcacgatcactacgatatactatacgaacataactcgacaacgaccgactctaaaaaatttaaacaaacaaaccgtaattacaactactacaaatacaaacttcatcgccccttccgccgcgataaacgaccaaatacaaacgattcgtcaaacgctaaacgctacgaaatttaaaaatacgacgattatatcgtattcgaccaaattcgcctcctccttttataacccgttccgtaaaactaccgaaaacgcattaaaaaacgaccgcaaaaactatcaaataaacccaataaaccgtcgtaaaacgattcgtaaatcactactaaataaaacccaaaacgcaaactacctaataattaaacctactaaaacgtacctcgacatcgtacgtaactaacgtaaacgtactaaattacccgtaacgcatatcaaataaaccgtaaatatacgataatttaattcccgcgctactctcgtatttacaaatcttcacctttaccgaatcgcgatttatactaacgataataaatactcgacgatataaactcgcaatttacgataattctaacgacaattttactaataatatcgcgcgaattaatacgtaatttcaacgaatacaacatattaatactcgataa

SEQ ID NO: 6169 - DNA, 607 bp, Artificial Sequence
  chemically treated genomic DNA (Homo sapiens) CpG-island No: 6169
acgttgttgttcgggacgcggttcggggttggtgggaataggggcgtttttttgcgcgtttttttttttagcgttttatttttcggcggcggcggggaaagttttttcgaaagcgtgaagggggattggaggaggtttttatttttttttgtgcgggtggttggggtcggatcgaggcggcgggggtcgcgggattgggggtttttcgttgagtcgagaggagcgcgataaaggatgcgtttcgtcggggttatagttttcgcggtttaattttgcgcgcggcgttcgcgtttttggggagttcgttcgttgcgttgagaatttaggcgttcgggttgggagaggggtcgggagcgttcgtaggtggcgttggttcggatttttcgattttaggaagggatttcggagttttttggaggcggcgggcggtcgtgtcgttttagggaatcgcgttgttcgcggaaatttcgcgcgttttcgcggatgtttttcgttttagtttttagcgcgcggggttcggggttttgcgaggtttttttttttttcgcggtgttttttaagttgggttaaggcgggttttttttttttttttttttgtcgttttttt

SEQ ID NO: 6170 - DNA, 607 bp, Artificial Sequence
  chemically treated genomic DNA (Homo sapiens) CpG-island No: 6170
aaaaaaacgacaaaaaaaaaaaaaaaaaaaacccgccttaacccaacttaaaaaacaccgcgaaaaaaaaaaaaacctcgcaaaaccccgaaccccgcgcgctaaaaactaaaacgaaaaacatccgcgaaaacgcgcgaaatttccgcgaacaacgcgattccctaaaacgacacgaccgcccgccgcctccaaaaaactccgaaatcccttcctaaaatcgaaaaatccgaaccaacgccacctacgaacgctcccgacccctctcccaacccgaacgcctaaattctcaacgcaacgaacgaactccccaaaaacgcgaacgccgcgcgcaaaattaaaccgcgaaaactataaccccgacgaaacgcatcctttatcgcgctcctctcgactcaacgaaaaacccccaatcccgcgacccccgccgcctcgatccgaccccaaccacccgcacaaaaaaaaataaaaacctcctccaatcccccttcacgctttcgaaaaaactttccccgccgccgccgaaaaataaaacgctaaaaaaaaaaacgcgcaaaaaaacgcccctattcccaccaaccccgaaccgcgtcccgaacaacaacgt

SEQ ID NO: 6171 - DNA, 607 bp, Artificial Sequence
  chemically treated genomic DNA (Homo sapiens) CpG-island No: 6171
aaggaggcgatagaggagggaggaagagaagttcgttttagtttagtttgggaagtatcgcgggggaaggggggatttcgtagggtttcgaatttcgcgcgttgggggttagggcgaggggtattcgcggaggcgcgcggagttttcgcgggtagcgcggttttttggagcgatacggtcgttcgtcgtttttaggaagtttcgggatttttttttggggtcgggagattcgggttagcgttatttgcggacgttttcggttttttttttagttcggacgtttgggtttttagcgtagcgggcgggttttttaggggcgcgggcgtcgcgcgtaaagttgggtcgcggagattgtgatttcggcgggacgtattttttgtcgcgtttttttcggtttagcggggagtttttagtttcgcggttttcgtcgtttcgattcggttttagttattcgtataaagggaaataaaaattttttttaatttttttttacgttttcggagagatttttttcgtcgtcgtcgggaggtgggacgttggggaggggggcgcgtaggaggacgtttttgtttttattagtttcgggtcgcgtttcgggtagtagcgt

SEQ ID NO: 6172 - DNA, 607 bp, Artificial Sequence
  chemically treated genomic DNA (Homo sapiens) CpG-island No: 6172
acgctactacccgaaacgcgacccgaaactaataaaaacaaaaacgtcctcctacgcgcccccctccccaacgtcccacctcccgacgacgacgaaaaaaatctctccgaaaacgtaaaaaaaaattaaaaaaaatttttatttccctttatacgaataactaaaaccgaatcgaaacgacgaaaaccgcgaaactaaaaactccccgctaaaccgaaaaaaacgcgacaaaaaatacgtcccgccgaaatcacaatctccgcgacccaactttacgcgcgacgcccgcgcccctaaaaaacccgcccgctacgctaaaaacccaaacgtccgaactaaaaaaaaaaccgaaaacgtccgcaaataacgctaacccgaatctcccgaccccaaaaaaaaatcccgaaacttcctaaaaacgacgaacgaccgtatcgctccaaaaaaccgcgctacccgcgaaaactccgcgcgcctccgcgaatacccctcgccctaacccccaacgcgcgaaattcgaaaccctacgaaatccccccttcccccgcgatacttcccaaactaaactaaaacgaacttctcttcctccctcctctatcgcctcctt

SEQ ID NO: 6173 - DNA, 557 bp, Artificial Sequence
  chemically treated genomic DNA (Homo sapiens) CpG-island No: 6173
gatgaatcgatttcggtaacggcgttcgtgttcgttagcgtgttagtcgataagaatcgaaagttagcgtattcgcgaaattattattgtttagttgtcggaaggttagtttatcgaaagtttggtcgtatagttgatggaaaaagtgatgaaggaaaaatagtcgttggagtagggcgtaatgtagtcgagttttaaatcggtgatcggtaaaggcggtattaaagtgattgatggtagtagcgttaagtttggtcgtttcgacggcgtagagtcgtattgcgtgggtttgattgattttgtgatcggagacgacggtagtagtatggtcgtcggttttatgtagtgggagaacgtatttttttcgtggattttgaattacgacgaaatcgatatggtgttggaaggggagttgtatgttcgttacgaaggttaaattatgatcgttaaagtaggcgacgtgatgtttatttcgaaaggttttagtatcgaatttggtacgatatttagcgtgaaatttttgtatgtcgtttggttcgttaattggtaatttttat

SEQ ID NO: 6174 - DNA, 557 bp, Artificial Sequence
  chemically treated genomic DNA (Homo sapiens) CpG-island No: 6174
ataaaaattaccaattaacgaaccaaacgacatacaaaaatttcacgctaaatatcgtaccaaattcgatactaaaacctttcgaaataaacatcacgtcgcctactttaacgatcataatttaaccttcgtaacgaacatacaactccccttccaacaccatatcgatttcgtcgtaattcaaaatccacgaaaaaaatacgttctcccactacataaaaccgacgaccatactactaccgtcgtctccgatcacaaaatcaatcaaacccacgcaatacgactctacgccgtcgaaacgaccaaacttaacgctactaccatcaatcactttaataccgcctttaccgatcaccgatttaaaactcgactacattacgccctactccaacgactatttttccttcatcactttttccatcaactatacgaccaaactttcgataaactaaccttccgacaactaaacaataataatttcgcgaatacgctaactttcgattcttatcgactaacacgctaacgaacacgaacgccgttaccgaaatcgattcatc

SEQ ID NO: 6175 - DNA, 557 bp, Artificial Sequence
  chemically treated genomic DNA (Homo sapiens) CpG-island No: 6175
atagggattgttagttagcgggttaggcgatatataggaattttacgttggatgtcgtattaaattcgatgttggagtttttcgggataaatattacgtcgtttgttttggcgattatggtttggttttcgtggcgaatatgtagttttttttttagtattatgtcgatttcgtcgtagtttagggtttacgggaagaatgcgtttttttattgtataaaatcggcggttatgttgttgtcgtcgttttcggttataagattagttaagtttacgtaatgcggttttgcgtcgtcgaaacgattaaatttgacgttattgttattaattattttgatgtcgtttttgtcggttatcgatttgaagttcggttgtattgcgttttgttttagcgattgttttttttttattattttttttattagttgtgcgattaggttttcggtaaattggtttttcggtagttgggtaatgatggtttcgcggatgcgttggttttcggtttttgtcggttggtacgttggcgggtacggacgtcgttatcgggatcgatttatt

SEQ ID NO: 6176 - DNA, 557 bp, Artificial Sequence
  chemically treated genomic DNA (Homo sapiens) CpG-island No: 6176
aataaatcgatcccgataacgacgtccgtacccgccaacgtaccaaccgacaaaaaccgaaaaccaacgcatccgcgaaaccatcattacccaactaccgaaaaaccaatttaccgaaaacctaatcgcacaactaataaaaaaaataataaaaaaaaaacaatcgctaaaacaaaacgcaatacaaccgaacttcaaatcgataaccgacaaaaacgacatcaaaataattaataacaataacgtcaaatttaatcgtttcgacgacgcaaaaccgcattacgtaaacttaactaatcttataaccgaaaacgacgacaacaacataaccgccgattttatacaataaaaaaacgcattcttcccgtaaaccctaaactacgacgaaatcgacataatactaaaaaaaaaactacatattcgccacgaaaaccaaaccataatcgccaaaacaaacgacgtaatatttatcccgaaaaactccaacatcgaatttaatacgacatccaacgtaaaattcctatatatcgcctaacccgctaactaacaatccctat

SEQ ID NO: 6177 - DNA, 1044 bp, Artificial Sequence
  chemically treated genomic DNA (Homo sapiens) CpG-island No: 6177
ggtttacgtgtaagtggttgttttcgttgtattgtacgcggaaaaagtgttttcgatcgtttttttttatacgaagtcgcgtttatttattatcgagcggtttttgtttttcgtagttgttcgtagttgtttacgttttttaagtaatgtttaggtttacgtcgtagttttatgggatgatgttttcgtggcgggggtttttagtagtgagtcgttttcgagttagtagcgtacgttcgtagttttagtacgtttattatatagcgggcggtttcgcgtagcgcgcgtaggtataggggggcgtttagcgtttttcgtagaggtaggcgggcgtgtcgtttatacggtttcgaagtagcgcgtggtttttttgttgtagtcgaattatttcgtcgttcgtttttttagtttattaggcggatgtttagcgcgcggagtaggtcgttcgtcgagcgcgtttttcgcgtttagttttttagcgcgcgtgggcgtggttagcgggggttggcgcgtcgcggcgaaggttaagtttagtagcgtatcgtttagtcgcgaagggcggtttgtagaaagaggttggtgtttacggtcgggttaggggcgtcgagaggttgaagaggtcgcgggcgcgtaggatattatagtattttcgtttagggcgtcgtagcggggcgcggcgggggttcgttatagcgggcggtttattttcgtaagttgacgtttagggttaggtattggtagggttggtcgtggtaatcggggcggttattagacgtgcgtttatgcgcggagcgtttttattatgcgttttagtaaggtatgtgttttagtcgcgttttattaagtattaaggttataaattcggtggttatcgtagtttcgggcgcgaggttgcgggtggtcggtttatggtcggtttggagtagcgtcgacgtacgttaggggatgcgggggtaggtgatatgattacgatatcgattttcggtatttagggtgaaagttatttcgttatggttggttaagattttgatagtttagtatttt

SEQ ID NO: 6178 - DNA, 1044 bp, Artificial Sequence
  chemically treated genomic DNA (Homo sapiens) CpG-island No: 6178
aaaatactaaactatcaaaatcttaaccaaccataacgaaataactttcaccctaaataccgaaaatcgatatcgtaatcatatcacctacccccgcatcccctaacgtacgtcgacgctactccaaaccgaccataaaccgaccacccgcaacctcgcgcccgaaactacgataaccaccgaatttataaccttaatacttaataaaacgcgactaaaacacataccttactaaaacgcataataaaaacgctccgcgcataaacgcacgtctaataaccgccccgattaccacgaccaaccctaccaatacctaaccctaaacgtcaacttacgaaaataaaccgcccgctataacgaacccccgccgcgccccgctacgacgccctaaacgaaaatactataatatcctacgcgcccgcgacctcttcaacctctcgacgcccctaacccgaccgtaaacaccaacctctttctacaaaccgcccttcgcgactaaacgatacgctactaaacttaaccttcgccgcgacgcgccaacccccgctaaccacgcccacgcgcgctaaaaaactaaacgcgaaaaacgcgctcgacgaacgacctactccgcgcgctaaacatccgcctaataaactaaaaaaacgaacgacgaaataattcgactacaacaaaaaaaccacgcgctacttcgaaaccgtataaacgacacgcccgcctacctctacgaaaaacgctaaacgcccccctatacctacgcgcgctacgcgaaaccgcccgctatataataaacgtactaaaactacgaacgtacgctactaactcgaaaacgactcactactaaaaacccccgccacgaaaacatcatcccataaaactacgacgtaaacctaaacattacttaaaaaacgtaaacaactacgaacaactacgaaaaacaaaaaccgctcgataataaataaacgcgacttcgtataaaaaaaaacgatcgaaaacactttttccgcgtacaatacaacgaaaacaaccacttacacgtaaacc

SEQ ID NO: 6179 - DNA, 1044 bp, Artificial Sequence
  chemically treated genomic DNA (Homo sapiens) CpG-island No: 6179
gggatgttgaattattaggattttagttagttatggcggaatggtttttattttgggtatcgagaatcgatgtcgtaattatgttatttgttttcgtattttttaacgtgcgtcggcgttgttttaggtcggttatggatcggttattcgtagtttcgcgttcgagattacggtggttatcgagtttgtggttttagtatttgatggggcgcggttgaggtatatgttttgttggagcgtatggtggaggcgtttcgcgtataagcgtacgtttggtggtcgtttcggttgttacggttaattttgttagtgtttggttttgaacgttagtttgcgagagtggatcgttcgttatggcgagttttcgtcgcgtttcgttgcgacgttttggacggagatgttgtggtgttttgcgcgttcgcgatttttttaatttttcggcgtttttggttcggtcgtgggtattagtttttttttgtagatcgtttttcgcggttgggcggtgcgttgttggatttgattttcgtcgcggcgcgttagttttcgttggttacgtttacgcgcgttggaaggttgagcgcgagggacgcgttcggcgggcggtttgtttcgcgcgttgggtattcgtttagtgagttgggaaggcgggcggcggagtggttcggttgtaataaggagattacgcgttgtttcggaatcgtgtgggcgatacgttcgtttatttttacgaggagcgttggacgtttttttgtgtttgcgcgcgttgcgcgagatcgttcgttatgtggtgggcgtgttggggttgcgggcgtgcgttattggttcgagggcggtttattgttgggggttttcgttacggggatattattttatgggattacgacgtggatttgggtattatttggaggacgtgggtaattgcgagtagttgcggggggtagaggtcgttcggtggtggatgagcgcggtttcgtatgggagaaggcggtcgagggtatttttttcgcgtgtagtatagcgaaagtaattatttgtacgtggatt

SEQ ID NO: 6180 - DNA, 1044 bp, Artificial Sequence
  chemically treated genomic DNA (Homo sapiens) CpG-island No: 6180
aatccacgtacaaataattactttcgctatactacacgcgaaaaaaataccctcgaccgccttctcccatacgaaaccgcgctcatccaccaccgaacgacctctaccccccgcaactactcgcaattacccacgtcctccaaataatacccaaatccacgtcgtaatcccataaaataatatccccgtaacgaaaacccccaacaataaaccgccctcgaaccaataacgcacgcccgcaaccccaacacgcccaccacataacgaacgatctcgcgcaacgcgcgcaaacacaaaaaaacgtccaacgctcctcgtaaaaataaacgaacgtatcgcccacacgattccgaaacaacgcgtaatctccttattacaaccgaaccactccgccgcccgccttcccaactcactaaacgaatacccaacgcgcgaaacaaaccgcccgccgaacgcgtccctcgcgctcaaccttccaacgcgcgtaaacgtaaccaacgaaaactaacgcgccgcgacgaaaatcaaatccaacaacgcaccgcccaaccgcgaaaaacgatctacaaaaaaaaactaatacccacgaccgaaccaaaaacgccgaaaaattaaaaaaatcgcgaacgcgcaaaacaccacaacatctccgtccaaaacgtcgcaacgaaacgcgacgaaaactcgccataacgaacgatccactctcgcaaactaacgttcaaaaccaaacactaacaaaattaaccgtaacaaccgaaacgaccaccaaacgtacgcttatacgcgaaacgcctccaccatacgctccaacaaaacatatacctcaaccgcgccccatcaaatactaaaaccacaaactcgataaccaccgtaatctcgaacgcgaaactacgaataaccgatccataaccgacctaaaacaacgccgacgcacgttaaaaaatacgaaaacaaataacataattacgacatcgattctcgatacccaaaataaaaaccattccgccataactaactaaaatcctaataattcaacatccc

SEQ ID NO: 6181 - DNA, 833 bp, Artificial Sequence
  chemically treated genomic DNA (Homo sapiens) CpG-island No: 6181
tcgggtttttcggtttcgttttatttcggagtgtttttaggatatttttcggacgttttttattcgtttttcgggatcgtcgcggttttttttcgttttttcgtcgtcgtttcggcggttattgttttaagatggcgtgttgtgcgtgttgtgcgcgggtgacggtcgggtcggtgtcgggtttgggttggggtgtcggaggttcgggatagcgtttatttgtaattcggcgcgttcggttttttagcgggtttttcggtttcgaagcgcgtttattcgtgttggataaagggtaggatttcggtaggtttaggggtttcgggttcgtcgtgggttcggggttgttttcgcgtcgttttttttatttgtcgggttcggttcgggggtaggggcggagacggggtcgttttagtggggttagggttcgcgtttgagtcgagcggacggcggaggaggcggcggttgcgatcgcggtagtcgttcgtttttttattatgaggtttcggggtcggtttgcgcgttcgttgtgtttcgcgcgtttgtacgtcgcgttaatatttttttttttttttcgtcgtaattatcgcgcgcgcgtcggcgggggatagtaggaaggggggtcggcggcgagcgcgagtttcgttattcgggtttatatcgaagggtagcgtgttcgcgcgggggtcggcgggtggagatcgcgtttcgaggagggcgagggagatttaggtttcgcgcgacgtttttttcgttggagtgagattgaggaaggggtcgttttttgttttttttttttatttcgttttagagaaagagttttattttttatatat

SEQ ID NO: 6182 - DNA, 833 bp, Artificial Sequence
  chemically treated genomic DNA (Homo sapiens) CpG-island No: 6182
atatataaaaaataaaactctttctctaaaacgaaataaaaaaaaaaaacaaaaaacgaccccttcctcaatctcactccaacgaaaaaaacgtcgcgcgaaacctaaatctccctcgccctcctcgaaacgcgatctccacccgccgacccccgcgcgaacacgctacccttcgatataaacccgaataacgaaactcgcgctcgccgccgaccccccttcctactatcccccgccgacgcgcgcgcgataattacgacgaaaaaaaaaaaaaaatattaacgcgacgtacaaacgcgcgaaacacaacgaacgcgcaaaccgaccccgaaacctcataataaaaaaacgaacgactaccgcgatcgcaaccgccgcctcctccgccgtccgctcgactcaaacgcgaaccctaaccccactaaaacgaccccgtctccgcccctacccccgaaccgaacccgacaaataaaaaaaacgacgcgaaaacaaccccgaacccacgacgaacccgaaacccctaaacctaccgaaatcctaccctttatccaacacgaataaacgcgcttcgaaaccgaaaaacccgctaaaaaaccgaacgcgccgaattacaaataaacgctatcccgaacctccgacaccccaacccaaacccgacaccgacccgaccgtcacccgcgcacaacacgcacaacacgccatcttaaaacaataaccgccgaaacgacgacgaaaaaacgaaaaaaaaccgcgacgatcccgaaaaacgaataaaaaacgtccgaaaaatatcctaaaaacactccgaaataaaacgaaaccgaaaaacccga

SEQ ID NO: 6183 - DNA, 833 bp, Artificial Sequence
  chemically treated genomic DNA (Homo sapiens) CpG-island No: 6183
gtgtataaagaataaggttttttttttggggcgaagtgggagaggggggtagaaagcggttttttttttagttttattttagcgagggggacgtcgcgcggggtttgggtttttttcgtttttttcggggcgcgatttttattcgtcggttttcgcgcgggtacgttatttttcggtgtagattcgggtggcgaggttcgcgttcgtcgtcggtttttttttttattgtttttcgtcggcgcgcgcgcggtggttgcggcgggggaggggggggggtgttggcgcggcgtgtaggcgcgcgaggtatagcgggcgcgtaggtcggtttcggggttttatgatggaggagcgagcggttgtcgcggtcgtagtcgtcgtttttttcgtcgttcgttcggtttaggcgcgggttttggttttattggggcggtttcgttttcgtttttgttttcgggtcgggttcggtaggtaagggaggcggcgcggaggtagtttcgggtttacggcgggttcggagtttttgagtttgtcgggattttgttttttatttagtacgagtgggcgcgtttcgaagtcgagaagttcgttgggaggtcgagcgcgtcgagttataggtgagcgttgtttcggattttcgatattttaatttaggttcggtatcggttcggtcgttattcgcgtatagtacgtatagtacgttattttggagtaatggtcgtcgggacgacggcgggggggcgggaggggatcgcgacggtttcggagggcgagtgagggacgttcgaggggtgttttgagggtatttcggggtgggacgggatcgggaggttcga

SEQ ID NO: 6184 - DNA, 833 bp, Artificial Sequence
  chemically treated genomic DNA (Homo sapiens) CpG-island No: 6184
tcgaacctcccgatcccgtcccaccccgaaataccctcaaaacacccctcgaacgtccctcactcgccctccgaaaccgtcgcgatcccctcccgcccccccgccgtcgtcccgacgaccattactccaaaataacgtactatacgtactatacgcgaataacgaccgaaccgataccgaacctaaattaaaatatcgaaaatccgaaacaacgctcacctataactcgacgcgctcgacctcccaacgaacttctcgacttcgaaacgcgcccactcgtactaaataaaaaacaaaatcccgacaaactcaaaaactccgaacccgccgtaaacccgaaactacctccgcgccgcctcccttacctaccgaacccgacccgaaaacaaaaacgaaaacgaaaccgccccaataaaaccaaaacccgcgcctaaaccgaacgaacgacgaaaaaaacgacgactacgaccgcgacaaccgctcgctcctccatcataaaaccccgaaaccgacctacgcgcccgctatacctcgcgcgcctacacgccgcgccaacacccccccccctcccccgccgcaaccaccgcgcgcgcgccgacgaaaaacaataaaaaaaaaaaccgacgacgaacgcgaacctcgccacccgaatctacaccgaaaaataacgtacccgcgcgaaaaccgacgaataaaaatcgcgccccgaaaaaaacgaaaaaaacccaaaccccgcgcgacgtccccctcgctaaaataaaactaaaaaaaaaaccgctttctacccccctctcccacttcgccccaaaaaaaaaaccttattctttatacac

SEQ ID NO: 6185 - DNA, 615 bp, Artificial Sequence
  chemically treated genomic DNA (Homo sapiens) CpG-island No: 6185
cgtagcggcggagttttcgttaacgggggtttggcgttggtttttatcgaggattaaggcgcggcgtaggcggttattgcggttttcgggattaggtgcgtcgttgttttcgagtaatttgtttgtgttgttgatagtggtggtcgtggtggtcggcgtggcgtgggattgggggtgtcgggggtcgggggtgcgttggcgttgggttcggacgtttgagcgttttcgttttttcgggcgagttgttgttgcgtttgttgcgatgattattttgtcgttggtggtgtgtagtttgatcggcggcgtcgtcgtttggatttcggcgcgttcggtcgtttgggcgtttgggcgttgttttttttttggttattacgttgttggcgtcggcgttcggagtgggtttggcgcggttttgtagtcgggcgtcgttttcgtcgttattaacgttttcgtgggatcgcgggtagtgtcgaaaatgtttttagtaaggaggtgttcgattcgttttggattttgcgaggttagttttcgttttttcgggaggtggggaagagtttacggatggcgggagtggttacgtggataggacggggttttggggttttggagtagaga

SEQ ID NO: 6186 - DNA, 615 bp, Artificial Sequence
  chemically treated genomic DNA (Homo sapiens) CpG-island No: 6186
tctctactccaaaaccccaaaaccccgtcctatccacgtaaccactcccgccatccgtaaactcttccccacctcccgaaaaaacgaaaactaacctcgcaaaatccaaaacgaatcgaacacctccttactaaaaacattttcgacactacccgcgatcccacgaaaacgttaataacgacgaaaacgacgcccgactacaaaaccgcgccaaacccactccgaacgccgacgccaacaacgtaataaccaaaaaaaaaacaacgcccaaacgcccaaacgaccgaacgcgccgaaatccaaacgacgacgccgccgatcaaactacacaccaccaacgacaaaataatcatcgcaacaaacgcaacaacaactcgcccgaaaaaacgaaaacgctcaaacgtccgaacccaacgccaacgcacccccgacccccgacacccccaatcccacgccacgccgaccaccacgaccaccactatcaacaacacaaacaaattactcgaaaacaacgacgcacctaatcccgaaaaccgcaataaccgcctacgccgcgccttaatcctcgataaaaaccaacgccaaacccccgttaacgaaaactccgccgctacg

SEQ ID NO: 6187 - DNA, 615 bp, Artificial Sequence
  chemically treated genomic DNA (Homo sapiens) CpG-island No: 6187
tttttgttttagggttttaaagtttcgttttgtttacgtgattattttcgttattcgtaaatttttttttatttttcgggggagcgggagttgatttcgtaagatttagaacgaatcgagtatttttttgttgggggtattttcggtattgttcgcggttttacggaggcgttgatggcggcggaggcggcgttcggttgtagagtcgcgttaagtttatttcgagcgtcgacgttagtagcgtggtgattaggaaaagagtagcgtttaggcgtttagacggtcgagcgcgtcggggtttaggcggcggcgtcgtcgattaagttgtatattattagcggtaagatgattatcgtagtagacgtagtagtagttcgttcgggaagacgaaggcgtttaagcgttcgggtttaacgttagcgtattttcggttttcgatatttttagttttacgttacgtcggttattacggttattattgttagtagtataagtaggttgttcgaaggtagcggcgtatttggtttcgggaatcgtagtagtcgtttgcgtcgcgttttggttttcgatggaggttagcgttaggttttcgttggcgggggtttcgtcgttgcg

SEQ ID NO: 6188 - DNA, 615 bp, Artificial Sequence
  chemically treated genomic DNA (Homo sapiens) CpG-island No: 6188
cgcaacgacgaaacccccgccaacgaaaacctaacgctaacctccatcgaaaaccaaaacgcgacgcaaacgactactacgattcccgaaaccaaatacgccgctaccttcgaacaacctacttatactactaacaataataaccgtaataaccgacgtaacgtaaaactaaaaatatcgaaaaccgaaaatacgctaacgttaaacccgaacgcttaaacgccttcgtcttcccgaacgaactactactacgtctactacgataatcatcttaccgctaataatatacaacttaatcgacgacgccgccgcctaaaccccgacgcgctcgaccgtctaaacgcctaaacgctactcttttcctaatcaccacgctactaacgtcgacgctcgaaataaacttaacgcgactctacaaccgaacgccgcctccgccgccatcaacgcctccgtaaaaccgcgaacaataccgaaaatacccccaacaaaaaaatactcgattcgttctaaatcttacgaaatcaactcccgctcccccgaaaaataaaaaaaaatttacgaataacgaaaataatcacgtaaacaaaacgaaactttaaaaccctaaaacaaaaa

SEQ ID NO: 6189 - DNA, 517 bp, Artificial Sequence
  chemically treated genomic DNA (Homo sapiens) CpG-island No: 6189
aacgcgtcgcgcgaagatcgagttaagcgtatagtcggagatagtaatataaaggcgtaatcgataaattcgggggttcgacgttttcggtaggttcgagttttttatattagacgcggggggacgagggaatatatagttcgggggaaaacgtagaggcggtcgcggggggatttcgaattttaaaaagtcggaaacgtataaaattcgtagagtcggcgttttttaagcgttaatacgtacgacgggaggaatagggggagttagggtaaggcgggggcgggaaatcggaggaataattaggaaggggggcggttttcggaaacgacgagaagggaatttcgacgcgagggggtttattagttcggtatatcgcgttagatcgaaggggacgtaataatttcggggggagggaggtatttcgaaaggaacgatttcgggggaggtcgggaacgcgttcgtcggcgtaacgagttacgtatatagtttattttttagggtagaagatgtagttttt

SEQ ID NO: 6190 - DNA, 517 bp, Artificial Sequence
  chemically treated genomic DNA (Homo sapiens) CpG-island No: 6190
aaaaactacatcttctaccctaaaaaataaactatatacgtaactcgttacgccgacgaacgcgttcccgacctcccccgaaatcgttcctttcgaaatacctccctccccccgaaattattacgtccccttcgatctaacgcgatataccgaactaataaaccccctcgcgtcgaaattcccttctcgtcgtttccgaaaaccgccccccttcctaattattcctccgatttcccgcccccgccttaccctaactccccctattcctcccgtcgtacgtattaacgcttaaaaaacgccgactctacgaattttatacgtttccgactttttaaaattcgaaatccccccgcgaccgcctctacgttttcccccgaactatatattccctcgtccccccgcgtctaatataaaaaactcgaacctaccgaaaacgtcgaacccccgaatttatcgattacgcctttatattactatctccgactatacgcttaactcgatcttcgcgcgacgcgtt

SEQ ID NO: 6191 - DNA, 517 bp, Artificial Sequence
  chemically treated genomic DNA (Homo sapiens) CpG-island No: 6191
ggaggttgtattttttattttggggaatgggttgtgtgcgtggttcgttgcgtcggcgggcgcgttttcggtttttttcggggtcgtttttttcggggtgttttttttttttcggggttgttgcgtttttttcggtttggcgcggtgtgtcgggttggtgggttttttcgcgtcggggtttttttttcgtcgttttcgggggtcgtttttttttttggttgttttttcggtttttcgttttcgttttgttttggttttttttgtttttttcgtcgtgcgtgttggcgtttggggggcgtcggttttgcgggttttgtgcgttttcggttttttggggttcggggttttttcgcggtcgtttttgcgttttttttcgggttgtgtgttttttcgttttttcgcgtttggtgtggggggttcgggtttgtcgggggcgtcgggttttcgggtttgtcggttgcgtttttgtgttgttgttttcggttgtgcgtttggttcggttttcgcgcggcgcgtt

SEQ ID NO: 6192 - DNA, 517 bp, Artificial Sequence
  chemically treated genomic DNA (Homo sapiens) CpG-island No: 6192
aacgcgccgcgcgaaaaccgaaccaaacgcacaaccgaaaacaacaacacaaaaacgcaaccgacaaacccgaaaacccgacgcccccgacaaacccgaaccccccacaccaaacgcgaaaaaacgaaaaaacacacaacccgaaaaaaaacgcaaaaacgaccgcgaaaaaaccccgaaccccaaaaaaccgaaaacgcacaaaacccgcaaaaccgacgccccccaaacgccaacacgcacgacgaaaaaaacaaaaaaaaccaaaacaaaacgaaaacgaaaaaccgaaaaaacaaccaaaaaaaaaaacgacccccgaaaacgacgaaaaaaaaaccccgacgcgaaaaaacccaccaacccgacacaccgcgccaaaccgaaaaaaacgcaacaaccccgaaaaaaaaaaaacaccccgaaaaaaacgaccccgaaaaaaaccgaaaacgcgcccgccgacgcaacgaaccacgcacacaacccattccccaaaataaaaaatacaacctcc

SEQ ID NO: 6193 - DNA, 713 bp, Artificial Sequence
  chemically treated genomic DNA (Homo sapiens) CpG-island No: 6193
tttatttattattttttcgtgttttttattttttaattttttgtcgatattttttttttttttcgtatttttttttttttttttttttttttttttttcgttttttttatttattttttttatcgattttttttttttcgtcgcgtatttttttttcgttgtcgtttttagttttttttattttttttttttttttattttttttttttttattttttcgttttttcgttttttatatttcgatggttttattttacgtttatttttttttttttttcggttttgttttttttttttttcgtattatttttttgttttttttattttattttattttttttatttttttttattttttttatcgcgattttttatcggtcgttttttttgttttcgtattttttttttttattttttatcgtttttcgtgtttggcgattatttattcgcgttttttttgttacgttttatttttttttttttttttcgggtggggtgtttaaaagtcgtaatcgcggcgtttatagggttttgggggggttcgtttcggcgttgtttcgaaggtttttgttcggatgattttatttcgaacggagtaggttacgtttcgacgtcggatattttatacgtgttgtaaaagtttttttggtttacgtttttgtttttaggtaacgtagtagtagatattttggtttttttttattcgtttttcg

SEQ ID NO: 6194 - DNA, 713 bp, Artificial Sequence
  chemically treated genomic DNA (Homo sapiens) CpG-island No: 6194
cgaaaaacgaataaaaaaaaaccaaaatatctactactacgttacctaaaaacaaaaacgtaaaccaaaaaaacttttacaacacgtataaaatatccgacgtcgaaacgtaacctactccgttcgaaataaaatcatccgaacaaaaaccttcgaaacaacgccgaaacgaacccccccaaaaccctataaacgccgcgattacgacttttaaacaccccacccgaaaaaaaaaaaaaaaaataaaacgtaacaaaaaaaacgcgaataaataatcgccaaacacgaaaaacgataaaaaataaaaaaaaaaaatacgaaaacaaaaaaaacgaccgataaaaaatcgcgataaaaaaaataaaaaaaaataaaaaaaataaaataaaataaaaaaaacaaaaaaataatacgaaaaaaaaaaaaaacaaaaccgaaaaaaaaaaaaaaataaacgtaaaataaaaccatcgaaatataaaaaacgaaaaaacgaaaaaataaaaaaaaaaaaaataaaaaaaaaaaaaaaataaaaaaaactaaaaacgacaacgaaaaaaaaatacgcgacgaaaaaaaaaaaatcgataaaaaaaataaataaaaaaaacgaaaaaaaaaaaaaaaaaaaaaaaaaaaaaaatacgaaaaaaaaaaaaaatatcgacaaaaaattaaaaaataaaaaacacgaaaaaataataaataaa

SEQ ID NO: 6195 - DNA, 713 bp, Artificial Sequence
  chemically treated genomic DNA (Homo sapiens) CpG-island No: 6195
cggggagcgggtgagggggggttagggtgtttgttgttgcgttgtttgggggtaaggacgtgggttaagaaagtttttgtaatacgtgtgggatgttcggcgtcggggcgtgatttgtttcgttcggggtgagattattcgggtaaaagttttcggggtagcgtcgaagcgggtttttttaggattttatgggcgtcgcgattacggtttttggatattttattcgaggagggggagggagagtggggcgtaataaagagagcgcgggtgggtggtcgttaagtacgaggggcggtgaaggatggggggggggggtgcggggataaaaagagcggtcggtggggggtcgcggtaagaaaggtaggaggaaatagggagagtggggtgaggtaggggggataaagaggtggtgcggagagagaggggggtagggtcggaggggagggaagggtgggcgtggggtggggttatcgaggtatgggggacggaggggcgggagggtaagaggagggggggtagaaaagagaggggggtgggggggattaagggcggtagcggggaggaggtgcgcggcggggggggaggagtcgatagagggggtgggtgaagggaacgggaggggaggggaaggaaagggaggggaaagtgcgaagggagagggaggtgtcggtaggaggttagagaatggggggtacgggaggatagtaaatgga

SEQ ID NO: 6196 - DNA, 713 bp, Artificial Sequence
  chemically treated genomic DNA (Homo sapiens) CpG-island No: 6196
tccatttactatcctcccgtaccccccattctctaacctcctaccgacacctccctctcccttcgcactttcccctccctttccttcccctcccctcccgttcccttcacccaccccctctatcgactcctccccccccgccgcgcacctcctccccgctaccgcccttaatcccccccacccccctctcttttctaccccccctcctcttaccctcccgcccctccgtcccccatacctcgataaccccaccccacgcccacccttccctcccctccgaccctacccccctctctctccgcaccacctctttatcccccctacctcaccccactctccctatttcctcctacctttcttaccgcgaccccccaccgaccgctctttttatccccgcaccccccccccccatccttcaccgcccctcgtacttaacgaccacccacccgcgctctctttattacgccccactctccctccccctcctcgaataaaatatccaaaaaccgtaatcgcgacgcccataaaatcctaaaaaaacccgcttcgacgctaccccgaaaacttttacccgaataatctcaccccgaacgaaacaaatcacgccccgacgccgaacatcccacacgtattacaaaaactttcttaacccacgtccttacccccaaacaacgcaacaacaaacaccctaaccccccctcacccgctccccg

SEQ ID NO: 6197 - DNA, 590 bp, Artificial Sequence
  chemically treated genomic DNA (Homo sapiens) CpG-island No: 6197
gtacgttagtttcgcggatgtgttgttagtcgcggtcgtagcgtcggtcgtcgtcgttttcggtttgttgggtttcgtcgggttggttggcgtgggggtttttttcgtcgcgttgttcgttttttttggtttcgttttgttggttttttgttcggcgtttttttcgttggtttgtttcggttttttttttttttttttgggtttgggttttttttcggtcgttgttttcggcgttttggtcgtcgtggtcgtcggggttttttttgttgtcgtcgtcgtcgttttttttttggtatttttcgcgggcgtggtcggggtcgggtttgtcggtggggtcgtttcgtcgtcgttttcgtttttcggagttttggggttttttgcgttggtcgttgtcgttttcggttatttcggggtcggggcgggcggcggggcgggcggtgggggcggttcgttggtggtcgttgttgtcgcggtcggggcggtcgggggttttttgtcggcggtgttgttggcggttgtgtgtgttttggtgttggtggtgtttgcggtgtttgtgtttttagtaaatatttttttaaaattaaaaaatt

SEQ ID NO: 6198 - DNA, 590 bp, Artificial Sequence
  chemically treated genomic DNA (Homo sapiens) CpG-island No: 6198
aattttttaattttaaaaaaatatttactaaaaacacaaacaccgcaaacaccaccaacaccaaaacacacacaaccgccaacaacaccgccgacaaaaaacccccgaccgccccgaccgcgacaacaacgaccaccaacgaaccgcccccaccgcccgccccgccgcccgccccgaccccgaaataaccgaaaacgacaacgaccaacgcaaaaaaccccaaaactccgaaaaacgaaaacgacgacgaaacgaccccaccgacaaacccgaccccgaccacgcccgcgaaaaataccaaaaaaaaaacgacgacgacgacaacaaaaaaaaccccgacgaccacgacgaccaaaacgccgaaaacaacgaccgaaaaaaaacccaaacccaaaaaaaaaaaaaaaaaaccgaaacaaaccaacgaaaaaaacgccgaacaaaaaaccaacaaaacgaaaccaaaaaaaacgaacaacgcgacgaaaaaaacccccacgccaaccaacccgacgaaacccaacaaaccgaaaacgacgacgaccgacgctacgaccgcgactaacaacacatccgcgaaactaacgtac

SEQ ID NO: 6199 - DNA, 590 bp, Artificial Sequence
  chemically treated genomic DNA (Homo sapiens) CpG-island No: 6199
agttttttaattttaggaaggtatttattaggaatataggtatcgtaaatattattagtattaaggtatatatagtcgttagtaatatcgtcgataggaagttttcggtcgtttcggtcgcggtagtagcggttattagcgggtcgtttttatcgttcgtttcgtcgttcgtttcggtttcgaggtagtcgaaggcggtagcggttaacgtaaaggattttagggtttcgggaggcgggggcggcggcggggcggttttatcggtaggttcggtttcggttacgttcgcgaaggatgttaggaggaaggcggcggcggcggtagtagggaaggtttcggcggttacggcggttaggacgtcggaagtagcggtcgagaagaggtttaggtttagggagaaggagaagaagtcgaaataagttagcgagaaaagcgtcgagtagaaggttagtaggacggagttagaaaaggcgggtagcgcggcgggaaaggtttttacgttagttagttcggcggggtttagtaggtcggaggcggcggcggtcgacgttgcggtcgcggttggtagtatattcgcggggttggcgtat

SEQ ID NO: 6200 - DNA, 590 bp, Artificial Sequence
  chemically treated genomic DNA (Homo sapiens) CpG-island No: 6200
atacgccaaccccgcgaatatactaccaaccgcgaccgcaacgtcgaccgccgccgcctccgacctactaaaccccgccgaactaactaacgtaaaaacctttcccgccgcgctacccgccttttctaactccgtcctactaaccttctactcgacgcttttctcgctaacttatttcgacttcttctccttctccctaaacctaaacctcttctcgaccgctacttccgacgtcctaaccgccgtaaccgccgaaaccttccctactaccgccgccgccgccttcctcctaacatccttcgcgaacgtaaccgaaaccgaacctaccgataaaaccgccccgccgccgcccccgcctcccgaaaccctaaaatcctttacgttaaccgctaccgccttcgactacctcgaaaccgaaacgaacgacgaaacgaacgataaaaacgacccgctaataaccgctactaccgcgaccgaaacgaccgaaaacttcctatcgacgatattactaacgactatatataccttaatactaataatatttacgatacctatattcctaataaataccttcctaaaattaaaaaact

SEQ ID NO: 6201 - DNA, 717 bp, Artificial Sequence
  chemically treated genomic DNA (Homo sapiens) CpG-island No: 6201
agtgtcgttgttgttgtttttcggtggttatttttttagtcgtttcgtttttcggttcgggggatgttttgcgacggcgcggcgtgggcgttaggtttcgggatggggttcgcgggggtgggttatagagagtcgtaggggtcggttttgggtattgttggggtagggttttcgcgggagttggttcgcggaagttgcggacgtcgtcggtaagtagttcgtttagttgtcgttatttttttgatttatgtcggcgtttatattcgaggtatttgaagttcgaagaagttagtgttttgttcggttttcgtagagtatcgtggaatatttggcgagttattgttaggacgtcggcgtatatattgtcggaattataggggtattcggtgaagagttttagttcgaattcgtattttggaggacgggtagtagtatcgaaggcgaatattcgttttattagttcgtgattttttttgaagcgtatattgaacggggcgtaggcggatagcgttagtagttgttttcgtattgttttggggcgttcgtgttatttttttgttcggtttcgtatggtttcgtttagttttgttagatagttcgtatttttttgttgtttttttttttcgaaatcggagtcgaagaggggacgggtaggatttaagtcgggtgttagcgttaggtttcggttttttaggttagatattgtagttgttagta

SEQ ID NO: 6202 - DNA, 717 bp, Artificial Sequence
  chemically treated genomic DNA (Homo sapiens) CpG-island No: 6202
tactaacaactacaatatctaacctaaaaaaccgaaacctaacgctaacacccgacttaaatcctacccgtcccctcttcgactccgatttcgaaaaaaaaaaacaacaaaaaaatacgaactatctaacaaaactaaacgaaaccatacgaaaccgaacaaaaaaataacacgaacgccccaaaacaatacgaaaacaactactaacgctatccgcctacgccccgttcaatatacgcttcaaaaaaaatcacgaactaataaaacgaatattcgccttcgatactactacccgtcctccaaaatacgaattcgaactaaaactcttcaccgaatacccctataattccgacaatatatacgccgacgtcctaacaataactcgccaaatattccacgatactctacgaaaaccgaacaaaacactaacttcttcgaacttcaaatacctcgaatataaacgccgacataaatcaaaaaaataacgacaactaaacgaactacttaccgacgacgtccgcaacttccgcgaaccaactcccgcgaaaaccctaccccaacaatacccaaaaccgacccctacgactctctataacccacccccgcgaaccccatcccgaaacctaacgcccacgccgcgccgtcgcaaaacatcccccgaaccgaaaaacgaaacgactaaaaaaataaccaccgaaaaacaacaacaacgacact

SEQ ID NO: 6203 - DNA, 717 bp, Artificial Sequence
  chemically treated genomic DNA (Homo sapiens) CpG-island No: 6203
tgttggtagttgtagtgtttggtttgggaagtcgaggtttgacgttggtattcggtttgagttttgttcgtttttttttcggtttcgatttcgagaaagagaagtagtagaggaatgcggattgtttggtagaattgaacgaggttatgcgaggtcgggtagaggaatggtacgggcgttttaaagtagtgcgggaatagttattggcgttgttcgtttgcgtttcgtttaatgtgcgttttaagaaggattacgggttggtggggcgagtgttcgttttcgatgttattgttcgttttttaggatacgagttcgagttgaagttttttatcgaatatttttgtggtttcggtaatgtgtacgtcggcgttttggtagtggttcgttagatgttttacgatgttttgcgggagtcgggtaaggtattggttttttcgggttttaagtatttcgaatatgaacgtcggtatggattaggagaatggcggtagttgggcgagttgtttatcgacggcgttcgtagttttcgcgagttagttttcgcggaggttttgttttagtagtatttagagtcggtttttgcggttttttgtggtttattttcgcgagttttatttcggaatttggcgtttacgtcgcgtcgtcgtaaggtatttttcgagtcggagggcgaggcggttgggaagatgattatcgaggagtagtagtaacggtatt

SEQ ID NO: 6204 - DNA, 717 bp, Artificial Sequence
  chemically treated genomic DNA (Homo sapiens) CpG-island No: 6204
aataccgttactactactcctcgataatcatcttcccaaccgcctcgccctccgactcgaaaaataccttacgacgacgcgacgtaaacgccaaattccgaaataaaactcgcgaaaataaaccacaaaaaaccgcaaaaaccgactctaaatactactaaaacaaaacctccgcgaaaactaactcgcgaaaactacgaacgccgtcgataaacaactcgcccaactaccgccattctcctaatccataccgacgttcatattcgaaatacttaaaacccgaaaaaaccaataccttacccgactcccgcaaaacatcgtaaaacatctaacgaaccactaccaaaacgccgacgtacacattaccgaaaccacaaaaatattcgataaaaaacttcaactcgaactcgtatcctaaaaaacgaacaataacatcgaaaacgaacactcgccccaccaacccgtaatccttcttaaaacgcacattaaacgaaacgcaaacgaacaacgccaataactattcccgcactactttaaaacgcccgtaccattcctctacccgacctcgcataacctcgttcaattctaccaaacaatccgcattcctctactacttctctttctcgaaatcgaaaccgaaaaaaaaacgaacaaaactcaaaccgaataccaacgtcaaacctcgacttcccaaaccaaacactacaactaccaaca

SEQ ID NO: 6205 - DNA, 834 bp, Artificial Sequence
  chemically treated genomic DNA (Homo sapiens) CpG-island No: 6205
ggcgagcggttttcggggagtacgtggttgcgtttgagttggcgggcggtatcgatgagtagttcgatgcggttcgcgttttcgaagtttacgtagtcgcgatatacggtttcgttgaagttttatattatggtttacggtattttgggtaggtcgtataggtagtattattggcggcgggacgtttgtatagacgttatggttttagttcgcgcgtcgtttagttttcgcgttttatcggtcgtcgacgtgcgattcgcgtcgttaacgttcgattcgcgtttcggggatagcgcgagttacggttcggttttcggttcggttttttcgtcggatttaggttcggtttttttttttcgttttttgggttttaagtttttttgtttattttcgtttttttcgcgaaggtaggttgaggtacgtcggcgttttcgttcggttcgggtttcgagtcgaggcgtatagttcgggttttacgatgggtcgcgagcgtcgtcgtttcgggttttcgtcgttttcgtcgtcgtcgttgtaacggtcgtcgtcgtttttattttttttttttgttttagaggtcgtttcgtagggaaagttatataatacgtttgtaaagttttttgggaaacgtagtttcgtcggggtcggtttttaaagggaacggcgggtagacgcgggttgggggggttgtcgtttttgtcggcgtaaattttataatttttttcgtggggtcggagtttagcgcgtcgtaagatgttgggatataaaggtggtaggcgaggatgtaatataaatgattagagttatttcggatttagaaattgtgggggtgggtgg

SEQ ID NO: 6206 - DNA, 834 bp, Artificial Sequence
  chemically treated genomic DNA (Homo sapiens) CpG-island No: 6206
ccacccacccccacaatttctaaatccgaaataactctaatcatttatattacatcctcgcctaccacctttatatcccaacatcttacgacgcgctaaactccgaccccacgaaaaaaattataaaatttacgccgacaaaaacgacaacccccccaacccgcgtctacccgccgttccctttaaaaaccgaccccgacgaaactacgtttcccaaaaaactttacaaacgtattatataactttccctacgaaacgacctctaaaacaaaaaaaaaaaataaaaacgacgacgaccgttacaacgacgacgacgaaaacgacgaaaacccgaaacgacgacgctcgcgacccatcgtaaaacccgaactatacgcctcgactcgaaacccgaaccgaacgaaaacgccgacgtacctcaacctaccttcgcgaaaaaaacgaaaataaacaaaaaaacttaaaacccaaaaaacgaaaaaaaaaaaccgaacctaaatccgacgaaaaaaccgaaccgaaaaccgaaccgtaactcgcgctatccccgaaacgcgaatcgaacgttaacgacgcgaatcgcacgtcgacgaccgataaaacgcgaaaactaaacgacgcgcgaactaaaaccataacgtctatacaaacgtcccgccgccaataatactacctatacgacctacccaaaataccgtaaaccataatataaaacttcaacgaaaccgtatatcgcgactacgtaaacttcgaaaacgcgaaccgcatcgaactactcatcgataccgcccgccaactcaaacgcaaccacgtactccccgaaaaccgctcgcc

SEQ ID NO: 6207 - DNA, 834 bp, Artificial Sequence
  chemically treated genomic DNA (Homo sapiens) CpG-island No: 6207
ttatttatttttataatttttgaattcggagtagttttgattatttgtattgtattttcgtttattatttttgtgttttagtattttgcggcgcgttgaatttcggttttacggagaaggttgtaaggtttgcgtcggtagaggcgataatttttttagttcgcgtttgttcgtcgttttttttaagagtcggtttcggcgggattacgttttttagaaggttttgtaggcgtgttatgtaattttttttgcgaagcggtttttggggtagaagaaggaggtggaggcggcggcggtcgttgtagcggcggcggcgagagcggcgggagttcgaggcggcggcgttcgcggtttatcgtggggttcgagttgtgcgtttcggttcggagttcggatcgggcgggggcgtcgacgtgttttagtttgttttcgcgagggaggcgggagtgagtagaaaggtttagggtttagggggcggggaaggggggtcgggtttggattcggcggggaggtcgagtcggaggtcggatcgtggttcgcgttgttttcgggacgcggatcgaacgttggcggcgcggatcgtacgtcggcggtcggtggaacgcgggagttgggcggcgcgcggattggggttatggcgtttgtgtaggcgtttcgtcgttagtggtgttatttgtgcgatttgtttaagatgtcgtgggttatggtgtgggattttagcgaggtcgtgtgtcgcggttgcgtgaatttcgagggcgcggatcgtatcgaattgtttatcgatgtcgttcgttagtttaagcgtagttacgtgtttttcgagggtcgttcgtt

SEQ ID NO: 6208 - DNA, 834 bp, Artificial Sequence
  chemically treated genomic DNA (Homo sapiens) CpG-island No: 6208
aacgaacgaccctcgaaaaacacgtaactacgcttaaactaacgaacgacatcgataaacaattcgatacgatccgcgccctcgaaattcacgcaaccgcgacacacgacctcgctaaaatcccacaccataacccacgacatcttaaacaaatcgcacaaataacaccactaacgacgaaacgcctacacaaacgccataaccccaatccgcgcgccgcccaactcccgcgttccaccgaccgccgacgtacgatccgcgccgccaacgttcgatccgcgtcccgaaaacaacgcgaaccacgatccgacctccgactcgacctccccgccgaatccaaacccgaccccccttccccgccccctaaaccctaaacctttctactcactcccgcctccctcgcgaaaacaaactaaaacacgtcgacgcccccgcccgatccgaactccgaaccgaaacgcacaactcgaaccccacgataaaccgcgaacgccgccgcctcgaactcccgccgctctcgccgccgccgctacaacgaccgccgccgcctccacctccttcttctaccccaaaaaccgcttcgcaaaaaaaattacataacacgcctacaaaaccttctaaaaaacgtaatcccgccgaaaccgactcttaaaaaaaacgacgaacaaacgcgaactaaaaaaattatcgcctctaccgacgcaaaccttacaaccttctccgtaaaaccgaaattcaacgcgccgcaaaatactaaaacacaaaaataataaacgaaaatacaatacaaataatcaaaactactccgaattcaaaaattataaaaataaataa

SEQ ID NO: 6209 - DNA, 531 bp, Artificial Sequence
  chemically treated genomic DNA (Homo sapiens) CpG-island No: 6209
ttgcgtcgagattcggtatcgggtataattcgaggtacgcgtatgcgcgcgatggagtttttgcgcgtgcgtcgttgtggttttaggaagttggggtattcgcgcggcgttaacgttgcggttgcgtagttgcggtttgttggtggggttcggcggagcgtagttttgcgtttgcgttgtgttggggtaggtgggaatgaaattttggcggtaagggtattggggtcgattggttttgggcgcgtttgcgttttggtatgcggggcggtcggaggcggggtcgaaagaggggagggagggaggcggggggtgggaataggtcgtagaagttcgagttttgatttatcggcggttgcggcggagtcggtgagtgattcgtggttcgattcggtttttatttttcgcgattttcgttttttttgtcgtttttcgtagttttcgttgtttttttgtgatacgggattttcgttatttttagagttttttttaatttttggtaatttttagagtttttataattttcgtagattt

SEQ ID NO: 6210 - DNA, 531 bp, Artificial Sequence
  chemically treated genomic DNA (Homo sapiens) CpG-island No: 6210
aaatctacgaaaattataaaaactctaaaaattaccaaaaattaaaaaaaactctaaaaataacgaaaatcccgtatcacaaaaaaacaacgaaaactacgaaaaacgacaaaaaaaacgaaaatcgcgaaaaataaaaaccgaatcgaaccacgaatcactcaccgactccgccgcaaccgccgataaatcaaaactcgaacttctacgacctattcccaccccccgcctccctccctcccctctttcgaccccgcctccgaccgccccgcataccaaaacgcaaacgcgcccaaaaccaatcgaccccaatacccttaccgccaaaatttcattcccacctaccccaacacaacgcaaacgcaaaactacgctccgccgaaccccaccaacaaaccgcaactacgcaaccgcaacgttaacgccgcgcgaataccccaacttcctaaaaccacaacgacgcacgcgcaaaaactccatcgcgcgcatacgcgtacctcgaattatacccgataccgaatctcgacgcaa

SEQ ID NO: 6211 - DNA, 531 bp, Artificial Sequence
  chemically treated genomic DNA (Homo sapiens) CpG-island No: 6211
gggtttgcgaggattgtgggggttttggggattgttagaaattaaggggagttttggaaataacgggggtttcgtattataaggagataacggaggttacgggggacggtagggagagcgaaggtcgcggagggtggggatcgagtcgggttacgggttatttatcggtttcgtcgtagtcgtcggtgggttagggttcgggtttttgcggtttgtttttatttttcgttttttttttttttttttttcggtttcgttttcggtcgtttcgtatgttaaggcgtaggcgcgtttagggttagtcggttttaatgtttttatcgttagggttttatttttatttattttagtatagcgtaggcgtagaattgcgtttcgtcgagttttattagtaggtcgtaattgcgtagtcgtaacgttagcgtcgcgcgggtattttagttttttggggttataacggcgtacgcgtaaaaattttatcgcgcgtatgcgcgtgtttcgggttgtattcggtatcgggtttcggcgtag

SEQ ID NO: 6212 - DNA, 531 bp, Artificial Sequence
  chemically treated genomic DNA (Homo sapiens) CpG-island No: 6212
ctacgccgaaacccgataccgaatacaacccgaaacacgcgcatacgcgcgataaaatttttacgcgtacgccgttataaccccaaaaaactaaaatacccgcgcgacgctaacgttacgactacgcaattacgacctactaataaaactcgacgaaacgcaattctacgcctacgctatactaaaataaataaaaataaaaccctaacgataaaaacattaaaaccgactaaccctaaacgcgcctacgccttaacatacgaaacgaccgaaaacgaaaccgaaaaaaaaaaaaaaaaaaaacgaaaaataaaaacaaaccgcaaaaacccgaaccctaacccaccgacgactacgacgaaaccgataaataacccgtaacccgactcgatccccaccctccgcgaccttcgctctccctaccgtcccccgtaacctccgttatctccttataatacgaaacccccgttatttccaaaactccccttaatttctaacaatccccaaaacccccacaatcctcgcaaaccc

SEQ ID NO: 6213 - DNA, 531 bp, Artificial Sequence
  chemically treated genomic DNA (Homo sapiens) CpG-island No: 6213
gtcggtcggtttcggtcggtttgtagcgtatgttagcgggtttatcgtttcgcgtcgcgtcgtcgttcgtttcggtttcgagggtagtcgtttcggtttgcggttaacgaagaggattttagggtttcgggaggcgggtgcggcggcgggggtggtttttagggttggtcggtgtttcggttgggcggcgttagttagttaggggtcgtgtcgtcgggggttggtcgttggttttgttttcggcgcgtggcgttaggtagcgggagttggcgggtttgttcggttcgcgttcgcgtttgttggtcgggtttagcgtcgcggcggtaggttttgtgcgcgcgttggggggggtttttaaaggggttcggcggcggttggtgttatgtgatgggtgttcggcgggcgcgggtcgggggtgtcgtgtggcgcgtggcggtcgtggcgtcgcgtgttgagcggtgtttttttgttggggtcgttattttttattttcggtgtttttataagaagaggagatatattagggaagat

SEQ ID NO: 6214 - DNA, 531 bp, Artificial Sequence
  chemically treated genomic DNA (Homo sapiens) CpG-island No: 6214
atcttccctaatatatctcctcttcttataaaaacaccgaaaataaaaaataacgaccccaacaaaaaaacaccgctcaacacgcgacgccacgaccgccacgcgccacacgacacccccgacccgcgcccgccgaacacccatcacataacaccaaccgccgccgaacccctttaaaaaccccccccaacgcgcgcacaaaacctaccgccgcgacgctaaacccgaccaacaaacgcgaacgcgaaccgaacaaacccgccaactcccgctacctaacgccacgcgccgaaaacaaaaccaacgaccaacccccgacgacacgacccctaactaactaacgccgcccaaccgaaacaccgaccaaccctaaaaaccacccccgccgccgcacccgcctcccgaaaccctaaaatcctcttcgttaaccgcaaaccgaaacgactaccctcgaaaccgaaacgaacgacgacgcgacgcgaaacgataaacccgctaacatacgctacaaaccgaccgaaaccgaccgac

SEQ ID NO: 6215 - DNA, 531 bp, Artificial Sequence
  chemically treated genomic DNA (Homo sapiens) CpG-island No: 6215
gttttttttggtgtgttttttttttttataaagatatcgggaatgaggaatgacggttttagtagaggggtatcgtttagtacgcggcgttacggtcgttacgcgttatacgatattttcgattcgcgttcgtcgggtatttattatatggtattagtcgtcgtcgggtttttttggaagttttttttagcgcgcgtataaggtttatcgtcgcggcgttggattcgattagtaggcgcggacgcgggtcgaataaattcgttagttttcgttgtttggcgttacgcgtcgggggtaaaattagcgattagttttcgacggtacgatttttagttggttaacgtcgtttaatcggggtatcggttaattttgagggttattttcgtcgtcgtattcgtttttcggagttttggggtttttttcgttggtcgtaagtcgaaacggttattttcgggatcgggacgggcggcggcgcggcgcggagcggtgggttcgttggtatgcgttgtaggtcggtcggggtcggtcggt

SEQ ID NO: 6216 - DNA, 531 bp, Artificial Sequence
  chemically treated genomic DNA (Homo sapiens) CpG-island No: 6216
accgaccgaccccgaccgacctacaacgcataccaacgaacccaccgctccgcgccgcgccgccgcccgtcccgatcccgaaaataaccgtttcgacttacgaccaacgaaaaaaaccccaaaactccgaaaaacgaatacgacgacgaaaataaccctcaaaattaaccgataccccgattaaacgacgttaaccaactaaaaatcgtaccgtcgaaaactaatcgctaattttacccccgacgcgtaacgccaaacaacgaaaactaacgaatttattcgacccgcgtccgcgcctactaatcgaatccaacgccgcgacgataaaccttatacgcgcgctaaaaaaaacttccaaaaaaacccgacgacgactaataccatataataaatacccgacgaacgcgaatcgaaaatatcgtataacgcgtaacgaccgtaacgccgcgtactaaacgatacccctctactaaaaccgtcattcctcattcccgatatctttataaaaaaaaaaaacacaccaaaaaaaac

SEQ ID NO: 6217 - DNA, 724 bp, Artificial Sequence
  chemically treated genomic DNA (Homo sapiens) CpG-island No: 6217
tttcggttttttcggcgttttttttttcgtttaggtttttcgcgggtattttaggtttcggttcgagttttggtaggtcgttgtttgtcgttattatttgttcggggattagtttttttcgtcgtcgttggttattcgggttttgttcgttttttttaaagggaaatcgttgtttttatcgtcgttcgggtcgttttgtttcgtttgcggtcgtatagtttttttatgtttcgcgttttaaaggaatgaattcggtcgcgttgttcgttacgtttcgttattcgagttgtttttcgtttttcgtcggttcggacgtgtagcggttgtcgcgtttgttgcgacggtatggtgtattgggttgcgagtcgggggtcggataagtttggagcgttatattattgattgtgtcgttacgttattgggtcgggggagggcggcggtcgcggttagtaacgagtttagggcgcgggcgcgggatagtcgcggtcggggttggggcgacggggagggggcgggggtttgaattattgggaggacgtgtttgcgtgtaatcgcgttgggggggcggggcgttgcgagggggcggatttgtgtttatcgaagcggttcgaggtagttcgagttttgagatttcgttggttttttttttttcggattttcggggtgtttttttagggaatttttcggttttattttagagatttttagaagggaagtgtattag

SEQ ID NO: 6218 - DNA, 724 bp, Artificial Sequence
  chemically treated genomic DNA (Homo sapiens) CpG-island No: 6218
ctaatacacttcccttctaaaaatctctaaaataaaaccgaaaaattccctaaaaaaacaccccgaaaatccgaaaaaaaaaaaaccaacgaaatctcaaaactcgaactacctcgaaccgcttcgataaacacaaatccgccccctcgcaacgccccgcccccccaacgcgattacacgcaaacacgtcctcccaataattcaaacccccgccccctccccgtcgccccaaccccgaccgcgactatcccgcgcccgcgccctaaactcgttactaaccgcgaccgccgccctcccccgacccaataacgtaacgacacaatcaataatataacgctccaaacttatccgacccccgactcgcaacccaatacaccataccgtcgcaacaaacgcgacaaccgctacacgtccgaaccgacgaaaaacgaaaaacaactcgaataacgaaacgtaacgaacaacgcgaccgaattcattcctttaaaacgcgaaacataaaaaaactatacgaccgcaaacgaaacaaaacgacccgaacgacgataaaaacaacgatttccctttaaaaaaaacgaacaaaacccgaataaccaacgacgacgaaaaaaactaatccccgaacaaataataacgacaaacaacgacctaccaaaactcgaaccgaaacctaaaatacccgcgaaaaacctaaacgaaaaaaaaaacgccgaaaaaaccgaaa

SEQ ID NO: 6219 - DNA, 724 bp, Artificial Sequence
  chemically treated genomic DNA (Homo sapiens) CpG-island No: 6219
ttaatatattttttttttgggggtttttgagatgggatcgaaagattttttaagggagtatttcgaaaattcgagaggagaagagttagcgagattttagaattcgagttgtttcgggtcgtttcgatgggtatagattcgttttttcgtagcgtttcgtttttttagcgcgattgtacgtaggtacgtttttttagtagtttaggttttcgtttttttttcgtcgttttagtttcggtcgcgattgtttcgcgttcgcgttttaggttcgttgttggtcgcggtcgtcgttttttttcggtttaatggcgtggcggtatagttagtgatgtgacgttttaggtttgttcggttttcggttcgtagtttagtatattatgtcgtcgtagtaggcgcggtagtcgttgtacgttcgagtcgacgaagggcgggaggtagttcgggtggcggggcgtggcgaatagcgcggtcggatttatttttttggggcgcggagtatggaggagttgtgcggtcgtaggcggagtagggcggttcgggcggcggtggggataacggtttttttttgaaggggacggataaagttcgagtgattagcggcggcggggaggattagttttcgggtaggtagtggcggtaggtagcggtttgttagggttcgggtcggggtttgaggtgttcgcggaaggtttgggcgggaaggagggcgtcgggggagtcgaag

SEQ ID NO: 6220 - DNA, 724 bp, Artificial Sequence
  chemically treated genomic DNA (Homo sapiens) CpG-island No: 6220
cttcgactcccccgacgccctccttcccgcccaaaccttccgcgaacacctcaaaccccgacccgaaccctaacaaaccgctacctaccgccactacctacccgaaaactaatcctccccgccgccgctaatcactcgaactttatccgtccccttcaaaaaaaaaccgttatccccaccgccgcccgaaccgccctactccgcctacgaccgcacaactcctccatactccgcgccccaaaaaaataaatccgaccgcgctattcgccacgccccgccacccgaactacctcccgcccttcgtcgactcgaacgtacaacgactaccgcgcctactacgacgacataatatactaaactacgaaccgaaaaccgaacaaacctaaaacgtcacatcactaactataccgccacgccattaaaccgaaaaaaaacgacgaccgcgaccaacaacgaacctaaaacgcgaacgcgaaacaatcgcgaccgaaactaaaacgacgaaaaaaaaacgaaaacctaaactactaaaaaaacgtacctacgtacaatcgcgctaaaaaaacgaaacgctacgaaaaaacgaatctatacccatcgaaacgacccgaaacaactcgaattctaaaatctcgctaactcttctcctctcgaattttcgaaatactcccttaaaaaatctttcgatcccatctcaaaaacccccaaaaaaaaaatatattaa

SEQ ID NO: 6221 - DNA, 1281 bp, Artificial Sequence
  chemically treated genomic DNA (Homo sapiens) CpG-island No: 6221
  unsure (1094, 1117)
ggaatcgttcgttttttttgatattttgtcgggttatatcgaatatggtcgggataacggtattcgtttgtttgtcgtgtggttgacgtacgattcggaatattcggagaatttatttgtcgcgtcgttggtgcgttatggttggacgttacgcggcgaattggcggtggtgtatgatcgtagtggtaaataggtgcgtagttttatttacgatgataaatatcggggtcggatggtggcgtatcgttatacgggtcggtcggaaattcgttatcgttacgatagcgacgggcgggtgatagaatagttaaattcggtaggtttaagttatacgtattagtatgagaaagatcgtattattattatcgatagtttggatcgtcgtgaagtgttgtatacgtagggcgaagtcgggttgaagcgggtggtgaaaaaggaatacgcggacggtagcgttacgtagagttagtttgacgtcgtgggtaggtttagggtatagacggatgtcgtaggtaggataatagagtatagttcggatgtggtgacgggttttattacgcgtataattacgtcggatggtagggtatcggcgttttattataattattataattagttaacgttagttatcgggtttgacgggttggaattgcgtcgggaatatgatgaattgggtcgtttgatttaggaaattgtttttgacggcgatattattcgttatcgttatgataatttatatagtgatttattttgcgtaacggaagatgttatcggtagtcggaaaattatgacgtggagtcgttacggttagttgttgagttttatcgattgtttcggttatgtaattcgttatgattatgatcgtttcgggtagatgacggcggtgtatcgcgaggaaaggttgagttagtatcgcgtattcgataggcgtgggatagttattgtcgtgaaagaaacgtaggggtttgaaacggggtttgaatattatttttcggtatttgacggcgttattgtttcgaaaggaatcgaaacgggaatagttaattcgtgggaaagcgtcgttttatagagggtgatcgtattgataattacgngggtattttatttgacgatatangcgtttatcggtatagatatacgaggataaatacgttggcgcggatatatagtagatcggagggtcgttaaaatatacgcgagagtggagtgatattttcgggttaggtcgcgagtttgtgtttttttttttttaaaataatgcgaacgatacgataattagat

SEQ ID NO: 6222 - DNA, 1281 bp, Artificial Sequence
  chemically treated genomic DNA (Homo sapiens) CpG-island No: 6222
  unsure (165, 188)
atctaattatcgtatcgttcgcattattttaaaaaaaaaaaaacacaaactcgcgacctaacccgaaaatatcactccactctcgcgtatattttaacgaccctccgatctactatatatccgcgccaacgtatttatcctcgtatatctataccgataaacgcntatatcgtcaaataaaatacccncgtaattatcaatacgatcaccctctataaaacgacgctttcccacgaattaactattcccgtttcgattcctttcgaaacaataacgccgtcaaataccgaaaaataatattcaaaccccgtttcaaacccctacgtttctttcacgacaataactatcccacgcctatcgaatacgcgatactaactcaacctttcctcgcgatacaccgccgtcatctacccgaaacgatcataatcataacgaattacataaccgaaacaatcgataaaactcaacaactaaccgtaacgactccacgtcataattttccgactaccgataacatcttccgttacgcaaaataaatcactatataaattatcataacgataacgaataatatcgccgtcaaaaacaatttcctaaatcaaacgacccaattcatcatattcccgacgcaattccaacccgtcaaacccgataactaacgttaactaattataataattataataaaacgccgataccctaccatccgacgtaattatacgcgtaataaaacccgtcaccacatccgaactatactctattatcctacctacgacatccgtctataccctaaacctacccacgacgtcaaactaactctacgtaacgctaccgtccgcgtattcctttttcaccacccgcttcaacccgacttcgccctacgtatacaacacttcacgacgatccaaactatcgataataataatacgatctttctcatactaatacgtataacttaaacctaccgaatttaactattctatcacccgcccgtcgctatcgtaacgataacgaatttccgaccgacccgtataacgatacgccaccatccgaccccgatatttatcatcgtaaataaaactacgcacctatttaccactacgatcatacaccaccgccaattcgccgcgtaacgtccaaccataacgcaccaacgacgcgacaaataaattctccgaatattccgaatcgtacgtcaaccacacgacaaacaaacgaataccgttatcccgaccatattcgatataacccgacaaaatatcaaaaaaaacgaacgattcc

SEQ ID NO: 6223 - DNA, 1281 bp, Artificial Sequence
  chemically treated genomic DNA (Homo sapiens) CpG-island No: 6223
  unsure (165, 188)
atttagttatcgtgtcgttcgtattgttttgggaaaaagagagtataaattcgcggtttagttcgaaggtgttattttattttcgcgtgtgttttagcggtttttcgatttgttgtgtattcgcgttagcgtgtttattttcgtatatttgtgtcggtgggcgtntgtgtcgttagatgggatgtttncgtgattattaatgcggttattttttgtggagcggcgtttttttacggattgattgttttcgtttcggtttttttcggggtaataacgtcgttaggtatcgggaagtggtatttaaatttcgttttaagtttttgcgttttttttacggtaataattgttttacgtttgtcgaatgcgcggtattgatttagttttttttcgcggtgtatcgtcgttatttgttcgaagcggttatggttataacgggttatataatcggaatagtcggtgaagtttagtaattgatcgtaacggttttacgttatggtttttcggttgtcggtggtatttttcgttgcgtagggtaagttattgtgtggattattataacggtagcgggtgatatcgtcgttaggggtagttttttgaattagacggtttaatttattatattttcggcgtaattttagttcgttaggttcggtggttgacgttaattggttgtggtggttatagtaaaacgtcgatgttttgttattcggcgtggttatgcgcgtgatgaggttcgttattatattcgggttgtattttgttgttttgtttgcggtattcgtttgtgttttgagtttgtttacggcgttaaattgattttgcgtgacgttgtcgttcgcgtgttttttttttattattcgttttagttcggtttcgttttgcgtgtgtagtattttacggcggtttaggttgtcggtgatggtgatgcggttttttttatattgatacgtgtagtttaagtttgtcgggtttagttgttttgttattcgttcgtcgttgtcgtaacggtaacggattttcggtcggttcgtgtgacggtgcgttattattcggtttcggtatttattatcgtaagtaaagttgcgtatttgtttgttattacggttatatattatcgttagttcgtcgcgtggcgtttagttatagcgtattagcggcgcggtaggtaaatttttcgggtatttcgggtcgtgcgttagttatacggtagatagacggatgtcgttgtttcggttatattcggtgtaattcggtagggtattaggaaaagcggacggtttt

SEQ ID NO: 6224 - DNA, 1281 bp, Artificial Sequence
  chemically treated genomic DNA (Homo sapiens) CpG-island No: 6224
  unsure (1094, 1117)
aaaaccgtccgcttttcctaataccctaccgaattacaccgaatataaccgaaacaacgacatccgtctatctaccgtataactaacgcacgacccgaaatacccgaaaaatttacctaccgcgccgctaatacgctataactaaacgccacgcgacgaactaacgataatatataaccgtaataacaaacaaatacgcaactttacttacgataataaataccgaaaccgaataataacgcaccgtcacacgaaccgaccgaaaatccgttaccgttacgacaacgacgaacgaataacaaaacaactaaacccgacaaacttaaactacacgtatcaatataaaaaaaaccgcatcaccatcaccgacaacctaaaccgccgtaaaatactacacacgcaaaacgaaaccgaactaaaacgaataataaaaaaaaaacacgcgaacgacaacgtcacgcaaaatcaatttaacgccgtaaacaaactcaaaacacaaacgaataccgcaaacaaaacaacaaaatacaacccgaatataataacgaacctcatcacgcgcataaccacgccgaataacaaaacatcgacgttttactataaccaccacaaccaattaacgtcaaccaccgaacctaacgaactaaaattacgccgaaaatataataaattaaaccgtctaattcaaaaaactacccctaacgacgatatcacccgctaccgttataataatccacacaataacttaccctacgcaacgaaaaataccaccgacaaccgaaaaaccataacgtaaaaccgttacgatcaattactaaacttcaccgactattccgattatataacccgttataaccataaccgcttcgaacaaataacgacgatacaccgcgaaaaaaaactaaatcaataccgcgcattcgacaaacgtaaaacaattattaccgtaaaaaaaacgcaaaaacttaaaacgaaatttaaataccacttcccgatacctaacgacgttattaccccgaaaaaaaccgaaacgaaaacaatcaatccgtaaaaaaacgccgctccacaaaaaataaccgcattaataatcacgnaaacatcccatctaacgacacanacgcccaccgacacaaatatacgaaaataaacacgctaacgcgaatacacaacaaatcgaaaaaccgctaaaacacacgcgaaaataaaataacaccttcgaactaaaccgcgaatttatactctctttttcccaaaacaatacgaacgacacgataactaaat

SEQ ID NO: 6225 - DNA, 857 bp, Artificial Sequence
  chemically treated genomic DNA (Homo sapiens) CpG-island No: 6225
ttattcgattttcgttgatcgcgcggaaaattgtcgggtgtgggacgttgaaggtcgtgagtattttgatttcgcgggcgggattgcggtgtttaatatcgggtatttgtattcgaaggtggtggtcgcggtggaagcgtagttgaaaaaattgtcgtatatttgtttttaggtgttggtttacgagtcgtatttggagttgtgcgagattatgaattagaaggtgtcgggcgatttcgttaagaaaacgttgttggttacgatcggtttcgaagcggtggaaaacgcggtaaaaatcgttcgcgtcgttattaaacgtagcggtattatcgtttttagcggcgcgtattacgggcgtacgtattatacgttggcgttgatcggtaaggtgaattcgtattttgcgggtatggggttgatgtcgggttatgtttatcgcgcgttttatttttgttcgttgtacggtataagcgaggatgacgttatcgttagtatttattcgggatttttaaaatgatgtcgcgtcggaagatatcggcggtaatcgtgattgagtcggattaggataaagtcggtttatagttttcgtgttagttttatgtagggttaagcgttcgtgtgataagttcgggattatgtaatgtcgataatgtagagggcgggagtatcgtatttgtgcgatgatataggtgttgttttttttattttggaaaatacggagggtattcggaggtatacgtcgcgaatgaatgcgtattagtgggattagaaaataatacgtcgcgatagtgtgaaaattataaaggtgagaagtcgtatacgttcgtgtcgttattgttttttatttttttttatat

SEQ ID NO: 6226 - DNA, 857 bp, Artificial Sequence
  chemically treated genomic DNA (Homo sapiens) CpG-island No: 6226
atataaaaaaaaataaaaaacaataacgacacgaacgtatacgacttctcacctttataattttcacactatcgcgacgtattattttctaatcccactaatacgcattcattcgcgacgtatacctccgaataccctccgtattttccaaaataaaaaaaacaacacctatatcatcgcacaaatacgatactcccgccctctacattatcgacattacataatcccgaacttatcacacgaacgcttaaccctacataaaactaacacgaaaactataaaccgactttatcctaatccgactcaatcacgattaccgccgatatcttccgacgcgacatcattttaaaaatcccgaataaatactaacgataacgtcatcctcgcttataccgtacaacgaacaaaaataaaacgcgcgataaacataacccgacatcaaccccatacccgcaaaatacgaattcaccttaccgatcaacgccaacgtataatacgtacgcccgtaatacgcgccgctaaaaacgataataccgctacgtttaataacgacgcgaacgatttttaccgcgttttccaccgcttcgaaaccgatcgtaaccaacaacgttttcttaacgaaatcgcccgacaccttctaattcataatctcgcacaactccaaatacgactcgtaaaccaacacctaaaaacaaatatacgacaattttttcaactacgcttccaccgcgaccaccaccttcgaatacaaatacccgatattaaacaccgcaatcccgcccgcgaaatcaaaatactcacgaccttcaacgtcccacacccgacaattttccgcgcgatcaacgaaaatcgaataa

SEQ ID NO: 6227 - DNA, 857 bp, Artificial Sequence
  chemically treated genomic DNA (Homo sapiens) CpG-island No: 6227
atgtgaggagaggtggagggtagtagcgatacgaacgtgtacgattttttatttttgtggtttttatattatcgcgacgtattgttttttggttttattggtgcgtatttattcgcggcgtgtattttcgggtatttttcgtgttttttaaggtgaaaggggtaatatttgtgttatcgtataggtgcggtattttcgttttttgtattatcggtattatatgatttcgggtttgttatacgggcgtttaattttgtataaagttggtacgagggttatgaatcggttttgttttgattcggtttaattacgattgtcgtcgatatttttcggcgcggtattattttgaagatttcgggtggatgttggcgatagcgttattttcgtttatgtcgtgtagcgggtaaggataaagcgcgcgataaatatgattcggtattagttttatgttcgtagagtacggatttattttgtcggttagcgttagcgtgtaatgcgtgcgttcgtgatacgcgtcgttaaaagcgatggtgtcgttacgtttggtggcggcgcgggcgatttttatcgcgttttttatcgtttcggaatcggtcgtaattagtagcgtttttttggcgaaatcgttcggtattttttgatttataatttcgtatagttttagatacggttcgtaagttagtatttggaagtaggtgtgcgatagtttttttaattgcgtttttatcgcggttattattttcggatgtaggtgttcggtattgagtatcgtaatttcgttcgcgaaattaagatatttacggtttttaacgttttatattcggtagtttttcgcgcggttagcgaaaatcgggtga

SEQ ID NO: 6228 - DNA, 857 bp, Artificial Sequence
  chemically treated genomic DNA (Homo sapiens) CpG-island No: 6228
tcacccgattttcgctaaccgcgcgaaaaactaccgaatataaaacgttaaaaaccgtaaatatcttaatttcgcgaacgaaattacgatactcaataccgaacacctacatccgaaaataataaccgcgataaaaacgcaattaaaaaaactatcgcacacctacttccaaatactaacttacgaaccgtatctaaaactatacgaaattataaatcaaaaaataccgaacgatttcgccaaaaaaacgctactaattacgaccgattccgaaacgataaaaaacgcgataaaaatcgcccgcgccgccaccaaacgtaacgacaccatcgcttttaacgacgcgtatcacgaacgcacgcattacacgctaacgctaaccgacaaaataaatccgtactctacgaacataaaactaataccgaatcatatttatcgcgcgctttatccttacccgctacacgacataaacgaaaataacgctatcgccaacatccacccgaaatcttcaaaataataccgcgccgaaaaatatcgacgacaatcgtaattaaaccgaatcaaaacaaaaccgattcataaccctcgtaccaactttatacaaaattaaacgcccgtataacaaacccgaaatcatataataccgataatacaaaaaacgaaaataccgcacctatacgataacacaaatattacccctttcaccttaaaaaacacgaaaaatacccgaaaatacacgccgcgaataaatacgcaccaataaaaccaaaaaacaatacgtcgcgataatataaaaaccacaaaaataaaaaatcgtacacgttcgtatcgctactaccctccacctctcctcacat

SEQ ID NO: 6229 - DNA, 833 bp, Artificial Sequence
  chemically treated genomic DNA (Homo sapiens) CpG-island No: 6229
taggtcgcgatggtcgtagtggtataggtggatttttcgcgtcggcgtgtatatcgggtttatttggttttgtatttgttttatcgttaggtcgtattgcgtaagttacgttcggtttttattgtttacgcggtttgttcggatttttttttttagtcggtttagtatttgtattagtttagtcgggaatattacgtcgtggtcgtttttattttttttttgttgaagcgtattcgttaggttgcggcgttgcgttttcgttagtttatcggtggcggttttaattttgatgagtggcgtgaagtttttcggttgataaatcgtttggatgcgggttttgtcgttttgtattgtggttagtcggtcgtcgttttagtcgtattaggttatttgcggttttcgtgatagcgatatttagttcgttaggtttcgtttacgtcgttatattcgttttgttattttgcggtttagcgggtcgtaaagatagcgattttcgattagcggttttttatattgtgttcgcgtgtagtgtattagtcggtgttgattgtcgtaatggtatcggtgagttcgtttattattcgtgcggataatttttttcgggatgaggtcggttttttttgttagtttgtcgtgacggttatatcggtaaagatagtgcgcgttacgggcgatacggttattcggtatatatgttgagggtgttgttcgggtgtagtttcgggtcgggtaggcggttatttgtcgggtttgtggtatacgggatgcggatatttagattcgttgcggtggtgtgaacgtcggttagtttgtcggtggtgttgtattgtaat

SEQ ID NO: 6230 - DNA, 833 bp, Artificial Sequence
  chemically treated genomic DNA (Homo sapiens) CpG-island No: 6230
attacaatacaacaccaccgacaaactaaccgacgttcacaccaccgcaacgaatctaaatatccgcatcccgtataccacaaacccgacaaataaccgcctacccgacccgaaactacacccgaacaacaccctcaacatatataccgaataaccgtatcgcccgtaacgcgcactatctttaccgatataaccgtcacgacaaactaacaaaaaaaaccgacctcatcccgaaaaaaattatccgcacgaataataaacgaactcaccgataccattacgacaatcaacaccgactaatacactacacgcgaacacaatataaaaaaccgctaatcgaaaatcgctatctttacgacccgctaaaccgcaaaataacaaaacgaatataacgacgtaaacgaaacctaacgaactaaatatcgctatcacgaaaaccgcaaataacctaatacgactaaaacgacgaccgactaaccacaatacaaaacgacaaaacccgcatccaaacgatttatcaaccgaaaaacttcacgccactcatcaaaattaaaaccgccaccgataaactaacgaaaacgcaacgccgcaacctaacgaatacgcttcaacaaaaaaaaaataaaaacgaccacgacgtaatattcccgactaaactaatacaaatactaaaccgactaaaaaaaaaaatccgaacaaaccgcgtaaacaataaaaaccgaacgtaacttacgcaatacgacctaacgataaaacaaatacaaaaccaaataaacccgatatacacgccgacgcgaaaaatccacctataccactacgaccatcgcgaccta

SEQ ID NO: 6231 - DNA, 833 bp, Artificial Sequence
  chemically treated genomic DNA (Homo sapiens) CpG-island No: 6231
gttatagtatagtattatcggtaggttgatcggcgtttatattatcgtagcgaatttggatattcgtatttcgtatgttatagattcggtaggtaatcgtttgttcgattcggagttgtattcggatagtatttttagtatgtgtgtcggataatcgtatcgttcgtgacgcgtattatttttatcggtatgatcgttacggtaggttgatagagaaaatcgattttatttcggaaggggttattcgtacggatgatgagcggatttatcggtattattacgatagttagtatcggttggtgtattatacgcggatataatatgaagagtcgttggtcgaaagtcgttatttttacgattcgttgggtcgtagggtggtaaaacgggtgtggcggcgtgaacgggatttgacgggttggatgtcgttgttacggaaatcgtaagtgatttggtacggttgggacggcgatcggttgattataatatagaacgatagaattcgtatttagacgatttattagtcggggagttttacgttatttattagagttgaaatcgttatcggtgagttggcgaaaacgtagcgtcgtagtttggcggatgcgttttagtaggaagggagtgagaacggttacggcgtggtgttttcggttgaattggtgtagatgttggatcggttggaggaagaaattcgggtagatcgcgtgagtagtgaaagtcgggcgtggtttgcgtagtgcggtttgacggtggagtagatgtaaaattagatggattcggtgtatacgtcggcgcgaaaaatttatttgtattattgcgattatcgcggtttg

SEQ ID NO: 6232 - DNA, 833 bp, Artificial Sequence
  chemically treated genomic DNA (Homo sapiens) CpG-island No: 6232
caaaccgcgataatcgcaataatacaaataaatttttcgcgccgacgtatacaccgaatccatctaattttacatctactccaccgtcaaaccgcactacgcaaaccacgcccgactttcactactcacgcgatctacccgaatttcttcctccaaccgatccaacatctacaccaattcaaccgaaaacaccacgccgtaaccgttctcactcccttcctactaaaacgcatccgccaaactacgacgctacgttttcgccaactcaccgataacgatttcaactctaataaataacgtaaaactccccgactaataaatcgtctaaatacgaattctatcgttctatattataatcaaccgatcgccgtcccaaccgtaccaaatcacttacgatttccgtaacaacgacatccaacccgtcaaatcccgttcacgccgccacacccgttttaccaccctacgacccaacgaatcgtaaaaataacgactttcgaccaacgactcttcatattatatccgcgtataatacaccaaccgatactaactatcgtaataataccgataaatccgctcatcatccgtacgaataaccccttccgaaataaaatcgattttctctatcaacctaccgtaacgatcataccgataaaaataatacgcgtcacgaacgatacgattatccgacacacatactaaaaatactatccgaatacaactccgaatcgaacaaacgattacctaccgaatctataacatacgaaatacgaatatccaaattcgctacgataatataaacgccgatcaacctaccgataatactatactataac

SEQ ID NO: 6233 - DNA, 566 bp, Artificial Sequence
  chemically treated genomic DNA (Homo sapiens) CpG-island No: 6233
gatgcgtagaaacgtgggattgttaacggcgatatggtgcgggtgtttaattatcgtggcgaagttcggttattagttaaagtaatattacgtattttttttggagttagcgttatgggttagtgagtttggtacgaggttaatatgtttggcgataaaatcgattatggcggttgtgtgaatacgtttaatattttgtgggtttttaatattggggaagggaattcgtagtaattatcggtttagatcggaaaatatattacgatacgtattcgggtgatttcggcgaagttatatggtacgcggaatttttcgagggttagaaggaatatagaattgaaattcgttggatgtcgtagagatacgacggatataggcggggatcgaaataggggatttagtatcggattgtaatcgggcgaggtaattgagtttaaaaatcggagatatagagttgttacggtcgtatacgatacgtagtattcgtttattagttttttttttttcgtatcggttcgtaattttttttatcgcgtgcgatcgtttattattttattatttttacg

SEQ ID NO: 6234 - DNA, 566 bp, Artificial Sequence
  chemically treated genomic DNA (Homo sapiens) CpG-island No: 6234
cgtaaaaataataaaataataaacgatcgcacgcgataaaaaaaattacgaaccgatacgaaaaaaaaaaaactaataaacgaatactacgtatcgtatacgaccgtaacaactctatatctccgatttttaaactcaattacctcgcccgattacaatccgatactaaatcccctatttcgatccccgcctatatccgtcgtatctctacgacatccaacgaatttcaattctatattccttctaaccctcgaaaaattccgcgtaccatataacttcgccgaaatcacccgaatacgtatcgtaatatattttccgatctaaaccgataattactacgaattcccttccccaatattaaaaacccacaaaatattaaacgtattcacacaaccgccataatcgattttatcgccaaacatattaacctcgtaccaaactcactaacccataacgctaactccaaaaaaaatacgtaatattactttaactaataaccgaacttcgccacgataattaaacacccgcaccatatcgccgttaacaatcccacgtttctacgcatc

SEQ ID NO: 6235 - DNA, 566 bp, Artificial Sequence
  chemically treated genomic DNA (Homo sapiens) CpG-island No: 6235
cgtgggggtggtggggtggtgggcggtcgtacgcggtgaggggggttgcgagtcggtgcggggaggggggggttggtgggcgggtgttgcgtgtcgtgtacggtcgtgataattttatattttcgatttttggatttagttgtttcgttcggttgtagttcggtgttgggttttttgtttcggttttcgtttgtattcgtcgtgtttttgcggtatttagcgagttttagttttgtgttttttttggttttcgggaggtttcgcgtgttatgtggtttcgtcgaggttattcgaatacgtgtcgtggtatatttttcgatttggatcgatagttgttgcgggtttttttttttaatgttaaaggtttatagagtgttgagcgtatttatatagtcgttatggtcgattttatcgttagatatattggtttcgtgttaggtttattggtttatagcgttaattttagggagaatacgtggtgttattttggttggtagtcgaatttcgttacgatggttaaatattcgtattatatcgtcgttggtaattttacgtttttgcgtatt

SEQ ID NO: 6236 - DNA, 566 bp, Artificial Sequence
  chemically treated genomic DNA (Homo sapiens) CpG-island No: 6236
aatacgcaaaaacgtaaaattaccaacgacgatataatacgaatatttaaccatcgtaacgaaattcgactaccaaccaaaataacaccacgtattctccctaaaattaacgctataaaccaataaacctaacacgaaaccaatatatctaacgataaaatcgaccataacgactatataaatacgctcaacactctataaacctttaacattaaaaaaaaaaacccgcaacaactatcgatccaaatcgaaaaatataccacgacacgtattcgaataacctcgacgaaaccacataacacgcgaaacctcccgaaaaccaaaaaaaacacaaaactaaaactcgctaaataccgcaaaaacacgacgaatacaaacgaaaaccgaaacaaaaaacccaacaccgaactacaaccgaacgaaacaactaaatccaaaaatcgaaaatataaaattatcacgaccgtacacgacacgcaacacccgcccaccaacccccccctccccgcaccgactcgcaacccccctcaccgcgtacgaccgcccaccaccccaccacccccacg

SEQ ID NO: 6237 - DNA, 533 bp, Artificial Sequence
  chemically treated genomic DNA (Homo sapiens) CpG-island No: 6237
gtcgttttaatcgtagagttgttcgagtcgtcgatttttcggtagggggcgtcgtattttttttcgaaggtcgttgtcggttgtagttttcgtttttagtttcgcggttatttgtagcgggtgtatttaggttttcgttcggtcggttttatcggtagtttttatagttcgttcgtattgtcgtcgttcgtttttgcgtttagggtagtcgtcgtcggtattgcgtcgttttttcgtcgttttttgtcgttcggcgtttgagagtttgaggttttagaaggtcgcgtaacgggtttttggagtgttcgtgtttttttttgcgattttatggcggatatttcggttaggtcgtggtattgaagttcggttgtcgtcggggggcgttacgcgttgtagaaatcggttcgcgtcgcgtagcgtaatgttcgtacgttacgtacggggggcgggttttcgaagtttaggttggaggttttattttgtcgttgggaaggaacgagtttattggttcgtgtttagtgggatcgtttatt

SEQ ID NO: 6238 - DNA, 533 bp, Artificial Sequence
  chemically treated genomic DNA (Homo sapiens) CpG-island No: 6238
aataaacgatcccactaaacacgaaccaataaactcgttccttcccaacgacaaaataaaacctccaacctaaacttcgaaaacccgccccccgtacgtaacgtacgaacattacgctacgcgacgcgaaccgatttctacaacgcgtaacgccccccgacgacaaccgaacttcaataccacgacctaaccgaaatatccgccataaaatcgcaaaaaaaaacacgaacactccaaaaacccgttacgcgaccttctaaaacctcaaactctcaaacgccgaacgacaaaaaacgacgaaaaaacgacgcaataccgacgacgactaccctaaacgcaaaaacgaacgacgacaatacgaacgaactataaaaactaccgataaaaccgaccgaacgaaaacctaaatacacccgctacaaataaccgcgaaactaaaaacgaaaactacaaccgacaacgaccttcgaaaaaaaatacgacgccccctaccgaaaaatcgacgactcgaacaactctacgattaaaacgac

SEQ ID NO: 6239 - DNA, 533 bp, Artificial Sequence
  chemically treated genomic DNA (Homo sapiens) CpG-island No: 6239
ggtgaacggttttattgggtacggattaatgggttcgtttttttttagcggtagggtgggatttttagtttgggtttcggagattcgtttttcgtacgtggcgtgcgggtattgcgttacgcggcgcgggtcggtttttatagcgcgtggcgtttttcggcggtagtcgggttttaatgttacggtttgatcggagtgttcgttatggagtcgtagaaagaggtacgaatattttaggagttcgttgcgcggttttttggggttttaagtttttagacgtcgaacgataaggagcggcgggagggcggcgtagtgtcggcggcggttgttttgggcgtagaggcggacgacgatagtgcggacgggttgtgggagttgtcggtggagtcggtcgagcggaggtttgagtgtattcgttgtaggtgatcgcggggttgggggcggggattgtagtcggtagcggttttcggaggagggtgcggcgttttttgtcggggagtcggcggttcgggtagttttgcgattagggcggt

SEQ ID NO: 6240 - DNA, 533 bp, Artificial Sequence
  chemically treated genomic DNA (Homo sapiens) CpG-island No: 6240
accgccctaatcgcaaaactacccgaaccgccgactccccgacaaaaaacgccgcaccctcctccgaaaaccgctaccgactacaatccccgcccccaaccccgcgatcacctacaacgaatacactcaaacctccgctcgaccgactccaccgacaactcccacaacccgtccgcactatcgtcgtccgcctctacgcccaaaacaaccgccgccgacactacgccgccctcccgccgctccttatcgttcgacgtctaaaaacttaaaaccccaaaaaaccgcgcaacgaactcctaaaatattcgtacctctttctacgactccataacgaacactccgatcaaaccgtaacattaaaacccgactaccgccgaaaaacgccacgcgctataaaaaccgacccgcgccgcgtaacgcaatacccgcacgccacgtacgaaaaacgaatctccgaaacccaaactaaaaatcccaccctaccgctaaaaaaaaacgaacccattaatccgtacccaataaaaccgttcacc

SEQ ID NO: 6241 - DNA, 588 bp, Artificial Sequence
  chemically treated genomic DNA (Homo sapiens) CpG-island No: 6241
tcgtagcgttgtgggttaataatgttaaattgcgaatgtcgcgtagtcgtattcgtattatgtaggttattattggcggtattatcgtcggttttggcgcgcgtttggtaatgggttgtaatttggcggcgttttttatcggtattttttagttttcgttgtatgtttggttttttgttatcgttattgttattggtttatggtttggcgcgcgttttattttgttgtttatttttcgtattttcgtgaaaatgtagaaagtttttgtcgttttatcgttgacgtaaaaatcggattaggcgcggcgtcgttttcgtttcgggatgttggtttttttcggtatgttgggttgggcgttgtttatagcgatgaattaatttaaattggggttggtaatgttgtttggcgtcggttttggtttattgattgaacgtgcgtaaatttgttttattttagcgtttcgcgatatgtggattatcggacgtatttatatggcgtaatgtcgttgttggagtcgattaagaagatgtttaagtttgacgataatcgtaataacgttatcggtttgttggaagattcgaaatcggt

SEQ ID NO: 6242 - DNA, 588 bp, Artificial Sequence
  chemically treated genomic DNA (Homo sapiens) CpG-island No: 6242
accgatttcgaatcttccaacaaaccgataacgttattacgattatcgtcaaacttaaacatcttcttaatcgactccaacaacgacattacgccatataaatacgtccgataatccacatatcgcgaaacgctaaaataaaacaaatttacgcacgttcaatcaataaaccaaaaccgacgccaaacaacattaccaaccccaatttaaattaattcatcgctataaacaacgcccaacccaacataccgaaaaaaaccaacatcccgaaacgaaaacgacgccgcgcctaatccgatttttacgtcaacgataaaacgacaaaaactttctacattttcacgaaaatacgaaaaataaacaacaaaataaaacgcgcgccaaaccataaaccaataacaataacgataacaaaaaaccaaacatacaacgaaaactaaaaaataccgataaaaaacgccgccaaattacaacccattaccaaacgcgcgccaaaaccgacgataataccgccaataataacctacataatacgaatacgactacgcgacattcgcaatttaacattattaacccacaacgctacga

SEQ ID NO: 6243 - DNA, 588 bp, Artificial Sequence
  chemically treated genomic DNA (Homo sapiens) CpG-island No: 6243
atcgatttcggattttttagtaggtcgataacgttattgcgattatcgttagatttggatatttttttggtcggttttagtagcgatattacgttatatgggtacgttcggtgatttatatatcgcggaacgttgaagtaaagtagatttgcgtacgtttaattagtaaattaaagtcgacgttaaatagtattgttagttttagtttgggttggtttatcgttgtgagtagcgtttagtttagtatgtcgaaaaagattagtatttcgagacgaaaacgacgtcgcgtttgattcggtttttgcgttagcggtgaggcggtagaaattttttgtatttttacgggaatacggaagatgggtagtagggtaaagcgcgcgttaaattatgaattaatggtagtggcgatggtaaagaattaggtatgtagcgagaattgaggaatatcggtaaagaacgtcgttaggttatagtttattgttagacgcgcgttaaaatcggcgataatgtcgttaatgatggtttgtataatgcggatacggttgcgcggtattcgtagtttgatattgttggtttatagcgttgcgg

SEQ ID NO: 6244 - DNA, 588 bp, Artificial Sequence
  chemically treated genomic DNA (Homo sapiens) CpG-island No: 6244
ccgcaacgctataaaccaacaatatcaaactacgaataccgcgcaaccgtatccgcattatacaaaccatcattaacgacattatcgccgattttaacgcgcgtctaacaataaactataacctaacgacgttctttaccgatattcctcaattctcgctacatacctaattctttaccatcgccactaccattaattcataatttaacgcgcgctttaccctactacccatcttccgtattcccgtaaaaatacaaaaaatttctaccgcctcaccgctaacgcaaaaaccgaatcaaacgcgacgtcgttttcgtctcgaaatactaatctttttcgacatactaaactaaacgctactcacaacgataaaccaacccaaactaaaactaacaatactatttaacgtcgactttaatttactaattaaacgtacgcaaatctactttacttcaacgttccgcgatatataaatcaccgaacgtacccatataacgtaatatcgctactaaaaccgaccaaaaaaatatccaaatctaacgataatcgcaataacgttatcgacctactaaaaaatccgaaatcgat

SEQ ID NO: 6245 - DNA, 520 bp, Artificial Sequence
  chemically treated genomic DNA (Homo sapiens) CpG-island No: 6245
gcgggcgtaaaaggggtagttcggtttatttacgtgatttcgtaattatttatgggtattttaatcgattgcgtttacgtcgattcggtttatagttttattcgggaaggcgaaagtaaagggtaattgttgttggatggtcgtaacgtcgggttggttgtcgttatcggttcgattatttttgtggatgtggattcgaatgcgtttttaagtcgcgaagagattttcggttcggtgttggtggttacgcgttttatattagaagaataggcgttatagtttgttaacgatagttagtacggttttggcgcggcggtatggacgcgcgatttttttcgcgcgtatcgtatgagtcgacgtttgaaagtcggtttcgttttcgttaataattataacgacggcgatatgatcgtgtcgtttggcggttataagtagagcggtaacggtcgcgataaatttttgtatgtttttgaaaaatttattgaattgaaaattatttggataagtttggaggtttgaa

SEQ ID NO: 6246 - DNA, 520 bp, Artificial Sequence
  chemically treated genomic DNA (Homo sapiens) CpG-island No: 6246
ttcaaacctccaaacttatccaaataattttcaattcaataaatttttcaaaaacatacaaaaatttatcgcgaccgttaccgctctacttataaccgccaaacgacacgatcatatcgccgtcgttataattattaacgaaaacgaaaccgactttcaaacgtcgactcatacgatacgcgcgaaaaaaatcgcgcgtccataccgccgcgccaaaaccgtactaactatcgttaacaaactataacgcctattcttctaatataaaacgcgtaaccaccaacaccgaaccgaaaatctcttcgcgacttaaaaacgcattcgaatccacatccacaaaaataatcgaaccgataacgacaaccaacccgacgttacgaccatccaacaacaattaccctttactttcgccttcccgaataaaactataaaccgaatcgacgtaaacgcaatcgattaaaatacccataaataattacgaaatcacgtaaataaaccgaactaccccttttacgcccgc

SEQ ID NO: 6247 - DNA, 520 bp, Artificial Sequence
  chemically treated genomic DNA (Homo sapiens) CpG-island No: 6247
tttaggtttttaggtttatttagatggtttttagtttagtgaattttttaagggtatgtagggatttgtcgcgatcgttgtcgttttgtttatagtcgttaaacggtacggttatatcgtcgtcgttgtagttattgacgaagacggaatcggtttttaggcgtcggtttatgcggtgcgcgcgggagaggtcgcgcgtttatatcgtcgcgttaaggtcgtattggttgtcgttggtaagttgtagcgtttgtttttttgatgtgaaacgcgtgattattagtatcggatcgaaaattttttcgcgatttaaggacgtattcgggtttatatttataaagatggtcgggtcgatggcggtagttagttcggcgttacggttatttaataatagttgttttttgttttcgttttttcgaataaagttatggatcgagtcggcgtgggcgtagtcgattaaggtgtttatgggtggttgcgggattacgtggatgggtcgagttgttttttttgcgttcgt

SEQ ID NO: 6248 - DNA, 520 bp, Artificial Sequence
  chemically treated genomic DNA (Homo sapiens) CpG-island No: 6248
acgaacgcaaaaaaaacaactcgacccatccacgtaatcccgcaaccacccataaacaccttaatcgactacgcccacgccgactcgatccataactttattcgaaaaaacgaaaacaaaaaacaactattattaaataaccgtaacgccgaactaactaccgccatcgacccgaccatctttataaatataaacccgaatacgtccttaaatcgcgaaaaaattttcgatccgatactaataatcacgcgtttcacatcaaaaaaacaaacgctacaacttaccaacgacaaccaatacgaccttaacgcgacgatataaacgcgcgacctctcccgcgcgcaccgcataaaccgacgcctaaaaaccgattccgtcttcgtcaataactacaacgacgacgatataaccgtaccgtttaacgactataaacaaaacgacaacgatcgcgacaaatccctacatacccttaaaaaattcactaaactaaaaaccatctaaataaacctaaaaacctaaa

SEQ ID NO: 6249 - DNA, 595 bp, Artificial Sequence
  chemically treated genomic DNA (Homo sapiens) CpG-island No: 6249
  unsure (459)
gtattcggtatcggtttaattttgtaaaatcgatgatattagtagttgtgtatacggatgatgcgggtcgtcgagtacgcggtcggttaatttattttttattatttgtttttgttttattattagtaaacggttcgttagtaggcgggcgacgtttaaattatgggtgataattattatcgcgaggtttagttttattattaggtcgcgtagtaggtcgagtaggcgggtttgtatcgatatatttagttcgtcggtcggtttatttataaatattagtttcggatgcgttattaggttgcgggtaatttgtaaacgttgttgtatatcgtcggaaaaggtggtcggtaggtcgtcgattcggttggcgggaatttttattttttttagttatttttgcgcggtggtacgaatatcgtcgtaatgacgtgtttcggtcgttattagtcgttcgtcgantttgtcgtttgtcgatatttggcggcgtaggtcgtcgagtggatgttgatgtattacgttttattcggtacgtagttagcggacggcggtcgggttcgtttttttggttataagggacgggtttttttgtgggttt

SEQ ID NO: 6250 - DNA, 595 bp, Artificial Sequence
  chemically treated genomic DNA (Homo sapiens) CpG-island No: 6250
  unsure (137)
aaacccacaaaaaaacccgtcccttataaccaaaaaaacgaacccgaccgccgtccgctaactacgtaccgaataaaacgtaatacatcaacatccactcgacgacctacgccgccaaatatcgacaaacgacaaantcgacgaacgactaataacgaccgaaacacgtcattacgacgatattcgtaccaccgcgcaaaaataactaaaaaaaataaaaattcccgccaaccgaatcgacgacctaccgaccaccttttccgacgatatacaacaacgtttacaaattacccgcaacctaataacgcatccgaaactaatatttataaataaaccgaccgacgaactaaatatatcgatacaaacccgcctactcgacctactacgcgacctaataataaaactaaacctcgcgataataattatcacccataatttaaacgtcgcccgcctactaacgaaccgtttactaataataaaacaaaaacaaataataaaaaataaattaaccgaccgcgtactcgacgacccgcatcatccgtatacacaactactaatatcatcgattttacaaaattaaaccgataccgaatac

SEQ ID NO: 6251 - DNA, 595 bp, Artificial Sequence
  chemically treated genomic DNA (Homo sapiens) CpG-island No: 6251
  unsure (137)
aaatttatagagagattcgttttttgtagttaaaggagcgagttcgatcgtcgttcgttggttgcgtatcgaatggggcgtggtgtattagtatttattcgacggtttgcgtcgttaggtgtcggtaggcggtaaantcggcgagcggttgatggcgatcggggtacgttattacggcgatattcgtgttatcgcgtagaagtggttggaagaggtggagattttcgttaatcggatcgacgatttgtcgattatttttttcggcggtatgtagtagcgtttgtagattgttcgtaatttggtgacgtattcgaagttggtgtttatggatgaatcgatcggcgggttggatgtgtcggtgtaggttcgtttgttcgatttgttgcgcggtttggtggtggagttgaatttcgcggtggtgattgttatttatgatttaggcgtcgttcgtttgttggcggatcgtttgttggtgatgaagtaggggtaagtggtggagagtgggttaatcgatcgcgtgttcgacgattcgtattattcgtatatatagttgttggtgttatcggttttgtagaattgagtcggtgtcggatgt

SEQ ID NO: 6252 - DNA, 595 bp, Artificial Sequence
  chemically treated genomic DNA (Homo sapiens) CpG-island No: 6252
  unsure (459)
acatccgacaccgactcaattctacaaaaccgataacaccaacaactatatatacgaataatacgaatcgtcgaacacgcgatcgattaacccactctccaccacttacccctacttcatcaccaacaaacgatccgccaacaaacgaacgacgcctaaatcataaataacaatcaccaccgcgaaattcaactccaccaccaaaccgcgcaacaaatcgaacaaacgaacctacaccgacacatccaacccgccgatcgattcatccataaacaccaacttcgaatacgtcaccaaattacgaacaatctacaaacgctactacataccgccgaaaaaaataatcgacaaatcgtcgatccgattaacgaaaatctccacctcttccaaccacttctacgcgataacacgaatatcgccgtaataacgtaccccgatcgccatcaaccgctcgccgantttaccgcctaccgacacctaacgacgcaaaccgtcgaataaatactaatacaccacgccccattcgatacgcaaccaacgaacgacgatcgaactcgctcctttaactacaaaaaacgaatctctctataaattt

SEQ ID NO: 6253 - DNA, 527 bp, Artificial Sequence
  chemically treated genomic DNA (Homo sapiens) CpG-island No: 6253
ggtcggacgtgggggtcggcgtgagaatttcgtttatttgtgagtcggttttacgtcgttagatttaatttatttcgtcgttaaagttttatagttatttgttcgagtggaacggtttttagcgttggttttatcgggttttttagttagcgcggggatgttttttaatacgatagtatcgtttcgttaaagtaaggagggggtgtagggggaggcggtagagcgcggtgcgcggggttggtaggtagttttttttcgcgagcgagtcgattttgaattttaagcgattgattaggaagtttaggtcgtttttattattttgagtagttaaatgcgacggcgtagggattttaaggggtttttgcggaggcggtaatgaggttatcgttattgcgttagttcgcgggcgggagggggcgaaggtttgcggatacgtgtgaatatagtttgtgaatcgagttatatttgtatttacgtgattttcggggttttagtattgatttaggaaaattcggtatttggatttg

SEQ ID NO: 6254 - DNA, 527 bp, Artificial Sequence
  chemically treated genomic DNA (Homo sapiens) CpG-island No: 6254
caaatccaaataccgaattttcctaaatcaatactaaaaccccgaaaatcacgtaaatacaaatataactcgattcacaaactatattcacacgtatccgcaaaccttcgccccctcccgcccgcgaactaacgcaataacgataacctcattaccgcctccgcaaaaaccccttaaaatccctacgccgtcgcatttaactactcaaaataataaaaacgacctaaacttcctaatcaatcgcttaaaattcaaaatcgactcgctcgcgaaaaaaaactacctaccaaccccgcgcaccgcgctctaccgcctccccctacaccccctccttactttaacgaaacgatactatcgtattaaaaaacatccccgcgctaactaaaaaacccgataaaaccaacgctaaaaaccgttccactcgaacaaataactataaaactttaacgacgaaataaattaaatctaacgacgtaaaaccgactcacaaataaacgaaattctcacgccgacccccacgtccgacc

SEQ ID NO: 6255 - DNA, 527 bp, Artificial Sequence
  chemically treated genomic DNA (Homo sapiens) CpG-island No: 6255
tagatttaaatgtcgagtttttttgggttagtgttggggtttcgggggttacgtgaatatagatgtggttcggtttataggttgtgtttatacgtgttcgtagattttcgttttttttcgttcgcgggttggcgtagtgacggtgattttattatcgttttcgtaaaggttttttgaaatttttgcgtcgtcgtatttggttgtttaaagtgatgggaacggtttgagttttttgattaatcgtttaaaatttagggtcggttcgttcgcgggagagggttgtttgttagtttcgcgtatcgcgttttgtcgtttttttttatattttttttttgttttggcggggcgatgttgtcgtattggaaaatattttcgcgttggttggggggttcggtggggttagcgttggaagtcgttttattcgagtagatggttgtgaaattttggcggcgagataaattgggtttgacggcgtgaggtcggtttatagatgggcgggatttttacgtcggtttttacgttcggtt

SEQ ID NO: 6256 - DNA, 527 bp, Artificial Sequence
  chemically treated genomic DNA (Homo sapiens) CpG-island No: 6256
aaccgaacgtaaaaaccgacgtaaaaatcccgcccatctataaaccgacctcacgccgtcaaacccaatttatctcgccgccaaaatttcacaaccatctactcgaataaaacgacttccaacgctaaccccaccgaaccccccaaccaacgcgaaaatattttccaatacgacaacatcgccccgccaaaacaaaaaaaaaatataaaaaaaaacgacaaaacgcgatacgcgaaactaacaaacaaccctctcccgcgaacgaaccgaccctaaattttaaacgattaatcaaaaaactcaaaccgttcccatcactttaaacaaccaaatacgacgacgcaaaaatttcaaaaaacctttacgaaaacgataataaaatcaccgtcactacgccaacccgcgaacgaaaaaaaacgaaaatctacgaacacgtataaacacaacctataaaccgaaccacatctatattcacgtaacccccgaaaccccaacactaacccaaaaaaactcgacatttaaatcta

SEQ ID NO: 6257 - DNA, 546 bp, Artificial Sequence
  chemically treated genomic DNA (Homo sapiens) CpG-island No: 6257
gtttgataagacgcggtagcgtcgtattaggcgtttaatatacggtattatgaaacggatttagcgttaggattatcgtttggtgatagacgttggcgcgagtgagtttttcggcggtaaatacgtcgatcgttttttttttacgattaattttattaatatcggtataacgcgatattacgggattaagcgttttatttttacgtattttttttagaattatcgtaggtaacggtaaagtagtcgaacgcgtttcgtcgcgttggttggcgtttttaattattatttaattgaaagtgttgttattatcgatgttagttttaatcgttatttaaaaattagtttttggaagtaaacggcgggtattggttattcgatttcgtgcgttagcgcgcgtttttttattgttaaagggttgtttcggtatatcgttttcgacggtaacggatgtaatatggtaggatttttcgtcgaagatttcgtgaaatgtttgtagaatggtttgaattttagcgggattggtggtcgtatagataatttggtgta

SEQ ID NO: 6258 - DNA, 546 bp, Artificial Sequence
  chemically treated genomic DNA (Homo sapiens) CpG-island No: 6258
tacaccaaattatctatacgaccaccaatcccgctaaaattcaaaccattctacaaacatttcacgaaatcttcgacgaaaaatcctaccatattacatccgttaccgtcgaaaacgatataccgaaacaaccctttaacaataaaaaaacgcgcgctaacgcacgaaatcgaataaccaatacccgccgtttacttccaaaaactaatttttaaataacgattaaaactaacatcgataataacaacactttcaattaaataataattaaaaacgccaaccaacgcgacgaaacgcgttcgactactttaccgttacctacgataattctaaaaaaaatacgtaaaaataaaacgcttaatcccgtaatatcgcgttataccgatattaataaaattaatcgtaaaaaaaaaacgatcgacgtatttaccgccgaaaaactcactcgcgccaacgtctatcaccaaacgataatcctaacgctaaatccgtttcataataccgtatattaaacgcctaatacgacgctaccgcgtcttatcaaac

SEQ ID NO: 6259 - DNA, 546 bp, Artificial Sequence
  chemically treated genomic DNA (Homo sapiens) CpG-island No: 6259
tgtattaagttgtttgtgcgattattaatttcgttaaaatttaggttattttgtaggtattttacgagattttcggcgaaggattttgttatattgtattcgttgtcgtcgagagcggtgtatcggaatagttttttggtagtgaggaaacgcgcgttggcgtacgaaatcgggtagttaatgttcgtcgtttatttttagaggttgatttttgggtggcgattgaagttggtatcgatggtgatagtatttttagttgggtggtgattgaaaacgttagttagcgcggcgaggcgcgttcggttattttgtcgttgtttgcggtgattttggaaaaagtgcgtgaaggtgaggcgtttggtttcgtgatgtcgcgttatatcggtattgatgagattggtcgtaaggaaggggcgatcggcgtgtttatcgtcgggaaatttattcgcgttagcgtttattattaggcggtgattttggcgttgagttcgttttataatgtcgtgtattaagcgtttgatgcgacgttgtcgcgttttattaggt

SEQ ID NO: 6260 - DNA, 546 bp, Artificial Sequence
  chemically treated genomic DNA (Homo sapiens) CpG-island No: 6260
acctaataaaacgcgacaacgtcgcatcaaacgcttaatacacgacattataaaacgaactcaacgccaaaatcaccgcctaataataaacgctaacgcgaataaatttcccgacgataaacacgccgatcgccccttccttacgaccaatctcatcaataccgatataacgcgacatcacgaaaccaaacgcctcaccttcacgcactttttccaaaatcaccgcaaacaacgacaaaataaccgaacgcgcctcgccgcgctaactaacgttttcaatcaccacccaactaaaaatactatcaccatcgataccaacttcaatcgccacccaaaaatcaacctctaaaaataaacgacgaacattaactacccgatttcgtacgccaacgcgcgtttcctcactaccaaaaaactattccgatacaccgctctcgacgacaacgaatacaatataacaaaatccttcgccgaaaatctcgtaaaatacctacaaaataacctaaattttaacgaaattaataatcgcacaaacaacttaataca

SEQ ID NO: 6261 - DNA, 795 bp, Artificial Sequence
  chemically treated genomic DNA (Homo sapiens) CpG-island No: 6261
aggcgggcggcggggagaatggttagtgtcgcgttcgaggattgtagttcgttcgggaggagagggttggatttcgaggggttaggggcgttcgtagtcgtcgtgttcgggaggggcgttcgtttttttgataatcgcgttaagggcgtagttttttttttgggtcgggggaggggagagaaaacgaggggattttttgcgttaaggcggcggcggttaagggtgttttttgggcgtagtagtcgtaggtttggttcgcggggttttgttcgttcgcggttcgcgtttatcgtgtattttcgttttaggtcgttttttttatagcgaaaggacgggatgtagatttttatggtcgcgtcggttagtcggttgagggcgagttgggggtaggtttacggtcgcggtcgtcgtttcgtttacggtcgggtcgtttcgtttttcgtttcgttgcgttcgcggggtttcgaggttgcgggtcggatttaggtttgcgggttgattcggtcgttttcgcgttttgggcgtgtcgggggtcggaagtagagggcgtagggttttaggcgtttgggtttcgggtttaacgggcggtggagattagttgggttcgaaagaggcggggttagaaaatttgagtttgtagaaacggggtgtgcgcgttaacgcgttgggcgcggggattgggtcgtattcggcgttttttgttttgcggatttcggttggagtttgatttgtagtttgttagacgttattattaagagattgttagatagtaaagaatagaaagagtggcgtttt

SEQ ID NO: 6262 - DNA, 795 bp, Artificial Sequence
  chemically treated genomic DNA (Homo sapiens) CpG-island No: 6262
aaaacgccactctttctattctttactatctaacaatctcttaataataacgtctaacaaactacaaatcaaactccaaccgaaatccgcaaaacaaaaaacgccgaatacgacccaatccccgcgcccaacgcgttaacgcgcacaccccgtttctacaaactcaaattttctaaccccgcctctttcgaacccaactaatctccaccgcccgttaaacccgaaacccaaacgcctaaaaccctacgccctctacttccgacccccgacacgcccaaaacgcgaaaacgaccgaatcaacccgcaaacctaaatccgacccgcaacctcgaaaccccgcgaacgcaacgaaacgaaaaacgaaacgacccgaccgtaaacgaaacgacgaccgcgaccgtaaacctacccccaactcgccctcaaccgactaaccgacgcgaccataaaaatctacatcccgtcctttcgctataaaaaaaacgacctaaaacgaaaatacacgataaacgcgaaccgcgaacgaacaaaaccccgcgaaccaaacctacgactactacgcccaaaaaacacccttaaccgccgccgccttaacgcaaaaaatcccctcgttttctctcccctcccccgacccaaaaaaaaaactacgcccttaacgcgattatcaaaaaaacgaacgcccctcccgaacacgacgactacgaacgcccctaacccctcgaaatccaaccctctcctcccgaacgaactacaatcctcgaacgcgacactaaccattctccccgccgcccgcct

SEQ ID NO: 6263 - DNA, 795 bp, Artificial Sequence
  chemically treated genomic DNA (Homo sapiens) CpG-island No: 6263
aaagcgttattttttttattttttgttgtttggtaattttttaatggtggcgtttagtaaattgtaaattaagttttagtcggagttcgtagggtagggagcgtcgggtgcggtttagttttcgcgtttagcgcgttggcgcgtatatttcgtttttgtagatttaggttttttggtttcgtttttttcgggtttagttgatttttatcgttcgttaggttcgaaatttaggcgtttggagttttgcgttttttgttttcggttttcggtacgtttagggcgcgggagcggtcgggttagttcgtagatttgagttcggttcgtagtttcggggtttcgcgggcgtagcggggcgggaggcggggcggttcggtcgtgggcggagcggcggtcgcggtcgtgagtttgtttttaattcgtttttagtcggttggtcggcgcggttatggaggtttatatttcgttttttcgttatgaagagagcgatttggagcggggatatacggtaggcgcgggtcgcgggcggatagggtttcgcgagttaggtttgcggttgttgcgtttaggaaatatttttggtcgtcgtcgttttggcgtagggggttttttcgtttttttttttttttttcggtttagaggaagggttgcgtttttggcgcggttgttaaggaaacgggcgtttttttcgggtacggcggttgcgggcgtttttagtttttcggggtttaatttttttttttcggacgagttgtagttttcggacgcggtattagttatttttttcgtcgttcgttt

SEQ ID NO: 6264 - DNA, 795 bp, Artificial Sequence
  chemically treated genomic DNA (Homo sapiens) CpG-island No: 6264
aaacgaacgacgaaaaaaataactaataccgcgtccgaaaactacaactcgtccgaaaaaaaaaaattaaaccccgaaaaactaaaaacgcccgcaaccgccgtacccgaaaaaaacgcccgtttccttaacaaccgcgccaaaaacgcaacccttcctctaaaccgaaaaaaaaaaaaaaaaacgaaaaaaccccctacgccaaaacgacgacgaccaaaaatatttcctaaacgcaacaaccgcaaacctaactcgcgaaaccctatccgcccgcgacccgcgcctaccgtatatccccgctccaaatcgctctcttcataacgaaaaaacgaaatataaacctccataaccgcgccgaccaaccgactaaaaacgaattaaaaacaaactcacgaccgcgaccgccgctccgcccacgaccgaaccgccccgcctcccgccccgctacgcccgcgaaaccccgaaactacgaaccgaactcaaatctacgaactaacccgaccgctcccgcgccctaaacgtaccgaaaaccgaaaacaaaaaacgcaaaactccaaacgcctaaatttcgaacctaacgaacgataaaaatcaactaaacccgaaaaaaacgaaaccaaaaaacctaaatctacaaaaacgaaatatacgcgccaacgcgctaaacgcgaaaactaaaccgcacccgacgctccctaccctacgaactccgactaaaacttaatttacaatttactaaacgccaccattaaaaaattaccaaacaacaaaaaataaaaaaaataacgcttt

SEQ ID NO: 6265 - DNA, 584 bp, Artificial Sequence
  chemically treated genomic DNA (Homo sapiens) CpG-island No: 6265
atcgagtacgttattaatcgcgttgattatggaagttaaacgtttgttcgacgtgttggataagtaattggggtagtataagtttgttgcgggcgatgagtatattattgcggatatggcgatttggtcgtggtttggtaacgtggtgttaggtggtgtgtatgatgtcgttgagttttttgatgcgggtaggtataagtatgtataacgttgggcgaacgaagtaggcgaacgttcggcggtgaaacgtgggcgtattgttaatcgtattaacggatcgttgaatgagtagttgtatgagcgttatgacgttagtgatttcgagacgaatacggtagataagcgttaggggtaagggttggtgttcgtcgtatgtaagttatttaggtcggataaggcgtttacgtcggattcggtaatcgtgtataatgtttgatgcgacgttgtcgcgttttattaggtttacggtttacgggcgaagtgtagttcggataaggcgtttaatttcgtattcggttagtcgtgttattattaacggtatattttagtttattggcgtggtagttaatatgttcgttaataaa

SEQ ID NO: 6266 - DNA, 584 bp, Artificial Sequence
  chemically treated genomic DNA (Homo sapiens) CpG-island No: 6266
tttattaacgaacatattaactaccacgccaataaactaaaatataccgttaataataacacgactaaccgaatacgaaattaaacgccttatccgaactacacttcgcccgtaaaccgtaaacctaataaaacgcgacaacgtcgcatcaaacattatacacgattaccgaatccgacgtaaacgccttatccgacctaaataacttacatacgacgaacaccaacccttacccctaacgcttatctaccgtattcgtctcgaaatcactaacgtcataacgctcatacaactactcattcaacgatccgttaatacgattaacaatacgcccacgtttcaccgccgaacgttcgcctacttcgttcgcccaacgttatacatacttatacctacccgcatcaaaaaactcaacgacatcatacacaccacctaacaccacgttaccaaaccacgaccaaatcgccatatccgcaataatatactcatcgcccgcaacaaacttatactaccccaattacttatccaacacgtcgaacaaacgtttaacttccataatcaacgcgattaataacgtactcgat

SEQ ID NO: 6267 - DNA, 584 bp, Artificial Sequence
  chemically treated genomic DNA (Homo sapiens) CpG-island No: 6267
tttattggcgagtatattggttattacgttaataaattggaatatgtcgttgataatagtacgattggtcggatgcggggttgaacgttttattcgggttatatttcgttcgtaagtcgtaggtttgataagacgcggtagcgtcgtattaggtattgtgtacgattgtcggattcggcgtgaacgttttattcggtttggatggtttgtatgcgacgaatattaatttttatttttgacgtttatttgtcgtattcgtttcgaaattattggcgttatggcgtttatgtaattgtttatttagcggttcgttggtgcggttaataatacgtttacgttttatcgtcggacgttcgtttatttcgttcgtttagcgttgtatatgtttatatttgttcgtattaagaaatttagcggtattatatatattatttaatattacgttgttaaattacggttaaatcgttatattcgtaatggtgtatttatcgttcgtaataaatttatgttgttttagttgtttatttagtacgtcgagtagacgtttggtttttatggttaacgcggttgatggcgtattcgat

SEQ ID NO: 6268 - DNA, 584 bp, Artificial Sequence
  chemically treated genomic DNA (Homo sapiens) CpG-island No: 6268
atcgaatacgccatcaaccgcgttaaccataaaaaccaaacgtctactcgacgtactaaataaacaactaaaacaacataaatttattacgaacgataaatacaccattacgaatataacgatttaaccgtaatttaacaacgtaatattaaataatatatataataccgctaaatttcttaatacgaacaaatataaacatatacaacgctaaacgaacgaaataaacgaacgtccgacgataaaacgtaaacgtattattaaccgcaccaacgaaccgctaaataaacaattacataaacgccataacgccaataatttcgaaacgaatacgacaaataaacgtcaaaaataaaaattaatattcgtcgcatacaaaccatccaaaccgaataaaacgttcacgccgaatccgacaatcgtacacaatacctaatacgacgctaccgcgtcttatcaaacctacgacttacgaacgaaatataacccgaataaaacgttcaaccccgcatccgaccaatcgtactattatcaacgacatattccaatttattaacgtaataaccaatatactcgccaataaa

SEQ ID NO: 6269 - DNA, 1045 bp, Artificial Sequence
  chemically treated genomic DNA (Homo sapiens) CpG-island No: 6269
tagtttaagttttgtgattcggttgatacgatggattattgagaaatttttatttcgtaggacgacgcgttttatgcggtgattatttacgcgtcgggttcgtagtgcgttttgtcgttgatttcgtagatgttgatggaattttttagcggtaatttgttcggtatgacgtagaacgtcgggatgggttgggacgttaataagtttatcggtaaagaggtgttgattatcggtatttagggcggtattcgcgtcggagacggacgtttaatcgcgttgggttattatatcgggtattgggagatcggtatgtagatgtaggcggcggcgaaggagattattcgtaatggcgggatttcgttcgcggttttcgttagcgattcgtgcgacgggcgttcgtagggtacgtacggtatgttcgattttttgtcgtatcgtaacgacgcggcgatcgtgtttcgtcgtttgattcgttttttgtcgacgcggcgggcggtgatcggcgtagcgatttgcgataaagggttgttcgttattatgattgcgttggtcgcgatgtacgatttgtcgattattttggtgtcgggcggggcgacgttgtcgtcgatcgtcggggaagacgcgggtaaggtgtagattatcggcgcgcgtttcgttaattacgaattttttttgtaggaggtcgtcgaattgggttgtcgcgtttgcgtttcgtcgggcggcgggtgttagtttttcggtacggcgggtatttcgtaggtggtcgcggaggcgttgggtttggcgttgtcgtatttcgcgttggcgtcgttcgggtaggcggtgtggttggagatcgttcgttagtcggcgcgcgcggttagcgagttggatagtcgcggtattattacgcgggatatttttttcgataaagttatcgaaaacgcgatggtgatttacgcggcgttcggcggttttattaatttattgttgtatatttcggttatcgtttacgcggcgggttgtacgatttcggacgttgagtattggacgcgtattaatcgta

SEQ ID NO: 6270 - DNA, 1045 bp, Artificial Sequence
  chemically treated genomic DNA (Homo sapiens) CpG-island No: 6270
tacgattaatacgcgtccaatactcaacgtccgaaatcgtacaacccgccgcgtaaacgataaccgaaatatacaacaataaattaataaaaccgccgaacgccgcgtaaatcaccatcgcgttttcgataactttatcgaaaaaaatatcccgcgtaataataccgcgactatccaactcgctaaccgcgcgcgccgactaacgaacgatctccaaccacaccgcctacccgaacgacgccaacgcgaaatacgacaacgccaaacccaacgcctccgcgaccacctacgaaatacccgccgtaccgaaaaactaacacccgccgcccgacgaaacgcaaacgcgacaacccaattcgacgacctcctacaaaaaaaattcgtaattaacgaaacgcgcgccgataatctacaccttacccgcgtcttccccgacgatcgacgacaacgtcgccccgcccgacaccaaaataatcgacaaatcgtacatcgcgaccaacgcaatcataataacgaacaaccctttatcgcaaatcgctacgccgatcaccgcccgccgcgtcgacaaaaaacgaatcaaacgacgaaacacgatcgccgcgtcgttacgatacgacaaaaaatcgaacataccgtacgtaccctacgaacgcccgtcgcacgaatcgctaacgaaaaccgcgaacgaaatcccgccattacgaataatctccttcgccgccgcctacatctacataccgatctcccaatacccgatataataacccaacgcgattaaacgtccgtctccgacgcgaataccgccctaaataccgataatcaacacctctttaccgataaacttattaacgtcccaacccatcccgacgttctacgtcataccgaacaaattaccgctaaaaaattccatcaacatctacgaaatcaacgacaaaacgcactacgaacccgacgcgtaaataatcaccgcataaaacgcgtcgtcctacgaaataaaaatttctcaataatccatcgtatcaaccgaatcacaaaacttaaacta

SEQ ID NO: 6271 - DNA, 1045 bp, Artificial Sequence
  chemically treated genomic DNA (Homo sapiens) CpG-island No: 6271
tacggttgatgcgcgtttagtgtttaacgttcgggatcgtgtagttcgtcgcgtgggcgatggtcggaatgtgtagtagtaaattggtggagtcgtcgaacgtcgcgtggattattatcgcgttttcgatggttttatcggagaggatatttcgcgtggtgatgtcgcggttatttagttcgttgatcgcgcgcgtcgattggcgggcgatttttagttatatcgtttgttcggacggcgttagcgcggagtgcggtagcgttagatttagcgttttcgcgattatttgcgaggtgttcgtcgtgtcgaggaattgatattcgtcgttcggcgaggcgtaggcgcgatagtttagttcggcggttttttgtagggagagttcgtggttggcgaaacgcgcgtcgatggtttgtattttgttcgcgtttttttcgacggtcggcggtagcgtcgtttcgttcggtattagaatagtcggtaggtcgtgtatcgcggttagcgtaattatggtggcgggtagttttttatcgtaggtcgttacgtcgattatcgttcgtcgcgtcggtagggagcggattaggcggcgaaatacgatcgtcgcgtcgttgcggtacggtagggaatcgaatatatcgtgcgtgttttgcgagcgttcgtcgtacggatcgttgacgaaggtcgcgaacgggatttcgttattgcgggtgatttttttcgtcgtcgtttgtatttgtatgtcgattttttaatgttcggtgtggtagtttagcgcgattgggcgttcgttttcggcgcggatgtcgttttgagtgtcgataattagtatttttttgtcggtgagtttgttggcgttttagtttatttcggcgttttgcgttatgtcgaataggttgtcgttgggagattttattagtatttgcggggttagcggtagagcgtattgcggattcgacgcgtgggtgattatcgtataaaacgcgtcgttttgcggggtgaaaattttttaatggtttatcgtattagtcgggttataaagtttgagttg

SEQ ID NO: 6272 - DNA, 1045 bp, Artificial Sequence
  chemically treated genomic DNA (Homo sapiens) CpG-island No: 6272
caactcaaactttataacccgactaatacgataaaccattaaaaaattttcaccccgcaaaacgacgcgttttatacgataatcacccacgcgtcgaatccgcaatacgctctaccgctaaccccgcaaatactaataaaatctcccaacgacaacctattcgacataacgcaaaacgccgaaataaactaaaacgccaacaaactcaccgacaaaaaaatactaattatcgacactcaaaacgacatccgcgccgaaaacgaacgcccaatcgcgctaaactaccacaccgaacattaaaaaatcgacatacaaatacaaacgacgacgaaaaaaatcacccgcaataacgaaatcccgttcgcgaccttcgtcaacgatccgtacgacgaacgctcgcaaaacacgcacgatatattcgattccctaccgtaccgcaacgacgcgacgatcgtatttcgccgcctaatccgctccctaccgacgcgacgaacgataatcgacgtaacgacctacgataaaaaactacccgccaccataattacgctaaccgcgatacacgacctaccgactattctaataccgaacgaaacgacgctaccgccgaccgtcgaaaaaaacgcgaacaaaatacaaaccatcgacgcgcgtttcgccaaccacgaactctccctacaaaaaaccgccgaactaaactatcgcgcctacgcctcgccgaacgacgaatatcaattcctcgacacgacgaacacctcgcaaataatcgcgaaaacgctaaatctaacgctaccgcactccgcgctaacgccgtccgaacaaacgatataactaaaaatcgcccgccaatcgacgcgcgcgatcaacgaactaaataaccgcgacatcaccacgcgaaatatcctctccgataaaaccatcgaaaacgcgataataatccacgcgacgttcgacgactccaccaatttactactacacattccgaccatcgcccacgcgacgaactacacgatcccgaacgttaaacactaaacgcgcatcaaccgta

SEQ ID NO: 6273 - DNA, 560 bp, Artificial Sequence
  chemically treated genomic DNA (Homo sapiens) CpG-island No: 6273
gtgtattttggagttcgcggttattgtatcgtgtttgggggtggtgcgattttgaattgttcgcgaagcgttgtcgtgaggattatacggaggaaggagaaatgtaatattaggggtttggacggttggcgattatatatagttagaggggtttacgcggtttttacgtcgttatttataaggtttcgttacggtcgacgtagacgttagtttgtttgcgttcgtcgtatagacgtttcgtatggatttatattacgttggcggtacgtatcggacgttacgtttatcgttttattgttttttataattatgttttgcgtcgtgaatacggtacgatttttattttattgtattcgattatatgggtcgtttgtcgtacggttgttaatgatacgttgcgatatatataattacgtttagtaatgtgaatgcgtatttttgttgttttgattatattattttgttcggtttgatcgtagggtttgtacgttgggtttattgcgtgatttgtcggatacgttttgattatcgatttatggtttatttcgtgagatgtttat

SEQ ID NO: 6274 - DNA, 560 bp, Artificial Sequence
  chemically treated genomic DNA (Homo sapiens) CpG-island No: 6274
ataaacatctcacgaaataaaccataaatcgataatcaaaacgtatccgacaaatcacgcaataaacccaacgtacaaaccctacgatcaaaccgaacaaaataatataatcaaaacaacaaaaatacgcattcacattactaaacgtaattatatatatcgcaacgtatcattaacaaccgtacgacaaacgacccatataatcgaatacaataaaataaaaatcgtaccgtattcacgacgcaaaacataattataaaaaacaataaaacgataaacgtaacgtccgatacgtaccgccaacgtaatataaatccatacgaaacgtctatacgacgaacgcaaacaaactaacgtctacgtcgaccgtaacgaaaccttataaataacgacgtaaaaaccgcgtaaacccctctaactatatataatcgccaaccgtccaaacccctaatattacatttctccttcctccgtataatcctcacgacaacgcttcgcgaacaattcaaaatcgcaccacccccaaacacgatacaataaccgcgaactccaaaatacac

SEQ ID NO: 6275 - DNA, 560 bp, Artificial Sequence
  chemically treated genomic DNA (Homo sapiens) CpG-island No: 6275
atgggtattttacgaaataagttataagtcggtaattagggcgtattcggtaaattacgtaataaatttaacgtataaattttgcggttaagtcgggtagggtagtgtaattagggtaataaggatgcgtatttatattgttgggcgtaattatgtatgtcgtagcgtattattagtagtcgtgcggtaaacggtttatatagtcgggtatagtaaggtgagggtcgtgtcgtatttacggcgtaaggtatggttataggggatagtagggcggtgggcgtggcgttcggtgcgtgtcgttagcgtggtgtgggtttatgcggggcgtttatgcggcgggcgtaggtaagttggcgtttgcgtcggtcgtaacggggttttataggtggcggcgtaaaagtcgcgtgggtttttttggttgtgtgtagtcgttagtcgtttaggtttttggtattatatttttttttttttcgtgtaatttttacggtaacgtttcgcgggtagtttaaagtcgtattatttttaggtacggtatagtggtcgcgggttttaaaatgtat

SEQ ID NO: 6276 - DNA, 560 bp, Artificial Sequence
  chemically treated genomic DNA (Homo sapiens) CpG-island No: 6276
atacattttaaaacccgcgaccactataccgtacctaaaaataatacgactttaaactacccgcgaaacgttaccgtaaaaattacacgaaaaaaaaaaaaatataataccaaaaacctaaacgactaacgactacacacaaccaaaaaaacccacgcgacttttacgccgccacctataaaaccccgttacgaccgacgcaaacgccaacttacctacgcccgccgcataaacgccccgcataaacccacaccacgctaacgacacgcaccgaacgccacgcccaccgccctactatcccctataaccataccttacgccgtaaatacgacacgaccctcaccttactatacccgactatataaaccgtttaccgcacgactactaataatacgctacgacatacataattacgcccaacaatataaatacgcatccttattaccctaattacactaccctacccgacttaaccgcaaaatttatacgttaaatttattacgtaatttaccgaatacgccctaattaccgacttataacttatttcgtaaaatacccat

SEQ ID NO: 6277 - DNA, 915 bp, Artificial Sequence
  chemically treated genomic DNA (Homo sapiens) CpG-island No: 6277
cgttttcgtttatcgtatttgtagtttcgtttcgtttagggagttttcgttataatattttcggttttagttttttaatcggttttcgtcgttttttatttttttttttttagttttttttttttgtttttatcgttttttttaatatagttacgtgagggacgcgcgcgggggtagttgggagtagtattgtcggttggttagggttcggttttaatatggcggtttcggtcgggtagtgattaaggttttgtcgttcgaaggattaagtggtgattgtcggcgtttttatttatcggggtggaatgcgagtacgcggggacgagcgttgagaagcggcggtgacgggaaggggggggttagtggattgtgttttagaaatcgaagcggcggcgtttgtttttttttgtttttaggttttagtgcgttcggggtttcgttcggtcgggttaggtcggcgggcggcggcggtagttgttgtagtcgtaggataatttcgtagggtgggtcggagggcgggcgtcgtcgttgtttgtgttgcggcgatggtttagtgtgtataattagtgtaggagttaatttcggattttttcgttttttgtgtcgttgcgttgtgtagcgacgaagtcgagcggtttattcgttttaattattttagtttcgcggagttgtttaagtttttttttcgttttattttcgagggtatgtggtatttttttttttttagtgggttttcgtaaagtcgtggtcgggagaaggaagttgcgggcgggtagggaagagaagggtagtgtttacgttttggagtcggtatcgtggcgtttggggttgtggtttcgcggtgtttcgggggcggttggaggagggatcgtgaggttgttaagatagcgtagttttaagttttagtttttttgg

SEQ ID NO: 6278 - DNA, 915 bp, Artificial Sequence
  chemically treated genomic DNA (Homo sapiens) CpG-island No: 6278
ccaaaaaaactaaaacttaaaactacgctatcttaacaacctcacgatccctcctccaaccgcccccgaaacaccgcgaaaccacaaccccaaacgccacgataccgactccaaaacgtaaacactacccttctcttccctacccgcccgcaacttccttctcccgaccacgactttacgaaaacccactaaaaaaaaaaaaataccacataccctcgaaaataaaacgaaaaaaaaacttaaacaactccgcgaaactaaaataattaaaacgaataaaccgctcgacttcgtcgctacacaacgcaacgacacaaaaaacgaaaaaatccgaaattaactcctacactaattatacacactaaaccatcgccgcaacacaaacaacgacgacgcccgccctccgacccaccctacgaaattatcctacgactacaacaactaccgccgccgcccgccgacctaacccgaccgaacgaaaccccgaacgcactaaaacctaaaaacaaaaaaaaacaaacgccgccgcttcgatttctaaaacacaatccactaaccccccccttcccgtcaccgccgcttctcaacgctcgtccccgcgtactcgcattccaccccgataaataaaaacgccgacaatcaccacttaatccttcgaacgacaaaaccttaatcactacccgaccgaaaccgccatattaaaaccgaaccctaaccaaccgacaatactactcccaactacccccgcgcgcgtccctcacgtaactatattaaaaaaaacgataaaaacaaaaaaaaaaaactaaaaaaaaaaaaataaaaaacgacgaaaaccgattaaaaaactaaaaccgaaaatattataacgaaaactccctaaacgaaacgaaactacaaatacgataaacgaaaacg

SEQ ID NO: 6279 - DNA, 915 bp, Artificial Sequence
  chemically treated genomic DNA (Homo sapiens) CpG-island No: 6279
ttagagaaattggagtttaggattgcgttgttttgataattttacggttttttttttagtcgttttcggagtatcgcggggttatagttttagacgttacggtatcggttttaggacgtaaatattgttttttttttttttgttcgttcgtaatttttttttttcgattacggttttgcgggagtttattggaaaagggaggatattatatattttcggaagtgaggcgggagaagggtttaagtagtttcgcgaagttgaggtgattgagacgagtgagtcgttcggtttcgtcgttgtatagcgtagcgatataggggacgaaggagttcgggattagtttttgtattgattgtatatattgggttatcgtcgtagtataggtagcggcggcgttcgtttttcggtttattttgcgaggttattttgcggttgtagtagttatcgtcgtcgttcgtcggtttggttcggtcgggcggggtttcgaacgtattggagtttagaaataagaaggaatagacgtcgtcgtttcggtttttggggtataatttattgattttttttttttcgttatcgtcgttttttagcgttcgttttcgcgtgttcgtattttatttcgataggtggagacgtcgatagttattatttagtttttcggacggtaaaattttggttattgttcggtcggaatcgttatgttgaggtcgaattttgattaatcggtagtattatttttagttgttttcgcgcgcgttttttacgtgattgtgttaaaggagacggtaggggtaagggaagagagttgaggagagggaagtgaaaaacgacggaggtcggttgggaggttggagtcggaagtgttgtgacggaagttttttgggcggggcggggttataagtgcggtgggcgggggcg

SEQ ID NO: 6280 - DNA, 915 bp, Artificial Sequence
  chemically treated genomic DNA (Homo sapiens) CpG-island No: 6280
cgcccccgcccaccgcacttataaccccgccccgcccaaaaaacttccgtcacaacacttccgactccaacctcccaaccgacctccgtcgtttttcacttccctctcctcaactctcttcccttacccctaccgtctcctttaacacaatcacgtaaaaaacgcgcgcgaaaacaactaaaaataatactaccgattaatcaaaattcgacctcaacataacgattccgaccgaacaataaccaaaattttaccgtccgaaaaactaaataataactatcgacgtctccacctatcgaaataaaatacgaacacgcgaaaacgaacgctaaaaaacgacgataacgaaaaaaaaaaaatcaataaattataccccaaaaaccgaaacgacgacgtctattccttcttatttctaaactccaatacgttcgaaaccccgcccgaccgaaccaaaccgacgaacgacgacgataactactacaaccgcaaaataacctcgcaaaataaaccgaaaaacgaacgccgccgctacctatactacgacgataacccaatatatacaatcaatacaaaaactaatcccgaactccttcgtcccctatatcgctacgctatacaacgacgaaaccgaacgactcactcgtctcaatcacctcaacttcgcgaaactacttaaacccttctcccgcctcacttccgaaaatatataatatcctcccttttccaataaactcccgcaaaaccgtaatcgaaaaaaaaaaattacgaacgaacaaaaaaaaaaaaaacaatatttacgtcctaaaaccgataccgtaacgtctaaaactataaccccgcgatactccgaaaacgactaaaaaaaaaaccgtaaaattatcaaaacaacgcaatcctaaactccaatttctctaa

SEQ ID NO: 6281 - DNA, 533 bp, Artificial Sequence
  chemically treated genomic DNA (Homo sapiens) CpG-island No: 6281
tttttgtaattggatttggagttgttattttttaacgttcgtcgcggtggagtttagttttttttttcgaaagttaggttggaggcggtttttaagcgtcgcgcgtttttcggaatttaaatattattcggaatcgtttttgtgaattggaaagtttattgaagttttagagaagtcgcgttattgcggaggtacgtaacgttaagtagggattttttgcgttttcgtcgcggtggttattttggtttgtcgggattatttatttatgttgcgtttgtatttttttgttaggatcgagagcgcgcgagaggagtggttgtgtttattgtatataggcggatttgaggtttggcgacgtcgttggtcgcgatttgggataggacgagtataggaatcgtttggtttgcgttttcgttcgcgtatgaagtcgtggcggcggtcgtttaagtgagttttgcgatttttaggttttattcgttatttttatatagattttgagatttttgattgtgaggggcgttttttcgcgtttt

SEQ ID NO: 6282 - DNA, 533 bp, Artificial Sequence
  chemically treated genomic DNA (Homo sapiens) CpG-island No: 6282
aaaacgcgaaaaaacgcccctcacaatcaaaaatctcaaaatctatataaaaataacgaataaaacctaaaaatcgcaaaactcacttaaacgaccgccgccacgacttcatacgcgaacgaaaacgcaaaccaaacgattcctatactcgtcctatcccaaatcgcgaccaacgacgtcgccaaacctcaaatccgcctatatacaataaacacaaccactcctctcgcgcgctctcgatcctaacaaaaaaatacaaacgcaacataaataaataatcccgacaaaccaaaataaccaccgcgacgaaaacgcaaaaaatccctacttaacgttacgtacctccgcaataacgcgacttctctaaaacttcaataaactttccaattcacaaaaacgattccgaataatatttaaattccgaaaaacgcgcgacgcttaaaaaccgcctccaacctaactttcgaaaaaaaaaactaaactccaccgcgacgaacgttaaaaaataacaactccaaatccaattacaaaaa

SEQ ID NO: 6283 - DNA, 533 bp, Artificial Sequence
  chemically treated genomic DNA (Homo sapiens) CpG-island No: 6283
aggacgcgagaaggcgttttttatagttaggggttttagggtttgtgtggggatggcgggtgaggtttggaggtcgtagggtttatttgagcggtcgtcgttacgattttatgcgcgggcggggacgtaggttaggcggtttttgtgttcgttttgttttaggtcgcgattagcggcgtcgttaagttttagattcgtttgtgtgtaatgggtataattatttttttcgcgcgttttcggttttgataaagaggtatagacgtagtataggtggatggtttcgataagttaaaatggttatcgcggcgaggacgtaggaagtttttgtttgacgttacgtgttttcgtaatggcgcggtttttttgaggttttaatgggttttttaatttatagagacgatttcgggtaatatttaagtttcgagagacgcgcggcgtttaaaggtcgtttttaatttgattttcgaaagaaggggttaagttttatcgcgacgggcgttaggaaatggtaattttaggtttagttgtagagg

SEQ ID NO: 6284 - DNA, 533 bp, Artificial Sequence
  chemically treated genomic DNA (Homo sapiens) CpG-island No: 6284
cctctacaactaaacctaaaattaccatttcctaacgcccgtcgcgataaaacttaaccccttctttcgaaaatcaaattaaaaacgacctttaaacgccgcgcgtctctcgaaacttaaatattacccgaaatcgtctctataaattaaaaaacccattaaaacctcaaaaaaaccgcgccattacgaaaacacgtaacgtcaaacaaaaacttcctacgtcctcgccgcgataaccattttaacttatcgaaaccatccacctatactacgtctatacctctttatcaaaaccgaaaacgcgcgaaaaaaataattatacccattacacacaaacgaatctaaaacttaacgacgccgctaatcgcgacctaaaacaaaacgaacacaaaaaccgcctaacctacgtccccgcccgcgcataaaatcgtaacgacgaccgctcaaataaaccctacgacctccaaacctcacccgccatccccacacaaaccctaaaacccctaactataaaaaacgccttctcgcgtcct

SEQ ID NO: 6285 - DNA, 633 bp, Artificial Sequence
  chemically treated genomic DNA (Homo sapiens) CpG-island No: 6285
ttcgttgtattttatggttttttgtgtttttcggttacgattgtttatagtttcgtttttttcgttgcgtgtcggattatggcgtaggggtagcgtaagttttaggcgtataaattcgtaaagagtaagacggtagcggtagtttttgaaaagaatcggggtttaagaaaaggcggtaaggagcggttcggggatttgggggcgaggtggattttcggtttttcggttttacgtgagtatatttttttttaggtcgtgttatcgtttttaagaaggcgcgcgtcgtgtagtagtaaaagtttaagaaggtgtgcgggggcgagagatggagttcggagggcggcgagtagcgaggggtggaattcggaggacggcgaggggggatgggtggagttcggggattagtgaggggagagggtggattttggggacgagttaggagcgaggggatagagttaggggtcgcgttaggagcgaaggatggagttcggggcgtagagaggggtaagaggtggaagttggcgagggataggggttgggggacgtgttagggacgagagatgaaatttggaggtcggcgagggaaggagtatagggatcggtaaagggtaagggatgaggtttggaggattt

SEQ ID NO: 6286 - DNA, 633 bp, Artificial Sequence
  chemically treated genomic DNA (Homo sapiens) CpG-island No: 6286
aaatcctccaaacctcatcccttaccctttaccgatccctatactccttccctcgccgacctccaaatttcatctctcgtccctaacacgtcccccaacccctatccctcgccaacttccacctcttacccctctctacgccccgaactccatccttcgctcctaacgcgacccctaactctatcccctcgctcctaactcgtccccaaaatccaccctctcccctcactaatccccgaactccacccatcccccctcgccgtcctccgaattccacccctcgctactcgccgccctccgaactccatctctcgcccccgcacaccttcttaaacttttactactacacgacgcgcgccttcttaaaaacgataacacgacctaaaaaaaaatatactcacgtaaaaccgaaaaaccgaaaatccacctcgcccccaaatccccgaaccgctccttaccgccttttcttaaaccccgattcttttcaaaaactaccgctaccgtcttactctttacgaatttatacgcctaaaacttacgctacccctacgccataatccgacacgcaacgaaaaaaacgaaactataaacaatcgtaaccgaaaaacacaaaaaaccataaaatacaacgaa

SEQ ID NO: 6287 - DNA, 633 bp, Artificial Sequence
  chemically treated genomic DNA (Homo sapiens) CpG-island No: 6287
gagttttttaggttttattttttgttttttgtcgatttttgtgttttttttttcgtcggtttttagattttatttttcgtttttagtacgttttttagtttttatttttcgttagtttttattttttatttttttttgcgtttcgggttttatttttcgtttttaacgcggtttttggttttattttttcgtttttagttcgtttttaggatttattttttttttttattgattttcgggttttatttattttttttcgtcgtttttcgggttttatttttcgttattcgtcgtttttcgggttttatttttcgttttcgtatatttttttgagtttttgttgttgtacgacgcgcgtttttttgggagcgataatacgatttggggaaagatgtgtttacgtgaggtcgggaagtcgggggtttatttcgtttttaagttttcgggtcgttttttatcgtttttttttgggtttcgattttttttagaggttgtcgttgtcgttttattttttgcgggtttgtgcgtttgaaatttgcgttgtttttgcgttatggttcggtacgtagcggaagaggcgggattgtgagtagtcgtagtcggaaggtatagggaattatgggatatagcggg

SEQ ID NO: 6288 - DNA, 633 bp, Artificial Sequence
  chemically treated genomic DNA (Homo sapiens) CpG-island No: 6288
cccgctatatcccataattccctataccttccgactacgactactcacaatcccgcctcttccgctacgtaccgaaccataacgcaaaaacaacgcaaatttcaaacgcacaaacccgcaaaaaataaaacgacaacgacaacctctaaaaaaaatcgaaacccaaaaaaaaacgataaaaaacgacccgaaaacttaaaaacgaaataaacccccgacttcccgacctcacgtaaacacatctttccccaaatcgtattatcgctcccaaaaaaacgcgcgtcgtacaacaacaaaaactcaaaaaaatatacgaaaacgaaaaataaaacccgaaaaacgacgaataacgaaaaataaaacccgaaaaacgacgaaaaaaaataaataaaacccgaaaatcaataaaaaaaaaaaataaatcctaaaaacgaactaaaaacgaaaaaataaaaccaaaaaccgcgttaaaaacgaaaaataaaacccgaaacgcaaaaaaaaataaaaaataaaaactaacgaaaaataaaaactaaaaaacgtactaaaaacgaaaaataaaatctaaaaaccgacgaaaaaaaaaacacaaaaatcgacaaaaaacaaaaaataaaacctaaaaaactc

SEQ ID NO: 6289 - DNA, 768 bp, Artificial Sequence
  chemically treated genomic DNA (Homo sapiens) CpG-island No: 6289
gagggcgttgtgggaagcgggcgtgggtgtttagagatttcggggttcgggaaagggatgtagaagggatttgtggcggggacgcgggaaaggggtttggtcgcggggaagaggatcgggtttatcgttggggtttttgggtagcggtttcgtatttcgtcgggttatttagttatatttatttatcgcgtagcgtttttttcgttttggcgtttgttcggaggttcgcggcggttgcggtagttttttagtaataataatttttgtttcggtttttatttcgggggcgtttacgttcgtttgatttcgtcgttcgttaagcgagcgtattaggtcgttgtttagttattcgcgcggttttcgatagcgattggagtagggggtgggtttcggtcgtaaattttttcgtcgtttttattgcgtacgcgtcgtgcggtgttaataataatttatatattaggattcggcgttgtcgcgggtatagcgtacgcgcgaggttattatttcgtttttgggtattttgagtattttagtcgcggggggttggtttttgtattgcgcgcgcgcgtttgttttaagtcgtttttttatttttcgtttttcgcgtcgaatcgtttatgttcgcgagattttttttgatgtttcgttttttttcgattatatttttcggatttttcgcgtatgcgttttgcgtagagaattgtaacgtattttttcgtcgtttagtaaagagtttttaggtgaatagtttgattgcgttgatgttta

SEQ ID NO: 6290 - DNA, 768 bp, Artificial Sequence
  chemically treated genomic DNA (Homo sapiens) CpG-island No: 6290
taaacatcaacgcaatcaaactattcacctaaaaactctttactaaacgacgaaaaaatacgttacaattctctacgcaaaacgcatacgcgaaaaatccgaaaaatataatcgaaaaaaaacgaaacatcaaaaaaaatctcgcgaacataaacgattcgacgcgaaaaacgaaaaataaaaaaacgacttaaaacaaacgcgcgcgcgcaatacaaaaaccaaccccccgcgactaaaatactcaaaatacccaaaaacgaaataataacctcgcgcgtacgctatacccgcgacaacgccgaatcctaatatataaattattattaacaccgcacgacgcgtacgcaataaaaacgacgaaaaaatttacgaccgaaacccaccccctactccaatcgctatcgaaaaccgcgcgaataactaaacaacgacctaatacgctcgcttaacgaacgacgaaatcaaacgaacgtaaacgcccccgaaataaaaaccgaaacaaaaattattattactaaaaaactaccgcaaccgccgcgaacctccgaacaaacgccaaaacgaaaaaaacgctacgcgataaataaatataactaaataacccgacgaaatacgaaaccgctacccaaaaaccccaacgataaacccgatcctcttccccgcgaccaaacccctttcccgcgtccccgccacaaatcccttctacatccctttcccgaaccccgaaatctctaaacacccacgcccgcttcccacaacgccctc

SEQ ID NO: 6291 - DNA, 768 bp, Artificial Sequence
  chemically treated genomic DNA (Homo sapiens) CpG-island No: 6291
tagatattaacgtaattaggttgtttatttagggattttttgttaggcggcggagaggtacgttatagttttttacgtaaaacgtatgcgcgaaagattcgggaagtgtgatcggaaaggggcggagtattagggagagtttcgcggatataggcggttcggcgcggaaagcgggaggtggaggggcggtttggggtaagcgcgcgcgcgtagtgtagaagttagtttttcgcggttgaggtatttaaggtgtttaaaggcggggtagtgatttcgcgcgtgcgttgtgttcgcggtagcgtcgggttttagtgtgtgggttgttgttggtatcgtacggcgcgtgcgtagtgaggacggcggagggatttgcggtcgggatttattttttgttttagtcgttatcggaggtcgcgcgggtggttgagtagcggtttggtgcgttcgtttagcgggcgacggaattagacggacgtggacgttttcggagtggaagtcgaagtaggagttgttgttgttgaggggttgtcgtagtcgtcgcgagttttcggatagacgttagagcgaggagggcgttacgcggtgagtgagtgtgattgagtggttcgacggggtgcggggtcgttatttagaagttttagcggtgggttcggttttttttttcgcggttaggtttttttttcgcgttttcgttataggttttttttgtatttttttttcggatttcgaaatttttgggtatttacgttcgttttttatagcgttttt

SEQ ID NO: 6292 - DNA, 768 bp, Artificial Sequence
  chemically treated genomic DNA (Homo sapiens) CpG-island No: 6292
aaaaacgctataaaaaacgaacgtaaatacccaaaaatttcgaaatccgaaaaaaaaatacaaaaaaaacctataacgaaaacgcgaaaaaaaaacctaaccgcgaaaaaaaaaaccgaacccaccgctaaaacttctaaataacgaccccgcaccccgtcgaaccactcaatcacactcactcaccgcgtaacgccctcctcgctctaacgtctatccgaaaactcgcgacgactacgacaacccctcaacaacaacaactcctacttcgacttccactccgaaaacgtccacgtccgtctaattccgtcgcccgctaaacgaacgcaccaaaccgctactcaaccacccgcgcgacctccgataacgactaaaacaaaaaataaatcccgaccgcaaatccctccgccgtcctcactacgcacgcgccgtacgataccaacaacaacccacacactaaaacccgacgctaccgcgaacacaacgcacgcgcgaaatcactaccccgcctttaaacaccttaaatacctcaaccgcgaaaaactaacttctacactacgcgcgcgcgcttaccccaaaccgcccctccacctcccgctttccgcgccgaaccgcctatatccgcgaaactctccctaatactccgcccctttccgatcacacttcccgaatctttcgcgcatacgttttacgtaaaaaactataacgtacctctccgccgcctaacaaaaaatccctaaataaacaacctaattacgttaatatcta

SEQ ID NO: 6293 - DNA, 994 bp, Artificial Sequence
  chemically treated genomic DNA (Homo sapiens) CpG-island No: 6293
ttacgtttcgttttttatcgggtcggttgcggttgtagtagtaagtttcgtgtcgtcgcggtcgtcgcggaagttaggtagcgtttcgaggtagaagacgacgatggagacgaggatgattagtacggagattacggcgagtacgcgcgcggtttgagagttttcgggaaattcgaaaagtagttatagttggcgggcgaaggcgcggcggggtagggggcgttcgggcggtatcgggtagttttcgttttcgcgtaggcgtgttagggtcgtcgcgtttagttcgtagaaggttattttttttaggaagacgtcgagcggtacgtgcgtcggtcgtcgtagtcgtttatcggattggtagtagtagagtacggcgtcgaagttgggtcggtgtcggtcgaagaaatattcgcggcgcgcgtcgtcgtagaagcggtcgcggcgcgttgggttttttagtagagtgttcgggaagcggtttagcgtgcgcgttcgcgtttcgaagcgtagttcggttacgttgagtattagtcgttcgtagtagtcgtacggcggcgggtatcgcggttttatggcgcgcgtagtttcggcgattcgcgaatcgacgtgtggtttcgacgttcggtttcggtgcggtttcgtttcggtcgtttcggtcgtcgtcgtcgtcgttttagttcggtgttcggtgttcggtgttcgcgcgtaaaaatagttcggtagggcggttagggcgcgagggagggggtattgtgatttcggcggggcggagggcgatagggcgatcgcgcgttttttgtcgggacgttcgttttgttttgtttcgtcgtcgtcgtcgttcgcgtttgttttgcgtttttttcgtttcggggtttttttttttttcgtttttttgtcgtcgggattttgttttgcgtttttttaagttttcgtgtgcgtgtgtttcgttagaattaggttttagttgtagtcgttttttttttttttttttttt

SEQ ID NO: 6294 - DNA, 994 bp, Artificial Sequence
  chemically treated genomic DNA (Homo sapiens) CpG-island No: 6294
aaaaaaaaaaaaaaaaaaaaacgactacaactaaaacctaattctaacgaaacacacgcacacgaaaacttaaaaaaacgcaaaacaaaatcccgacgacaaaaaaacgaaaaaaaaaaaaaccccgaaacgaaaaaaacgcaaaacaaacgcgaacgacgacgacgacgaaacaaaacaaaacgaacgtcccgacaaaaaacgcgcgatcgccctatcgccctccgccccgccgaaatcacaataccccctccctcgcgccctaaccgccctaccgaactatttttacgcgcgaacaccgaacaccgaacaccgaactaaaacgacgacgacgacgaccgaaacgaccgaaacgaaaccgcaccgaaaccgaacgtcgaaaccacacgtcgattcgcgaatcgccgaaactacgcgcgccataaaaccgcgatacccgccgccgtacgactactacgaacgactaatactcaacgtaaccgaactacgcttcgaaacgcgaacgcgcacgctaaaccgcttcccgaacactctactaaaaaacccaacgcgccgcgaccgcttctacgacgacgcgcgccgcgaatatttcttcgaccgacaccgacccaacttcgacgccgtactctactactaccaatccgataaacgactacgacgaccgacgcacgtaccgctcgacgtcttcctaaaaaaaataaccttctacgaactaaacgcgacgaccctaacacgcctacgcgaaaacgaaaactacccgataccgcccgaacgccccctaccccgccgcgccttcgcccgccaactataactacttttcgaatttcccgaaaactctcaaaccgcgcgcgtactcgccgtaatctccgtactaatcatcctcgtctccatcgtcgtcttctacctcgaaacgctacctaacttccgcgacgaccgcgacgacacgaaacttactactacaaccgcaaccgacccgataaaaaacgaaacgtaa

SEQ ID NO: 6295 - DNA, 994 bp, Artificial Sequence
  chemically treated genomic DNA (Homo sapiens) CpG-island No: 6295
agaaagagaaaagaaaagaggcgattgtaattgaagtttgattttgacgaaatatacgtatacggaaatttggagagacgtaggataggatttcggcggtagaaggacggagagaaaggggatttcgggacgggaaaggcgtagagtaggcgcgggcggcggcggcggcggggtagggtagggcgggcgtttcggtagagggcgcgcggtcgttttgtcgtttttcgtttcgtcggggttatagtgttttttttttcgcgttttagtcgttttgtcgggttatttttacgcgcggatatcggatatcggatatcgggttggggcggcggcggcggcggtcgaggcggtcgaggcggggtcgtatcggggtcgggcgtcggggttatacgtcggttcgcgggtcgtcggggttgcgcgcgttatggagtcgcggtgttcgtcgtcgtgcggttgttgcgagcggttggtgtttaacgtggtcgggttgcgtttcgagacgcgggcgcgtacgttgggtcgtttttcggatattttgttaggggatttagcgcgtcgcggtcgtttttacgacgacgcgcgtcgcgagtattttttcgatcggtatcggtttagtttcgacgtcgtgttttattattattagttcggtgggcggttgcggcggtcggcgtacgtgtcgttcgacgtttttttggaagaggtggttttttacgggttgggcgcggcggttttggtacgtttgcgcgaggacgagggttgttcggtgtcgttcgagcgttttttgtttcgtcgcgttttcgttcgttagttgtggttgtttttcgagtttttcgagagtttttaggtcgcgcgcgtgttcgtcgtagttttcgtgttggttattttcgtttttatcgtcgttttttgtttcgagacgttgtttgattttcgcgacgatcgcgacggtacggggtttgttgttgtagtcgtagtcggttcggtgagaggcggggcgtgg

SEQ ID NO: 6296 - DNA, 994 bp, Artificial Sequence
  chemically treated genomic DNA (Homo sapiens) CpG-island No: 6296
ccacgccccgcctctcaccgaaccgactacgactacaacaacaaaccccgtaccgtcgcgatcgtcgcgaaaatcaaacaacgtctcgaaacaaaaaacgacgataaaaacgaaaataaccaacacgaaaactacgacgaacacgcgcgcgacctaaaaactctcgaaaaactcgaaaaacaaccacaactaacgaacgaaaacgcgacgaaacaaaaaacgctcgaacgacaccgaacaaccctcgtcctcgcgcaaacgtaccaaaaccgccgcgcccaacccgtaaaaaaccacctcttccaaaaaaacgtcgaacgacacgtacgccgaccgccgcaaccgcccaccgaactaataataataaaacacgacgtcgaaactaaaccgataccgatcgaaaaaatactcgcgacgcgcgtcgtcgtaaaaacgaccgcgacgcgctaaatcccctaacaaaatatccgaaaaacgacccaacgtacgcgcccgcgtctcgaaacgcaacccgaccacgttaaacaccaaccgctcgcaacaaccgcacgacgacgaacaccgcgactccataacgcgcgcaaccccgacgacccgcgaaccgacgtataaccccgacgcccgaccccgatacgaccccgcctcgaccgcctcgaccgccgccgccgccgccccaacccgatatccgatatccgatatccgcgcgtaaaaataacccgacaaaacgactaaaacgcgaaaaaaaaaacactataaccccgacgaaacgaaaaacgacaaaacgaccgcgcgccctctaccgaaacgcccgccctaccctaccccgccgccgccgccgcccgcgcctactctacgcctttcccgtcccgaaatcccctttctctccgtccttctaccgccgaaatcctatcctacgtctctccaaatttccgtatacgtatatttcgtcaaaatcaaacttcaattacaatcgcctcttttcttttctctttct

SEQ ID NO: 6297 - DNA, 516 bp, Artificial Sequence
  chemically treated genomic DNA (Homo sapiens) CpG-island No: 6297
gtttcggtcgtttttttcggattgtgcgttcggttttatttcgtcgttttttttgtttttttgcgtttcggggtttttgatattcggggtttttgcgtttcgttttcgtttcgtagacgtgtttcgggcggttgagtttttcgagcggttttagcgtagcggggagttgtcgtcgtagaagttgtaggttttttagcgagttttgtagagtcgtttttgtttcgttattcgagaggtgaggggcgcgcggcgtaggggcgcgagttggtggtcgtcgtttttttttttttttttttgtttgtttcgagttcggagattacgtttttcggtagttttcgaggcggttcgttttggggtgttaacgttttagtttaggggtttttcgggagttgtagttttttcggttttttgttgcgggggcggggcggatttttgcgtggtagcgggagagggtttagaggtttgaatttttgcgtttagggttggaggagttggcgattttttgatgtcgttgtt

SEQ ID NO: 6298 - DNA, 516 bp, Artificial Sequence
  chemically treated genomic DNA (Homo sapiens) CpG-island No: 6298
aacaacgacatcaaaaaatcgccaactcctccaaccctaaacgcaaaaattcaaacctctaaaccctctcccgctaccacgcaaaaatccgccccgcccccgcaacaaaaaaccgaaaaaactacaactcccgaaaaacccctaaactaaaacgttaacaccccaaaacgaaccgcctcgaaaactaccgaaaaacgtaatctccgaactcgaaacaaacaaaaaaaaaaaaaaaaaaacgacgaccaccaactcgcgcccctacgccgcgcgcccctcacctctcgaataacgaaacaaaaacgactctacaaaactcgctaaaaaacctacaacttctacgacgacaactccccgctacgctaaaaccgctcgaaaaactcaaccgcccgaaacacgtctacgaaacgaaaacgaaacgcaaaaaccccgaatatcaaaaaccccgaaacgcaaaaaaacaaaaaaaacgacgaaataaaaccgaacgcacaatccgaaaaaaacgaccgaaac

SEQ ID NO: 6299 - DNA, 516 bp, Artificial Sequence
  chemically treated genomic DNA (Homo sapiens) CpG-island No: 6299
ggtagcggtattagggagtcgttagtttttttagttttagacgtaggagtttaggtttttagattttttttcgttattacgtaaggattcgtttcgttttcgtaatagaaggtcgagaaaattataattttcgaagaatttttgagttgaagcgttggtattttaaggcgggtcgtttcgggagttgtcgggaggcgtagttttcgggttcgggataagtaggaggaggaggaggaggacgacggttattagttcgcgtttttgcgtcgcgcgttttttatttttcggatagcggagtagaagcggttttgtagaattcgttggagggtttgtagtttttgcggcggtagtttttcgttgcgttggagtcgttcgaggagtttaatcgttcgggatacgtttgcggggcgggggcggggcgtagaaatttcgagtgttagagatttcgagacgtagagaagtaaggagagcggcggagtgaggtcgagcgtatagttcggggaggacggtcgaagt

SEQ ID NO: 6300 - DNA, 516 bp, Artificial Sequence
  chemically treated genomic DNA (Homo sapiens) CpG-island No: 6300
acttcgaccgtcctccccgaactatacgctcgacctcactccgccgctctccttacttctctacgtctcgaaatctctaacactcgaaatttctacgccccgcccccgccccgcaaacgtatcccgaacgattaaactcctcgaacgactccaacgcaacgaaaaactaccgccgcaaaaactacaaaccctccaacgaattctacaaaaccgcttctactccgctatccgaaaaataaaaaacgcgcgacgcaaaaacgcgaactaataaccgtcgtcctcctcctcctcctcctacttatcccgaacccgaaaactacgcctcccgacaactcccgaaacgacccgccttaaaataccaacgcttcaactcaaaaattcttcgaaaattataattttctcgaccttctattacgaaaacgaaacgaatccttacgtaataacgaaaaaaaatctaaaaacctaaactcctacgtctaaaactaaaaaaactaacgactccctaataccgctacc

SEQ ID NO: 6301 - DNA, 646 bp, Artificial Sequence
  chemically treated genomic DNA (Homo sapiens) CpG-island No: 6301
cggtttttgtgtgggcggggcggagcgaattattagtttcgttcgtcgggggaattttgtaggtcgtattattgtttgcgtgggagtcgcgggtgggggtgtcgcgtgtagttttcgaggcgggcgtaggggtgtagaatgaggtgttttcgtttatcgggcgtttattttattttttaaatatagcgcgttttttcggaagtagttttcgttttgaaatttaatttttagttttatttcgttgttcgtttagttttcgtgtttcgtgcggcgcgagggttagtgcgcgttattgtcgggagtcggggtcgcgattcgcgttttacgtcgcgcgttattcgttttaggtgatattatttttttgtcgggtttcgtttttcgttttagtcgttttacgtcgcgtgtttattggtcgacgcgttttatgtttcgtttttcgtttttcgttcgcgcgatttttttcggtcggtgtggaggcggggtttagtcgtcggtcggcgtcgacgtttttttttattggtcgtttttcgtcgtttgttagttttttgttaaaggggttacgatcgttcgggagtcgtggggggggagggggagggaggaggaatttttttggggggaaggtgggatttggggggcgttggtgggt

SEQ ID NO: 6302 - DNA, 646 bp, Artificial Sequence
  chemically treated genomic DNA (Homo sapiens) CpG-island No: 6302
acccaccaacgccccccaaatcccaccttccccccaaaaaaattcctcctccctccccctccccccccacgactcccgaacgatcgtaacccctttaacaaaaaactaacaaacgacgaaaaacgaccaataaaaaaaaacgtcgacgccgaccgacgactaaaccccgcctccacaccgaccgaaaaaaatcgcgcgaacgaaaaacgaaaaacgaaacataaaacgcgtcgaccaataaacacgcgacgtaaaacgactaaaacgaaaaacgaaacccgacaaaaaaataatatcacctaaaacgaataacgcgcgacgtaaaacgcgaatcgcgaccccgactcccgacaataacgcgcactaaccctcgcgccgcacgaaacacgaaaactaaacgaacaacgaaataaaactaaaaattaaatttcaaaacgaaaactacttccgaaaaaacgcgctatatttaaaaaataaaataaacgcccgataaacgaaaacacctcattctacacccctacgcccgcctcgaaaactacacgcgacacccccacccgcgactcccacgcaaacaataatacgacctacaaaattcccccgacgaacgaaactaataattcgctccgccccgcccacacaaaaaccg

SEQ ID NO: 6303 - DNA, 646 bp, Artificial Sequence
  chemically treated genomic DNA (Homo sapiens) CpG-island No: 6303
gtttattagcgttttttaaattttattttttttttaaaaaaattttttttttttttttttttttttttacggttttcgggcggtcgtggtttttttaataggagattgatagacggcgaagagcggttaatgggagagagcgtcggcgtcggtcggcgattagatttcgtttttatatcggtcgggaggggtcgcgcgggcggagagcgagaggcggggtataaggcgcgtcgattaataggtacgcggcgtgaggcggttggggcgggaggcggagttcggtagggggatgatgttatttggagcgagtagcgcgcggcgtggaacgcgagtcgcgatttcggttttcggtagtggcgcgtattagttttcgcgtcgtacgggatacgagggttgggcgggtagcgggatgaggttaaaggttggattttaaggcgggggttgttttcggaaagacgcgttgtgtttggaaggtggagtgagcgttcggtgggcgagggtattttattttgtatttttgcgttcgtttcgggaattgtacgcggtatttttattcgcgatttttacgtagatagtagtgcggtttgtagggttttttcggcggacgaggttaatggttcgtttcgtttcgtttatatagaggtcg

SEQ ID NO: 6304 - DNA, 646 bp, Artificial Sequence
  chemically treated genomic DNA (Homo sapiens) CpG-island No: 6304
cgacctctatataaacgaaacgaaacgaaccattaacctcgtccgccgaaaaaaccctacaaaccgcactactatctacgtaaaaatcgcgaataaaaataccgcgtacaattcccgaaacgaacgcaaaaatacaaaataaaataccctcgcccaccgaacgctcactccaccttccaaacacaacgcgtctttccgaaaacaacccccgccttaaaatccaacctttaacctcatcccgctacccgcccaaccctcgtatcccgtacgacgcgaaaactaatacgcgccactaccgaaaaccgaaatcgcgactcgcgttccacgccgcgcgctactcgctccaaataacatcatccccctaccgaactccgcctcccgccccaaccgcctcacgccgcgtacctattaatcgacgcgccttataccccgcctctcgctctccgcccgcgcgacccctcccgaccgatataaaaacgaaatctaatcgccgaccgacgccgacgctctctcccattaaccgctcttcgccgtctatcaatctcctattaaaaaaaccacgaccgcccgaaaaccgtaaaaaaaaaaaaaaaaaaaaaaaaaatttttttaaaaaaaaaataaaatttaaaaaacgctaataaac

SEQ ID NO: 6305 - DNA, 655 bp, Artificial Sequence
  chemically treated genomic DNA (Homo sapiens) CpG-island No: 6305
cgtagagagcggagtcgggagcgagataaggagcgagaacggcgacgttttcgttttcgggatcggcggaggcgtttacggagtcgcgataaggaggagcggaggcgttttagggagcggagtaaggataaggatcgggatcggaagcggcgaagtagtcggagtcgggagcgggttcggcgggagcgggagcgtaaggaggagttgcgtggcggcggtggcgatatggcggagtttttcgaggcgggtgacgcgttttttgatgatgggtttttaggggagttcgggtttgacggttttgacggtttagaggaaaagggtcgggatcgtgatcgggagcgacggcggagttatcggagcgagcgcgagcggcgtcgggatcgggatcgtgatcgtgatcgtgatcgcgagtataaacggggggagcggggtagtgagcggggtagggatgaggttcgaggtgggggcggtggttaggataacgggttggagggtttgggtaacgatagtcgagatatgtatatggagtttgagggcggcgacggttatttggtttcggagaatgggtatttgatggaggttgcgtcggagtgaagaggtcgttttttttatttgttgtgtttggacgcgtttttgtttagttttttgttgttat

SEQ ID NO: 6306 - DNA, 655 bp, Artificial Sequence
  chemically treated genomic DNA (Homo sapiens) CpG-island No: 6306
ataacaacaaaaaactaaacaaaaacgcgtccaaacacaacaaataaaaaaaacgacctcttcactccgacgcaacctccatcaaatacccattctccgaaaccaaataaccgtcgccgccctcaaactccatatacatatctcgactatcgttacccaaaccctccaacccgttatcctaaccaccgcccccacctcgaacctcatccctaccccgctcactaccccgctccccccgtttatactcgcgatcacgatcacgatcacgatcccgatcccgacgccgctcgcgctcgctccgataactccgccgtcgctcccgatcacgatcccgacccttttcctctaaaccgtcaaaaccgtcaaacccgaactcccctaaaaacccatcatcaaaaaacgcgtcacccgcctcgaaaaactccgccatatcgccaccgccgccacgcaactcctccttacgctcccgctcccgccgaacccgctcccgactccgactacttcgccgcttccgatcccgatccttatccttactccgctccctaaaacgcctccgctcctccttatcgcgactccgtaaacgcctccgccgatcccgaaaacgaaaacgtcgccgttctcgctccttatctcgctcccgactccgctctctacg

SEQ ID NO: 6307 - DNA, 655 bp, Artificial Sequence
  chemically treated genomic DNA (Homo sapiens) CpG-island No: 6307
atgatagtaaggggttgggtaggaacgcgtttaaatatagtagatggagaggacgatttttttatttcggcgtagtttttattaaatatttatttttcggagttaggtagtcgtcgtcgtttttagattttatgtatatgtttcggttgtcgttgtttagattttttagttcgttgttttggttatcgtttttatttcgggttttatttttgtttcgtttattgtttcgtttttttcgtttgtgttcgcggttacggttacggttacgatttcggtttcggcgtcgttcgcgttcgtttcggtggtttcgtcgtcgttttcggttacgatttcggttttttttttttggatcgttagggtcgttaggttcgagtttttttggaggtttattattagggggcgcgttattcgtttcggagggtttcgttatgtcgttatcgtcgttacgtagtttttttttgcgttttcgttttcgtcgggttcgttttcgatttcggttgtttcgtcgttttcggtttcggtttttgtttttgtttcgttttttggagcgttttcgtttttttttgtcgcgatttcgtgagcgttttcgtcggtttcgggagcgggagcgtcgtcgttttcgttttttgtttcgttttcggtttcgttttttgcg

SEQ ID NO: 6308 - DNA, 655 bp, Artificial Sequence
  chemically treated genomic DNA (Homo sapiens) CpG-island No: 6308
cgcaaaaaacgaaaccgaaaacgaaacaaaaaacgaaaacgacgacgctcccgctcccgaaaccgacgaaaacgctcacgaaatcgcgacaaaaaaaaacgaaaacgctccaaaaaacgaaacaaaaacaaaaaccgaaaccgaaaacgacgaaacaaccgaaatcgaaaacgaacccgacgaaaacgaaaacgcaaaaaaaaactacgtaacgacgataacgacataacgaaaccctccgaaacgaataacgcgccccctaataataaacctccaaaaaaactcgaacctaacgaccctaacgatccaaaaaaaaaaaaccgaaatcgtaaccgaaaacgacgacgaaaccaccgaaacgaacgcgaacgacgccgaaaccgaaatcgtaaccgtaaccgtaaccgcgaacacaaacgaaaaaaacgaaacaataaacgaaacaaaaataaaacccgaaataaaaacgataaccaaaacaacgaactaaaaaatctaaacaacgacaaccgaaacatatacataaaatctaaaaacgacgacgactacctaactccgaaaaataaatatttaataaaaactacgccgaaataaaaaaatcgtcctctccatctactatatttaaacgcgttcctacccaaccccttactatcat

SEQ ID NO: 6309 - DNA, 738 bp, Artificial Sequence
  chemically treated genomic DNA (Homo sapiens) CpG-island No: 6309
atcgtgtaggttttcgacgttaatgataacgttttcgtttttatttaaattttttatattttgttcgttcgcgagaataatagtttcgttttgtatatcggtagtgttagcgttatagatagagattcgggtattaacgtttaggttatttattcgttgttgtcgttttaggattcgtatttgtttttcgtttttttggtttttattaacgtagataacggttatttgttcgtttttaggtcgttggattacgaggttttgtaggcgttcgagtttcgcgtgggcgttttagatcgcggtttttcggttttgagtagcgaggcgttggtgcgcgtgttggtgttggatattaacgataattcgtttttcgtgttgtattcgttgtagaatggtttcgcgttttgtatcgagttggtgtttcgggcggtcgagtcgggttatttggtgattaaggtggtggcggtggacggcgattcgggttagaacgtttggttgtcgtattagttgtttaaggttacggagtttgggttgttcggcgtgtgggcgtataatggcgaggtgcgtatcgttaggttgttgagcgagcgcgacgtagttaagtataggttcgtggtgtttgttaaggataatggcgagttttcgcgttcggttatcgttacgttgtacgtgtttttggtggatggttttttttagttttatttgtttttttttgaggcggtttcggtttaggtttaggtt

SEQ ID NO: 6310 - DNA, 738 bp, Artificial Sequence
  chemically treated genomic DNA (Homo sapiens) CpG-island No: 6310
aacctaaacctaaaccgaaaccgcctcaaaaaaaaacaaataaaactaaaaaaaaccatccaccaaaaacacgtacaacgtaacgataaccgaacgcgaaaactcgccattatccttaacaaacaccacgaacctatacttaactacgtcgcgctcgctcaacaacctaacgatacgcacctcgccattatacgcccacacgccgaacaacccaaactccgtaaccttaaacaactaatacgacaaccaaacgttctaacccgaatcgccgtccaccgccaccaccttaatcaccaaataacccgactcgaccgcccgaaacaccaactcgatacaaaacgcgaaaccattctacaacgaatacaacacgaaaaacgaattatcgttaatatccaacaccaacacgcgcaccaacgcctcgctactcaaaaccgaaaaaccgcgatctaaaacgcccacgcgaaactcgaacgcctacaaaacctcgtaatccaacgacctaaaaacgaacaaataaccgttatctacgttaataaaaaccaaaaaaacgaaaaacaaatacgaatcctaaaacgacaacaacgaataaataacctaaacgttaatacccgaatctctatctataacgctaacactaccgatatacaaaacgaaactattattctcgcgaacgaacaaaatataaaaaatttaaataaaaacgaaaacgttatcattaacgtcgaaaacctacacgat

SEQ ID NO: 6311 - DNA, 738 bp, Artificial Sequence
  chemically treated genomic DNA (Homo sapiens) CpG-island No: 6311
ggtttgggtttgggtcggggtcgttttagggagaggtaggtagggttgggagaagttatttattaggagtacgtgtagcgtggcggtggtcgagcgcggaggttcgttattgtttttgataagtattacgagtttgtgtttggttgcgtcgcgttcgtttagtagtttggcggtgcgtatttcgttattgtgcgtttatacgtcgaatagtttaggtttcgtggttttgagtagttggtacgatagttaggcgttttggttcgagtcgtcgtttatcgttattattttggttattaggtagttcggttcggtcgttcggggtattagttcggtgtagggcgcggagttattttgtagcgggtatagtacgaagggcgagttgtcgttggtgtttagtattagtacgcgtattagcgtttcgttgtttaaagtcggagaatcgcggtttgaggcgtttacgcggaattcgaacgtttgtagggtttcgtagtttagcgatttgagggcgaataggtggtcgttgtttgcgttgatggagattagggaggcgaggggtaggtgcgggttttggggcggtagtagcgagtaggtgatttgggcgttggtgttcgagtttttgtttgtggcgttgatattgtcgatgtgtagggcggggttgttgttttcgcggacgaatagggtgtaggaggtttgggtgaaggcgggggcgttgttattgacgtcggagatttgtacggt

SEQ ID NO: 6312 - DNA, 738 bp, Artificial Sequence
  chemically treated genomic DNA (Homo sapiens) CpG-island No: 6312
accgtacaaatctccgacgtcaataacaacgcccccgccttcacccaaacctcctacaccctattcgtccgcgaaaacaacaaccccgccctacacatcgacaatatcaacgccacaaacaaaaactcgaacaccaacgcccaaatcacctactcgctactaccgccccaaaacccgcacctacccctcgcctccctaatctccatcaacgcaaacaacgaccacctattcgccctcaaatcgctaaactacgaaaccctacaaacgttcgaattccgcgtaaacgcctcaaaccgcgattctccgactttaaacaacgaaacgctaatacgcgtactaatactaaacaccaacgacaactcgcccttcgtactatacccgctacaaaataactccgcgccctacaccgaactaataccccgaacgaccgaaccgaactacctaataaccaaaataataacgataaacgacgactcgaaccaaaacgcctaactatcgtaccaactactcaaaaccacgaaacctaaactattcgacgtataaacgcacaataacgaaatacgcaccgccaaactactaaacgaacgcgacgcaaccaaacacaaactcgtaatacttatcaaaaacaataacgaacctccgcgctcgaccaccgccacgctacacgtactcctaataaataacttctcccaaccctacctacctctccctaaaacgaccccgacccaaacccaaacc

SEQ ID NO: 6313 - DNA, 805 bp, Artificial Sequence
  chemically treated genomic DNA (Homo sapiens) CpG-island No: 6313
gtatcggtagcgagggtattttggtttagacggtagcggaaatgtttggcgtatcgttggagtaggttgcggtttatttcggcgattttagtttttcggtttttgcgggttttggtggataatggggcgcgaatatttttattttcggcgtttacgtcgtttgtatgaagtttcgcgaaatgattgtttcggtagtcgggtttgattttgagtagtcgtagtttgtcgacggtaagattattaacggtattcgaagcgttacgttatatgaagttatcgtaggcggtagattgatagcggaagagagtattgaattcggaatattgagtaaagagtattagtagtcgatttttgtcgggtattttgtggaggtcggcgtgtatagcgcgacgggagaagttcgggttcggcgtatgttcgttgtgtgtgttgtaggacgtattttgaattcgaaaattgcgcgtagttaggttattggcgtaatgattatgggtatgggcgcggtattgatggaggagttggcggtggatgatcgtttgggttatttcgttaattacgatatggcggggtatgaggtgtcggtttatgcggatattttaaaataggaggtgatttttttggatgatatcgattttatatttttttcgatgaaggttaaaggtgtcggtgagttgggtttgtgcggcgtgagcgcggttatcgttaacgcggtgtataacgttatcggtattcgggtacgggattattttattattttggataagttgttcgataagttgtcggatgtggtttaaggaggaataat

SEQ ID NO: 6314 - DNA, 805 bp, Artificial Sequence
  chemically treated genomic DNA (Homo sapiens) CpG-island No: 6314
attattcctccttaaaccacatccgacaacttatcgaacaacttatccaaaataataaaataatcccgtacccgaataccgataacgttatacaccgcgttaacgataaccgcgctcacgccgcacaaacccaactcaccgacacctttaaccttcatcgaaaaaaatataaaatcgatatcatccaaaaaaatcacctcctattttaaaatatccgcataaaccgacacctcataccccgccatatcgtaattaacgaaataacccaaacgatcatccaccgccaactcctccatcaataccgcgcccatacccataatcattacgccaataacctaactacgcgcaattttcgaattcaaaatacgtcctacaacacacacaacgaacatacgccgaacccgaacttctcccgtcgcgctatacacgccgacctccacaaaatacccgacaaaaatcgactactaatactctttactcaatattccgaattcaatactctcttccgctatcaatctaccgcctacgataacttcatataacgtaacgcttcgaataccgttaataatcttaccgtcgacaaactacgactactcaaaatcaaacccgactaccgaaacaatcatttcgcgaaacttcatacaaacgacgtaaacgccgaaaataaaaatattcgcgccccattatccaccaaaacccgcaaaaaccgaaaaactaaaatcgccgaaataaaccgcaacctactccaacgatacgccaaacatttccgctaccgtctaaaccaaaataccctcgctaccgatac

SEQ ID NO: 6315 - DNA, 805 bp, Artificial Sequence
  chemically treated genomic DNA (Homo sapiens) CpG-island No: 6315
attgtttttttttaaattatattcggtagtttatcgagtagtttatttagagtgatgggataatttcgtattcgaatatcggtggcgttatatatcgcgttggcgatagtcgcgtttacgtcgtataggtttagtttatcgatatttttggtttttatcggggaggatatggggtcggtattatttaggaaaattattttttgttttgggatattcgtatgaatcggtattttatatttcgttatatcgtgattaacgaagtagtttaaacggttatttatcgttagtttttttattagtgtcgcgtttatgtttatagttattgcgttaatgatttggttgcgcgtagttttcggatttaggatgcgttttgtagtatatatagcgagtatacgtcggattcgaatttttttcgtcgcgttatgtacgtcgatttttataaaatgttcggtaaaggtcgattgttggtattttttgtttagtgtttcgaatttaatgttttttttcgttgttagtttgtcgtttgcggtggttttatgtagcgtggcgtttcgggtatcgttggtaattttgtcgtcggtaaattgcgattgtttaggattaaattcgattgtcgaggtaattatttcgcgaagttttatataggcggcgtaaacgtcggaggtggaggtattcgcgttttattgtttattagaattcgtagaaatcgggaaattggaatcgtcgaggtgaatcgtaatttgttttagcggtacgttaagtattttcgttgtcgtttgggttagaatgttttcgttgtcggtgt

SEQ ID NO: 6316 - DNA, 805 bp, Artificial Sequence
  chemically treated genomic DNA (Homo sapiens) CpG-island No: 6316
acaccgacaacgaaaacattctaacccaaacgacaacgaaaatacttaacgtaccgctaaaacaaattacgattcacctcgacgattccaatttcccgatttctacgaattctaataaacaataaaacgcgaatacctccacctccgacgtttacgccgcctatataaaacttcgcgaaataattacctcgacaatcgaatttaatcctaaacaatcgcaatttaccgacgacaaaattaccaacgatacccgaaacgccacgctacataaaaccaccgcaaacgacaaactaacaacgaaaaaaaacattaaattcgaaacactaaacaaaaaataccaacaatcgacctttaccgaacattttataaaaatcgacgtacataacgcgacgaaaaaaattcgaatccgacgtatactcgctatatatactacaaaacgcatcctaaatccgaaaactacgcgcaaccaaatcattaacgcaataactataaacataaacgcgacactaataaaaaaactaacgataaataaccgtttaaactacttcgttaatcacgatataacgaaatataaaataccgattcatacgaatatcccaaaacaaaaaataattttcctaaataataccgaccccatatcctccccgataaaaaccaaaaatatcgataaactaaacctatacgacgtaaacgcgactatcgccaacgcgatatataacgccaccgatattcgaatacgaaattatcccatcactctaaataaactactcgataaactaccgaatataatttaaaaaaaaacaat

SEQ ID NO: 6317 - DNA, 539 bp, Artificial Sequence
  chemically treated genomic DNA (Homo sapiens) CpG-island No: 6317
ttgcgtttcgtcgtagaggcgttaatgttcggtaaaggagcggtgttggtgacgttggtggagatacgcggcggcgcggcgcgttcgttcggggcgtagatggtggtgcgcgaagatggtcgttattgcggttttgtttttggcggttgcgtggaggtcgttgtcgtttttgaagcgttggagatgatgggtttaggtcgcgatcgcgaaattcgttatggcgaagttcgtcgtggtttgatatcgttttgttttgcggcggtgggattacgttgacgttttataaattacgttcggtatagttttgtcgtcgtgttggaacgttggaatagagaaaatcgtgggggtggttagattcgtagtattaagcgcgggggtgttcgtgttacggtatatcggaaggggcgggaatttaagggtgggaaggggggtacgttacgcgtcggggcgacgaaatacgacgttagaggggaggatagtaatatttagggataaggtagtgagtatattggcgtttggggtcgacgggttagaaaaaa

SEQ ID NO: 6318 - DNA, 539 bp, Artificial Sequence
  chemically treated genomic DNA (Homo sapiens) CpG-island No: 6318
ttttttctaacccgtcgaccccaaacgccaatatactcactaccttatccctaaatattactatcctcccctctaacgtcgtatttcgtcgccccgacgcgtaacgtaccccccttcccacccttaaattcccgccccttccgatataccgtaacacgaacacccccgcgcttaatactacgaatctaaccacccccacgattttctctattccaacgttccaacacgacgacaaaactataccgaacgtaatttataaaacgtcaacgtaatcccaccgccgcaaaacaaaacgatatcaaaccacgacgaacttcgccataacgaatttcgcgatcgcgacctaaacccatcatctccaacgcttcaaaaacgacaacgacctccacgcaaccgccaaaaacaaaaccgcaataacgaccatcttcgcgcaccaccatctacgccccgaacgaacgcgccgcgccgccgcgtatctccaccaacgtcaccaacaccgctcctttaccgaacattaacgcctctacgacgaaacgcaa

SEQ ID NO: 6319 - DNA, 539 bp, Artificial Sequence
  chemically treated genomic DNA (Homo sapiens) CpG-island No: 6319
ttttttttggttcgtcggttttaagcgttagtgtgtttattgttttgtttttgaatgttgttgtttttttttttggcgtcgtgtttcgtcgtttcggcgcgtggcgtgtttttttttttatttttgaattttcgtttttttcggtgtgtcgtggtacgggtattttcgcgtttggtgttgcggatttagttatttttacggttttttttgttttagcgttttagtacggcgatagagttgtgtcgagcgtagtttatggagcgttagcgtgattttatcgtcgtagggtagaacgatgttaaattacggcgaatttcgttatagcgaatttcgcgatcgcggtttgagtttattatttttagcgttttaaaagcggtagcggtttttacgtagtcgttagagataaaatcgtagtaacgattattttcgcgtattattatttgcgtttcgagcgggcgcgtcgcgtcgtcgcgtatttttattagcgttattagtatcgtttttttatcggatattagcgtttttacggcgaagcgtag

SEQ ID NO: 6320 - DNA, 539 bp, Artificial Sequence
  chemically treated genomic DNA (Homo sapiens) CpG-island No: 6320
ctacgcttcgccgtaaaaacgctaatatccgataaaaaaacgatactaataacgctaataaaaatacgcgacgacgcgacgcgcccgctcgaaacgcaaataataatacgcgaaaataatcgttactacgattttatctctaacgactacgtaaaaaccgctaccgcttttaaaacgctaaaaataataaactcaaaccgcgatcgcgaaattcgctataacgaaattcgccgtaatttaacatcgttctaccctacgacgataaaatcacgctaacgctccataaactacgctcgacacaactctatcgccgtactaaaacgctaaaacaaaaaaaaccgtaaaaataactaaatccgcaacaccaaacgcgaaaatacccgtaccacgacacaccgaaaaaaacgaaaattcaaaaataaaaaaaaaaacacgccacgcgccgaaacgacgaaacacgacgccaaaaaaaaaaacaacaacattcaaaaacaaaacaataaacacactaacgcttaaaaccgacgaaccaaaaaaaa

SEQ ID NO: 6321 - DNA, 631 bp, Artificial Sequence
  chemically treated genomic DNA (Homo sapiens) CpG-island No: 6321
atcgaatcgattacgcgcggtaggattatttgcgtagtatcggtagagtaattttcgttcgtattaacgttattattatgtaaggtaatagttttcgttagtattttcgaagcgttatggaatattttcgtcgattgttaattattggcggttagtaaggtattcggttcgtgagttttttgtacgcgttttagttttttatagaatatgtcgagggttttattttagtttacgcgtataaaacggttattatcgcgttgggaggtatcgttgagatggcgtttacgtagttagtttacgcgtattatcggataacgaatacgcgtcgcgttgtgtacgtgattcggtaattcggtaattattttcgacggatatttatttagttcgaacggttttgtcgttataaagcgattattttttatcgtcgcgcggatagttttttagtgcgattcggtaagaatgttttttttcgagatgatagcgttagtcgtcgtttgcgtcgtagtcgtacgtcgcggcgttaataatgacggttttagtatttcggcgacggttaagtcgtcgagttgtgttagaaaacgtcgacgtgatgtttgaaagagatcgttattgtttattatttttttttttt

SEQ ID NO: 6322 - DNA, 631 bp, Artificial Sequence
  chemically treated genomic DNA (Homo sapiens) CpG-island No: 6322
aaaaaaaaaaaataataaacaataacgatctctttcaaacatcacgtcgacgttttctaacacaactcgacgacttaaccgtcgccgaaatactaaaaccgtcattattaacgccgcgacgtacgactacgacgcaaacgacgactaacgctatcatctcgaaaaaaaacattcttaccgaatcgcactaaaaaactatccgcgcgacgataaaaaataatcgctttataacgacaaaaccgttcgaactaaataaatatccgtcgaaaataattaccgaattaccgaatcacgtacacaacgcgacgcgtattcgttatccgataatacgcgtaaactaactacgtaaacgccatctcaacgatacctcccaacgcgataataaccgttttatacgcgtaaactaaaataaaaccctcgacatattctataaaaaactaaaacgcgtacaaaaaactcacgaaccgaataccttactaaccgccaataattaacaatcgacgaaaatattccataacgcttcgaaaatactaacgaaaactattaccttacataataataacgttaatacgaacgaaaattactctaccgatactacgcaaataatcctaccgcgcgtaatcgattcgat

SEQ ID NO: 6323 - DNA, 631 bp, Artificial Sequence
  chemically treated genomic DNA (Homo sapiens) CpG-island No: 6323
aaggaagaaaaataatgaataataacgattttttttaggtattacgtcggcgttttttggtataattcggcggtttaatcgtcgtcgggatgttggggtcgttattgttaacgtcgcgacgtgcgattgcggcgtaagcggcgattgacgttgttatttcgaaagagggtatttttatcgggtcgtattggggggttattcgcgcgacggtgaaggatggtcgttttgtggcggtaaaatcgttcgaattggataaatattcgtcgaaaatgattgtcggattgtcggattacgtatataacgcggcgcgtattcgttattcgatggtacgcgtggattggttgcgtaagcgttattttagcgatattttttagcgcggtgataatcgttttgtgcgcgtgagttgggatgaagttttcgatatgttttatgaagaattggaacgcgtgtagaaaatttacgggtcgagtgttttgttgatcgttagtggttggtaatcgacggggatgttttataacgtttcggggatgttggcgaaagttattgttttgtatggtaatagcgttggtacgggcggagattattttatcggtgttgcgtaggtgattttgtcgcgcgtagtcggttcgat

SEQ ID NO: 6324 - DNA, 631 bp, Artificial Sequence
  chemically treated genomic DNA (Homo sapiens) CpG-island No: 6324
atcgaaccgactacgcgcgacaaaatcacctacgcaacaccgataaaataatctccgcccgtaccaacgctattaccatacaaaacaataactttcgccaacatccccgaaacgttataaaacatccccgtcgattaccaaccactaacgatcaacaaaacactcgacccgtaaattttctacacgcgttccaattcttcataaaacatatcgaaaacttcatcccaactcacgcgcacaaaacgattatcaccgcgctaaaaaatatcgctaaaataacgcttacgcaaccaatccacgcgtaccatcgaataacgaatacgcgccgcgttatatacgtaatccgacaatccgacaatcattttcgacgaatatttatccaattcgaacgattttaccgccacaaaacgaccatccttcaccgtcgcgcgaataaccccccaatacgacccgataaaaataccctctttcgaaataacaacgtcaatcgccgcttacgccgcaatcgcacgtcgcgacgttaacaataacgaccccaacatcccgacgacgattaaaccgccgaattataccaaaaaacgccgacgtaatacctaaaaaaaatcgttattattcattatttttcttcctt

SEQ ID NO: 6325 - DNA, 870 bp, Artificial Sequence
  chemically treated genomic DNA (Homo sapiens) CpG-island No: 6325
  unsure (555)
gaatggtcgtggagtattacgtattcgttcgcgttgacggtgagcgaggcgcgattgaggacgggtaggcgtacgtcgttttgttggtgtaggatgaaggttttattgacgttttgtacgttaattatttttcgtttcgtggttcgggtgtcggatgcgacgttggcgcgttttattcgatttacggggagcgtatgtgtaggtcggataaggcgtttacgtcgtattcggtatcggtttaattttgtaaaatcgatgatattagtagttgtgtatacggatgatgcgggtcgtcgagtacgcggtcggttaatttattttttattatttgtttttgttttattattagtaaacggttcgttagtaggcgggcgacgtttaaattatgggtgataattattatcgcgaggtttagttttattattaggtcgcgtagtaggtcgagtaggcgggtttgtatcgatatatttagttcgtcggtcggtttatttataaatagtagtttcggatgcgttattaggttgcgggtaatttgtaaacgttgttgtatatcgncggaaaacgtggtcggtaggtcgtcgattcgcgtggggggaatttttatttttttagttattttgggcggtggataataatggcgaaatgagtgtttcggtcgtataagcgatgcgataatgcgtttgcgaaattgtcgggtaggcgtagtggatgtgatgtttagcgttatcggtagttaaggaacggggtcgatttatttcgcgtaacgaagcgcgtggtatatatacgcggtttgggacggaggagtgtataataggaggggtttaagatcgaagaggaaaggcgtagaataaaattaacggtgaggagaga

SEQ ID NO: 6326 - DNA, 870 bp, Artificial Sequence
  chemically treated genomic DNA (Homo sapiens) CpG-island No: 6326
  unsure (316)
tctctcctcaccgttaattttattctacgcctttcctcttcgatcttaaacccctcctattatacactcctccgtcccaaaccgcgtatatataccacgcgcttcgttacgcgaaataaatcgaccccgttccttaactaccgataacgctaaacatcacatccactacgcctacccgacaatttcgcaaacgcattatcgcatcgcttatacgaccgaaacactcatttcgccattattatccaccgcccaaaataactaaaaaaataaaaattccccccacgcgaatcgacgacctaccgaccacgttttccgncgatatacaacaacgtttacaaattacccgcaacctaataacgcatccgaaactactatttataaataaaccgaccgacgaactaaatatatcgatacaaacccgcctactcgacctactacgcgacctaataataaaactaaacctcgcgataataattatcacccataatttaaacgtcgcccgcctactaacgaaccgtttactaataataaaacaaaaacaaataataaaaaataaattaaccgaccgcgtactcgacgacccgcatcatccgtatacacaactactaatatcatcgattttacaaaattaaaccgataccgaatacgacgtaaacgccttatccgacctacacatacgctccccgtaaatcgaataaaacgcgccaacgtcgcatccgacacccgaaccacgaaacgaaaaataattaacgtacaaaacgtcaataaaaccttcatcctacaccaacaaaacgacgtacgcctacccgtcctcaatcgcgcctcgctcaccgtcaacgcgaacgaatacgtaatactccacgaccattc

SEQ ID NO: 6327 - DNA, 870 bp, Artificial Sequence
  chemically treated genomic DNA (Homo sapiens) CpG-island No: 6327
  unsure (316)
tttttttttatcgttaattttgttttacgtttttttttttcggttttggattttttttgttgtatattttttcgttttaaatcgcgtgtatatattacgcgtttcgttacgcgagatgagtcgatttcgttttttggttatcgatggcgttggatattatatttattgcgtttgttcgatagtttcgtaagcgtattatcgtatcgtttatgcgatcggggtatttatttcgttattattgtttatcgtttagaatggttggaagagtggaaattttttttacgcggatcgacgatttgtcgattacgtttttcgncggtatgtagtagcgtttgtagattgttcgtaatttggtgacgtattcgaagttgttgtttatggatgaatcgatcggcgggttggatgtgtcggtgtaggttcgtttgttcgatttgttgcgcggtttggtggtggagttgaatttcgcggtggtgattgttatttatgatttaggcgtcgttcgtttgttggcggatcgtttgttggtgatgaagtaggggtaagtggtggagagtgggttaatcgatcgcgtgttcgacgattcgtattattcgtatatatagttgttggtgttatcggttttgtagaattgagtcggtgtcggatgcggcgtaaacgttttattcggtttatatatgcgtttttcgtaggtcggataagacgcgttagcgtcgtattcgatattcgaattacgaggcgaaaaatgattaacgtataaaacgttagtaaaatttttattttgtattagtaaaacggcgtgcgtttgttcgtttttaatcgcgtttcgtttatcgttaacgcgggcgaatgcgtggtgttttacggttattt

SEQ ID NO: 6328 - DNA, 870 bp, Artificial Sequence
  chemically treated genomic DNA (Homo sapiens) CpG-island No: 6328
  unsure (555)
aaataaccgtaaaacaccacgcattcgcccgcgttaacgataaacgaaacgcgattaaaaacgaacaaacgcacgccgttttactaatacaaaataaaaattttactaacgttttatacgttaatcatttttcgcctcgtaattcgaatatcgaatacgacgctaacgcgtcttatccgacctacgaaaaacgcatatataaaccgaataaaacgtttacgccgcatccgacaccgactcaattctacaaaaccgataacaccaacaactatatatacgaataatacgaatcgtcgaacacgcgatcgattaacccactctccaccacttacccctacttcatcaccaacaaacgatccgccaacaaacgaacgacgcctaaatcataaataacaatcaccaccgcgaaattcaactccaccaccaaaccgcgcaacaaatcgaacaaacgaacctacaccgacacatccaacccgccgatcgattcatccataaacaacaacttcgaatacgtcaccaaattacgaacaatctacaaacgctactacataccgncgaaaaacgtaatcgacaaatcgtcgatccgcgtaaaaaaaatttccactcttccaaccattctaaacgataaacaataataacgaaataaataccccgatcgcataaacgatacgataatacgcttacgaaactatcgaacaaacgcaataaatataatatccaacgccatcgataaccaaaaaacgaaatcgactcatctcgcgtaacgaaacgcgtaatatatacacgcgatttaaaacgaaaaaatatacaacaaaaaaaatccaaaaccgaaaaaaaaaaacgtaaaacaaaattaacgataaaaaaaaa

SEQ ID NO: 6329 - DNA, 545 bp, Artificial Sequence
  chemically treated genomic DNA (Homo sapiens) CpG-island No: 6329
atatcgatattagttgtacgtcgtggcgatacgtattagagtttaacgtttttttgatttagttcgagcgtcgtgtaatatcgtgtagttattaggaacgttatttatatatatagcgttatttttggtaggttttgtcgtcgtgtacgtcgaggtattagtattaatagtagtgcggttatttatggttttattggtatttttttgtcgttgttataattatggtggcggttcgtagttggtttcggtatttagcgttagtacgtttggcgttagttgtaaaatggtttagtcgttttttagtatatcgtttggttgtattcgtcgttatttttttggttcgttttttattatatcgatgatgcgttcgtttcgttttattattttttgatagcgttattggttaagttcgttaattcggtatagatttttcggcggttttaaagggttacgtatatcggtttataggtattatgtaatatttgttaataaatagggtataatttttatgcggagtttttagttgtagcgtgtataaagaatta

SEQ ID NO: 6330 - DNA, 545 bp, Artificial Sequence
  chemically treated genomic DNA (Homo sapiens) CpG-island No: 6330
taattctttatacacgctacaactaaaaactccgcataaaaattataccctatttattaacaaatattacataatacctataaaccgatatacgtaaccctttaaaaccgccgaaaaatctataccgaattaacgaacttaaccaataacgctatcaaaaaataataaaacgaaacgaacgcatcatcgatataataaaaaacgaaccaaaaaaataacgacgaatacaaccaaacgatatactaaaaaacgactaaaccattttacaactaacgccaaacgtactaacgctaaataccgaaaccaactacgaaccgccaccataattataacaacgacaaaaaaataccaataaaaccataaataaccgcactactattaatactaatacctcgacgtacacgacgacaaaacctaccaaaaataacgctatatatataaataacgttcctaataactacacgatattacacgacgctcgaactaaatcaaaaaaacgttaaactctaatacgtatcgccacgacgtacaactaatatcgatat

SEQ ID NO: 6331 - DNA, 545 bp, Artificial Sequence
  chemically treated genomic DNA (Homo sapiens) CpG-island No: 6331
tgattttttgtgtacgttataattggagatttcgtatgagggttatattttgtttgttggtaggtattgtatggtgtttgtgaatcggtatgcgtgattttttgaaatcgtcggaagatttatgtcggattagcgaatttagttagtggcgttattaggggatggtagggcgaggcgagcgtattatcggtgtaataaaagacgggttaaagaaatggcgacgggtgtagttaaacgatgtgttggaaaacggttggattattttatagttgacgttagacgtattaacgttgggtatcgggattaattgcgaatcgttattatggttgtggtaacggtaaggagatattaatgaagttatggatagtcgtattattgttgatgttgatatttcggcgtatacggcggtaaagtttgttaaaagtgacgttgtatgtgtggatgacgtttttggtagttgtacggtgttgtacggcgttcgggttgaattaggagaacgttgaattttggtgcgtgtcgttacgacgtgtagttggtatcggtgt

SEQ ID NO: 6332 - DNA, 545 bp, Artificial Sequence
  chemically treated genomic DNA (Homo sapiens) CpG-island No: 6332
acaccgataccaactacacgtcgtaacgacacgcaccaaaattcaacgttctcctaattcaacccgaacgccgtacaacaccgtacaactaccaaaaacgtcatccacacatacaacgtcacttttaacaaactttaccgccgtatacgccgaaatatcaacatcaacaataatacgactatccataacttcattaatatctccttaccgttaccacaaccataataacgattcgcaattaatcccgatacccaacgttaatacgtctaacgtcaactataaaataatccaaccgttttccaacacatcgtttaactacacccgtcgccatttctttaacccgtcttttattacaccgataatacgctcgcctcgccctaccatcccctaataacgccactaactaaattcgctaatccgacataaatcttccgacgatttcaaaaaatcacgcataccgattcacaaacaccatacaatacctaccaacaaacaaaatataaccctcatacgaaatctccaattataacgtacacaaaaaatca

SEQ ID NO: 6333 - DNA, 937 bp, Artificial Sequence
  chemically treated genomic DNA (Homo sapiens) CpG-island No: 6333
ttttcgtgcgatttcggtcggattttcggagattatttgcggttcgttggtgtttttggttggacgttcggcgcgaaattgtcggtgtgtatgatcgtagtggtaaataggtgcgtagttttatttacgatgataaatatcggggtcggatggtggcgtatcgttatacgggtcggtcggaaattcgttatcgttacgatagcgacgggcgggtgatagaatagttaaattcggtaggtttaagttatacgtattagtatgagaaagatcgtattattattatcgatagtttggatcgtcgtgaagtgttgtatacgtagggcgaagtcgggttgaagcgggtggtgaaaaaggaatacgcggacggtagcgttacgtagagttagtttgacgtcgtgggtaggtttagggtatagacggatgtcgtaggtaggataatagagtatagttcggatgtggtgacgggttttattacgcgtataattacgtcggatggtagggtatcggcgttttattataattattataattagttaacgttagttatcgggtttgacgggttggaattgcgtcgggaatatgatgaattgggtcgtttgatttaggaaattgtttttgacggcgatattattcgttatcgttatgataatttatatagtgatttattttgcgtaacggaagatgttatcggtagtcggaaaattatgacgtggagtcgttacggttagttgttgagttttatcgattgtttcggttatgtaattcgttatgattatgatcgtttcgggtagatgacggcggtgtatcgcgaggaagggttgagttagtatcgcgtatacgatagtcgtggatagttaattgtcgtgaaagatacgttagggttatgaaacgcggtatgattataatatcgtcggtgatttgagcggcgtaattgttt

SEQ ID NO: 6334 - DNA, 937 bp, Artificial Sequence
  chemically treated genomic DNA (Homo sapiens) CpG-island No: 6334
aaacaattacgccgctcaaatcaccgacgatattataatcataccgcgtttcataaccctaacgtatctttcacgacaattaactatccacgactatcgtatacgcgatactaactcaacccttcctcgcgatacaccgccgtcatctacccgaaacgatcataatcataacgaattacataaccgaaacaatcgataaaactcaacaactaaccgtaacgactccacgtcataattttccgactaccgataacatcttccgttacgcaaaataaatcactatataaattatcataacgataacgaataatatcgccgtcaaaaacaatttcctaaatcaaacgacccaattcatcatattcccgacgcaattccaacccgtcaaacccgataactaacgttaactaattataataattataataaaacgccgataccctaccatccgacgtaattatacgcgtaataaaacccgtcaccacatccgaactatactctattatcctacctacgacatccgtctataccctaaacctacccacgacgtcaaactaactctacgtaacgctaccgtccgcgtattcctttttcaccacccgcttcaacccgacttcgccctacgtatacaacacttcacgacgatccaaactatcgataataataatacgatctttctcatactaatacgtataacttaaacctaccgaatttaactattctatcacccgcccgtcgctatcgtaacgataacgaatttccgaccgacccgtataacgatacgccaccatccgaccccgatatttatcatcgtaaataaaactacgcacctatttaccactacgatcatacacaccgacaatttcgcgccgaacgtccaaccaaaaacaccaacgaaccgcaaataatctccgaaaatccgaccgaaatcgcacgaaaa

SEQ ID NO: 6335 - DNA, 937 bp, Artificial Sequence
  chemically treated genomic DNA (Homo sapiens) CpG-island No: 6335
gggtaattacgtcgtttaggttatcggcgatgttgtaattatatcgcgttttatggttttggcgtgttttttacggtaattaattgtttacggttgtcgtatgcgcggtattgatttagttttttttcgcggtgtatcgtcgttatttgttcgaagcggttatggttataacgggttatataatcggaatagtcggtgaagtttagtaattgatcgtaacggttttacgttatggtttttcggttgtcggtggtatttttcgttgcgtagggtaagttattgtgtggattattataacggtagcgggtgatatcgtcgttaggggtagttttttgaattagacggtttaatttattatattttcggcgtaattttagttcgttaggttcggtggttgacgttaattggttgtggtggttatagtaaaacgtcgatgttttgttattcggcgtggttatgcgcgtgatgaggttcgttattatattcgggttgtattttgttgttttgtttgcggtattcgtttgtgttttgagtttgtttacggcgttaaattgattttgcgtgacgttgtcgttcgcgtgttttttttttattattcgttttagttcggtttcgttttgcgtgtgtagtattttacggcggtttaggttgtcggtgatggtgatgcggttttttttatattgatacgtgtagtttaagtttgtcgggtttagttgttttgttattcgttcgtcgttgtcgtaacggtaacggattttcggtcggttcgtgtgacggtgcgttattattcggtttcggtatttattatcgtaagtaaagttgcgtatttgtttgttattacggttatatatatcggtagtttcgcgtcgggcgtttagttaaaggtattagcgggtcgtaggtaattttcgggaattcggtcggggtcgtacgggaa

SEQ ID NO: 6336 - DNA, 937 bp, Artificial Sequence
  chemically treated genomic DNA (Homo sapiens) CpG-island No: 6336
ttcccgtacgaccccgaccgaattcccgaaaattacctacgacccgctaatacctttaactaaacgcccgacgcgaaactaccgatatatataaccgtaataacaaacaaatacgcaactttacttacgataataaataccgaaaccgaataataacgcaccgtcacacgaaccgaccgaaaatccgttaccgttacgacaacgacgaacgaataacaaaacaactaaacccgacaaacttaaactacacgtatcaatataaaaaaaaccgcatcaccatcaccgacaacctaaaccgccgtaaaatactacacacgcaaaacgaaaccgaactaaaacgaataataaaaaaaaaacacgcgaacgacaacgtcacgcaaaatcaatttaacgccgtaaacaaactcaaaacacaaacgaataccgcaaacaaaacaacaaaatacaacccgaatataataacgaacctcatcacgcgcataaccacgccgaataacaaaacatcgacgttttactataaccaccacaaccaattaacgtcaaccaccgaacctaacgaactaaaattacgccgaaaatataataaattaaaccgtctaattcaaaaaactacccctaacgacgatatcacccgctaccgttataataatccacacaataacttaccctacgcaacgaaaaataccaccgacaaccgaaaaaccataacgtaaaaccgttacgatcaattactaaacttcaccgactattccgattatataacccgttataaccataaccgcttcgaacaaataacgacgatacaccgcgaaaaaaaactaaatcaataccgcgcatacgacaaccgtaaacaattaattaccgtaaaaaacacgccaaaaccataaaacgcgatataattacaacatcgccgataacctaaacgacgtaattaccc

SEQ ID NO: 6337 - DNA, 825 bp, Artificial Sequence
  chemically treated genomic DNA (Homo sapiens) CpG-island No: 6337
ataattcgtataatattatcgtgttataggcgtttgattcgtagatcggtacgttttcgttcgagcgtaaaacgttgtttatcggtacgtcgttttgttatatcgaaggcgcgtatttgtatcgttacgcgggatggtattatttgatggtcgtcgagggcggtattagttacgagtacgtcgtcgtggtgttgcgttttaaaaatatcgacgggtcgtacgagttgtattcggacgtaacgatgatgattagttggtatttgtcggagaattcgttgtagaagagcggttacggttcgttgttgtagacgtatacgggtgaatggtatatggtttattttattagtcgttcgttgcgtttgttcggcgtgtcgttgttggttttcggcggacgcggttattgttcgttggggcgcgagatcggtatcgttcgtattgaatggcgcgacggttggtcgtacgtggaaggcggtaagtacgcgtagttgatcgtgaaaggttcgtaagtagtcgagtagtttgtagtcgtttcgggtaattggcgggacgatttcgacgttagttcgtttggatcggagttgtagattttgcgtattcgtacgaagatatttcggatgtttatcgagcgttcgggttttaggattttaggaagatcgttaatcgatttaattaattacggggttttatgagaaatgtttcgggaaaacggagagtttcgggattttataacggggatagatataatataaggagcgaatgaaagcgaggatattaattaaatagtacgcgggatataagaagagcgagagttagtaaaatgttttt

SEQ ID NO: 6338 - DNA, 825 bp, Artificial Sequence
  chemically treated genomic DNA (Homo sapiens) CpG-island No: 6338
aaaaacattttactaactctcgctcttcttatatcccgcgtactatttaattaatatcctcgctttcattcgctccttatattatatctatccccgttataaaatcccgaaactctccgttttcccgaaacatttctcataaaaccccgtaattaattaaatcgattaacgatcttcctaaaatcctaaaacccgaacgctcgataaacatccgaaatatcttcgtacgaatacgcaaaatctacaactccgatccaaacgaactaacgtcgaaatcgtcccgccaattacccgaaacgactacaaactactcgactacttacgaacctttcacgatcaactacgcgtacttaccgccttccacgtacgaccaaccgtcgcgccattcaatacgaacgataccgatctcgcgccccaacgaacaataaccgcgtccgccgaaaaccaacaacgacacgccgaacaaacgcaacgaacgactaataaaataaaccatataccattcacccgtatacgtctacaacaacgaaccgtaaccgctcttctacaacgaattctccgacaaataccaactaatcatcatcgttacgtccgaatacaactcgtacgacccgtcgatatttttaaaacgcaacaccacgacgacgtactcgtaactaataccgccctcgacgaccatcaaataataccatcccgcgtaacgatacaaatacgcgccttcgatataacaaaacgacgtaccgataaacaacgttttacgctcgaacgaaaacgtaccgatctacgaatcaaacgcctataacacgataatattatacgaattat

SEQ ID NO: 6339 - DNA, 825 bp, Artificial Sequence
  chemically treated genomic DNA (Homo sapiens) CpG-island No: 6339
agagatattttgttagttttcgttttttttgtgtttcgcgtgttgtttggttagtgttttcgtttttattcgttttttgtgttgtgtttgttttcgttgtgggatttcgggatttttcgttttttcgaagtattttttatggggtttcgtgattggttaagtcgattgacgatttttttaggattttaagattcgggcgttcggtgagtattcgaggtgttttcgtacgaatgcgtagggtttgtagtttcggtttaagcgaattggcgtcgaaatcgtttcgttagttgttcggaacggttgtaggttgttcggttatttgcgggttttttacggttagttgcgcgtgtttgtcgttttttacgtacggttagtcgtcgcgttatttaatgcgggcgatgtcggtttcgcgttttagcgggtagtagtcgcgttcgtcggaggttagtagcggtacgtcgggtaggcgtagcgggcggttggtgaggtaggttatgtattatttattcgtatgcgtttgtagtagcgagtcgtggtcgtttttttgtagcgggtttttcggtaggtgttagttggttattatcgttacgttcgggtgtagttcgtacggttcgtcgatatttttggaacgtagtattacgacggcgtgttcgtagttggtgtcgttttcggcggttattaggtagtattatttcgcgtggcgatataggtgcgcgttttcggtgtagtagagcggcgtgtcggtaaatagcgttttgcgttcgggcgagagcgtgtcggtttgcgggttaaacgtttgtaatacgatggtgttgtgcgggttgt

SEQ ID NO: 6340 - DNA, 825 bp, Artificial Sequence
  chemically treated genomic DNA (Homo sapiens) CpG-island No: 6340
acaacccgcacaacaccatcgtattacaaacgtttaacccgcaaaccgacacgctctcgcccgaacgcaaaacgctatttaccgacacgccgctctactacaccgaaaacgcgcacctatatcgccacgcgaaataatactacctaataaccgccgaaaacgacaccaactacgaacacgccgtcgtaatactacgttccaaaaatatcgacgaaccgtacgaactacacccgaacgtaacgataataaccaactaacacctaccgaaaaacccgctacaaaaaaacgaccacgactcgctactacaaacgcatacgaataaataatacataacctacctcaccaaccgcccgctacgcctacccgacgtaccgctactaacctccgacgaacgcgactactacccgctaaaacgcgaaaccgacatcgcccgcattaaataacgcgacgactaaccgtacgtaaaaaacgacaaacacgcgcaactaaccgtaaaaaacccgcaaataaccgaacaacctacaaccgttccgaacaactaacgaaacgatttcgacgccaattcgcttaaaccgaaactacaaaccctacgcattcgtacgaaaacacctcgaatactcaccgaacgcccgaatcttaaaatcctaaaaaaatcgtcaatcgacttaaccaatcacgaaaccccataaaaaatacttcgaaaaaacgaaaaatcccgaaatcccacaacgaaaacaaacacaacacaaaaaacgaataaaaacgaaaacactaaccaaacaacacgcgaaacacaaaaaaaacgaaaactaacaaaatatctct

SEQ ID NO: 6341 - DNA, 759 bp, Artificial Sequence
  chemically treated genomic DNA (Homo sapiens) CpG-island No: 6341
gttttttaaggacgaatcgttttttttttttcgttgtggttttgcggtaagtttgtaagttttgacgtcgtaggtcgagttttgagagtttttttgtcgcggaggttttaagagaacgcgcgagtgcgtaaagggtatttggtttaaggcggagaaattacgtttcggaattagttttttagttttttgagttcgacggcgcggttttttttcgttgcgtcggttttttgattttggcgtatttcggttcgggcgttaaagcggtgtttcgcgaaagttgtatagtttgcgacgtttttagttatttttcgtagtttaggttcggttaaggagataatatcgttgttatgggaacggaacgttacgggttttgttgggagcgtttgtagttatggcgacgcggggtattttcggttcggagagtttttgttgtttggcgtttatagtagtttttgttttatttttcgttttttttttttcgtaggttagacgcgttcggttttcggttcgttttaaaattggtttttgtatattgtattttacgagattttatttttcggaggtgaaggcgtaggaagagaagatatatttcgtttaaggatggaagggagcgtcgggttttacggttttatttatttaaagttgcgacgtgtgcgggttgtattcggcgacgatttttggttacggtgtatttttatagtttttcgggagttttgtttttatggattttagaggaaaggtttagatatggttgttgat

SEQ ID NO: 6342 - DNA, 759 bp, Artificial Sequence
  chemically treated genomic DNA (Homo sapiens) CpG-island No: 6342
atcaacaaccatatctaaacctttcctctaaaatccataaaaacaaaactcccgaaaaactataaaaatacaccgtaaccaaaaatcgtcgccgaatacaacccgcacacgtcgcaactttaaataaataaaaccgtaaaacccgacgctcccttccatccttaaacgaaatatatcttctcttcctacgccttcacctccgaaaaataaaatctcgtaaaatacaatatacaaaaaccaattttaaaacgaaccgaaaaccgaacgcgtctaacctacgaaaaaaaaaaaacgaaaaataaaacaaaaactactataaacgccaaacaacaaaaactctccgaaccgaaaataccccgcgtcgccataactacaaacgctcccaacaaaacccgtaacgttccgttcccataacaacgatattatctccttaaccgaacctaaactacgaaaaataactaaaaacgtcgcaaactatacaactttcgcgaaacaccgctttaacgcccgaaccgaaatacgccaaaatcaaaaaaccgacgcaacgaaaaaaaaccgcgccgtcgaactcaaaaaactaaaaaactaattccgaaacgtaatttctccgccttaaaccaaataccctttacgcactcgcgcgttctcttaaaacctccgcgacaaaaaaactctcaaaactcgacctacgacgtcaaaacttacaaacttaccgcaaaaccacaacgaaaaaaaaaaaacgattcgtccttaaaaaac

SEQ ID NO: 6343 - DNA, 759 bp, Artificial Sequence
  chemically treated genomic DNA (Homo sapiens) CpG-island No: 6343
gttaatagttatatttaagttttttttttggggtttataaaaataaaattttcgaggagttgtgggggtgtatcgtggttagggatcgtcgtcgaatatagttcgtatacgtcgtagttttaaataagtagggtcgtggggttcggcgtttttttttatttttggacggaatgtattttttttttttacgtttttattttcgaggggtaaggtttcgtgagatataatatgtagaggttagttttggggcgagtcggaggtcgggcgcgtttaatttgcggggaagggaaagcggagggtaaggtaagggttgttgtaggcgttagataatagggatttttcgaatcggaagtgtttcgcgtcgttatggttataggcgtttttagtagaattcgtagcgtttcgtttttatggtaacggtattgtttttttggtcggatttgggttgcggaaggtaattggggacgtcgtaggttgtgtagttttcgcgaggtatcgttttggcgttcggatcgaggtgcgttagggttaggaggtcgacgtagcgggaggaagtcgcgtcgtcgggtttagggagttgggaggttggtttcggggcgtggttttttcgttttgagttaggtgttttttgcgtattcgcgcgtttttttagagttttcgcggtagagaggtttttagagttcgatttgcggcgttagggtttatagatttgtcgtagaattatagcgggaaaagaggagcgattcgtttttgaggggt

SEQ ID NO: 6344 - DNA, 759 bp, Artificial Sequence
  chemically treated genomic DNA (Homo sapiens) CpG-island No: 6344
acccctcaaaaacgaatcgctcctcttttcccgctataattctacgacaaatctataaaccctaacgccgcaaatcgaactctaaaaacctctctaccgcgaaaactctaaaaaaacgcgcgaatacgcaaaaaacacctaactcaaaacgaaaaaaccacgccccgaaaccaacctcccaactccctaaacccgacgacgcgacttcctcccgctacgtcgacctcctaaccctaacgcacctcgatccgaacgccaaaacgatacctcgcgaaaactacacaacctacgacgtccccaattaccttccgcaacccaaatccgaccaaaaaaacaataccgttaccataaaaacgaaacgctacgaattctactaaaaacgcctataaccataacgacgcgaaacacttccgattcgaaaaatccctattatctaacgcctacaacaacccttaccttaccctccgctttcccttccccgcaaattaaacgcgcccgacctccgactcgccccaaaactaacctctacatattatatctcacgaaaccttacccctcgaaaataaaaacgtaaaaaaaaaaaatacattccgtccaaaaataaaaaaaaacgccgaaccccacgaccctacttatttaaaactacgacgtatacgaactatattcgacgacgatccctaaccacgatacacccccacaactcctcgaaaattttatttttataaaccccaaaaaaaaaacttaaatataactattaac

SEQ ID NO: 6345 - DNA, 1089 bp, Artificial Sequence
  chemically treated genomic DNA (Homo sapiens) CpG-island No: 6345
gttgcgttgtaagggacgtagggaaaagtaagtttggggtaggtttgagtttcgagttttcgattgttttttcgtggtgtttgcgattcggtagcgggagtaagtgaggttgttggattgtagttttttttttatagtggcgatgcggggtcggggtcgcgggtatgaggagatggggtgtgagtcggggtgcgttagggtagagcgtttcgtttatcgagacgggtagggcggtttcgggtattggtcgggcggggtaaggagtttttaggtcgttaggtttttttttgttggtttcgcggagttcgttcgggggaagggaaggtcggggagggtcgggttttttcgagtggtcgcgggggttgcgggataggtatttattcgggtgttattttagggttagttttcgataggtttttttgagttttttttcgttggcgtcgcgtcgtatttttagcgttttatagtgatattttatcgttcgatcgggcgggcggtcggcgttggggttcgggacggggtcggggttcgggttcgggtcgaagcggcggcggcggcggcgttggtagtttttttcggcgggagttcgtcgttcgtatcgggttagttagcgagttcggcggcggcggcggcggcggcggtggtgtaggttagtgaaggcgcgcggtggcggtagacgacgtagttgcggtaagcgggagcgcggcgggggcggtgtcggcggtcgtcgtttcgtatgggttaggggtgggttttgtgtcggaaagggtcgcgcgggagggggtggggtttcggcggggtgagaggcgaggtttcgaggaaggaaggcggggttttggcgaggagagaggcgggtcgcgtaggagaaaggcgggagtttggcggggaaagaggcgggtcgcgtgggaggaaggtaggttttggtcgggaagaataggaggaaggcgggattttggtgtgagaggcggggtttcggcggggcgagaggcggggtcgcgcggaagggaggtagggttacgttggtgttattgtgaggggtatagatggcggttagtgtgagtggtagtcgatttgagggttgaaggggga

SEQ ID NO: 6346 - DNA, 1089 bp, Artificial Sequence
  chemically treated genomic DNA (Homo sapiens) CpG-island No: 6346
tcccccttcaaccctcaaatcgactaccactcacactaaccgccatctatacccctcacaataacaccaacgtaaccctacctcccttccgcgcgaccccgcctctcgccccgccgaaaccccgcctctcacaccaaaatcccgccttcctcctattcttcccgaccaaaacctaccttcctcccacgcgacccgcctctttccccgccaaactcccgcctttctcctacgcgacccgcctctctcctcgccaaaaccccgccttccttcctcgaaacctcgcctctcaccccgccgaaaccccaccccctcccgcgcgaccctttccgacacaaaacccacccctaacccatacgaaacgacgaccgccgacaccgcccccgccgcgctcccgcttaccgcaactacgtcgtctaccgccaccgcgcgccttcactaacctacaccaccgccgccgccgccgccgccgccgaactcgctaactaacccgatacgaacgacgaactcccgccgaaaaaaactaccaacgccgccgccgccgccgcttcgacccgaacccgaaccccgaccccgtcccgaaccccaacgccgaccgcccgcccgatcgaacgataaaatatcactataaaacgctaaaaatacgacgcgacgccaacgaaaaaaaactcaaaaaaacctatcgaaaactaaccctaaaataacacccgaataaatacctatcccgcaacccccgcgaccactcgaaaaaacccgaccctccccgaccttcccttcccccgaacgaactccgcgaaaccaacaaaaaaaaacctaacgacctaaaaactccttaccccgcccgaccaatacccgaaaccgccctacccgtctcgataaacgaaacgctctaccctaacgcaccccgactcacaccccatctcctcatacccgcgaccccgaccccgcatcgccactataaaaaaaaaactacaatccaacaacctcacttactcccgctaccgaatcgcaaacaccacgaaaaaacaatcgaaaactcgaaactcaaacctaccccaaacttacttttccctacgtcccttacaacgcaac

SEQ ID NO: 6347 - DNA, 1089 bp, Artificial Sequence
  chemically treated genomic DNA (Homo sapiens) CpG-island No: 6347
tttttttttagtttttaggtcggttgttatttatattgatcgttatttgtgttttttataatgatattagcgtggttttgtttttttttcgcgcggtttcgtttttcgtttcgtcgaggtttcgttttttatattaaggtttcgttttttttttgtttttttcggttaaggtttattttttttttacgcggttcgttttttttttcgttaagttttcgttttttttttgcgcggttcgttttttttttcgttaaggtttcgtttttttttttcggggtttcgttttttatttcgtcgaggttttattttttttcgcgcggtttttttcggtatagagtttatttttagtttatgcgaagcggcggtcgtcggtatcgttttcgtcgcgttttcgtttgtcgtagttgcgtcgtttgtcgttatcgcgcgtttttattgatttatattatcgtcgtcgtcgtcgtcgtcgtcgggttcgttggttggttcggtgcgggcggcggattttcgtcggagaggattgttagcgtcgtcgtcgtcgtcgtttcggttcgggttcgggtttcgatttcgtttcgggttttagcgtcggtcgttcgttcggtcgggcgatgaagtgttattatgaggcgttgggggtgcggcgcgacgttagcgaggaggagtttaagaaggtttatcggaagttggttttgaaatggtattcgggtaagtatttgtttcgtagttttcgcggttattcggagaagttcggtttttttcgatttttttttttttcgggcggatttcgcggagttagtagagagggatttggcggtttaggagttttttgtttcgttcggttagtgttcggagtcgttttgttcgtttcggtgggcgaagcgttttgttttggcgtatttcggtttatattttatttttttatattcgcgatttcggtttcgtatcgttattgtagggggaaaattgtagtttaataattttatttgttttcgttatcgggtcgtagatattacgagggagtagtcgggaattcggaatttagatttgttttaggtttgtttttttttgcgttttttgtagcgtagt

SEQ ID NO: 6348 - DNA, 1089 bp, Artificial Sequence
  chemically treated genomic DNA (Homo sapiens) CpG-island No: 6348
actacgctacaaaaaacgcaaaaaaaaacaaacctaaaacaaatctaaattccgaattcccgactactccctcgtaatatctacgacccgataacgaaaacaaataaaattattaaactacaattttccccctacaataacgatacgaaaccgaaatcgcgaatataaaaaaataaaatataaaccgaaatacgccaaaacaaaacgcttcgcccaccgaaacgaacaaaacgactccgaacactaaccgaacgaaacaaaaaactcctaaaccgccaaatccctctctactaactccgcgaaatccgcccgaaaaaaaaaaaaatcgaaaaaaaccgaacttctccgaataaccgcgaaaactacgaaacaaatacttacccgaataccatttcaaaaccaacttccgataaaccttcttaaactcctcctcgctaacgtcgcgccgcacccccaacgcctcataataacacttcatcgcccgaccgaacgaacgaccgacgctaaaacccgaaacgaaatcgaaacccgaacccgaaccgaaacgacgacgacgacgacgctaacaatcctctccgacgaaaatccgccgcccgcaccgaaccaaccaacgaacccgacgacgacgacgacgacgacgataatataaatcaataaaaacgcgcgataacgacaaacgacgcaactacgacaaacgaaaacgcgacgaaaacgataccgacgaccgccgcttcgcataaactaaaaataaactctataccgaaaaaaaccgcgcgaaaaaaaataaaacctcgacgaaataaaaaacgaaaccccgaaaaaaaaaaacgaaaccttaacgaaaaaaaaaacgaaccgcgcaaaaaaaaaacgaaaacttaacgaaaaaaaaaacgaaccgcgtaaaaaaaaaataaaccttaaccgaaaaaaacaaaaaaaaaacgaaaccttaatataaaaaacgaaacctcgacgaaacgaaaaacgaaaccgcgcgaaaaaaaaacaaaaccacgctaatatcattataaaaaacacaaataacgatcaatataaataacaaccgacctaaaaactaaaaaaaaa

SEQ ID NO: 6349 - DNA, 662 bp, Artificial Sequence
  chemically treated genomic DNA (Homo sapiens) CpG-island No: 6349
tttcgtatttattatcgtttttatttgggtatttttcgtttgaacgtgtaaagtttttacgtcgttttttttggtgtcgttattttgtttcgtcgttcgcgtttttggtttttttttcggcgttgtcgttcgtttttattttcgatttttatggttcggcggttttaagcgtttagtttcgcggtcgttttttaggtttgtgtcgttttttttcggtttcggtggcgcggtacgcgcggtttttaggttttttttagttttgtggtgacggtggtcgaggtggagggtcggtttgaagagtggcgggattggttttatttttttcgcggtttttcggagtcgtttcgtttttttttagggattttgttgagaagggttttcgggcgtttagattttatcgtaaaggtagggttttcgtattcggggatttcgagattagtaagcgatgttgtttcgcgggcgggttggtgaatggggttgtttgggatttttggaggattatttggatatttcgggttcgtttcgttatcgtttgttttgttggaggcggggttggtggcgcgggttgtataaaatcgatttttcgcggatttgtagtttttgtttggtcgggagatatcgtgttagttgcgtgtttttattttttataattttttacgtta

SEQ ID NO: 6350 - DNA, 662 bp, Artificial Sequence
  chemically treated genomic DNA (Homo sapiens) CpG-island No: 6350
taacgtaaaaaattataaaaaataaaaacacgcaactaacacgatatctcccgaccaaacaaaaactacaaatccgcgaaaaatcgattttatacaacccgcgccaccaaccccgcctccaacaaaacaaacgataacgaaacgaacccgaaatatccaaataatcctccaaaaatcccaaacaaccccattcaccaacccgcccgcgaaacaacatcgcttactaatctcgaaatccccgaatacgaaaaccctacctttacgataaaatctaaacgcccgaaaacccttctcaacaaaatccctaaaaaaaaacgaaacgactccgaaaaaccgcgaaaaaaataaaaccaatcccgccactcttcaaaccgaccctccacctcgaccaccgtcaccacaaaactaaaaaaaacctaaaaaccgcgcgtaccgcgccaccgaaaccgaaaaaaaacgacacaaacctaaaaaacgaccgcgaaactaaacgcttaaaaccgccgaaccataaaaatcgaaaataaaaacgaacgacaacgccgaaaaaaaaaccaaaaacgcgaacgacgaaacaaaataacgacaccaaaaaaaacgacgtaaaaactttacacgttcaaacgaaaaatacccaaataaaaacgataataaatacgaaa

SEQ ID NO: 6351 - DNA, 662 bp, Artificial Sequence
  chemically treated genomic DNA (Homo sapiens) CpG-island No: 6351
taacgtgaaaagttgtgaagaatgaagatacgtaattgatacggtatttttcggttaaataggagttataaattcgcggggagtcggttttgtgtagttcgcgttattagtttcgtttttaataaaataggcgatggcggggcgggttcggagtgtttagataattttttaagagttttagataattttatttattagttcgttcgcgggatagtatcgtttattagtttcggggttttcgagtgcggaaattttatttttgcggtggggtttggacgttcgagagttttttttagtaaagtttttgaagaggagcgaggcggtttcgaggaatcgcggaggaagtgaagttagtttcgttattttttagatcggttttttatttcggttatcgttattatagagttgaaggaggtttaagagtcgcgcgtgtcgcgttatcgagatcggaaggaggcggtatagatttggaggacgatcgcggagttgagcgtttagagtcgtcgaattatagagatcggaaataggagcgagcggtagcgtcggaaaggaggttaagagcgcgggcggcgaggtaagatggcggtattagaggaaacggcgtggaggttttgtacgtttaggcgaagaatgtttaaatagaaacgataatagatgcggag

SEQ ID NO: 6352 - DNA, 662 bp, Artificial Sequence
  chemically treated genomic DNA (Homo sapiens) CpG-island No: 6352
ctccgcatctattatcgtttctatttaaacattcttcgcctaaacgtacaaaacctccacgccgtttcctctaataccgccatcttacctcgccgcccgcgctcttaacctcctttccgacgctaccgctcgctcctatttccgatctctataattcgacgactctaaacgctcaactccgcgatcgtcctccaaatctataccgcctccttccgatctcgataacgcgacacgcgcgactcttaaacctccttcaactctataataacgataaccgaaataaaaaaccgatctaaaaaataacgaaactaacttcacttcctccgcgattcctcgaaaccgcctcgctcctcttcaaaaactttactaaaaaaaactctcgaacgtccaaaccccaccgcaaaaataaaatttccgcactcgaaaaccccgaaactaataaacgatactatcccgcgaacgaactaataaataaaattatctaaaactcttaaaaaattatctaaacactccgaacccgccccgccatcgcctattttattaaaaacgaaactaataacgcgaactacacaaaaccgactccccgcgaatttataactcctatttaaccgaaaaataccgtatcaattacgtatcttcattcttcacaacttttcacgtta

SEQ ID NO: 6353 - DNA, 803 bp, Artificial Sequence
  chemically treated genomic DNA (Homo sapiens) CpG-island No: 6353
agggtatatcgtttttcgatttgattatttttgattgggtggaagcgtagagtgagtatttattgttgcgcgaaatcggcggtacggcgatttagattgaaggtatttttgagcggttgcgattggcgggaatgtcggaggcggatattcgtcgtttgatcgttacgttaaaaaatttagattcgttttacgtttaaagcgtttattgatggcgtgattatcgcgtttgatttgcgcgcgggaataatatcgttaagattacgtggtacgcgaaaatttagggtatggattcggtgttgggttattgttgcgatttcggagtttatcgtttggttggtgaaagatgtttcgtagtttatttttatcgtttcggcgcgatcggataaaatatttattattcgtaaatggacgttgttatttggcgtggatgtcgcgattcgtacgttgtagttgcgtttggaagtcgataacgtcgacgaggcgttaaaatcgggtatgaacgtttggttgtaatttaatatcgttagcgaatcgatgttgtttatttcgttataagcgttgattgatatcggtagcgaatagcgggtgattatcgttgatgtcgacgggcgttttgtatcgaaacgcgttgttgttttttaggtatcgtaaggcgttatcgtattacgttttggtttggcggaaggtgaaaaggtggtttttagcggtttgtttttgattgatttcgaagttaatatttttggcgtattggagcggatgcgttttgaaagtgttatttatgcgtattgagggaataattaatg

SEQ ID NO: 6354 - DNA, 803 bp, Artificial Sequence
  chemically treated genomic DNA (Homo sapiens) CpG-island No: 6354
cattaattattccctcaatacgcataaataacactttcaaaacgcatccgctccaatacgccaaaaatattaacttcgaaatcaatcaaaaacaaaccgctaaaaaccaccttttcaccttccgccaaaccaaaacgtaatacgataacgccttacgatacctaaaaaacaacaacgcgtttcgatacaaaacgcccgtcgacatcaacgataatcacccgctattcgctaccgatatcaatcaacgcttataacgaaataaacaacatcgattcgctaacgatattaaattacaaccaaacgttcatacccgattttaacgcctcgtcgacgttatcgacttccaaacgcaactacaacgtacgaatcgcgacatccacgccaaataacaacgtccatttacgaataataaatattttatccgatcgcgccgaaacgataaaaataaactacgaaacatctttcaccaaccaaacgataaactccgaaatcgcaacaataacccaacaccgaatccataccctaaattttcgcgtaccacgtaatcttaacgatattattcccgcgcgcaaatcaaacgcgataatcacgccatcaataaacgctttaaacgtaaaacgaatctaaattttttaacgtaacgatcaaacgacgaatatccgcctccgacattcccgccaatcgcaaccgctcaaaaataccttcaatctaaatcgccgtaccgccgatttcgcgcaacaataaatactcactctacgcttccacccaatcaaaaataatcaaatcgaaaaacgatataccct

SEQ ID NO: 6355 - DNA, 803 bp, Artificial Sequence
  chemically treated genomic DNA (Homo sapiens) CpG-island No: 6355
tattggttatttttttaatgcgtatgggtagtatttttagagcgtattcgttttagtgcgttagaaatattggtttcggaattaattaggaataggtcgttggaaattatttttttatttttcgttagattagagcgtaatgcggtgacgttttgcgatgtttggaaaatagtaacgcgtttcggtataaagcgttcgtcggtattaacggtaattattcgttgttcgttgtcggtattaattagcgtttgtgacggaatgagtagtatcggttcgttggcggtgttgagttgtaattaggcgtttatgttcggttttagcgtttcgtcggcgttgtcgatttttagacgtagttgtagcgtgcgggtcgcggtatttacgttaggtagtagcgtttatttgcggatggtgagtgttttattcggtcgcgtcggaacggtgagggtaaattgcgaggtattttttattagttaggcgatagatttcgggatcgtagtagtgatttaatatcgggtttatattttgaattttcgcgtattacgtaattttggcgatattattttcgcgcgtagattaaacgcggtgattacgttattaatgggcgttttgagcgtaaagcgagtttggattttttagcgtggcgattaggcggcgaatattcgttttcggtattttcgttagtcgtagtcgtttaagaatgtttttagtttgggtcgtcgtatcgtcggtttcgcgtagtagtaaatatttattttgcgtttttatttagttaggaatggttaggtcgagaagcggtgtgtttt

SEQ ID NO: 6356 - DNA, 803 bp, Artificial Sequence
  chemically treated genomic DNA (Homo sapiens) CpG-island No: 6356
aaaacacaccgcttctcgacctaaccattcctaactaaataaaaacgcaaaataaatatttactactacgcgaaaccgacgatacgacgacccaaactaaaaacattcttaaacgactacgactaacgaaaataccgaaaacgaatattcgccgcctaatcgccacgctaaaaaatccaaactcgctttacgctcaaaacgcccattaataacgtaatcaccgcgtttaatctacgcgcgaaaataatatcgccaaaattacgtaatacgcgaaaattcaaaatataaacccgatattaaatcactactacgatcccgaaatctatcgcctaactaataaaaaatacctcgcaatttaccctcaccgttccgacgcgaccgaataaaacactcaccatccgcaaataaacgctactacctaacgtaaataccgcgacccgcacgctacaactacgtctaaaaatcgacaacgccgacgaaacgctaaaaccgaacataaacgcctaattacaactcaacaccgccaacgaaccgatactactcattccgtcacaaacgctaattaataccgacaacgaacaacgaataattaccgttaataccgacgaacgctttataccgaaacgcgttactattttccaaacatcgcaaaacgtcaccgcattacgctctaatctaacgaaaaataaaaaaataatttccaacgacctattcctaattaattccgaaaccaatatttctaacgcactaaaacgaatacgctctaaaaatactacccatacgcattaaaaaaataaccaata

SEQ ID NO: 6357 - DNA, 519 bp, Artificial Sequence
  chemically treated genomic DNA (Homo sapiens) CpG-island No: 6357
tgcgtcgaaaaatggttaggtcgttggtattaatattattggttttttcgaggtttgtatgttcggcgggatggcgatgaaatggcgttggcgtaagcgtatggaagttgtaggtaaattaacggataaattaaatttggtgtgcggttcggtataaatttgttggtataaattcgttcgttattgggatgtggagttgcgtgagatttttatgcgtttcggttagttgtttatggattcgaaacgtatgattgaagtttgtgacgaaaatattatcggcgtggtgtcgattttcggcgtgatttatattggtaattatgagtttttataatcgttgtacgatgcgttggataaattttaggtcgatatcggtatcgatatcgatatgtatatcgacgttgttagcggtggttttttggtatcgtcgtcgttcggatatcgttgggattttcgtttgcgcgtgtgaatcgattatgttatttagtagttaatcgttttgtgttttaaagaaagtaattt

SEQ ID NO: 6358 - DNA, 519 bp, Artificial Sequence
  chemically treated genomic DNA (Homo sapiens) CpG-island No: 6358
aaattactttctttaaaacacaaaacgattaactactaaataacataatcgattcacacgcgcaaacgaaaatcccaacgatatccgaacgacgacgataccaaaaaaccaccgctaacaacgtcgatatacatatcgatatcgataccgatatcgacctaaaatttatccaacgcatcgtacaacgattataaaaactcataattaccaatataaatcacgccgaaaatcgacaccacgccgataatattttcgtcacaaacttcaatcatacgtttcgaatccataaacaactaaccgaaacgcataaaaatctcacgcaactccacatcccaataacgaacgaatttataccaacaaatttataccgaaccgcacaccaaatttaatttatccgttaatttacctacaacttccatacgcttacgccaacgccatttcatcgccatcccgccgaacatacaaacctcgaaaaaaccaataatattaataccaacgacctaaccatttttcgacgca

SEQ ID NO: 6359 - DNA, 519 bp, Artificial Sequence
  chemically treated genomic DNA (Homo sapiens) CpG-island No: 6359
aaattgttttttttagagtatagggcgattaattattgagtagtatgatcgatttatacgcgtaagcgaaagttttagcgatattcgggcgacgacggtgttaggaagttatcgttggtagcgtcgatgtgtatgtcgatgtcgatatcggtatcggtttggaatttatttagcgtatcgtgtagcggttgtgggaatttatagttattagtgtaggttacgtcgaaagtcggtattacgtcgatggtgttttcgttataggttttaattatgcgtttcgggtttataaataattgatcggggcgtatagggattttacgtagttttatattttagtagcgggcgaatttatgttagtagatttgtatcggatcgtatattaggtttggtttattcgttggtttgtttgtagtttttatacgtttgcgttaacgttattttatcgttatttcgtcgagtatataggtttcggaagaattaatggtgttggtgttaacggtttgattatttttcggcgta

SEQ ID NO: 6360 - DNA, 519 bp, Artificial Sequence
  chemically treated genomic DNA (Homo sapiens) CpG-island No: 6360
tacgccgaaaaataatcaaaccgttaacaccaacaccattaattcttccgaaacctatatactcgacgaaataacgataaaataacgttaacgcaaacgtataaaaactacaaacaaaccaacgaataaaccaaacctaatatacgatccgatacaaatctactaacataaattcgcccgctactaaaatataaaactacgtaaaatccctatacgccccgatcaattatttataaacccgaaacgcataattaaaacctataacgaaaacaccatcgacgtaataccgactttcgacgtaacctacactaataactataaattcccacaaccgctacacgatacgctaaataaattccaaaccgataccgatatcgacatcgacatacacatcgacgctaccaacgataacttcctaacaccgtcgtcgcccgaatatcgctaaaactttcgcttacgcgtataaatcgatcatactactcaataattaatcgccctatactctaaaaaaaacaattt

SEQ ID NO: 6361 - DNA, 502 bp, Artificial Sequence
  chemically treated genomic DNA (Homo sapiens) CpG-island No: 6361
tcgattcgaagaatggcgtagcggtaatgaaagcgttcgtcgtgattcgtgtgggtgacgtgtttttcgttttcgtattgtttattttttataacgaattgggtattttgaattttcgcgaaatggtggaattggtattagcgtattttgttgacggtaataatatgttgatgtgggcgacgttgatgttgttgggcggtgcgggcggtaaatttgcgtagttgtcgttgtagatatggtttgtcgacgcgatggcgggtttcgacgtttgttttcgcgttgatttacgtcgtaaattatggtaatcggcggtggttatttgatcgttcgtatatatcgttgtttttgatgacgacggaggtttgtatttggggggtattgtcgggtaggttttttgttttttggcgggttttgtcggtttggtatagatcgacgataaaagcggttttggtttattttattatgaagtagatatggtttattgttttttgggtttcggcgt

SEQ ID NO: 6362 - DNA, 502 bp, Artificial Sequence
  chemically treated genomic DNA (Homo sapiens) CpG-island No: 6362
acgccgaaacccaaaaaacaataaaccatatctacttcataataaaataaaccaaaaccgcttttatcgtcgatctataccaaaccgacaaaacccgccaaaaaacaaaaaacctacccgacaataccccccaaatacaaacctccgtcgtcatcaaaaacaacgatatatacgaacgatcaaataaccaccgccgattaccataatttacgacgtaaatcaacgcgaaaacaaacgtcgaaacccgccatcgcgtcgacaaaccatatctacaacgacaactacgcaaatttaccgcccgcaccgcccaacaacatcaacgtcgcccacatcaacatattattaccgtcaacaaaatacgctaataccaattccaccatttcgcgaaaattcaaaatacccaattcgttataaaaaataaacaatacgaaaacgaaaaacacgtcacccacacgaatcacgacgaacgctttcattaccgctacgccattcttcgaatcga

SEQ ID NO: 6363 - DNA, 502 bp, Artificial Sequence
  chemically treated genomic DNA (Homo sapiens) CpG-island No: 6363
gcgtcgaagtttaaggaataataaattatatttgttttatggtaaagtaagttagaatcgtttttatcgtcggtttgtattaggtcggtaaaattcgttaggaagtaggggatttgttcgataatattttttagatgtagattttcgtcgttattaggaatagcggtgtgtacgggcgattaggtagttatcgtcggttattatggtttacggcgtggattagcgcggagataggcgtcggggttcgttatcgcgtcggtaagttatgtttgtaacggtaattgcgtagatttatcgttcgtatcgtttagtagtattagcgtcgtttatattagtatgttattgtcgttagtaaagtgcgttggtgttagttttattatttcgcggaagtttagggtgtttagttcgttgtaaagaatgaatagtgcgaaagcgaggaatacgttatttatacgggttacgacgaacgtttttattgtcgttgcgttatttttcggatcgg

SEQ ID NO: 6364 - DNA, 502 bp, Artificial Sequence
  chemically treated genomic DNA (Homo sapiens) CpG-island No: 6364
ccgatccgaaaaataacgcaacgacaataaaaacgttcgtcgtaacccgtataaataacgtattcctcgctttcgcactattcattctttacaacgaactaaacaccctaaacttccgcgaaataataaaactaacaccaacgcactttactaacgacaataacatactaatataaacgacgctaatactactaaacgatacgaacgataaatctacgcaattaccgttacaaacataacttaccgacgcgataacgaaccccgacgcctatctccgcgctaatccacgccgtaaaccataataaccgacgataactacctaatcgcccgtacacaccgctattcctaataacgacgaaaatctacatctaaaaaatattatcgaacaaatcccctacttcctaacgaattttaccgacctaatacaaaccgacgataaaaacgattctaacttactttaccataaaacaaatataatttattattccttaaacttcgacgc

SEQ ID NO: 6365 - DNA, 515 bp, Artificial Sequence
  chemically treated genomic DNA (Homo sapiens) CpG-island No: 6365
tcgagcgtgtttaggcgttggttatcgtggcgtcgttattttgttttagtgttcgtgacgagtggtcggggataaaatcggacgtgttggcgggattttagtagtaatttagtgatgatttttagcgtatagtggagcggtttttggcgttataaattatggggattgaaacggcgcgttaggatgcgcgggcgttgaagaaaatcgttttggcgttatcgatgtcggaggttgacgtgtttaatggcgggttggaaattttgaaaacggtcgattttcgttagtcgttgtaaaacgtgtttatgtcgtttttgcgattgtatggttatttcgacggtttggtgtcgcgtaaagtggtgtcgatgttggataaattttggttttatagcgaattatatattttcgttaaagcggtttatgcgttatttatttcgtattcggtcgagttttgttatttgttggtggcgttgaagtagaaggtgtaaggggtttttgaaatggcgagatagaattat

SEQ ID NO: 6366 - DNA, 515 bp, Artificial Sequence
  chemically treated genomic DNA (Homo sapiens) CpG-island No: 6366
ataattctatctcgccatttcaaaaaccccttacaccttctacttcaacgccaccaacaaataacaaaactcgaccgaatacgaaataaataacgcataaaccgctttaacgaaaatatataattcgctataaaaccaaaatttatccaacatcgacaccactttacgcgacaccaaaccgtcgaaataaccatacaatcgcaaaaacgacataaacacgttttacaacgactaacgaaaatcgaccgttttcaaaatttccaacccgccattaaacacgtcaacctccgacatcgataacgccaaaacgattttcttcaacgcccgcgcatcctaacgcgccgtttcaatccccataatttataacgccaaaaaccgctccactatacgctaaaaatcatcactaaattactactaaaatcccgccaacacgtccgattttatccccgaccactcgtcacgaacactaaaacaaaataacgacgccacgataaccaacgcctaaacacgctcga

SEQ ID NO: 6367 - DNA, 515 bp, Artificial Sequence
  chemically treated genomic DNA (Homo sapiens) CpG-island No: 6367
atagttttgtttcgttattttaaaagttttttatattttttgttttaacgttattagtaggtgataaaattcggtcggatgcgaaataaatggcgtatgggtcgttttggcgaagatatatgattcgttgtgaggttaaagtttatttagtatcggtattattttgcgcggtattagatcgtcgagatagttatataatcgtaaaaacggtatggatacgttttgtagcggttgacggagatcgatcgtttttaggatttttagttcgttattaagtacgttaattttcggtatcggtaacgttagaacggttttttttaacgttcgcgtattttggcgcgtcgttttagtttttatggtttgtaacgttaggaatcgttttattgtacgttgaaaattattattgagttgttgttgaaatttcgttagtacgttcggttttattttcggttattcgttacgagtattaaaataaggtgacgacgttacggtgattagcgtttgaatacgttcgg

SEQ ID NO: 6368 - DNA, 515 bp, Artificial Sequence
  chemically treated genomic DNA (Homo sapiens) CpG-island No: 6368
ccgaacgtattcaaacgctaatcaccgtaacgtcgtcaccttattttaatactcgtaacgaataaccgaaaataaaaccgaacgtactaacgaaatttcaacaacaactcaataataattttcaacgtacaataaaacgattcctaacgttacaaaccataaaaactaaaacgacgcgccaaaatacgcgaacgttaaaaaaaaccgttctaacgttaccgataccgaaaattaacgtacttaataacgaactaaaaatcctaaaaacgatcgatctccgtcaaccgctacaaaacgtatccataccgtttttacgattatataactatctcgacgatctaataccgcgcaaaataataccgatactaaataaactttaacctcacaacgaatcatatatcttcgccaaaacgacccatacgccatttatttcgcatccgaccgaattttatcacctactaataacgttaaaacaaaaaatataaaaaacttttaaaataacgaaacaaaactat

SEQ ID NO: 6369 - DNA, 797 bp, Artificial Sequence
  chemically treated genomic DNA (Homo sapiens) CpG-island No: 6369
  unsure (614)
agatcgtcgtcgtcgcgtacgtcgttaattgttacggtatttagtacggtggtgatgtcgttcgttattattagcgcgtcgtggttgtttatcgtcgagtgggtaggttagttaattttcgggcgcggggtgaagaatttatttagattatcggtatgtagtttaattagtttcggtagtagttagtcgttttcgtcgtttatcgttttcggtaggcggttttggttttcggtaaaggcgcggatttcgtcgttttgtatttttagcgaatcgtttattatttcgttttttagtattagtttaacgttattgataattatgaagaggtttttattgggtgtaggcggtcggcgacgttattacgtatagtttcgttatggaagatgtttacgatggttgcgttacgggttttggtttcgcgaattagttttattatcgcggcgttgtttttggcgtttagcgaggcggtaggttcgttaagtagtagaatggggtagtcgacgataaagtcgcgggcgatgttgacgcgttgttgttcgttatcggaaaatgtcgatggtgttaggtgtttatagcgttttcgtacgttttagcgggtgagaagacgcgcggtntttacggcgtatgttttacgtcgaacgttcgtatcgagtagcggttgtattattatttttagcgttgagatacgtcggatggacgtttagaatttggtttattttagttacgggggttttgtgggaatgaggggtgtgtatatgcgtcgtttttaagcgtattttttgtttgttaaaaatgtg

SEQ ID NO: 6370 - DNA, 797 bp, Artificial Sequence
  chemically treated genomic DNA (Homo sapiens) CpG-island No: 6370
  unsure (184)
cacatttttaacaaacaaaaaatacgcttaaaaacgacgcatatacacacccctcattcccacaaaacccccgtaactaaaataaaccaaattctaaacgtccatccgacgtatctcaacgctaaaaataataatacaaccgctactcgatacgaacgttcgacgtaaaacatacgccgtaaanaccgcgcgtcttctcacccgctaaaacgtacgaaaacgctataaacacctaacaccatcgacattttccgataacgaacaacaacgcgtcaacatcgcccgcgactttatcgtcgactaccccattctactacttaacgaacctaccgcctcgctaaacgccaaaaacaacgccgcgataataaaactaattcgcgaaaccaaaacccgtaacgcaaccatcgtaaacatcttccataacgaaactatacgtaataacgtcgccgaccgcctacacccaataaaaacctcttcataattatcaataacgttaaactaatactaaaaaacgaaataataaacgattcgctaaaaatacaaaacgacgaaatccgcgcctttaccgaaaaccaaaaccgcctaccgaaaacgataaacgacgaaaacgactaactactaccgaaactaattaaactacataccgataatctaaataaattcttcaccccgcgcccgaaaattaactaacctacccactcgacgataaacaaccacgacgcgctaataataacgaacgacatcaccaccgtactaaataccgtaacaattaacgacgtacgcgacgacgacgatct

SEQ ID NO: 6371 - DNA, 797 bp, Artificial Sequence
  chemically treated genomic DNA (Homo sapiens) CpG-island No: 6371
  unsure (184)
tatatttttagtagataaggagtgcgtttagagacgacgtatatatatattttttatttttataaaattttcgtggttggggtgaattaggttttgggcgtttattcggcgtattttagcgttggaagtggtgatgtagtcgttgttcgatacgggcgttcggcgtgaagtatgcgtcgtaaangtcgcgcgtttttttattcgttagaacgtgcgggaacgttgtgggtatttggtattatcgatatttttcggtggcgaatagtagcgcgttaatatcgttcgcggttttatcgtcgattattttattttgttgtttgacgaatttatcgtttcgttggacgttaaaaatagcgtcgcggtggtggaattgattcgcgaagttaaaattcgtggcgtagttatcgtaggtattttttatgacgaagttgtacgtaatgacgtcgtcgatcgtttgtatttaatgggagtttttttatgattattaataacgttaagttggtgttggaaaacgaggtggtaagcggttcgttggaggtgtagaacggcgaaattcgcgtttttgtcgaaagttagagtcgtttgtcggaggcgatggacggcgaaggcggttggttgttgtcggggttgattgagttgtatatcgataatttggataaattttttatttcgcgttcgaaagttgattggtttgtttattcggcgatgagtagttacgacgcgttgatggtggcgagcggtattattatcgtattggatgtcgtggtaattggcgacgtgcgcgacggcggcgattt

SEQ ID NO: 6372 - DNA, 797 bp, Artificial Sequence
  chemically treated genomic DNA (Homo sapiens) CpG-island No: 6372
  unsure (614)
aaatcgccgccgtcgcgcacgtcgccaattaccacgacatccaatacgataataataccgctcgccaccatcaacgcgtcgtaactactcatcgccgaataaacaaaccaatcaactttcgaacgcgaaataaaaaatttatccaaattatcgatatacaactcaatcaaccccgacaacaaccaaccgccttcgccgtccatcgcctccgacaaacgactctaactttcgacaaaaacgcgaatttcgccgttctacacctccaacgaaccgcttaccacctcgttttccaacaccaacttaacgttattaataatcataaaaaaactcccattaaatacaaacgatcgacgacgtcattacgtacaacttcgtcataaaaaatacctacgataactacgccacgaattttaacttcgcgaatcaattccaccaccgcgacgctatttttaacgtccaacgaaacgataaattcgtcaaacaacaaaataaaataatcgacgataaaaccgcgaacgatattaacgcgctactattcgccaccgaaaaatatcgataataccaaatacccacaacgttcccgcacgttctaacgaataaaaaaacgcgcgacntttacgacgcatacttcacgccgaacgcccgtatcgaacaacgactacatcaccacttccaacgctaaaatacgccgaataaacgcccaaaacctaattcaccccaaccacgaaaattttataaaaataaaaaatatatatatacgtcgtctctaaacgcactccttatctactaaaaatata

SEQ ID NO: 6373 - DNA, 557 bp, Artificial Sequence
  chemically treated genomic DNA (Homo sapiens) CpG-island No: 6373
  unsure (302)
attttttcgaggtttatatatggtattttattttaattttttcggataggtaagattttcgatgtgtagggaaattttacgaagagtgttatacgcgaagtcgttttatagtgttagttaaaaagggggaagttttatgcgtagtacggttcggagagacgttttttcgagttatcgttgcgtattcggtaagtgcgttaaattgttgacgcgatgagttgtcggcgtgatttgattatcggtaagacgaagtaagttgttttcgcgaaggtaagtggtgcgtttaagagttttttgttcgncgatggttgtaatattatcggtgtcgcggtattcgtttaggtgaaggcgataaagtcgtttttttgatcgtgtttcgtggcgatggcgtaatttttatcgtaacgtaaaacggttacggtaaacgtatcgtagtggcggaatatttaattaagtcgcgtgcgacgaaaggggttatttttattaaggttatcgaacgtaacggtttagttgttggcgcggtataggtagatgattgcgattagattatgatgatt

SEQ ID NO: 6374 - DNA, 557 bp, Artificial Sequence
  chemically treated genomic DNA (Homo sapiens) CpG-island No: 6374
  unsure (256)
aatcatcataatctaatcgcaatcatctacctataccgcgccaacaactaaaccgttacgttcgataaccttaataaaaataacccctttcgtcgcacgcgacttaattaaatattccgccactacgatacgtttaccgtaaccgttttacgttacgataaaaattacgccatcgccacgaaacacgatcaaaaaaacgactttatcgccttcacctaaacgaataccgcgacaccgataatattacaaccatcgncgaacaaaaaactcttaaacgcaccacttaccttcgcgaaaacaacttacttcgtcttaccgataatcaaatcacgccgacaactcatcgcgtcaacaatttaacgcacttaccgaatacgcaacgataactcgaaaaaacgtctctccgaaccgtactacgcataaaacttccccctttttaactaacactataaaacgacttcgcgtataacactcttcgtaaaatttccctacacatcgaaaatcttacctatccgaaaaaattaaaataaaataccatatataaacctcgaaaaaat

SEQ ID NO: 6375 - DNA, 557 bp, Artificial Sequence
  chemically treated genomic DNA (Homo sapiens) CpG-island No: 6375
  unsure (256)
gattattatgatttggtcgtagttatttatttgtatcgcgttaataattaaatcgttacgttcggtaattttgatggagataatttttttcgtcgtacgcgatttggttgggtatttcgttattgcggtacgtttatcgtaatcgttttgcgttgcggtgaggattgcgttatcgttacgaggtacgattagagagacgattttatcgtttttatttaagcgaatatcgcgatatcggtggtgttgtagttatcgncggatagaagatttttaagcgtattatttattttcgcgggaatagtttatttcgttttgtcggtggttaggttacgtcgatagtttatcgcgttaatagtttgacgtatttatcgggtacgtaacggtgattcgagaggacgttttttcggatcgtattgcgtatgaaatttttttttttttaattggtattgtgaagcgatttcgcgtgtgatatttttcgtaggatttttttgtatatcggaagttttgtttgttcgagagggttaaggtgggatattatatgtaagtttcggggagat

SEQ ID NO: 6376 - DNA, 557 bp, Artificial Sequence
  chemically treated genomic DNA (Homo sapiens) CpG-island No: 6376
  unsure (302)
atctccccgaaacttacatataatatcccaccttaaccctctcgaacaaacaaaacttccgatatacaaaaaaatcctacgaaaaatatcacacgcgaaatcgcttcacaataccaattaaaaaaaaaaaaatttcatacgcaatacgatccgaaaaaacgtcctctcgaatcaccgttacgtacccgataaatacgtcaaactattaacgcgataaactatcgacgtaacctaaccaccgacaaaacgaaataaactattcccgcgaaaataaataatacgcttaaaaatcttctatccgncgataactacaacaccaccgatatcgcgatattcgcttaaataaaaacgataaaatcgtctctctaatcgtacctcgtaacgataacgcaatcctcaccgcaacgcaaaacgattacgataaacgtaccgcaataacgaaatacccaaccaaatcgcgtacgacgaaaaaaattatctccatcaaaattaccgaacgtaacgatttaattattaacgcgatacaaataaataactacgaccaaatcataataatc

SEQ ID NO: 6377 - DNA, 964 bp, Artificial Sequence
  chemically treated genomic DNA (Homo sapiens) CpG-island No: 6377
gtgtagcgacgtttggcgtattttggtcggttttggatttatcgggatattgttcggagtgatgattatatggttaaaataatcgttttgttttaaggaggatagtatagttattttcgttagcgttattagtaggtcgttattagagcggtcgtgatacgttagtagtttacgttgtgtaattagcgtttgaatcgcgttatagaagttttttagttgcgcgatatcgcgtatatttgtcggtttgtcgttaagttgacgataaatttgcgttagcgtcgttgcgtttagcgcgttattgtttttgtttaaattaattagtagtagtgcgttattttcggtagaaagttgcggcgtgatggtgtgacgtatattttttacgcgggtaaatgtagaaattattagcgatagcggcgacgttatttcgcgtttttcgttatttttttgttagcgggtttttatcgatatggagtttttatttatcgggatcgttaggtttagcgtcggataaagtttttcgtttacggttttaacggttttatataggttcgtatttttattagggtggtttgtcgtcgttatttagttggcggaaagtttgatgcgtttgatatcgttaatttgtgttgcggcgatgttggttaacgttttatcgatcgttagacgggtagaggcggcgaaattagtagcgtaatcggcgcgcgttttgtaattggcgatcgtttatcggagagtttgttagtttgcggttgtgatcgtttagatatgatcgtatatgttaggtttattagtgatgtttttatttgcggttcgttgcgcgttaatgttattagatagtttttcgtttagtcgtagatgtattacgtttatcgcgttgtaggggatttttttcggttattttgtgatgatttattttttgtgttttaaagatattaatttcggtttattttttagtattaatggt

SEQ ID NO: 6378 - DNA, 964 bp, Artificial Sequence
  chemically treated genomic DNA (Homo sapiens) CpG-island No: 6378
accattaatactaaaaaataaaccgaaattaatatctttaaaacacaaaaaataaatcatcacaaaataaccgaaaaaaatcccctacaacgcgataaacgtaatacatctacgactaaacgaaaaactatctaataacattaacgcgcaacgaaccgcaaataaaaacatcactaataaacctaacatatacgatcatatctaaacgatcacaaccgcaaactaacaaactctccgataaacgatcgccaattacaaaacgcgcgccgattacgctactaatttcgccgcctctacccgtctaacgatcgataaaacgttaaccaacatcgccgcaacacaaattaacgatatcaaacgcatcaaactttccgccaactaaataacgacgacaaaccaccctaataaaaatacgaacctatataaaaccgttaaaaccgtaaacgaaaaactttatccgacgctaaacctaacgatcccgataaataaaaactccatatcgataaaaacccgctaacaaaaaaataacgaaaaacgcgaaataacgtcgccgctatcgctaataatttctacatttacccgcgtaaaaaatatacgtcacaccatcacgccgcaactttctaccgaaaataacgcactactactaattaatttaaacaaaaacaataacgcgctaaacgcaacgacgctaacgcaaatttatcgtcaacttaacgacaaaccgacaaatatacgcgatatcgcgcaactaaaaaacttctataacgcgattcaaacgctaattacacaacgtaaactactaacgtatcacgaccgctctaataacgacctactaataacgctaacgaaaataactatactatcctccttaaaacaaaacgattattttaaccatataatcatcactccgaacaatatcccgataaatccaaaaccgaccaaaatacgccaaacgtcgctacac

SEQ ID NO: 6379 - DNA, 964 bp, Artificial Sequence
  chemically treated genomic DNA (Homo sapiens) CpG-island No: 6379
attattgatgttgaagggtgaatcggagttgatatttttagagtataggggatgagttattatagggtggtcgggaaggattttttgtagcgcggtgaacgtggtgtatttgcgattgggcgaaaaattatttggtgatattggcgcgtagcgagtcgtagatagaggtattattggtgggtttagtatgtgcggttatatttggacgattatagtcgtagattggtaggtttttcggtgaacgatcgttagttgtagagcgcgcgtcggttgcgttgttgatttcgtcgtttttgttcgtttggcggtcggtgaagcgttaattaatatcgtcgtaatataaattggcgatattaaacgtattaaatttttcgttaattggatggcggcggtaggttattttggtgaagatgcgggtttgtatgaagtcgttaaagtcgtgggcgaagagttttgttcggcgttgggtttgacgatttcggtgggtaaagattttatgtcgatgaaaattcgttggtaggaaggtaacgaagagcgcgaaatgacgtcgtcgttgtcgttggtgatttttgtatttgttcgcgtggaagatgtacgttatattattacgtcgtagttttttatcgaagataacgtattgttgttgattgatttgggtaaaggtaataacgcgttgggcgtaacggcgttggcgtaggtttatcgttagtttggcgataaatcggtagatgtacgcgatgtcgcgtaattgaaaggtttttatgacgcgatttaggcgttggttgtatagcgtaagttgttggcgtattacgatcgttttgatggcggtttgttggtaacgttggcggaaatggttgtgttgttttttttaggatagggcggttattttggttatatgattattatttcgggtagtatttcggtaaatttaaaatcggttaaagtacgttagacgtcgttgtat

SEQ ID NO: 6380 - DNA, 964 bp, Artificial Sequence
  chemically treated genomic DNA (Homo sapiens) CpG-island No: 6380
atacaacgacgtctaacgtactttaaccgattttaaatttaccgaaatactacccgaaataataatcatataaccaaaataaccgccctatcctaaaaaaaacaacacaaccatttccgccaacgttaccaacaaaccgccatcaaaacgatcgtaatacgccaacaacttacgctatacaaccaacgcctaaatcgcgtcataaaaacctttcaattacgcgacatcgcgtacatctaccgatttatcgccaaactaacgataaacctacgccaacgccgttacgcccaacgcgttattacctttacccaaatcaatcaacaacaatacgttatcttcgataaaaaactacgacgtaataatataacgtacatcttccacgcgaacaaatacaaaaatcaccaacgacaacgacgacgtcatttcgcgctcttcgttaccttcctaccaacgaattttcatcgacataaaatctttacccaccgaaatcgtcaaacccaacgccgaacaaaactcttcgcccacgactttaacgacttcatacaaacccgcatcttcaccaaaataacctaccgccgccatccaattaacgaaaaatttaatacgtttaatatcgccaatttatattacgacgatattaattaacgcttcaccgaccgccaaacgaacaaaaacgacgaaatcaacaacgcaaccgacgcgcgctctacaactaacgatcgttcaccgaaaaacctaccaatctacgactataatcgtccaaatataaccgcacatactaaacccaccaataatacctctatctacgactcgctacgcgccaatatcaccaaataatttttcgcccaatcgcaaatacaccacgttcaccgcgctacaaaaaatccttcccgaccaccctataataactcatcccctatactctaaaaatatcaactccgattcacccttcaacatcaataat

SEQ ID NO: 6381 - DNA, 804 bp, Artificial Sequence
  chemically treated genomic DNA (Homo sapiens) CpG-island No: 6381
  unsure (657, 718, 720, 728)
ttttagcgttcgttattgcggtattttatgtttgcgtaacgttattaaatgatttgtcgttatttaaatgtttaagtagttgttttgtcgtggtatcgcgcggtttttttagtggcgtataatattagttattaattacgttttttaattaggttagagtttcggtaatatttttattatgtagtatatcgataatcgttagtacgcgttcgtttttcggtagcgtttttatacgttcggtgagatatttcgtcgtatgtggattatgcgcgatattaaaaataacgcgtggcgattcgtttataatttggaaacgtttcggtaaaattgcgttggtaatttcgtcgcgaatggtatttttattgatttttagttcgttggtacgtagtgtcgttagcgttgttgcggtattcggttgcgggataagcggtaacggtagattttttagcgtgtcgtgagtatcgttaaacgtttagttatgatcggtgacggaatagttttatttaacgtttcgacgttgtaatagtgcgatttttttttttgcgttatattagtaatggtagaaggtattttcggtttatcgataattgtcgggtttttcgttgcgggaagatgtttgcgtttttcgcgataattttttgcgattggattattcgncggatgattattatattggtcgtagtaggttttatcgggatgcgcgaagagaagcgttagngngatttgtnggtcgggtataaatttttgaatgatgcgttttttatttatgagtcgtcgtttgtgaaaaattttcgtgtatcgtga

SEQ ID NO: 6382 - DNA, 804 bp, Artificial Sequence
  chemically treated genomic DNA (Homo sapiens) CpG-island No: 6382
  unsure (77, 85, 87, 148)
tcacgatacacgaaaatttttcacaaacgacgactcataaataaaaaacgcatcattcaaaaatttatacccgaccnacaaatcncnctaacgcttctcttcgcgcatcccgataaaacctactacgaccaatataataatcatccgncgaataatccaatcgcaaaaaattatcgcgaaaaacgcaaacatcttcccgcaacgaaaaacccgacaattatcgataaaccgaaaataccttctaccattactaatataacgcaaaaaaaaaaatcgcactattacaacgtcgaaacgttaaataaaactattccgtcaccgatcataactaaacgtttaacgatactcacgacacgctaaaaaatctaccgttaccgcttatcccgcaaccgaataccgcaacaacgctaacgacactacgtaccaacgaactaaaaatcaataaaaataccattcgcgacgaaattaccaacgcaattttaccgaaacgtttccaaattataaacgaatcgccacgcgttatttttaatatcgcgcataatccacatacgacgaaatatctcaccgaacgtataaaaacgctaccgaaaaacgaacgcgtactaacgattatcgatatactacataataaaaatattaccgaaactctaacctaattaaaaaacgtaattaataactaatattatacgccactaaaaaaaccgcgcgataccacgacaaaacaactacttaaacatttaaataacgacaaatcatttaataacgttacgcaaacataaaataccgcaataacgaacgctaaaa

SEQ ID NO: 6383 - DNA, 804 bp, Artificial Sequence
  chemically treated genomic DNA (Homo sapiens) CpG-island No: 6383
  unsure (77, 85, 87, 148)
ttacgatatacgaaagttttttataggcggcgatttatggataaagaacgtattatttaggaatttgtgttcggttngtaggttntnttggcgttttttttcgcgtatttcggtgaggtttgttgcgattagtatggtggttattcgncgggtggtttagtcgtaaaggattgtcgcgagaaacgtaggtattttttcgtagcgaaaaattcggtaattgtcggtgagtcggaagtgttttttattattgttgatgtggcgtagagaaaaaggtcgtattgttataacgtcggggcgttgagtggaattatttcgttatcgattatgattgggcgtttagcgatgtttacggtacgttggaaaatttgtcgttgtcgtttgtttcgtaatcgaatgtcgtaatagcgttggcggtattgcgtgttagcgggttggaagttagtgaaaatgttattcgcgacgggattgttagcgtaattttgtcgggacgtttttagattgtgagcgagtcgttacgcgttatttttgatgtcgcgtataatttatatgcggcggaatattttatcgggcgtatgaaagcgttatcgaaaaacgggcgcgtgttggcggttatcggtatgttatatgataaagatattgtcggaattttggtttggttgaaaagcgtggttgatgattggtattgtgcgttattggaagggtcgcgcggtgttacggtagaataattgtttgagtatttgggtaacggtaaattatttgatagcgttgcgtaggtatgggatgtcgtaatggcggacgttaaag

SEQ ID NO: 6384 - DNA, 804 bp, Artificial Sequence
  chemically treated genomic DNA (Homo sapiens) CpG-island No: 6384
  unsure (657, 718, 720, 728)
ctttaacgtccgccattacgacatcccatacctacgcaacgctatcaaataatttaccgttacccaaatactcaaacaattattctaccgtaacaccgcgcgacccttccaataacgcacaataccaatcatcaaccacgcttttcaaccaaaccaaaattccgacaatatctttatcatataacataccgataaccgccaacacgcgcccgtttttcgataacgctttcatacgcccgataaaatattccgccgcatataaattatacgcgacatcaaaaataacgcgtaacgactcgctcacaatctaaaaacgtcccgacaaaattacgctaacaatcccgtcgcgaataacattttcactaacttccaacccgctaacacgcaataccgccaacgctattacgacattcgattacgaaacaaacgacaacgacaaattttccaacgtaccgtaaacatcgctaaacgcccaatcataatcgataacgaaataattccactcaacgccccgacgttataacaatacgacctttttctctacgccacatcaacaataataaaaaacacttccgactcaccgacaattaccgaatttttcgctacgaaaaaatacctacgtttctcgcgacaatcctttacgactaaaccacccgncgaataaccaccatactaatcgcaacaaacctcaccgaaatacgcgaaaaaaaacgccaananaacctacnaaccgaacacaaattcctaaataatacgttctttatccataaatcgccgcctataaaaaactttcgtatatcgtaa

SEQ ID NO: 6385 - DNA, 716 bp, Artificial Sequence
  chemically treated genomic DNA (Homo sapiens) CpG-island No: 6385
tgtttatgtagggaaaaatttttcgttagtgtagcgattttacgtttagtaatatggcgcggtatattagttaatagaatttttttacgtatttgtataatgttttcgcgttcgttaagttgtaaggtgttaaacgatgttacgggcgagattttcgttgttattatatcgttttcggtagggtaaaaatcgtggcgtaatagcgtggtttgttgatgaatttttattttcgttagtagcggttttagtattcggcggataaaattcgtaggcggcgtcgacgggttatcggtgtcgtcgtttattttaatacgcgaaggtttatcggtaaattatagcgcgggtagtatcgtttgtagtattagcgtataattttcggcgttatcgatagtaaagcggtaatcgtcgtcgcgtacggtgtcgggtcggaaaagtagacgttgcgattttagttcgcgttttttacggttgtttcgtaaattttcgtcgtcgtttttatcgcggttagatgttggcgtaatagtttcggtttcgttcgttcggtacgaatgttggggatggtaaatggttggtcggttattatcgataggtttagcgtcgagcgtaggatttgttcgttattttcgttttgtgcgttatttagcgtaattattttttttattatttatttttttacgtatattatttgacgtagggtatagataatttttattaga

SEQ ID NO: 6386 - DNA, 716 bp, Artificial Sequence
  chemically treated genomic DNA (Homo sapiens) CpG-island No: 6386
tctaataaaaattatctataccctacgtcaaataatatacgtaaaaaaataaataataaaaaaaataattacgctaaataacgcacaaaacgaaaataacgaacaaatcctacgctcgacgctaaacctatcgataataaccgaccaaccatttaccatccccaacattcgtaccgaacgaacgaaaccgaaactattacgccaacatctaaccgcgataaaaacgacgacgaaaatttacgaaacaaccgtaaaaaacgcgaactaaaatcgcaacgtctacttttccgacccgacaccgtacgcgacgacgattaccgctttactatcgataacgccgaaaattatacgctaatactacaaacgatactacccgcgctataatttaccgataaaccttcgcgtattaaaataaacgacgacaccgataacccgtcgacgccgcctacgaattttatccgccgaatactaaaaccgctactaacgaaaataaaaattcatcaacaaaccacgctattacgccacgatttttaccctaccgaaaacgatataataacaacgaaaatctcgcccgtaacatcgtttaacaccttacaacttaacgaacgcgaaaacattatacaaatacgtaaaaaaattctattaactaatataccgcgccatattactaaacgtaaaatcgctacactaacgaaaaatttttccctacataaaca

SEQ ID NO: 6387 - DNA, 716 bp, Artificial Sequence
  chemically treated genomic DNA (Homo sapiens) CpG-island No: 6387
tttggtggaagttatttatattttgcgttaggtggtgtgcgtaaaaggataaatgatgaaaaggatgattgcgttggatggcgtatagggcgaaggtggcgggtagattttgcgttcggcgttgagtttgtcgatgataatcggttagttatttattatttttagtattcgtgtcgggcgggcgaaatcggggttgttgcgttagtatttgatcgcggtaaaggcggcgacggaaatttgcggagtaatcgtggaaggcgcgagttggggtcgtagcgtttgttttttcggttcggtatcgtgcgcggcggcgattatcgttttgttatcggtagcgtcggaagttgtacgttggtgttgtaaacggtgttgttcgcgttgtggtttgtcgatggattttcgcgtgttgaagtgagcggcggtatcgataattcgtcggcgtcgtttgcggattttattcgtcgggtgttggagtcgttgttggcgaaaataggaatttattagtaaattacgttgttacgttacggtttttattttgtcggaggcggtgtggtggtaacggaagtttcgttcgtggtatcgtttaatattttgtaatttggcgagcgcgggaatattgtgtagatgcgtggagaagttttattagttggtgtgtcgcgttatgttgttgagcgtgaaatcgttatattggcggggagtttttttttgtatgaata

SEQ ID NO: 6388 - DNA, 716 bp, Artificial Sequence
  chemically treated genomic DNA (Homo sapiens) CpG-island No: 6388
tattcatacaaaaaaaaactccccgccaatataacgatttcacgctcaacaacataacgcgacacaccaactaataaaacttctccacgcatctacacaatattcccgcgctcgccaaattacaaaatattaaacgataccacgaacgaaacttccgttaccaccacaccgcctccgacaaaataaaaaccgtaacgtaacaacgtaatttactaataaattcctattttcgccaacaacgactccaacacccgacgaataaaatccgcaaacgacgccgacgaattatcgataccgccgctcacttcaacacgcgaaaatccatcgacaaaccacaacgcgaacaacaccgtttacaacaccaacgtacaacttccgacgctaccgataacaaaacgataatcgccgccgcgcacgataccgaaccgaaaaaacaaacgctacgaccccaactcgcgccttccacgattactccgcaaatttccgtcgccgcctttaccgcgatcaaatactaacgcaacaaccccgatttcgcccgcccgacacgaatactaaaaataataaataactaaccgattatcatcgacaaactcaacgccgaacgcaaaatctacccgccaccttcgccctatacgccatccaacgcaatcatccttttcatcatttatccttttacgcacaccacctaacgcaaaatataaataacttccaccaaa

SEQ ID NO: 6389 - DNA, 648 bp, Artificial Sequence
  chemically treated genomic DNA (Homo sapiens) CpG-island No: 6389
  unsure (27, 29..30, 49, 55, 65)
ggaaggcgattagaggaacggggggangnnggaatttatttgacgtagngtttgngtggcgcggntaaatttgttttgattgaaattaaagttatcgattagcgttataacggtatcgttttgcggattgatcgatattagcgtcgagtttattttcggtatttgtgttagttattatgtatcgttaatttgacgaatttagatttgttgattcgtttgtagaatatcggttattttacgcggcgtcggtttttgttgagtattcgaacggtaaggacgcgtttagcgaacgttttttatatttaatgcgacggtcgattcgttcgttagtatcgtcgtcgtttgttgaggattggcgttggtgattgcggtaggtagtagcggattataggttggtagcgtttttagcgtatcggtaattttgttgttattttacgtcgattcgtttattttttatagtatatttgtcgggtcgcgatagtcgtggcgtatgtcgtagtttagtacgttattacgtatcgtttgttgcgcggtttgttgtattttgcgggtgatggtggtgtaaatgcgataatcgtttttataggtattttcgttataacggttatatattttttggcgtattatttggtttagtacggcgtagag

SEQ ID NO: 6390 - DNA, 648 bp, Artificial Sequence
  chemically treated genomic DNA (Homo sapiens) CpG-island No: 6390
  unsure (584, 594, 600, 619..620, 622)
ctctacgccgtactaaaccaaataatacgccaaaaaatatataaccgttataacgaaaatacctataaaaacgattatcgcatttacaccaccatcacccgcaaaatacaacaaaccgcgcaacaaacgatacgtaataacgtactaaactacgacatacgccacgactatcgcgacccgacaaatatactataaaaaataaacgaatcgacgtaaaataacaacaaaattaccgatacgctaaaaacgctaccaacctataatccgctactacctaccgcaatcaccaacgccaatcctcaacaaacgacgacgatactaacgaacgaatcgaccgtcgcattaaatataaaaaacgttcgctaaacgcgtccttaccgttcgaatactcaacaaaaaccgacgccgcgtaaaataaccgatattctacaaacgaatcaacaaatctaaattcgtcaaattaacgatacataataactaacacaaataccgaaaataaactcgacgctaatatcgatcaatccgcaaaacgataccgttataacgctaatcgataactttaatttcaatcaaaacaaatttanccgcgccacncaaacnctacgtcaaataaattccnncntccccccgttcctctaatcgccttcc

SEQ ID NO: 6391 - DNA, 648 bp, Artificial Sequence
  chemically treated genomic DNA (Homo sapiens) CpG-island No: 6391
  unsure (584, 594, 600, 619..620, 622)
ttttgcgtcgtattgagttaaatggtgcgttaggagatgtataatcgttatggcgaaagtgtttatgaagacggttatcgtatttatattattattattcgtaaagtgtagtaggtcgcgtagtaggcggtacgtaataacgtgttggattacgatatgcgttacggttatcgcggttcggtaaatgtgttgtggaaagtgggcgagtcggcgtgggataataataagattatcgatacgttgaaggcgttgttaatttatggttcgttgttgtttgtcgtagttattagcgttaatttttagtaagcgacggcgatgttggcggacgggtcgatcgtcgtattgagtatggaaggcgttcgttgggcgcgtttttatcgttcggatatttagtaaggatcgacgtcgcgtaaagtgatcgatgttttgtaaacgggttagtaaatttgggttcgttaggttggcgatgtatggtggttggtataagtgtcggaagtgaattcggcgttggtgtcgattaattcgtaaaacggtgtcgttatggcgttggtcggtggttttgattttaattagagtaagtttantcgcgttatntaggtnttgcgttaggtgggttttnntnttttttcgtttttttaatcgtttttt

SEQ ID NO: 6392 - DNA, 648 bp, Artificial Sequence
  chemically treated genomic DNA (Homo sapiens) CpG-island No: 6392
  unsure (27, 29..30, 49, 55, 65)
aaaaaacgattaaaaaaacgaaaaaanannaaaacccacctaacgcaanacctanataacgcgantaaacttactctaattaaaatcaaaaccaccgaccaacgccataacgacaccgttttacgaattaatcgacaccaacgccgaattcacttccgacacttataccaaccaccatacatcgccaacctaacgaacccaaatttactaacccgtttacaaaacatcgatcactttacgcgacgtcgatccttactaaatatccgaacgataaaaacgcgcccaacgaacgccttccatactcaatacgacgatcgacccgtccgccaacatcgccgtcgcttactaaaaattaacgctaataactacgacaaacaacaacgaaccataaattaacaacgccttcaacgtatcgataatcttattattatcccacgccgactcgcccactttccacaacacatttaccgaaccgcgataaccgtaacgcatatcgtaatccaacacgttattacgtaccgcctactacgcgacctactacactttacgaataataataatataaatacgataaccgtcttcataaacactttcgccataacgattatacatctcctaacgcaccatttaactcaatacgacgcaaaa

SEQ ID NO: 6393 - DNA, 501 bp, Artificial Sequence
  chemically treated genomic DNA (Homo sapiens) CpG-island No: 6393
tattgtttcgtcggtgtttgatttcgggatgcgttgtatttatatttggcgtatcgttgtcgatggttaggttaacgtggcgtttttcggcgagcgttacggcgattattcgtatattatttcgtgtatcggttttattatgggaattaacggcgaatacgattaggtggcgtattacggtcgtggatcgggcgaaaattacgtcgatagttagtaggttaatattatcgatatttggcgtagtatcgtcgatgttatgttcgagaattattttttttcgtagaataacggtaatcgttagtatgttcgttggacggtattgattaatcgttacggtaacggtttgttggtggtttcgtagcgtttaattaattttagcgtttggtattatatttaggaaaatatttacgttgtttagtattgtaacgagttgtagcgtagtgatgatattattttgaatttcgattattattgtttggtttcggttttaatttttggggt

SEQ ID NO: 6394 - DNA, 501 bp, Artificial Sequence
  chemically treated genomic DNA (Homo sapiens) CpG-island No: 6394
accccaaaaattaaaaccgaaaccaaacaataataatcgaaattcaaaataatatcatcactacgctacaactcgttacaatactaaacaacgtaaatattttcctaaatataataccaaacgctaaaattaattaaacgctacgaaaccaccaacaaaccgttaccgtaacgattaatcaataccgtccaacgaacatactaacgattaccgttattctacgaaaaaaaataattctcgaacataacatcgacgatactacgccaaatatcgataatattaacctactaactatcgacgtaattttcgcccgatccacgaccgtaatacgccacctaatcgtattcgccgttaattcccataataaaaccgatacacgaaataatatacgaataatcgccgtaacgctcgccgaaaaacgccacgttaacctaaccatcgacaacgatacgccaaatataaatacaacgcatcccgaaatcaaacaccgacgaaacaata

SEQ ID NO: 6395 - DNA, 501 bp, Artificial Sequence
  chemically treated genomic DNA (Homo sapiens) CpG-island No: 6395
gttttaggagttggagtcgaggttaagtagtggtgatcgaggtttagggtgatgttattattgcgttgtagttcgttatagtgttgggtagcgtggatgtttttttgggtatagtgttaggcgttgaagttaattgggcgttgcggaattattagtagatcgttatcgtggcggttagttagtgtcgtttagcggatatgttgacggttatcgttgttttgcgggaagggatagttttcgaatatggtatcgacggtgttgcgttagatatcgatgatgttagtttgttggttgtcggcgtagttttcgttcggtttacgatcgtaatacgttatttgatcgtattcgtcgttaatttttatggtgaaatcgatgtacggaatgatgtgcggatagtcgtcgtaacgttcgtcggaaagcgttacgttaatttggttatcggtagcgatgcgttagatgtaggtgtagcgtatttcgaagttaaatatcggcggggtaata

SEQ ID NO: 6396 - DNA, 501 bp, Artificial Sequence
  chemically treated genomic DNA (Homo sapiens) CpG-island No: 6396
tattaccccgccgatatttaacttcgaaatacgctacacctacatctaacgcatcgctaccgataaccaaattaacgtaacgctttccgacgaacgttacgacgactatccgcacatcattccgtacatcgatttcaccataaaaattaacgacgaatacgatcaaataacgtattacgatcgtaaaccgaacgaaaactacgccgacaaccaacaaactaacatcatcgatatctaacgcaacaccgtcgataccatattcgaaaactatcccttcccgcaaaacaacgataaccgtcaacatatccgctaaacgacactaactaaccgccacgataacgatctactaataattccgcaacgcccaattaacttcaacgcctaacactatacccaaaaaaacatccacgctacccaacactataacgaactacaacgcaataataacatcaccctaaacctcgatcaccactacttaacctcgactccaactcctaaaac

SEQ ID NO: 6397 - DNA, 702 bp, Artificial Sequence
  chemically treated genomic DNA (Homo sapiens) CpG-island No: 6397
  unsure (449, 464..)
aatttggtaggataacggcggagcgtttgtcgagtgcgttattttttatcgtattaacgtttagtcgcgggtgtttttagaggcgttattgaggttagtatgtcgtatcgtatttacggcgggatgcgttttttggatcgttatgaaattaaagatgcgttttcgtatttgcgtttgattgttaatcgtaacgacgacgcggtttttgacgcgtggggaatacgcgtacgcggggtattggtgatcggacgttggacgtggtacgttagatatcgtgcgatcgatagttaatattttggtatgtatgtcgagagttgttagtagagaagttttcgtcggcgagttgtagcgttttgtacgattttggtattaatagacgttttacgtagattattcgatgttcgttggaggaatttcgaacggaaagagtacgtttagcggagtttagnttgtagattaacgannttttaagttgtttgttgatggagttagcgtcgtgagagtgatggtggaagtaatagcggtgttaaagttaattggcgcgtgagtgcggttttttagtttaacgttttttattattttgttttatagggtggtggtcgttttagtagcgttagttaggaaggattcgttattttcgtacggagtgtagtttttttgaatgaagttacggacgtttattttattttgttagttattttt

SEQ ID NO: 6398 - DNA, 702 bp, Artificial Sequence
  chemically treated genomic DNA (Homo sapiens) CpG-island No: 6398
  unsure (238..239, 254)
aaaaataactaacaaaataaaataaacgtccgtaacttcattcaaaaaaactacactccgtacgaaaataacgaatccttcctaactaacgctactaaaacgaccaccaccctataaaacaaaataataaaaaacgttaaactaaaaaaccgcactcacgcgccaattaactttaacaccgctattacttccaccatcactctcacgacgctaactccatcaacaaacaacttaaaanntcgttaatctacaanctaaactccgctaaacgtactctttccgttcgaaattcctccaacgaacatcgaataatctacgtaaaacgtctattaataccaaaatcgtacaaaacgctacaactcgccgacgaaaacttctctactaacaactctcgacatacataccaaaatattaactatcgatcgcacgatatctaacgtaccacgtccaacgtccgatcaccaataccccgcgtacgcgtattccccacgcgtcaaaaaccgcgtcgtcgttacgattaacaatcaaacgcaaatacgaaaacgcatctttaatttcataacgatccaaaaaacgcatcccgccgtaaatacgatacgacatactaacctcaataacgcctctaaaaacacccgcgactaaacgttaatacgataaaaaataacgcactcgacaaacgctccgccgttatcctaccaaatt

SEQ ID NO: 6399 - DNA, 702 bp, Artificial Sequence
  chemically treated genomic DNA (Homo sapiens) CpG-island No: 6399
  unsure (238..239, 254)
aaaggtgattggtagaatgaagtaaacgttcgtgattttatttagaaaaattatatttcgtacgagggtgacgagttttttttggttggcgttattgaagcgattattattttgtgggataaagtaatggaaggcgttaaattggaaaatcgtatttacgcgttagttgattttgatatcgttgttgtttttattattatttttacgacgttggttttattaataagtagtttgaganntcgttggtttgtagnttgggtttcgttgggcgtgtttttttcgttcggggtttttttagcggatatcggatgatttgcgtaaggcgtttattaatattaaaatcgtgtaaggcgttgtagttcgtcggcgagggtttttttgttaatagttttcgatatgtatgttagagtgttaattgtcgatcgtacgatgtttaacgtattacgtttagcgttcggttattaatatttcgcgtgcgcgtattttttacgcgttaagagtcgcgtcgtcgttgcggttggtaattaggcgtagatacgagagcgtatttttgattttatggcgatttaagaagcgtatttcgtcgtaaatacggtgcggtatattggttttaataacgtttttgggagtattcgcgattgggcgttgatgcggtagagaatggcgtattcggtaagcgtttcgtcgttgttttgttaggtt

SEQ ID NO: 6400 - DNA, 702 bp, Artificial Sequence
  chemically treated genomic DNA (Homo sapiens) CpG-island No: 6400
  unsure (449, 464..)
aacctaacaaaacaacgacgaaacgcttaccgaatacgccattctctaccgcatcaacgcccaatcgcgaatactcccaaaaacgttattaaaaccaatataccgcaccgtatttacgacgaaatacgcttcttaaatcgccataaaatcaaaaatacgctctcgtatctacgcctaattaccaaccgcaacgacgacgcgactcttaacgcgtaaaaaatacgcgcacgcgaaatattaataaccgaacgctaaacgtaatacgttaaacatcgtacgatcgacaattaacactctaacatacatatcgaaaactattaacaaaaaaaccctcgccgacgaactacaacgccttacacgattttaatattaataaacgccttacgcaaatcatccgatatccgctaaaaaaaccccgaacgaaaaaaacacgcccaacgaaacccaanctacaaaccaacganntctcaaactacttattaataaaaccaacgtcgtaaaaataataataaaaacaacaacgatatcaaaatcaactaacgcgtaaatacgattttccaatttaacgccttccattactttatcccacaaaataataatcgcttcaataacgccaaccaaaaaaaactcgtcaccctcgtacgaaatataatttttctaaataaaatcacgaacgtttacttcattctaccaatcaccttt

SEQ ID NO: 6401 - DNA, 851 bp, Artificial Sequence
  chemically treated genomic DNA (Homo sapiens) CpG-island No: 6401
cgcgtgagattagtcggattacgggggagatattatcggggagtcgggaagcgcggggtaattcgtcggggggaattggtcggtcggcggtgtatggtttaacgcgagtacgttagcggtaaaggtagttgtcgggtatggtagataattgttcggtaataggtcgttggttgggcgatatgtcgtttttttacgatgtcgtcgtttggaatcgtttggtaaagtgttatcgggatacgttattcggtgtggcgttgtatgtatggttttaggtcgaataacgataatcgagcgtttggtaatatcgtgcggtagtttattaggcgtattaggttgaggattacgttatcgtattggcggtttggtagaaaattagtttttacgatatgagtaatgaggatttgtttgttgttgttaatatcgtttaggcggtaggaaatggtgcggttcgcgatcgttggttataataggtagaaaaacgtggattgggaagtaatgttttttattggtggttgtatgcgtaacgttatatttttggttagtcggaattcgtattgaacgattttacgcgtttaattaatattgcgttttttgttaacgtttacgttgcgcgggcgataatttatcgttaacgttataatgtttcggtcgcggtgagtgatttgcgcgtcgcgttggaattggaatcgaatatagtaatatttaagtagcgtttggttacgttttgtgggattagggggatatcgtatagtcggcggaaatgttcgaatcggcggtataaaggttttcggacgaatcggttttttatcggataattgtgttacgatatcgattacgaatgaacgtatatt

SEQ ID NO: 6402 - DNA, 851 bp, Artificial Sequence
  chemically treated genomic DNA (Homo sapiens) CpG-island No: 6402
aatatacgttcattcgtaatcgatatcgtaacacaattatccgataaaaaaccgattcgtccgaaaacctttataccgccgattcgaacatttccgccgactatacgatatccccctaatcccacaaaacgtaaccaaacgctacttaaatattactatattcgattccaattccaacgcgacgcgcaaatcactcaccgcgaccgaaacattataacgttaacgataaattatcgcccgcgcaacgtaaacgttaacaaaaaacgcaatattaattaaacgcgtaaaatcgttcaatacgaattccgactaaccaaaaatataacgttacgcatacaaccaccaataaaaaacattacttcccaatccacgtttttctacctattataaccaacgatcgcgaaccgcaccatttcctaccgcctaaacgatattaacaacaacaaacaaatcctcattactcatatcgtaaaaactaattttctaccaaaccgccaatacgataacgtaatcctcaacctaatacgcctaataaactaccgcacgatattaccaaacgctcgattatcgttattcgacctaaaaccatacatacaacgccacaccgaataacgtatcccgataacactttaccaaacgattccaaacgacgacatcgtaaaaaaacgacatatcgcccaaccaacgacctattaccgaacaattatctaccatacccgacaactacctttaccgctaacgtactcgcgttaaaccatacaccgccgaccgaccaattccccccgacgaattaccccgcgcttcccgactccccgataatatctcccccgtaatccgactaatctcacgcg

SEQ ID NO: 6403 - DNA, 851 bp, Artificial Sequence
  chemically treated genomic DNA (Homo sapiens) CpG-island No: 6403
aatatgcgtttattcgtgatcgatgtcgtagtatagttgttcgataaggagtcgattcgttcgaaggtttttatgtcgtcggttcgagtattttcgtcgattgtgcgatatttttttaattttataaggcgtaattaagcgttgtttgggtgttgttatattcggttttagttttagcgcggcgcgtaaattatttatcgcggtcgggatattatgacgttggcgataaattgtcgttcgcgtaacgtaagcgttggtagaaggcgtaatattgattgagcgcgtgagatcgtttagtgcgagtttcggttgattaggaatgtaacgttgcgtatgtagttattagtagagggtattgttttttagtttacgtttttttgtttgttgtagttagcgatcgcgagtcgtattattttttgtcgtttgggcggtattggtagtagtaagtagatttttattgtttatgtcgtgaagattgattttttgttaggtcgttagtgcggtggcgtagtttttaatttgatacgtttgataggttatcgtacgatgttgttaggcgttcggttgtcgttgttcggtttgaagttatgtatataacgttatatcgggtagcgtgtttcgataatattttgttagacggttttaggcggcggtatcgtaggaaggcgatatatcgtttagttagcgatttattgtcgggtaattatttgttatgttcggtagttgtttttgtcgttggcgtgttcgcgttgagttatgtatcgtcggtcggttagtttttttcggcgaattatttcgcgtttttcgatttttcgataatgtttttttcgtaattcggttgattttacgcg

SEQ ID NO: 6404 - DNA, 851 bp, Artificial Sequence
  chemically treated genomic DNA (Homo sapiens) CpG-island No: 6404
cgcgtaaaatcaaccgaattacgaaaaaaacattatcgaaaaatcgaaaaacgcgaaataattcgccgaaaaaaactaaccgaccgacgatacataactcaacgcgaacacgccaacgacaaaaacaactaccgaacataacaaataattacccgacaataaatcgctaactaaacgatatatcgccttcctacgataccgccgcctaaaaccgtctaacaaaatattatcgaaacacgctacccgatataacgttatatacataacttcaaaccgaacaacgacaaccgaacgcctaacaacatcgtacgataacctatcaaacgtatcaaattaaaaactacgccaccgcactaacgacctaacaaaaaatcaatcttcacgacataaacaataaaaatctacttactactaccaataccgcccaaacgacaaaaaataatacgactcgcgatcgctaactacaacaaacaaaaaaacgtaaactaaaaaacaataccctctactaataactacatacgcaacgttacattcctaatcaaccgaaactcgcactaaacgatctcacgcgctcaatcaatattacgccttctaccaacgcttacgttacgcgaacgacaatttatcgccaacgtcataatatcccgaccgcgataaataatttacgcgccgcgctaaaactaaaaccgaatataacaacacccaaacaacgcttaattacgccttataaaattaaaaaaatatcgcacaatcgacgaaaatactcgaaccgacgacataaaaaccttcgaacgaatcgactccttatcgaacaactatactacgacatcgatcacgaataaacgcatatt

SEQ ID NO: 6405 - DNA, 540 bp, Artificial Sequence
  chemically treated genomic DNA (Homo sapiens) CpG-island No: 6405
gcgataggcgttggagtaggtgcgggaataggtttttgattttgtgttttgcgatgtgcgaatggcggagatggacggtatcgttacgttgaaagagattaaagcgttaaattcggtaatttcggtgttgattatgattgcgtattttagcgtcgagacggcggtagaggtattgaaaattggggcgttggattattttattaagtcgttggatttcgataatttataggcgacgttggaaaaagcgttcgcgtatacgtatagtattgatgttgaaatatttgcggtgattgttagttagttcggtatggtcggtaaaagttcggcgatgtaatatttgtttagtgaaatcgttttcgtcgcgttatcggaagttacggtattgatttacggcgatttcggtatcggaaagagttggtcgttagggcgatttacgttagtagcgtacgtagtagaaaatcgttggtaacgtttaattgtgcggtatttaacgaatttttgttggaatttgaattgttcggttacgaaaaaggagcgttt

SEQ ID NO: 6406 - DNA, 540 bp, Artificial Sequence
  chemically treated genomic DNA (Homo sapiens) CpG-island No: 6406
aaacgctcctttttcgtaaccgaacaattcaaattccaacaaaaattcgttaaataccgcacaattaaacgttaccaacgattttctactacgtacgctactaacgtaaatcgccctaacgaccaactctttccgataccgaaatcgccgtaaatcaataccgtaacttccgataacgcgacgaaaacgatttcactaaacaaatattacatcgccgaacttttaccgaccataccgaactaactaacaatcaccgcaaatatttcaacatcaatactatacgtatacgcgaacgctttttccaacgtcgcctataaattatcgaaatccaacgacttaataaaataatccaacgccccaattttcaatacctctaccgccgtctcgacgctaaaatacgcaatcataatcaacaccgaaattaccgaatttaacgctttaatctctttcaacgtaacgataccgtccatctccgccattcgcacatcgcaaaacacaaaatcaaaaacctattcccgcacctactccaacgcctatcgc

SEQ ID NO: 6407 - DNA, 540 bp, Artificial Sequence
  chemically treated genomic DNA (Homo sapiens) CpG-island No: 6407
aaacgtttttttttcgtgatcgaataatttagattttagtaaggattcgttgagtgtcgtatagttgagcgttattagcggttttttgttacgtgcgttattggcgtgaatcgttttggcgattagtttttttcggtgtcggaatcgtcgtggattagtatcgtggttttcgatggcgcgacgagggcgattttattgagtaggtgttgtatcgtcgggtttttatcgattatatcgaattggttggtagttatcgtaggtgttttagtattaatattgtgcgtatgcgcgagcgttttttttagcgtcgtttgtaggttatcgaaatttagcggtttgatgagataatttagcgttttagtttttagtgtttttatcgtcgtttcgacgttggagtacgtagttataattagtatcggaattgtcgggtttaacgttttgattttttttagcgtggcgatgtcgtttattttcgttattcgtatatcgtaaagtataagattaaaaatttgttttcgtatttgttttaacgtttgtcgt

SEQ ID NO: 6408 - DNA, 540 bp, Artificial Sequence
  chemically treated genomic DNA (Homo sapiens) CpG-island No: 6408
acgacaaacgttaaaacaaatacgaaaacaaatttttaatcttatactttacgatatacgaataacgaaaataaacgacatcgccacgctaaaaaaaatcaaaacgttaaacccgacaattccgatactaattataactacgtactccaacgtcgaaacgacgataaaaacactaaaaactaaaacgctaaattatctcatcaaaccgctaaatttcgataacctacaaacgacgctaaaaaaaacgctcgcgcatacgcacaatattaatactaaaacacctacgataactaccaaccaattcgatataatcgataaaaacccgacgatacaacacctactcaataaaatcgccctcgtcgcgccatcgaaaaccacgatactaatccacgacgattccgacaccgaaaaaaactaatcgccaaaacgattcacgccaataacgcacgtaacaaaaaaccgctaataacgctcaactatacgacactcaacgaatccttactaaaatctaaattattcgatcacgaaaaaaaaacgttt

SEQ ID NO: 6409 - DNA, 512 bp, Artificial Sequence
  chemically treated genomic DNA (Homo sapiens) CpG-island No: 6409
  unsure (429, 469)
attgttatcgttcggttgcgtttttggttttagtagatggaaaaaagtttcgtttatgaggtacgtttttgttgcggttcgataagttcgcgtattaggtttattagtttcgtttacgggtgaatattatttagtacgtcgcgatagttttcgtcggtaaatattaaagtggtaggaaagcgaaagacgttaaagcgatcgtcgatggtttcgttttgtttaaggttagtaatcgttatttgttatgtatagtcgggaaattcgcgtagtaattcgttaattattatcggattatcgttgatttttggcgtgcgtttcgggttattgtttaataatattacgtcgtttggcgtttgcgtaagttagtcgttaagacgggatttattgattggcgttatcgcgcgttagtatcgttgttatacgtattanatgcgtgtcgtgtttatttttttttttttgtgttattcgntattggcgtaagcgacgtttattgtgtattagtacgatataat

SEQ ID NO: 6410 - DNA, 512 bp, Artificial Sequence
  chemically treated genomic DNA (Homo sapiens) CpG-island No: 6410
  unsure (44, 84)
attatatcgtactaatacacaataaacgtcgcttacgccaatancgaataacacaaaaaaaaaaaaataaacacgacacgcatntaatacgtataacaacgatactaacgcgcgataacgccaatcaataaatcccgtcttaacgactaacttacgcaaacgccaaacgacgtaatattattaaacaataacccgaaacgcacgccaaaaatcaacgataatccgataataattaacgaattactacgcgaatttcccgactatacataacaaataacgattactaaccttaaacaaaacgaaaccatcgacgatcgctttaacgtctttcgctttcctaccactttaatatttaccgacgaaaactatcgcgacgtactaaataatattcacccgtaaacgaaactaataaacctaatacgcgaacttatcgaaccgcaacaaaaacgtacctcataaacgaaacttttttccatctactaaaaccaaaaacgcaaccgaacgataacaat

SEQ ID NO: 6411 - DNA, 512 bp, Artificial Sequence
  chemically treated genomic DNA (Homo sapiens) CpG-island No: 6411
  unsure (44, 84)
attgtatcgtattagtatataataggcgtcgtttgcgttagtancggatgatataggaggagagggatgagtacgatacgtatntgatgcgtgtggtaacgatgttggcgcgcggtgacgttagttagtgaatttcgttttgacgattggtttacgtaagcgttagacggcgtggtgttattaagtagtgattcgaaacgtacgttagaggttagcgataattcggtaatgattggcgaattattgcgcgagtttttcgattatatatggtaggtggcgattgttgattttgagtagagcgaagttatcggcgatcgttttggcgtttttcgtttttttgttattttagtgtttatcggcggaaattatcgcggcgtgttgaatggtatttattcgtgggcggaattgataaatttgatgcgcgggtttgtcgaatcgtagtaggagcgtgttttatgagcgaaatttttttttatttgttggggttaggaacgtaatcgaacgatgatagt

SEQ ID NO: 6412 - DNA, 512 bp, Artificial Sequence
  chemically treated genomic DNA (Homo sapiens) CpG-island No: 6412
  unsure (429, 469)
actatcatcgttcgattacgttcctaaccccaacaaataaaaaaaaatttcgctcataaaacacgctcctactacgattcgacaaacccgcgcatcaaatttatcaattccgcccacgaataaataccattcaacacgccgcgataatttccgccgataaacactaaaataacaaaaaaacgaaaaacgccaaaacgatcgccgataacttcgctctactcaaaatcaacaatcgccacctaccatatataatcgaaaaactcgcgcaataattcgccaatcattaccgaattatcgctaacctctaacgtacgtttcgaatcactacttaataacaccacgccgtctaacgcttacgtaaaccaatcgtcaaaacgaaattcactaactaacgtcaccgcgcgccaacatcgttaccacacgcatcanatacgtatcgtactcatccctctcctcctatatcatccgntactaacgcaaacgacgcctattatatactaatacgatacaat

SEQ ID NO: 6413 - DNA, 529 bp, Artificial Sequence
  chemically treated genomic DNA (Homo sapiens) CpG-island No: 6413
  unsure (492, 494, 497, 515)
gtagttttcgggcgtggtgtttggacgttatttgttgaattttcgtcggagtggtaggcgttataagtcgtacgtcgtatttaggtataaatttattttatcgatttgttttgttgggcgtagagtgaagaagaggacgattcgtttgatacgtaagatgaaagttaggttttattgttgcgtgttattcgtatggataatagcgatattttgtgggattatttgttcgaagataaagttagtaaattgtattattttttgcgttggcgtattattttgtttaattgcggggcgacgttttcggcgatgcgtttaatcgttagcgcgaagtttttatggttcgttggattggatgggcgatgtagtaaaataatggcgacgtgttagttgtttgcggtggttggtacgtttttgtattggtaaagatgtggcgcgaatgtttttagaaaattaataagttagtattgttttcgtttgtagatgtcgttatangntgntattttatattttatagncgaaagcgttttga

SEQ ID NO: 6414 - DNA, 529 bp, Artificial Sequence
  chemically treated genomic DNA (Homo sapiens) CpG-island No: 6414
  unsure (15, 33, 36, 38)
tcaaaacgctttcgnctataaaatataaaatancancntataacgacatctacaaacgaaaacaatactaacttattaattttctaaaaacattcgcgccacatctttaccaatacaaaaacgtaccaaccaccgcaaacaactaacacgtcgccattattttactacatcgcccatccaatccaacgaaccataaaaacttcgcgctaacgattaaacgcatcgccgaaaacgtcgccccgcaattaaacaaaataatacgccaacgcaaaaaataatacaatttactaactttatcttcgaacaaataatcccacaaaatatcgctattatccatacgaataacacgcaacaataaaacctaactttcatcttacgtatcaaacgaatcgtcctcttcttcactctacgcccaacaaaacaaatcgataaaataaatttatacctaaatacgacgtacgacttataacgcctaccactccgacgaaaattcaacaaataacgtccaaacaccacgcccgaaaactac

SEQ ID NO: 6415 - DNA, 529 bp, Artificial Sequence
  chemically treated genomic DNA (Homo sapiens) CpG-island No: 6415
  unsure (15, 33, 36, 38)
ttaaggcgttttcgnttgtagggtgtgagatantantntgtagcggtatttgtaagcgagggtaatgttggtttgttaattttttgagggtattcgcgttatatttttgttagtgtaggagcgtgttagttatcgtagataattaatacgtcgttattattttgttgtatcgtttatttaatttagcgggttataaaggtttcgcgttgacgattgagcgtatcgtcgaaggcgtcgtttcgtagttgggtaaaatagtgcgttagcgtagagggtaatgtagtttgttggttttattttcgaataagtgattttatagggtatcgttgttatttatgcgggtggtacgtagtagtaaggtttggtttttattttgcgtattaggcgaatcgtttttttttttattttgcgtttagtaaggtaaatcgatgaagtaagtttgtgtttgaatgcgacgtgcggtttgtagcgtttgttatttcggcgaaaatttagtaaatggcgtttaggtattacgttcgggggttgt

SEQ ID NO: 6416 - DNA, 529 bp, Artificial Sequence
  chemically treated genomic DNA (Homo sapiens) CpG-island No: 6416
  unsure (492, 494, 497, 515)
acaacccccgaacgtaatacctaaacgccatttactaaattttcgccgaaataacaaacgctacaaaccgcacgtcgcattcaaacacaaacttacttcatcgatttaccttactaaacgcaaaataaaaaaaaaaacgattcgcctaatacgcaaaataaaaaccaaaccttactactacgtaccacccgcataaataacaacgataccctataaaatcacttattcgaaaataaaaccaacaaactacattaccctctacgctaacgcactattttacccaactacgaaacgacgccttcgacgatacgctcaatcgtcaacgcgaaacctttataacccgctaaattaaataaacgatacaacaaaataataacgacgtattaattatctacgataactaacacgctcctacactaacaaaaatataacgcgaataccctcaaaaaattaacaaaccaacattaccctcgcttacaaataccgctacanantantatctcacaccctacaancgaaaacgccttaa

SEQ ID NO: 6417 - DNA, 604 bp, Artificial Sequence
  chemically treated genomic DNA (Homo sapiens) CpG-island No: 6417
ggtgcgcgaagttatttacgtagtgtttttttattacgttattcgtaatggtatggatatggggatcgttaacgtcgggtaattggcgatttacgacgatttattcgttgaattgcgcgacgcggtggaagatgtgatttttaatcgtcgcgacgatggtatcgagcgtttattggagtttgtcgagaaatatcgcggtagtaaaatcgacgatatcgttaacgtttagtaggcggagtggcgttcgtgggaagtgaataaacgtttggaatattcgttggttaaaggtattatcgagtttatcgagtaggatatcgaagaagttcgttagtaggttacgcgttcgattgaagtgattgaaggttcgttgatggacggtatgaatgtggtcggcgatttgtttggcgaagggaaaatgtttttgttataggtggttaaatcggcgcgcgttatgaaataggggtggtttatttcgaatcgtttattgaagttagtaaagagtagggtaaaattaacggtaagatggtgatcgttatcgtgaagggcgacgtttacgatatcggtaaaaatatcgttggtgtggtgttgtaatgtaataattacg

SEQ ID NO: 6418 - DNA, 604 bp, Artificial Sequence
  chemically treated genomic DNA (Homo sapiens) CpG-island No: 6418
cgtaattattacattacaacaccacaccaacgatatttttaccgatatcgtaaacgtcgcccttcacgataacgatcaccatcttaccgttaattttaccctactctttactaacttcaataaacgattcgaaataaaccacccctatttcataacgcgcgccgatttaaccacctataacaaaaacattttcccttcgccaaacaaatcgccgaccacattcataccgtccatcaacgaaccttcaatcacttcaatcgaacgcgtaacctactaacgaacttcttcgatatcctactcgataaactcgataatacctttaaccaacgaatattccaaacgtttattcacttcccacgaacgccactccgcctactaaacgttaacgatatcgtcgattttactaccgcgatatttctcgacaaactccaataaacgctcgataccatcgtcgcgacgattaaaaatcacatcttccaccgcgtcgcgcaattcaacgaataaatcgtcgtaaatcgccaattacccgacgttaacgatccccatatccataccattacgaataacgtaataaaaaaacactacgtaaataacttcgcgcacc

SEQ ID NO: 6419 - DNA, 604 bp, Artificial Sequence
  chemically treated genomic DNA (Homo sapiens) CpG-island No: 6419
cgtagttgttatattgtagtattatattaacgatatttttatcgatgtcgtggacgtcgttttttacggtggcgattattattttgtcgttggttttgttttgttttttgttggttttaataaacggttcgaggtaggttatttttgttttatgacgcgcgtcgatttgattatttgtggtaggaatatttttttttcgttaaataggtcgtcgattatatttatgtcgtttattaacgggtttttaattattttaatcgggcgcgtagtttgttggcgggttttttcggtattttgttcgataaattcggtaatgtttttgattagcgagtattttagacgtttatttattttttacgagcgttatttcgtttgttgggcgttggcggtgtcgtcggttttgttgtcgcgatatttttcggtaagttttagtaaacgttcggtgttatcgtcgcgacgattaagaattatattttttatcgcgtcgcgtagtttagcgggtaggtcgtcgtaaatcgttagttgttcggcgttgacgatttttatatttatgttattgcgaatagcgtagtagaggaatattgcgtgaatggtttcgcgtatt

SEQ ID NO: 6420 - DNA, 604 bp, Artificial Sequence
  chemically treated genomic DNA (Homo sapiens) CpG-island No: 6420
aatacgcgaaaccattcacgcaatattcctctactacgctattcgcaataacataaatataaaaatcgtcaacgccgaacaactaacgatttacgacgacctacccgctaaactacgcgacgcgataaaaaatataattcttaatcgtcgcgacgataacaccgaacgtttactaaaacttaccgaaaaatatcgcgacaacaaaaccgacgacaccgccaacgcccaacaaacgaaataacgctcgtaaaaaataaataaacgtctaaaatactcgctaatcaaaaacattaccgaatttatcgaacaaaataccgaaaaaacccgccaacaaactacgcgcccgattaaaataattaaaaacccgttaataaacgacataaatataatcgacgacctatttaacgaaaaaaaaatattcctaccacaaataatcaaatcgacgcgcgtcataaaacaaaaataacctacctcgaaccgtttattaaaaccaacaaaaaacaaaacaaaaccaacgacaaaataataatcgccaccgtaaaaaacgacgtccacgacatcgataaaaatatcgttaatataatactacaatataacaactacg

SEQ ID NO: 6421 - DNA, 565 bp, Artificial Sequence
  chemically treated genomic DNA (Homo sapiens) CpG-island No: 6421
tcgtgagttataacgttggcgattaatttttggcgaagcggtagaaacgacgttttgtgggttggatgataacgttcggtagatagattacgcgttggagtggttgtatgggcgcgattttgaacggttttagcgtggtgaacgtttcggtggattaggtggtttaaattttattatttttgagtggattaatagtatttatacgttgttttcgtagtaggtgattgagcggttggaaagcgatgtcgtgttgcgttacggtattgaagatgtggtgacgaatttcgacgtgttggaacgtatgtagttttttgaaagtttgttacgcgttgttttgtatattaaatatttgatgaatttcgaagtattggttgtcgttcgtcggatagtgtgttaggttgttgaagaaattatggttcgattggcgaaagaagttcggtaggttttttttggtgttcgcgatcggcggcgtcggttatttattttattggcgcgaaattttgattttaaagtattttgcgcgttaatttgttatattggtattcgtaatacggtaagttgtata

SEQ ID NO: 6422 - DNA, 565 bp, Artificial Sequence
  chemically treated genomic DNA (Homo sapiens) CpG-island No: 6422
tatacaacttaccgtattacgaataccaatataacaaattaacgcgcaaaatactttaaaatcaaaatttcgcgccaataaaataaataaccgacgccgccgatcgcgaacaccaaaaaaaacctaccgaacttctttcgccaatcgaaccataatttcttcaacaacctaacacactatccgacgaacgacaaccaatacttcgaaattcatcaaatatttaatatacaaaacaacgcgtaacaaactttcaaaaaactacatacgttccaacacgtcgaaattcgtcaccacatcttcaataccgtaacgcaacacgacatcgctttccaaccgctcaatcacctactacgaaaacaacgtataaatactattaatccactcaaaaataataaaatttaaaccacctaatccaccgaaacgttcaccacgctaaaaccgttcaaaatcgcgcccatacaaccactccaacgcgtaatctatctaccgaacgttatcatccaacccacaaaacgtcgtttctaccgcttcgccaaaaattaatcgccaacgttataactcacga

SEQ ID NO: 6423 - DNA, 565 bp, Artificial Sequence
  chemically treated genomic DNA (Homo sapiens) CpG-island No: 6423
tatataatttatcgtgttgcgggtgttagtgtagtaggttggcgcgtagagtattttgaaattaaagtttcgcgttagtggaataaatgatcggcgtcgtcgatcgcggatattagaaaaagtttgtcgaatttttttcgttagtcgagttataatttttttaataatttggtatattattcggcgggcggtagttagtatttcggggtttattagatgtttggtgtgtaaaatagcgcgtagtaggtttttagaaggttgtatacgttttagtacgtcgagattcgttattatatttttaatgtcgtagcgtagtacggtatcgttttttagtcgtttaattatttgttgcggaaatagcgtgtgaatattgttgatttatttaggggtggtgagatttgagttatttaatttatcggaacgtttattacgttggagtcgtttaggatcgcgtttatatagttattttagcgcgtggtttatttgtcgggcgttgttatttagtttataaagcgtcgtttttgtcgtttcgttaagaattaatcgttagcgttgtagtttacgg

SEQ ID NO: 6424 - DNA, 565 bp, Artificial Sequence
  chemically treated genomic DNA (Homo sapiens) CpG-island No: 6424
ccgtaaactacaacgctaacgattaattcttaacgaaacgacaaaaacgacgctttataaactaaataacaacgcccgacaaataaaccacgcgctaaaataactatataaacgcgatcctaaacgactccaacgtaataaacgttccgataaattaaataactcaaatctcaccacccctaaataaatcaacaatattcacacgctatttccgcaacaaataattaaacgactaaaaaacgataccgtactacgctacgacattaaaaatataataacgaatctcgacgtactaaaacgtatacaaccttctaaaaacctactacgcgctattttacacaccaaacatctaataaaccccgaaatactaactaccgcccgccgaataatataccaaattattaaaaaaattataactcgactaacgaaaaaaattcgacaaactttttctaatatccgcgatcgacgacgccgatcatttattccactaacgcgaaactttaatttcaaaatactctacgcgccaacctactacactaacacccgcaacacgataaattatata

SEQ ID NO: 6425 - DNA, 540 bp, Artificial Sequence
  chemically treated genomic DNA (Homo sapiens) CpG-island No: 6425
  unsure (38)
cgcgttggttgtggttaagcgggtggatcgtatatatntcgttattttttcgtataagtgagtatttattaatgaataatttttggatttatataagcgtatggtattgtaattatttattttcgcgttgattggtaggaatttgtcgtattattaagcgagcgtattagattggtgatttttaatatttcgtataattttagtgtaattgtttggtagtaggttgatttcgtcgttttgtggtaggcgatcgtcgggtacgagatttttgttattagcgatgaagtttacgagtatattaattttttataatagggttatgttagtgtgttggcgtattcgtagttgcgtgagcgggtagtggcggtttttttatttggtaagatttattatatgatcggttggaaagtgggttattgtgttgcgttagcgtttattagcgtcgaaattcgtaaggtatattagtatttgattttttcggtgaatatttcggtatagttggcgtttgttgatatgttacgtgtagaatttgagtattat

SEQ ID NO: 6426 - DNA, 540 bp, Artificial Sequence
  chemically treated genomic DNA (Homo sapiens) CpG-island No: 6426
  unsure (503)
ataatactcaaattctacacgtaacatatcaacaaacgccaactataccgaaatattcaccgaaaaaatcaaatactaatataccttacgaatttcgacgctaataaacgctaacgcaacacaataacccactttccaaccgatcatataataaatcttaccaaataaaaaaaccgccactacccgctcacgcaactacgaatacgccaacacactaacataaccctattataaaaaattaatatactcgtaaacttcatcgctaataacaaaaatctcgtacccgacgatcgcctaccacaaaacgacgaaatcaacctactaccaaacaattacactaaaattatacgaaatattaaaaatcaccaatctaatacgctcgcttaataatacgacaaattcctaccaatcaacgcgaaaataaataattacaataccatacgcttatataaatccaaaaattattcattaataaatactcacttatacgaaaaaataacganatatatacgatccacccgcttaaccacaaccaacgcg

SEQ ID NO: 6427 - DNA, 540 bp, Artificial Sequence
  chemically treated genomic DNA (Homo sapiens) CpG-island No: 6427
  unsure (503)
ataatgtttaggttttgtacgtagtatattagtaagcgttagttgtgtcggggtatttatcgaaaaggttagatattgatgtattttgcgaatttcggcgttgatgggcgttggcgtaatataataatttattttttagtcggttatatgataggttttgttaaatgaagaaatcgttattgttcgtttacgtagttgcggatgcgttagtatattggtatggttttgttgtgaaaagttgatgtgttcgtagattttatcgttaatgataaaaatttcgtgttcggcgatcgtttgttataaagcggcgaaattagtttgttgttagatagttgtattggggttatgcggagtgttgaggattattagtttggtgcgttcgtttaataatgcggtaaatttttgttagttaacgcgaaaatgggtggttgtagtgttatacgtttgtgtgagtttaggggttgtttattggtgggtgtttatttatgcgaaagggtggcgangtatatgcgatttattcgtttggttatagttaacgcg

SEQ ID NO: 6428 - DNA, 540 bp, Artificial Sequence
  chemically treated genomic DNA (Homo sapiens) CpG-island No: 6428
  unsure (38)
cgcgttaactataaccaaacgaataaatcgcatatacntcgccaccctttcgcataaataaacacccaccaataaacaacccctaaactcacacaaacgtataacactacaaccacccattttcgcgttaactaacaaaaatttaccgcattattaaacgaacgcaccaaactaataatcctcaacactccgcataaccccaatacaactatctaacaacaaactaatttcgccgctttataacaaacgatcgccgaacacgaaatttttatcattaacgataaaatctacgaacacatcaacttttcacaacaaaaccataccaatatactaacgcatccgcaactacgtaaacgaacaataacgatttcttcatttaacaaaacctatcatataaccgactaaaaaataaattattatattacgccaacgcccatcaacgccgaaattcgcaaaatacatcaatatctaaccttttcgataaataccccgacacaactaacgcttactaatatactacgtacaaaacctaaacattat

SEQ ID NO: 6429 - DNA, 547 bp, Artificial Sequence
  chemically treated genomic DNA (Homo sapiens) CpG-island No: 6429
  unsure (9, 38, 131, 174, 180..)
agcgggcgnttgggtacggatggcgagtggatgtttgngattgttggtggttatagcgataattagggcgatagtcgttcgaatatgatcggtattcgcgtcgataattagaaattacgttatgtcgttgngttgatattaagttggttttagtacggtaattagaagtaaggngtttgnnttgatattcgtaaggcgggtattacgttttgtgttttaagaatggtgcgatcgatttcgtagttattggttttatttcgttgtgtgttacgcggtttattattgttggtggtgttcgtttgttgttggcggttattttgatttgtcggaggcgtgttgattggcgcgttattcgtaggtgtcggttgattcgataacgttttcggtacgtcgttcggataatcggaatcgttttgttcgtttttattaagttggcgtgaacgaagcgtcgtatgagatttattatcgttagggcgatattgttttttcgtttgttttttattggcgaagtttagttgcgtcgtaatttgggcgtgaatattatcgt

SEQ ID NO: 6430 - DNA, 547 bp, Artificial Sequence
  chemically treated genomic DNA (Homo sapiens) CpG-island No: 6430
  unsure (367..368, 374, 417, 510, 539)
acgataatattcacgcccaaattacgacgcaactaaacttcgccaataaaaaacaaacgaaaaaacaatatcgccctaacgataataaatctcatacgacgcttcgttcacgccaacttaataaaaacgaacaaaacgattccgattatccgaacgacgtaccgaaaacgttatcgaatcaaccgacacctacgaataacgcgccaatcaacacgcctccgacaaatcaaaataaccgccaacaacaaacgaacaccaccaacaataataaaccgcgtaacacacaacgaaataaaaccaataactacgaaatcgatcgcaccattcttaaaacacaaaacgtaatacccgccttacgaatatcaanncaaacnccttacttctaattaccgtactaaaaccaacttaatatcaacncaacgacataacgtaatttctaattatcgacgcgaataccgatcatattcgaacgactatcgccctaattatcgctataaccaccaacaatcncaaacatccactcgccatccgtacccaancgcccgct

SEQ ID NO: 6431 - DNA, 547 bp, Artificial Sequence
  chemically treated genomic DNA (Homo sapiens) CpG-island No: 6431
  unsure (367..368, 374, 417, 510, 539)
acggtaatatttacgtttaggttacggcgtagttggatttcgttagtaaagaataaacggaagaatagtatcgttttaacggtgatgaattttatgcggcgtttcgtttacgttagtttaatgagagcgagtaaagcggtttcggttattcgggcggcgtatcgggggcgttgtcgaattaatcggtatttgcgaataacgcgttaattagtacgttttcggtaaattaaaataatcgttagtagtaggcgagtattattagtaatagtgggtcgcgtagtatatagcggaatgaaattagtaattacgaagtcgatcgtattatttttagagtatagggcgtgatattcgttttgcgagtattagnntaggtnttttgtttttgattatcgtgttgaaattagtttgatgttagtntaacggtataacgtggtttttggttatcggcgcgagtgtcggttatattcgagcggttgtcgttttggttatcgttgtagttattaataattntaagtatttattcgttattcgtgtttagncgttcgtt

SEQ ID NO: 6432 - DNA, 547 bp, Artificial Sequence
  chemically treated genomic DNA (Homo sapiens) CpG-island No: 6432
  unsure (9, 38, 131, 174, 180..)
aacgaacgnctaaacacgaataacgaataaatacttanaattattaataactacaacgataaccaaaacgacaaccgctcgaatataaccgacactcgcgccgataaccaaaaaccacgttataccgttanactaacatcaaactaatttcaacacgataatcaaaaacaaaanacctannctaatactcgcaaaacgaatatcacgccctatactctaaaaataatacgatcgacttcgtaattactaatttcattccgctatatactacgcgacccactattactaataatactcgcctactactaacgattattttaatttaccgaaaacgtactaattaacgcgttattcgcaaataccgattaattcgacaacgcccccgatacgccgcccgaataaccgaaaccgctttactcgctctcattaaactaacgtaaacgaaacgccgcataaaattcatcaccgttaaaacgatactattcttccgtttattctttactaacgaaatccaactacgccgtaacctaaacgtaaatattaccgt

SEQ ID NO: 6433 - DNA, 703 bp, Artificial Sequence
  chemically treated genomic DNA (Homo sapiens) CpG-island No: 6433
  unsure (602)
tatcgattcggtatttattgtaggtttgataagatgcgttaagtatcgtattaggtattgtgtattaattgtcggatgcggtatcggttgtaggtttgataagacgcgttaagcgtcgtattaggtataaatgtttaatgtttacgattatagcgaaatataggttttcgtttcgttcgttagcgtttttttaattcgcgataacgttttaatttacgcgggtttattacggtttttgatataattatttatcgtcgttatattcggttttatcgaattatcggttttggtaaatggcgttaatttattcggtgtggtatggcgaatggtacgttgttgcggcgttttttagtttttatatatcgtattagtatcggtgaggattattagtttatttgtattaatttgttcggcgagtaacgtagcggcgagatttttattaattattgttttattttttgttcggttatcggtatagtatattcgcgtcgtattgaaattatatatgttttttttgagtaaaattcgatggttcgtttcgagaatttacgcggtgcgagatttattatcgcgtaattttatattcgtttatttgtagcgtngtcgtttcgaggttttgttttttgttgattatcgtttataatttttgttgttaaggatggatttgcgttttaagtttttcgaaaggtgttatttcgtcgta

SEQ ID NO: 6434 - DNA, 703 bp, Artificial Sequence
  chemically treated genomic DNA (Homo sapiens) CpG-island No: 6434
  unsure (102)
tacgacgaaataacacctttcgaaaaacttaaaacgcaaatccatccttaacaacaaaaattataaacgataatcaacaaaaaacaaaacctcgaaacgacnacgctacaaataaacgaatataaaattacgcgataataaatctcgcaccgcgtaaattctcgaaacgaaccatcgaattttactcaaaaaaaacatatataatttcaatacgacgcgaatatactataccgataaccgaacaaaaaataaaacaataattaataaaaatctcgccgctacgttactcgccgaacaaattaatacaaataaactaataatcctcaccgatactaatacgatatataaaaactaaaaaacgccgcaacaacgtaccattcgccataccacaccgaataaattaacgccatttaccaaaaccgataattcgataaaaccgaatataacgacgataaataattatatcaaaaaccgtaataaacccgcgtaaattaaaacgttatcgcgaattaaaaaaacgctaacgaacgaaacgaaaacctatatttcgctataatcgtaaacattaaacatttatacctaatacgacgcttaacgcgtcttatcaaacctacaaccgataccgcatccgacaattaatacacaatacctaatacgatacttaacgcatcttatcaaacctacaataaataccgaatcgata

SEQ ID NO: 6435 - DNA, 703 bp, Artificial Sequence
  chemically treated genomic DNA (Homo sapiens) CpG-island No: 6435
  unsure (102)
tacgacggaatgatatttttcgggaaatttagagcgtaggtttatttttagtagtaagaattatgggcggtaattagtagaagatagagtttcgaagcggtnacgttgtagataaacggatgtaaaattgcgcggtggtgggtttcgtatcgcgtaaattttcgaagcgagttatcgagttttgtttaagaggggtatgtgtgattttagtgcggcgcgggtgtgttgtgtcgatggtcgagtagggagtgaagtagtgattgataaagatttcgtcgttgcgttgttcgtcgagtagattaatgtagatggattggtgatttttatcgatgttgatgcggtatatgaaaattggggaacgtcgtagtaacgtgttattcgttatgttatatcggatgagttagcgttatttgttaaagtcgatggttcgatggggtcgaatgtaacggcggtgagtggttatgttagaagtcgtggtaaattcgcgtggattggggcgttatcgcgaattgaagagacgttggcgggcgaagcggggatttgtatttcgttgtagtcgtaggtattagatatttgtgtttgatgcgacgtttgacgcgttttattaggtttataatcggtgtcgtattcggtaattggtgtataatgtttgatgcgatgtttgacgtattttattaggtttataatgggtatcggatcggta

SEQ ID NO: 6436 - DNA, 703 bp, Artificial Sequence
  chemically treated genomic DNA (Homo sapiens) CpG-island No: 6436
  unsure (602)
taccgatccgatacccattataaacctaataaaatacgtcaaacatcgcatcaaacattatacaccaattaccgaatacgacaccgattataaacctaataaaacgcgtcaaacgtcgcatcaaacacaaatatctaatacctacgactacaacgaaatacaaatccccgcttcgcccgccaacgtctcttcaattcgcgataacgccccaatccacgcgaatttaccacgacttctaacataaccactcaccgccgttacattcgaccccatcgaaccatcgactttaacaaataacgctaactcatccgatataacataacgaataacacgttactacgacgttccccaattttcatataccgcatcaacatcgataaaaatcaccaatccatctacattaatctactcgacgaacaacgcaacgacgaaatctttatcaatcactacttcactccctactcgaccatcgacacaacacacccgcgccgcactaaaatcacacatacccctcttaaacaaaactcgataactcgcttcgaaaatttacgcgatacgaaacccaccaccgcgcaattttacatccgtttatctacaacgtnaccgcttcgaaactctatcttctactaattaccgcccataattcttactactaaaaataaacctacgctctaaatttcccgaaaaatatcattccgtcgta

SEQ ID NO: 6437 - DNA, 590 bp, Artificial Sequence
  chemically treated genomic DNA (Homo sapiens) CpG-island No: 6437
gagattagggtttacgaagtgtggttggatgttggggtataaattcgtttacgataaaattttgtttcgtattattcgcggttatgattttgtttgttattagcgtataatttagttggtacgttagcgcgggttgaaggtgtgtttttatttaattgtcggtttgtttggcgaagggtaggttgaatgtttgtaaacgttggagcgagtggttgaaatcggcgtggacggtataaagttgtattcgttgtatattgtgaaaggtagtattatggcgaaagtttgggaagcggggcgtttgaacggtattgaattggaggattatacgtttattgtcggagaaatgattcgttatacgttatcggaagtgatttattatcgtattttcgttagcgttcgtcgttcgacgttgtttgtttcgttgtggtgcgaaaatcgatggacgggaatggtcgagttggatcgttatttgaatgaatatggcgtatagggatcggcgttgggacgttcgtggttatttttaacggagtaggtcgttgaggggaatttcgtattttttatataatttataacgtaattgttagaattgg

SEQ ID NO: 6438 - DNA, 590 bp, Artificial Sequence
  chemically treated genomic DNA (Homo sapiens) CpG-island No: 6438
ccaattctaacaattacgttataaattatataaaaaatacgaaattcccctcaacgacctactccgttaaaaataaccacgaacgtcccaacgccgatccctatacgccatattcattcaaataacgatccaactcgaccattcccgtccatcgattttcgcaccacaacgaaacaaacaacgtcgaacgacgaacgctaacgaaaatacgataataaatcacttccgataacgtataacgaatcatttctccgacaataaacgtataatcctccaattcaataccgttcaaacgccccgcttcccaaactttcgccataatactacctttcacaatatacaacgaatacaactttataccgtccacgccgatttcaaccactcgctccaacgtttacaaacattcaacctacccttcgccaaacaaaccgacaattaaataaaaacacaccttcaacccgcgctaacgtaccaactaaattatacgctaataacaaacaaaatcataaccgcgaataatacgaaacaaaattttatcgtaaacgaatttataccccaacatccaaccacacttcgtaaaccctaatctc

SEQ ID NO: 6439 - DNA, 590 bp, Artificial Sequence
  chemically treated genomic DNA (Homo sapiens) CpG-island No: 6439
ttaattttgatagttacgttataaattgtgtgagaaatgcggaattttttttaacgatttatttcgttggaggtagttacggacgttttagcgtcgatttttgtacgttatgtttatttagatagcgatttagttcgattattttcgtttatcgattttcgtattatagcggagtaagtagcgtcgggcgacgggcgttggcggaaatgcggtggtagattattttcggtggcgtatggcgaattattttttcggtagtgagcgtgtaattttttagtttaatatcgtttaaacgtttcgttttttaggttttcgttataatgttgttttttataatatgtagcggatgtagttttatgtcgtttacgtcggttttaattattcgttttagcgtttgtaaatatttagtttgtttttcgttaggtaggtcgataattaagtgggaatatatttttagttcgcgttgacgtgttagttgggttgtacgttgataataagtaaaattatggtcgcgggtgatgcgaagtaaggttttgtcgtgggcgggtttgtattttagtatttagttatatttcgtaaattttggtttt

SEQ ID NO: 6440 - DNA, 590 bp, Artificial Sequence
  chemically treated genomic DNA (Homo sapiens) CpG-island No: 6440
aaaaccaaaatttacgaaatataactaaatactaaaatacaaacccgcccacgacaaaaccttacttcgcatcacccgcgaccataattttacttattatcaacgtacaacccaactaacacgtcaacgcgaactaaaaatatattcccacttaattatcgacctacctaacgaaaaacaaactaaatatttacaaacgctaaaacgaataattaaaaccgacgtaaacgacataaaactacatccgctacatattataaaaaacaacattataacgaaaacctaaaaaacgaaacgtttaaacgatattaaactaaaaaattacacgctcactaccgaaaaaataattcgccatacgccaccgaaaataatctaccaccgcatttccgccaacgcccgtcgcccgacgctacttactccgctataatacgaaaatcgataaacgaaaataatcgaactaaatcgctatctaaataaacataacgtacaaaaatcgacgctaaaacgtccgtaactacctccaacgaaataaatcgttaaaaaaaattccgcatttctcacacaatttataacgtaactatcaaaattaa

SEQ ID NO: 6441 - DNA, 745 bp, Artificial Sequence
  chemically treated genomic DNA (Homo sapiens) CpG-island No: 6441
gacgtcgtagtagggggaaatttattacgagaatcgttcgttgtatgtaatgagcgaggtcgatcgtcgtcgtttgttgcgtatcgaatggggcgtggtgtattagtatttattcgacggtttgcgtcgttaggtgtcggtaggcggtaatatcggcgagcggttgatggcgatcggggtacgttattacggcgatattcgtgttatcgcgtagaagtggttggaagaggtggagattttcgttaatcggatcgacgatttgtcgattatttttttcggcggtatgtagtagcgtttgtagattgttcgtaatttggtgacgtattcgaagttggtgtttatggatgaatcgatcggcgggttggatgtgtcggtgtaggttcgtttgttcgatttgttgcgcggtttggtggtggagttgaattcgcggtggtgattgttatttatgatttaggcgtcgttcgtttgttggcggatcgtttgttggtgatgaagtaggggtaagtggtggagagtgggttaatcgatcgcgtgttcgacgattcgtattattcgtatatatagttgttggtgttatcggttttgtagaattgagttcgtgtcggatgcggcgtaaacgttttattcggtttatatatgcgttttcgtaggtcggataagacgcgttagcgtcgtattcgatattcgattaacgagcgaataatgataacgtataaaacgtagtaaattttttttgtatagtaaa

SEQ ID NO: 6442 - DNA, 745 bp, Artificial Sequence
  chemically treated genomic DNA (Homo sapiens) CpG-island No: 6442
tttactatacaaaaaaaatttactacgttttatacgttatcattattcgctcgttaatcgaatatcgaatacgacgctaacgcgtcttatccgacctacgaaaacgcatatataaaccgaataaaacgtttacgccgcatccgacacgaactcaattctacaaaaccgataacaccaacaactatatatacgaataatacgaatcgtcgaacacgcgatcgattaacccactctccaccacttacccctacttcatcaccaacaaacgatccgccaacaaacgaacgacgcctaaatcataaataacaatcaccaccgcgaattcaactccaccaccaaaccgcgcaacaaatcgaacaaacgaacctacaccgacacatccaacccgccgatcgattcatccataaacaccaacttcgaatacgtcaccaaattacgaacaatctacaaacgctactacataccgccgaaaaaaataatcgacaaatcgtcgatccgattaacgaaaatctccacctcttccaaccacttctacgcgataacacgaatatcgccgtaataacgtaccccgatcgccatcaaccgctcgccgatattaccgcctaccgacacctaacgacgcaaaccgtcgaataaatactaatacaccacgccccattcgatacgcaacaaacgacgacgatcgacctcgctcattacatacaacgaacgattctcgtaataaatttccccctactacgacgtc

SEQ ID NO: 6443 - DNA, 745 bp, Artificial Sequence
  chemically treated genomic DNA (Homo sapiens) CpG-island No: 6443
tttgttgtgtagagaaagtttattgcgttttgtacgttattattattcgttcgttggtcgggtgtcgaatgcgacgttggcgcgttttattcgatttacggggacgtatgtgtaggtcggataaggcgtttacgtcgtattcggtacgggtttaattttgtaaaatcgatgatattagtagttgtgtatacgaatgatgcgggtcgtcgagtacgcggtcggttaatttattttttattatttgtttttgttttattattagtaaacggttcgttagtaggcgggcgacgtttaaattatgggtgataattattatcgcgggtttagttttattattaggtcgcgtagtaggtcgagtaggcgggtttgtatcgatatatttagttcgtcggtcggtttatttataaatattagtttcggatgcgttattaggttgcgggtaatttgtaaacgttgttgtatatcgtcggaaaaggtggtcggtaggtcgtcgattcggttggcgggaatttttattttttttagttatttttgcgcggtggtacgaatatcgtcgtaatgacgtgtttcggtcgttattagtcgttcgtcgatattgtcgtttgtcgatatttggcggcgtaggtcgtcgagtggatgttgatgtattacgttttattcggtacgtagtaggcgacggcggtcggtttcgtttattgtatatagcgaacggttttcgtagtgaatttttttttgttgcggcgtt

SEQ ID NO: 6444 - DNA, 745 bp, Artificial Sequence
  chemically treated genomic DNA (Homo sapiens) CpG-island No: 6444
aacgccgcaacaaaaaaaaattcactacgaaaaccgttcgctatatacaataaacgaaaccgaccgccgtcgcctactacgtaccgaataaaacgtaatacatcaacatccactcgacgacctacgccgccaaatatcgacaaacgacaatatcgacgaacgactaataacgaccgaaacacgtcattacgacgatattcgtaccaccgcgcaaaaataactaaaaaaaataaaaattcccgccaaccgaatcgacgacctaccgaccaccttttccgacgatatacaacaacgtttacaaattacccgcaacctaataacgcatccgaaactaatatttataaataaaccgaccgacgaactaaatatatcgatacaaacccgcctactcgacctactacgcgacctaataataaaactaaacccgcgataataattatcacccataatttaaacgtcgcccgcctactaacgaaccgtttactaataataaaacaaaaacaaataataaaaaataaattaaccgaccgcgtactcgacgacccgcatcattcgtatacacaactactaatatcatcgattttacaaaattaaacccgtaccgaatacgacgtaaacgccttatccgacctacacatacgtccccgtaaatcgaataaaacgcgccaacgtcgcattcgacacccgaccaacgaacgaataataataacgtacaaaacgcaataaactttctctacacaacaaa

SEQ ID NO: 6445 - DNA, 526 bp, Artificial Sequence
  chemically treated genomic DNA (Homo sapiens) CpG-island No: 6445
gttgatcgcgcgggattatattttattatattttacgtgatgatcgttttgtgttttatagtggtatttttcgaatgtagaatcgatggatagtgttttaatacgtcgttgcgaatatagcgatacgttttttttatcggtatttcgttggtggtgcggtagattttttttagcgtcgtaatcgttagcggggcgttgttaattagttgttgagttagttcgcgggcgttatttattagtttcgtttggttaattacgcggttgattattttttaacgtagcgttttttttgcgtttattcgtttgtcggttattattattttattgacgatggtaggcggtaggattttcggtagacgtagtatatcgtcgttgttaggaacgatgtttagtttggttttcggtagggcgaagttggcgttatcggtataaataataaaatttgtcgttagcgttagtttaaagtcgtcgttaaaggtatagtcgtttatagttgcgataatcggtttgtcgagattgaaaattt

SEQ ID NO: 6446 - DNA, 526 bp, Artificial Sequence
  chemically treated genomic DNA (Homo sapiens) CpG-island No: 6446
aaattttcaatctcgacaaaccgattatcgcaactataaacgactatacctttaacgacgactttaaactaacgctaacgacaaattttattatttataccgataacgccaacttcgccctaccgaaaaccaaactaaacatcgttcctaacaacgacgatatactacgtctaccgaaaatcctaccgcctaccatcgtcaataaaataataataaccgacaaacgaataaacgcaaaaaaaacgctacgttaaaaaataatcaaccgcgtaattaaccaaacgaaactaataaataacgcccgcgaactaactcaacaactaattaacaacgccccgctaacgattacgacgctaaaaaaaatctaccgcaccaccaacgaaataccgataaaaaaaacgtatcgctatattcgcaacgacgtattaaaacactatccatcgattctacattcgaaaaataccactataaaacacaaaacgatcatcacgtaaaatataataaaatataatcccgcgcgatcaac

SEQ ID NO: 6447 - DNA, 526 bp, Artificial Sequence
  chemically treated genomic DNA (Homo sapiens) CpG-island No: 6447
aaatttttaatttcgataaatcggttatcgtagttgtgaacggttatgtttttggcggcggttttgaattggcgttggcggtagattttattgtttgtgtcgataacgttagtttcgttttgtcggaagttaaattgggtatcgtttttgatagcggcggtgtgttgcgtttgtcgaagattttgtcgtttgttatcgttaatgaaatggtgatgatcggtagacgaatgggcgtagaagaggcgttgcgttgggggatagttaatcgcgtggttagttaggcggaattgatggataacgttcgcgaattggtttagtagttggttaatagcgtttcgttggcgattgcggcgttgaaagagatttatcgtattattagcgaaatgtcggtagaagaagcgtatcgttatattcgtagcggcgtgttgaaatattatttatcggttttgtattcggaagatgttattgtagagtatagggcgattattacgtgaggtgtgataggatgtaatttcgcgcggttaat

SEQ ID NO: 6448 - DNA, 526 bp, Artificial Sequence
  chemically treated genomic DNA (Homo sapiens) CpG-island No: 6448
attaaccgcgcgaaattacatcctatcacacctcacgtaataatcgccctatactctacaataacatcttccgaatacaaaaccgataaataatatttcaacacgccgctacgaatataacgatacgcttcttctaccgacatttcgctaataatacgataaatctctttcaacgccgcaatcgccaacgaaacgctattaaccaactactaaaccaattcgcgaacgttatccatcaattccgcctaactaaccacgcgattaactatcccccaacgcaacgcctcttctacgcccattcgtctaccgatcatcaccatttcattaacgataacaaacgacaaaatcttcgacaaacgcaacacaccgccgctatcaaaaacgatacccaatttaacttccgacaaaacgaaactaacgttatcgacacaaacaataaaatctaccgccaacgccaattcaaaaccgccgccaaaaacataaccgttcacaactacgataaccgatttatcgaaattaaaaattt

SEQ ID NO: 6449 - DNA, 738 bp, Artificial Sequence
  chemically treated genomic DNA (Homo sapiens) CpG-island No: 6449
gggcgtttaatcgcgttgattaaatgttagaatattatagtcgggacgaatattacgttgtattttaagcgtgaagatttgttgtacggcggcgcgtataaaattaattaggtgttggggtaggcgttgttggcgaagcggatgggtaaaatcgaaattatcgtcgaaatcggtgtcggttagtatggcgtggcgtcggtttttgttagcgttttgttcggtttgaaatgtcgtatttatatgggtgttaaagacgttgaacgttagtcgtttaacgtttttcgtatgcgtttaatgggtgcggaagtgatttcggtgtatagcggtttcgcgacgttgaaagatgtttgtaacgaggcgttgcgcgattggttcggtagttacgaaatcgcgtattatatgttgggtatcgtagttggttcgtatttttattcgattattgtgcgtgagttttagcggatgattggcgaagaaattaaagcgtagattttggaaagagaaggtcgtttgtcggatgtcggtatcgtttgtgttggcggcggttcgaatgttatcggtatgtttgttgattttattaatgaaattaacggtcggtttgattggagttggagttaggtggtcgcggtattgaaattggcgagtacggcgcgtcgttaaaatatggtcgcgtgggtatgtatttcggtatgaaagcgtagatgatgtaaatcgaagacgggtagattgaagaattttatt

SEQ ID NO: 6450 - DNA, 738 bp, Artificial Sequence
  chemically treated genomic DNA (Homo sapiens) CpG-island No: 6450
aataaaattcttcaatctacccgtcttcgatttacatcatctacgctttcataccgaaatacatacccacgcgaccatattttaacgacgcgccgtactcgccaatttcaataccgcgaccacctaactccaactccaatcaaaccgaccgttaatttcattaataaaatcaacaaacataccgataacattcgaaccgccgccaacacaaacgataccgacatccgacaaacgaccttctctttccaaaatctacgctttaatttcttcgccaatcatccgctaaaactcacgcacaataatcgaataaaaatacgaaccaactacgatacccaacatataatacgcgatttcgtaactaccgaaccaatcgcgcaacgcctcgttacaaacatctttcaacgtcgcgaaaccgctatacaccgaaatcacttccgcacccattaaacgcatacgaaaaacgttaaacgactaacgttcaacgtctttaacacccatataaatacgacatttcaaaccgaacaaaacgctaacaaaaaccgacgccacgccatactaaccgacaccgatttcgacgataatttcgattttacccatccgcttcgccaacaacgcctaccccaacacctaattaattttatacgcgccgccgtacaacaaatcttcacgcttaaaatacaacgtaatattcgtcccgactataatattctaacatttaatcaacgcgattaaacgccc

SEQ ID NO: 6451 - DNA, 738 bp, Artificial Sequence
  chemically treated genomic DNA (Homo sapiens) CpG-island No: 6451
agtaagattttttaatttgttcgttttcggtttgtattatttgcgtttttatatcgaaatatatatttacgcgattatgttttagcggcgcgtcgtgttcgttagttttaatatcgcgattatttggttttaattttaattaggtcgatcgttggttttattgatgaaattagtaaatatgtcgatggtattcgaatcgtcgttaatataggcgatatcggtattcggtaggcgattttttttttttagaatttgcgttttggttttttcgttaattattcgttgaaatttacgtataatggtcggataaggatgcgggttagttgcggtgtttagtatatagtgcgcggtttcgtaattatcggattagtcgcgtagcgtttcgttataggtattttttagcgtcgcggaatcgttatgtatcgggattattttcgtatttattaagcgtatacgaaaaacgttaggcgattggcgtttaacgtttttggtatttatataaatacggtattttaggtcgagtagggcgttggtaagggtcgacgttacgttatgttgatcggtatcggtttcggcgatgatttcggttttatttattcgtttcgttagtaacgtttgttttagtatttggttagttttatgcgcgtcgtcgtgtagtaaatttttacgtttgagatatagcgtggtgttcgtttcggttgtaatgttttggtatttggttagcgcggttggacgttt

SEQ ID NO: 6452 - DNA, 738 bp, Artificial Sequence
  chemically treated genomic DNA (Homo sapiens) CpG-island No: 6452
aaacgtccaaccgcgctaaccaaataccaaaacattacaaccgaaacgaacaccacgctatatctcaaacgtaaaaatttactacacgacgacgcgcataaaactaaccaaatactaaaacaaacgttactaacgaaacgaataaataaaaccgaaatcatcgccgaaaccgataccgatcaacataacgtaacgtcgacccttaccaacgccctactcgacctaaaataccgtatttatataaataccaaaaacgttaaacgccaatcgcctaacgtttttcgtatacgcttaataaatacgaaaataatcccgatacataacgattccgcgacgctaaaaaatacctataacgaaacgctacgcgactaatccgataattacgaaaccgcgcactatatactaaacaccgcaactaacccgcatccttatccgaccattatacgtaaatttcaacgaataattaacgaaaaaaccaaaacgcaaattctaaaaaaaaaaaatcgcctaccgaataccgatatcgcctatattaacgacgattcgaataccatcgacatatttactaatttcatcaataaaaccaacgatcgacctaattaaaattaaaaccaaataatcgcgatattaaaactaacgaacacgacgcgccgctaaaacataatcgcgtaaatatatatttcgatataaaaacgcaaataatacaaaccgaaaacgaacaaattaaaaaatcttact

SEQ ID NO: 6453 - DNA, 515 bp, Artificial Sequence
  chemically treated genomic DNA (Homo sapiens) CpG-island No: 6453
gcggtgaagtaatattaaaacgcggaagatacgcgtggtcgtttggtgatgttttgtatgatatcggttttcgatggtatttttatttttattgacgacgaagaagcgaaatagtttcgtgaaagcgtggtcgagtggttgatgattaattattcgtacgattgttcggtatgtgaagagggcggtaattgttatttttaggatatgattgtgatgatcggatatagttttcgtcgttatcgttttattaaacgtatttatcgtaattaggatttggggttatttattttttacgaaatgaatcgttgtatcgtttgttatcgttgtgtgcgttattataaagattacgttgacggtatagatttgggcgtttacggtgcgtacgataacgtttatttcggtcgttcggaagacggtacgttggaaagcgaatttttcggtaatttggtcgaaatttgttcgatcggcgtatttatcgataaaacgtatttcgagcgttataatcgtaaatggga

SEQ ID NO: 6454 - DNA, 515 bp, Artificial Sequence
  chemically treated genomic DNA (Homo sapiens) CpG-island No: 6454
tcccatttacgattataacgctcgaaatacgttttatcgataaatacgccgatcgaacaaatttcgaccaaattaccgaaaaattcgctttccaacgtaccgtcttccgaacgaccgaaataaacgttatcgtacgcaccgtaaacgcccaaatctataccgtcaacgtaatctttataataacgcacacaacgataacaaacgatacaacgattcatttcgtaaaaaataaataaccccaaatcctaattacgataaatacgtttaataaaacgataacgacgaaaactatatccgatcatcacaatcatatcctaaaaataacaattaccgccctcttcacataccgaacaatcgtacgaataattaatcatcaaccactcgaccacgctttcacgaaactatttcgcttcttcgtcgtcaataaaaataaaaataccatcgaaaaccgatatcatacaaaacatcaccaaacgaccacgcgtatcttccgcgttttaatattacttcaccgc

SEQ ID NO: 6455 - DNA, 515 bp, Artificial Sequence
  chemically treated genomic DNA (Homo sapiens) CpG-island No: 6455
ttttatttacggttgtaacgttcggagtgcgttttgtcggtaaatacgtcggtcgggtaaatttcgattaggttatcggaaaattcgttttttagcgtgtcgtttttcgggcgatcgaagtagacgttgtcgtgcgtatcgtaaacgtttagatttgtatcgttagcgtaatttttgtagtaacgtatatagcggtagtaggcgatgtagcggtttatttcgtgagagatgaatggttttaaattttgattacggtgggtacgtttggtgaaacggtagcgacggaagttgtgttcggttattatagttatattttgaagatggtagttatcgttttttttatatatcggatagtcgtgcgggtggttggttattaattattcgattacgtttttacggaattgtttcgttttttcgtcgttaatggaaataaaggtgttatcggaagtcggtgttatataggatattattaggcgattacgcgtgtttttcgcgttttggtattgttttatcgt

SEQ ID NO: 6456 - DNA, 515 bp, Artificial Sequence
  chemically treated genomic DNA (Homo sapiens) CpG-island No: 6456
acgataaaacaataccaaaacgcgaaaaacacgcgtaatcgcctaataatatcctatataacaccgacttccgataacacctttatttccattaacgacgaaaaaacgaaacaattccgtaaaaacgtaatcgaataattaataaccaaccacccgcacgactatccgatatataaaaaaaacgataactaccatcttcaaaatataactataataaccgaacacaacttccgtcgctaccgtttcaccaaacgtacccaccgtaatcaaaatttaaaaccattcatctctcacgaaataaaccgctacatcgcctactaccgctatatacgttactacaaaaattacgctaacgatacaaatctaaacgtttacgatacgcacgacaacgtctacttcgatcgcccgaaaaacgacacgctaaaaaacgaattttccgataacctaatcgaaatttacccgaccgacgtatttaccgacaaaacgcactccgaacgttacaaccgtaaataaaa

SEQ ID NO: 6457 - DNA, 986 bp, Artificial Sequence
  chemically treated genomic DNA (Homo sapiens) CpG-island No: 6457
  unsure (819, 978)
gcgtcgagtatttgttagtaatgttttatcggttgtaatattagtttcggtgaacgttacggcgaattgcgtcgtatcgaaaatcgttataacggtacggtaaattattattttttttgcgatcgtggtcgtttcggttacggttacgttaatttgaaggatcgttcgcgttagttagtatagcgtcgtggcgatgattttattatttttaacgtcgaataggtaatgtagggcgcggtagatattttgcgttagtcgaagaaagtgatcggtattggtttttcgcgtgttagcgtggaaagtaattttgcgttgcgtgaattggtgggcgaagaaaatttttatatcggtatcgtttacggtgagtaggaacgtttgtaattggcgttgaaagtgttgcgtgaaggcggtatttatatttcggttttgcgcgaaatcgaattttacgatgcggtattggtgttgggcgaagacgttatttagatcggcgcgcgcgtcgcgttggtagtgcgttaggttgtgaaaggtaaagcgcgcgaaatggcggtagtatagaaagtggttgattggtagattgcggtaatttttaatatcggttaacgtgcgaagtattcgttgtttgttattacgttgatgatattcgtttggatgatatcgcggcgtggatttatcgcgtatcggttgaagattaggcgcgtttaggttttgttatcgtttatgcgttggataattttgtattagcggttgacggtatcgaatttgagttgtaaagtaaaatcgacgttatcgtgtaggtattggtaggtgcgaagaaatcgntgattattttacggacgaacgtcggtagtttagaggtgaatttagcggcggtttacgtcgcgaaagttttgaaggtcgcggcgttgatcgtcgtattattatgattgttcggttcgttaataagtatgggttggtatatttagataattaatattattnaaataagt

SEQ ID NO: 6458 - DNA, 986 bp, Artificial Sequence
  chemically treated genomic DNA (Homo sapiens) CpG-island No: 6458
  unsure (9, 168)
acttatttnaataatattaattatctaaatataccaacccatacttattaacgaaccgaacaatcataataatacgacgatcaacgccgcgaccttcaaaactttcgcgacgtaaaccgccgctaaattcacctctaaactaccgacgttcgtccgtaaaataatcancgatttcttcgcacctaccaatacctacacgataacgtcgattttactttacaactcaaattcgataccgtcaaccgctaatacaaaattatccaacgcataaacgataacaaaacctaaacgcgcctaatcttcaaccgatacgcgataaatccacgccgcgatatcatccaaacgaatatcatcaacgtaataacaaacaacgaatacttcgcacgttaaccgatattaaaaattaccgcaatctaccaatcaaccactttctatactaccgccatttcgcgcgctttacctttcacaacctaacgcactaccaacgcgacgcgcgcgccgatctaaataacgtcttcgcccaacaccaataccgcatcgtaaaattcgatttcgcgcaaaaccgaaatataaataccgccttcacgcaacactttcaacgccaattacaaacgttcctactcaccgtaaacgataccgatataaaaattttcttcgcccaccaattcacgcaacgcaaaattactttccacgctaacacgcgaaaaaccaataccgatcactttcttcgactaacgcaaaatatctaccgcgccctacattacctattcgacgttaaaaataataaaatcatcgccacgacgctatactaactaacgcgaacgatccttcaaattaacgtaaccgtaaccgaaacgaccacgatcgcaaaaaaaataataatttaccgtaccgttataacgattttcgatacgacgcaattcgccgtaacgttcaccgaaactaatattacaaccgataaaacattactaacaaatactcgacgc

SEQ ID NO: 6459 - DNA, 986 bp, Artificial Sequence
  chemically treated genomic DNA (Homo sapiens) CpG-island No: 6459
  unsure (9, 168)
atttatttnagtgatattggttgtttggatatgttagtttatgtttgttgacgaatcgggtaattatggtgatacgacggttagcgtcgcgatttttagggttttcgcgacgtaagtcgtcgttgaatttatttttaagttatcggcgttcgttcgtgagataattancggttttttcgtatttgttagtgtttgtacgatgacgtcgattttgttttgtagtttaggttcgatatcgttaatcgttggtgtagagttatttagcgtatgggcgatggtaaaatttaaacgcgtttgatttttaatcggtgcgcggtaagtttacgtcgcgatattatttagacgggtgttattaacgtggtaataaatagcggatgtttcgtacgttgatcgatgttgaggattgtcgtaatttgttagttagttattttttgtgttgtcgttatttcgcgcgttttattttttatagtttgacgtattgttagcgcgacgcgcgcgtcggtttgggtaacgttttcgtttagtattagtatcgtatcgtaagattcgatttcgcgtagagtcggagtataaatgtcgtttttacgtagtatttttagcgttagttgtagacgtttttgtttatcgtgagcgatatcggtgtagaagtttttttcgtttattagtttacgtagcgtaaagttgttttttacgttggtacgcggagaattaatatcgattatttttttcgattgacgtagaatatttgtcgcgttttgtattgtttgttcggcgttgagggtaatgaaattatcgttacgacgttgtattggttgacgcggacgattttttaggttgacgtaatcgtaatcgaaacgattacggtcgtagaggaagtagtggtttatcgtatcgttgtaacggttttcgatacgacgtagttcgtcgtaacgtttatcggggttgatgttatagtcgatggaatattgttggtagatgttcggcgt

SEQ ID NO: 6460 - DNA, 986 bp, Artificial Sequence
  chemically treated genomic DNA (Homo sapiens) CpG-island No: 6460
  unsure (819, 978)
acgccgaacatctaccaacaatattccatcgactataacatcaaccccgataaacgttacgacgaactacgtcgtatcgaaaaccgttacaacgatacgataaaccactacttcctctacgaccgtaatcgtttcgattacgattacgtcaacctaaaaaatcgtccgcgtcaaccaatacaacgtcgtaacgataatttcattaccctcaacgccgaacaaacaatacaaaacgcgacaaatattctacgtcaatcgaaaaaaataatcgatattaattctccgcgtaccaacgtaaaaaacaactttacgctacgtaaactaataaacgaaaaaaacttctacaccgatatcgctcacgataaacaaaaacgtctacaactaacgctaaaaatactacgtaaaaacgacatttatactccgactctacgcgaaatcgaatcttacgatacgatactaatactaaacgaaaacgttacccaaaccgacgcgcgcgtcgcgctaacaatacgtcaaactataaaaaataaaacgcgcgaaataacgacaacacaaaaaataactaactaacaaattacgacaatcctcaacatcgatcaacgtacgaaacatccgctatttattaccacgttaataacacccgtctaaataatatcgcgacgtaaacttaccgcgcaccgattaaaaatcaaacgcgtttaaattttaccatcgcccatacgctaaataactctacaccaacgattaacgatatcgaacctaaactacaaaacaaaatcgacgtcatcgtacaaacactaacaaatacgaaaaaaccgntaattatctcacgaacgaacgccgataacttaaaaataaattcaacgacgacttacgtcgcgaaaaccctaaaaatcgcgacgctaaccgtcgtatcaccataattacccgattcgtcaacaaacataaactaacatatccaaacaaccaatatcactnaaataaat

SEQ ID NO: 6461 - DNA, 585 bp, Artificial Sequence
  chemically treated genomic DNA (Homo sapiens) CpG-island No: 6461
aaagataacggtagggagagaacgttataagagagggaaagttagagcgaaaattggtaattcgtttcgaggttttcgttattacgggtgatttgaggatttagtacgaggcgagaggcgagagtatggggttgggaagagttataaaattcgtttgtgattagttcggatgggggtatcggtcgtttgtgattgggtgacgtcgagatatagagttgcgttttgaattacgtagggttttgggtagtaaaggttttgtaaggattttaatcgaaagggggagggggaaggtcgttaataaacggttgagtttataattcgggtcggggcgttttttaatttttatggagagagttaggttggagtcgtcgttttagtcgtattttttgagtttcgtttcgtttttgttgtcggtcgagggtatttttttttgggtagcggtcgtgaagattttttcgtcgtcgtttatgttgtgcgcggtcgttattgcgatcgtggttttttcgtgtagggagggtttggtgtcgtgtgcggcgtagtagattgttggaggtgaagttggagtaggtgttgttgttattatag

SEQ ID NO: 6462 - DNA, 585 bp, Artificial Sequence
  chemically treated genomic DNA (Homo sapiens) CpG-island No: 6462
ctataataacaacaacacctactccaacttcacctccaacaatctactacgccgcacacgacaccaaaccctccctacacgaaaaaaccacgatcgcaataacgaccgcgcacaacataaacgacgacgaaaaaatcttcacgaccgctacccaaaaaaaaataccctcgaccgacaacaaaaacgaaacgaaactcaaaaaatacgactaaaacgacgactccaacctaactctctccataaaaattaaaaaacgccccgacccgaattataaactcaaccgtttattaacgaccttccccctccccctttcgattaaaatccttacaaaacctttactacccaaaaccctacgtaattcaaaacgcaactctatatctcgacgtcacccaatcacaaacgaccgatacccccatccgaactaatcacaaacgaattttataactcttcccaaccccatactctcgcctctcgcctcgtactaaatcctcaaatcacccgtaataacgaaaacctcgaaacgaattaccaattttcgctctaactttccctctcttataacgttctctccctaccgttatcttt

SEQ ID NO: 6463 - DNA, 585 bp, Artificial Sequence
  chemically treated genomic DNA (Homo sapiens) CpG-island No: 6463
ttgtggtagtagtaatatttgttttagttttatttttagtagtttgttgcgtcgtatacggtattaaattttttttatacgaggaggttacggtcgtaatggcggtcgcgtatagtatgggcggcgacggaggggtttttacggtcgttgtttaaaaggaggtgttttcgatcggtagtagggacggagcgggatttaaagggtgcggttgaggcggcggttttagtttagttttttttatggaggttgggggacgtttcggttcggattgtgagtttagtcgtttgttggcgattttttttttttttttttcggttaagatttttgtaaggtttttgttatttagaattttacgtggtttaaaacgtagttttatgtttcggcgttatttaattataagcgatcgatatttttattcgggttaattataggcgggttttgtggttttttttagttttatgttttcgtttttcgtttcgtgttgagtttttaaattattcgtgatggcgggagtttcgagacgggttgttagttttcgttttgatttttttttttttgtggcgttttttttttgtcgttgttttt

SEQ ID NO: 6464 - DNA, 585 bp, Artificial Sequence
  chemically treated genomic DNA (Homo sapiens) CpG-island No: 6464
aaaaacaacgacaaaaaaaaaacgccacaaaaaaaaaaaaatcaaaacgaaaactaacaacccgtctcgaaactcccgccatcacgaataatttaaaaactcaacacgaaacgaaaaacgaaaacataaaactaaaaaaaaccacaaaacccgcctataattaacccgaataaaaatatcgatcgcttataattaaataacgccgaaacataaaactacgttttaaaccacgtaaaattctaaataacaaaaaccttacaaaaatcttaaccgaaaaaaaaaaaaaaaaaatcgccaacaaacgactaaactcacaatccgaaccgaaacgtcccccaacctccataaaaaaaactaaactaaaaccgccgcctcaaccgcaccctttaaatcccgctccgtccctactaccgatcgaaaacacctccttttaaacaacgaccgtaaaaacccctccgtcgccgcccatactatacgcgaccgccattacgaccgtaacctcctcgtataaaaaaaatttaataccgtatacgacgcaacaaactactaaaaataaaactaaaacaaatattactactaccacaa

SEQ ID NO: 6465 - DNA, 564 bp, Artificial Sequence
  chemically treated genomic DNA (Homo sapiens) CpG-island No: 6465
tttaggcgtggtagtagattgtcgttgaaattggtattagtttgatgcgtagtttaacgaatttttaaaagggattagtcgcgatgagttttgtcggcgtattttgtaatatcggggcgtaaaaggacgtggtcggaatttttaattttcgttaggagagggcgtaattggcgtatcgtaaaaatttgtttatgtttatttattacgcgagttgacggttaacgttgttttattcggattcgttttttgttggtagattttcgtgtatagtagatttcggttgggcggtttttgtttttttgaatgcgtcgacgattttagcggcgttggagttggcgagttttttattttttgcgcggatgtatttttaatttaaaaattcgaatcggatttaggaaatttttttcgtcgtattgtgtagggttgggcgtgcgtacgtaggtatgtattaggtattgaagatgcgtagcgggtagtgaggttatttcgggagttattttatgtttcgaaaaggtttaaatttcgaatttacgttaaaatttagttaggtaattaatcgggata

SEQ ID NO: 6466 - DNA, 564 bp, Artificial Sequence
  chemically treated genomic DNA (Homo sapiens) CpG-island No: 6466
tatcccgattaattacctaactaaattttaacgtaaattcgaaatttaaaccttttcgaaacataaaataactcccgaaataacctcactacccgctacgcatcttcaatacctaatacatacctacgtacgcacgcccaaccctacacaatacgacgaaaaaaatttcctaaatccgattcgaatttttaaattaaaaatacatccgcgcaaaaaataaaaaactcgccaactccaacgccgctaaaatcgtcgacgcattcaaaaaaacaaaaaccgcccaaccgaaatctactatacacgaaaatctaccaacaaaaaacgaatccgaataaaacaacgttaaccgtcaactcgcgtaataaataaacataaacaaatttttacgatacgccaattacgccctctcctaacgaaaattaaaaattccgaccacgtccttttacgccccgatattacaaaatacgccgacaaaactcatcgcgactaatcccttttaaaaattcgttaaactacgcatcaaactaataccaatttcaacgacaatctactaccacgcctaaa

SEQ ID NO: 6467 - DNA, 564 bp, Artificial Sequence
  chemically treated genomic DNA (Homo sapiens) CpG-island No: 6467
tatttcgattgattatttggttagattttggcgtaaattcggaatttgggttttttcgggatatggggtaattttcgaggtgattttattgttcgttgcgtatttttaatgtttgatatatgtttgcgtgcgtacgtttagttttgtatagtgcggcgagaaagattttttgggttcggttcgagtttttaagttgggaatgtattcgcgtagaaggtgaaaaattcgttagttttagcgtcgttaaaatcgtcggcgtatttagggagatagaagtcgtttaatcgagatttgttgtgtacggagatttgttagtaaagagcgaattcgggtagaatagcgttgatcgttaattcgcgtagtgagtggatatagatagatttttgcgatacgttagttgcgtttttttttggcggaggttaaaggtttcggttacgtttttttgcgtttcggtgttgtagaatgcgtcggtaggatttatcgcggttgattttttttagggattcgttaaattgcgtattaagttgatgttaattttagcggtaatttgttgttacgtttggg

SEQ ID NO: 6468 - DNA, 564 bp, Artificial Sequence
  chemically treated genomic DNA (Homo sapiens) CpG-island No: 6468
cccaaacgtaacaacaaattaccgctaaaattaacatcaacttaatacgcaatttaacgaatccctaaaaaaaatcaaccgcgataaatcctaccgacgcattctacaacaccgaaacgcaaaaaaacgtaaccgaaacctttaacctccgccaaaaaaaaacgcaactaacgtatcgcaaaaatctatctatatccactcactacgcgaattaacgatcaacgctattctacccgaattcgctctttactaacaaatctccgtacacaacaaatctcgattaaacgacttctatctccctaaatacgccgacgattttaacgacgctaaaactaacgaatttttcaccttctacgcgaatacattcccaacttaaaaactcgaaccgaacccaaaaaatctttctcgccgcactatacaaaactaaacgtacgcacgcaaacatatatcaaacattaaaaatacgcaacgaacaataaaatcacctcgaaaattaccccatatcccgaaaaaacccaaattccgaatttacgccaaaatctaaccaaataatcaatcgaaata

SEQ ID NO: 6469 - DNA, 662 bp, Artificial Sequence
  chemically treated genomic DNA (Homo sapiens) CpG-island No: 6469
gcgcgttttcggtgtttttaacggatggagaagacggaattataacgtaaggtagatttcgtgattgatttaggtgaggtttcgcgaggtgtttttaattttacgacgatagtaggaaacgatttattcgtatcgttttaattttacgttatagtggagttatttttttgggcgttttttagcgtgcgcgtgcgtttgcgtatgcgtatttattttttttcgttttcgcgtagatttgttttcgttagtcgcgcgtgggtagaggttttaggcgggcgttgcgaagggttgttgttagagttcggattttgttacggcgcgaagttttttttttggggcggggaaaggtatcgtattcgttatttagtgtgaatgaattgtggcgtgggttttaagggtaggttgcggagtattcgggtcgtggttatgaatttattcgtgattttggcgttaggtaggcgttgaggaagaagttattcgagcggatttcgaggtgaggttggttgatttttatgtgcgttttatagtttagtagatatatttttttgtttgttcgaaattcgcggcgattgtttttttgttagagttcgtatttgttattgggaatttgttcgtttgagttttttttttgatttagtttttgtcgttagtagggtgtcgat

SEQ ID NO: 6470 - DNA, 662 bp, Artificial Sequence
  chemically treated genomic DNA (Homo sapiens) CpG-island No: 6470
atcgacaccctactaacgacaaaaactaaatcaaaaaaaaaactcaaacgaacaaattcccaataacaaatacgaactctaacaaaaaaacaatcgccgcgaatttcgaacaaacaaaaaaatatatctactaaactataaaacgcacataaaaatcaaccaacctcacctcgaaatccgctcgaataacttcttcctcaacgcctacctaacgccaaaatcacgaataaattcataaccacgacccgaatactccgcaacctacccttaaaacccacgccacaattcattcacactaaataacgaatacgatacctttccccgccccaaaaaaaaaacttcgcgccgtaacaaaatccgaactctaacaacaacccttcgcaacgcccgcctaaaacctctacccacgcgcgactaacgaaaacaaatctacgcgaaaacgaaaaaaaataaatacgcatacgcaaacgcacgcgcacgctaaaaaacgcccaaaaaaataactccactataacgtaaaattaaaacgatacgaataaatcgtttcctactatcgtcgtaaaattaaaaacacctcgcgaaacctcacctaaatcaatcacgaaatctaccttacgttataattccgtcttctccatccgttaaaaacaccgaaaacgcgc

SEQ ID NO: 6471 - DNA, 662 bp, Artificial Sequence
  chemically treated genomic DNA (Homo sapiens) CpG-island No: 6471
gtcggtattttgttggcgataagggttgggttagggaagagatttaagcgaatagatttttagtagtaggtgcgaattttggtaagagggtagtcgtcgcggatttcggatagataggaggatgtgtttattggattgtgagacgtatataaaggttaattagttttatttcggagttcgttcgggtggttttttttttaacgtttgtttagcgttagggttacgggtgagtttatggttacggttcgggtatttcgtagtttgtttttagagtttacgttatagtttatttatattaggtagcgggtgcggtattttttttcgttttaaggagggaatttcgcgtcgtaataaggttcgaattttagtaataatttttcgtaacgttcgtttaaggtttttatttacgcgcgattggcggagataagtttgcgcgggggcgggggagagtaagtgcgtatgcgtagacgtacgcgtacgttaagaaacgtttaagggagtaattttattgtgacgtaaaattggggcggtgcgagtaagtcgttttttgttgtcgtcgtgagattaaagatatttcgcgagattttatttaaattagttacggggtttgttttgcgttgtggtttcgttttttttattcgttggagatatcggaaacgcgt

SEQ ID NO: 6472 - DNA, 662 bp, Artificial Sequence
  chemically treated genomic DNA (Homo sapiens) CpG-island No: 6472
acgcgtttccgatatctccaacgaataaaaaaaacgaaaccacaacgcaaaacaaaccccgtaactaatttaaataaaatctcgcgaaatatctttaatctcacgacgacaacaaaaaacgacttactcgcaccgccccaattttacgtcacaataaaattactcccttaaacgtttcttaacgtacgcgtacgtctacgcatacgcacttactctcccccgcccccgcgcaaacttatctccgccaatcgcgcgtaaataaaaaccttaaacgaacgttacgaaaaattattactaaaattcgaaccttattacgacgcgaaattccctccttaaaacgaaaaaaaataccgcacccgctacctaatataaataaactataacgtaaactctaaaaacaaactacgaaatacccgaaccgtaaccataaactcacccgtaaccctaacgctaaacaaacgttaaaaaaaaaaccacccgaacgaactccgaaataaaactaattaacctttatatacgtctcacaatccaataaacacatcctcctatctatccgaaatccgcgacgactaccctcttaccaaaattcgcacctactactaaaaatctattcgcttaaatctcttccctaacccaacccttatcgccaacaaaataccgac

SEQ ID NO: 6473 - DNA, 911 bp, Artificial Sequence
  chemically treated genomic DNA (Homo sapiens) CpG-island No: 6473
tatcgacgcggtaagtaaattatttttaacgttgtcggaaagcgtttcggagaagtgtttcgtattcggtaataatttttattgtttttaggttagatcgttttacgatgtttgaaaacgggttttgtttgtcgtttgaagcgggatatttagcgttagagtgttaattttgtcgttcggttgtgtgggagcgttaaatattatttagtgtaggtgaaagtttcgcggttagcgggcgtatgttttttaggtttgttagttttagattattggcgcgaattcggagttcgttattgcgtttattgtttttgtcgttaacgttttgtttcggtatttaggttagcgttaatgtttcgttcggttagggtttgtcgtttatcgtgattcgtgtatcgggaatagagaattgttagttcggatttttacgcgtaatatgcgcggttagattatttatcgatagcgtatgcgtttgtttttcgtttaattagttggtatcgttttgttttagttagacgttatcgtcggttatatcgtttttgtcgatcgttatttagtttttaagggagaattgtgtcgtttttagcgtaatattgttttgtatttatttatcgagttacggttttaggtcgatgttattcgtttggagttagacgcgattattgtttaataattttttattatcgcgtaaatttatgcgtatttgtattacgtcgtgttgttcggtaaggttggagaggtttattaggtttttcgtacggtgtcgacgtggatcgtttagttaggtgagttgtgggatcgttagttcggcgcgttgatcggatggcgttaggaaattgattttattgtcgcgaagatcgaaatggttttattgacgaagaaatagatcgttgatgtgattggtttttagatat

SEQ ID NO: 6474 - DNA, 911 bp, Artificial Sequence
  chemically treated genomic DNA (Homo sapiens) CpG-island No: 6474
atatctaaaaaccaatcacatcaacgatctatttcttcgtcaataaaaccatttcgatcttcgcgacaataaaatcaatttcctaacgccatccgatcaacgcgccgaactaacgatcccacaactcacctaactaaacgatccacgtcgacaccgtacgaaaaacctaataaacctctccaaccttaccgaacaacacgacgtaatacaaatacgcataaatttacgcgataataaaaaattattaaacaataatcgcgtctaactccaaacgaataacatcgacctaaaaccgtaactcgataaataaatacaaaacaatattacgctaaaaacgacacaattctcccttaaaaactaaataacgatcgacaaaaacgatataaccgacgataacgtctaactaaaacaaaacgataccaactaattaaacgaaaaacaaacgcatacgctatcgataaataatctaaccgcgcatattacgcgtaaaaatccgaactaacaattctctattcccgatacacgaatcacgataaacgacaaaccctaaccgaacgaaacattaacgctaacctaaataccgaaacaaaacgttaacgacaaaaacaataaacgcaataacgaactccgaattcgcgccaataatctaaaactaacaaacctaaaaaacatacgcccgctaaccgcgaaactttcacctacactaaataatatttaacgctcccacacaaccgaacgacaaaattaacactctaacgctaaatatcccgcttcaaacgacaaacaaaacccgttttcaaacatcgtaaaacgatctaacctaaaaacaataaaaattattaccgaatacgaaacacttctccgaaacgctttccgacaacgttaaaaataatttacttaccgcgtcgata

SEQ ID NO: 6475 - DNA, 911 bp, Artificial Sequence
  chemically treated genomic DNA (Homo sapiens) CpG-island No: 6475
atgtttggaagttagttatattagcgatttgttttttcgttaatgggattatttcgattttcgcgatagtgaagttagttttttgacgttattcggttagcgcgtcgagttggcgattttataatttatttggttgaacgatttacgtcgatatcgtgcggaaggtttggtaagtttttttagttttatcggatagtacggcgtgatgtaggtgcgtatggatttgcgcgatgatgaggggttgttaagtaatggtcgcgtttggttttaggcggatgatatcgatttgaagtcgtggttcggtaaatggatgtaggataatattgcgttggaaacggtatagtttttttttgaaggttggatgacgatcgataaaggcgatgtaatcggcggtgacgtttggttgaaatagggcggtgttagttggttgggcgagaagtaaacgtatacgttgtcggtggataatttgatcgcgtatattacgcgtgaaaattcgggttggtagttttttattttcgatatacggattacgatggacggtaaattttggtcgagcggagtattgacgttggtttggatatcggaataggacgttggcggtaaagataataaacgtagtgacgaatttcggattcgcgttagtaatttggagttggtaggtttggagggtatacgttcgttggtcgcgaaatttttatttgtattgggtgatgtttggcgtttttatataatcgagcggtaagattaatattttggcgttggatatttcgttttaggcggtagataagattcgtttttaggtatcgtggagcgatttggtttggaagtaatggaaattattatcgggtgcggaatattttttcgggacgtttttcggtagcgttgaaaatggtttgtttatcgcgtcgatg

SEQ ID NO: 6476 - DNA, 911 bp, Artificial Sequence
  chemically treated genomic DNA (Homo sapiens) CpG-island No: 6476
catcgacgcgataaacaaaccattttcaacgctaccgaaaaacgtcccgaaaaaatattccgcacccgataataatttccattacttccaaaccaaatcgctccacgatacctaaaaacgaatcttatctaccgcctaaaacgaaatatccaacgccaaaatattaatcttaccgctcgattatataaaaacgccaaacatcacccaatacaaataaaaatttcgcgaccaacgaacgtataccctccaaacctaccaactccaaattactaacgcgaatccgaaattcgtcactacgtttattatctttaccgccaacgtcctattccgatatccaaaccaacgtcaatactccgctcgaccaaaatttaccgtccatcgtaatccgtatatcgaaaataaaaaactaccaacccgaattttcacgcgtaatatacgcgatcaaattatccaccgacaacgtatacgtttacttctcgcccaaccaactaacaccgccctatttcaaccaaacgtcaccgccgattacatcgcctttatcgatcgtcatccaaccttcaaaaaaaaactataccgtttccaacgcaatattatcctacatccatttaccgaaccacgacttcaaatcgatatcatccgcctaaaaccaaacgcgaccattacttaacaacccctcatcatcgcgcaaatccatacgcacctacatcacgccgtactatccgataaaactaaaaaaacttaccaaaccttccgcacgatatcgacgtaaatcgttcaaccaaataaattataaaatcgccaactcgacgcgctaaccgaataacgtcaaaaaactaacttcactatcgcgaaaatcgaaataatcccattaacgaaaaaacaaatcgctaatataactaacttccaaacat

SEQ ID NO: 6477 - DNA, 803 bp, Artificial Sequence
  chemically treated genomic DNA (Homo sapiens) CpG-island No: 6477
cggatttttatttcggcgggggcgggggaggcgggcgcgggttttttgtttttttttcggttttggtttttgcgcggggtgtttttttcgatttcgggtcgatttttcgattttcggtcgttgttttggtcgtttcgaggagttttcgcgtttcgttgttttacgttgagggtatcgaaatttagcgttttgttttcgaaggcgttttttacgttgtagaatatgtcgtcgtatttttgtcgcgggatttggttcgtggtgttcggtttggttaggtatacgggtagatcgttttcgtgggagttgttttagttttttcggttcgaggttatggtttaagtacgaaagcggttcgcgggttttttttttttagaggcggaaagggtagtcgtcggtagcgtgcgtcgagttatagtgattgtggcgggaggaggcgtttgagttttcgcgttagaggcggtagtgttgtttcgatttttgtttgtttttagcgagttagcgagttatatagttagttagcgcgcggagtaggggtttagagtagcgtcgcgtttggtttattcgttggatttttcgttcggtcgtatttttttacgtatttttaattttaacgtggtttttcgggttgacgtagcgtcggtgtttattataattataaattaaatttggcgcgcgcgtatacgtatatataggcgtatattgttcgttcgcgtaatagttttgttttatatattttcgcgtaatttagacgttttagaaatgtttatattttagtatttgattgttttatttatattaatttt

SEQ ID NO: 6478 - DNA, 803 bp, Artificial Sequence
  chemically treated genomic DNA (Homo sapiens) CpG-island No: 6478
aaaattaatataaataaaacaatcaaatactaaaatataaacatttctaaaacgtctaaattacgcgaaaatatataaaacaaaactattacgcgaacgaacaatatacgcctatatatacgtatacgcgcgcgccaaatttaatttataattataataaacaccgacgctacgtcaacccgaaaaaccacgttaaaattaaaaatacgtaaaaaaatacgaccgaacgaaaaatccaacgaataaaccaaacgcgacgctactctaaacccctactccgcgcgctaactaactatataactcgctaactcgctaaaaacaaacaaaaatcgaaacaacactaccgcctctaacgcgaaaactcaaacgcctcctcccgccacaatcactataactcgacgcacgctaccgacgactaccctttccgcctctaaaaaaaaaaaacccgcgaaccgctttcgtacttaaaccataacctcgaaccgaaaaaactaaaacaactcccacgaaaacgatctacccgtatacctaaccaaaccgaacaccacgaaccaaatcccgcgacaaaaatacgacgacatattctacaacgtaaaaaacgccttcgaaaacaaaacgctaaatttcgataccctcaacgtaaaacaacgaaacgcgaaaactcctcgaaacgaccaaaacaacgaccgaaaatcgaaaaatcgacccgaaatcgaaaaaaacaccccgcgcaaaaaccaaaaccgaaaaaaaaacaaaaaacccgcgcccgcctcccccgcccccgccgaaataaaaatccg

SEQ ID NO: 6479 - DNA, 803 bp, Artificial Sequence
  chemically treated genomic DNA (Homo sapiens) CpG-island No: 6479
ggagttagtgtgggtgaagtagttaagtgttggagtgtgaatatttttaagacgtttaaattgcgcgaaagtgtgtgaggtaaggttgttgcgcgagcgggtagtgtgcgtttgtgtgtgcgtgtgcgcgcgcgttaagtttggtttgtgattgtgatgggtatcgacgttgcgttagttcgggaggttacgttagggttgggggtgcgtgaggaggtgcggtcgggcgagaggtttagcgagtgagttaagcgcggcgttattttgggtttttgtttcgcgcgttagttggttgtgtggttcgttggttcgttagggataagtaggaatcggagtagtattgtcgtttttggcgcgaaggtttaggcgttttttttcgttatagttattgtggttcggcgtacgttgtcggcggttgtttttttcgtttttggggaagaaaaattcgcgggtcgttttcgtgtttgaattatggtttcgggtcggaggggttgggatagtttttacgaagacgatttgttcgtgtatttggttaggtcgggtattacggattaggtttcgcggtagaaatacggcggtatgttttgtaacgtggagggcgttttcgagagtaagacgttggatttcgatgtttttagcgtggggtagcggggcgcgaagatttttcggagcggttagggtagcgatcgaggatcggggagtcggttcgggatcgagggggatatttcgcgtaggggttaaggtcgggaagagagtagggagttcgcgttcgtttttttcgttttcgtcggggtagagattcg

SEQ ID NO: 6480 - DNA, 803 bp, Artificial Sequence
  chemically treated genomic DNA (Homo sapiens) CpG-island No: 6480
cgaatctctaccccgacgaaaacgaaaaaaacgaacgcgaactccctactctcttcccgaccttaacccctacgcgaaatatccccctcgatcccgaaccgactccccgatcctcgatcgctaccctaaccgctccgaaaaatcttcgcgccccgctaccccacgctaaaaacatcgaaatccaacgtcttactctcgaaaacgccctccacgttacaaaacataccgccgtatttctaccgcgaaacctaatccgtaatacccgacctaaccaaatacacgaacaaatcgtcttcgtaaaaactatcccaacccctccgacccgaaaccataattcaaacacgaaaacgacccgcgaatttttcttccccaaaaacgaaaaaaacaaccgccgacaacgtacgccgaaccacaataactataacgaaaaaaaacgcctaaaccttcgcgccaaaaacgacaatactactccgattcctacttatccctaacgaaccaacgaaccacacaaccaactaacgcgcgaaacaaaaacccaaaataacgccgcgcttaactcactcgctaaacctctcgcccgaccgcacctcctcacgcacccccaaccctaacgtaacctcccgaactaacgcaacgtcgatacccatcacaatcacaaaccaaacttaacgcgcgcgcacacgcacacacaaacgcacactacccgctcgcgcaacaaccttacctcacacactttcgcgcaatttaaacgtcttaaaaatattcacactccaacacttaactacttcacccacactaactcc

SEQ ID NO: 6481 - DNA, 554 bp, Artificial Sequence
  chemically treated genomic DNA (Homo sapiens) CpG-island No: 6481
tcgtcgagtatcgttagttttacgttaaatttttttagttttttttcgttgttatagatattttggaaaattagttcgttcggtgcgttacgacggatcgtttcgatttgggtggtgacgtgcgttagtatatagttttgagttgggatgttgaatttgtcgattacgttatagatggtatttaatacgcggtttaagttttttacgtcgttagttatcgggttaacgtcgattatcgtatcgtttatttcgaaggaaagtttttcgtagatttgcgcggcgatattttgtacgtcgttacgggtgttatttggttgtaaacgggcgttaaaggtgttcggaatatcgatggtggtattggtttttttgattatcggtatttttttcgcgtcgtagattaggttcgcgttggagtaaattttcgttatcgtcgcgattattttcgaggttagttttttgcgggtaaaggtaatgtcgtttacgttggttttatcgtttagtatatatttacgtagttcgttgatgttttagtttttaatttggttgtaggtcgt

SEQ ID NO: 6482 - DNA, 554 bp, Artificial Sequence
  chemically treated genomic DNA (Homo sapiens) CpG-island No: 6482
acgacctacaaccaaattaaaaactaaaacatcaacgaactacgtaaatatatactaaacgataaaaccaacgtaaacgacattacctttacccgcaaaaaactaacctcgaaaataatcgcgacgataacgaaaatttactccaacgcgaacctaatctacgacgcgaaaaaaataccgataatcaaaaaaaccaataccaccatcgatattccgaacacctttaacgcccgtttacaaccaaataacacccgtaacgacgtacaaaatatcgccgcgcaaatctacgaaaaactttccttcgaaataaacgatacgataatcgacgttaacccgataactaacgacgtaaaaaacttaaaccgcgtattaaataccatctataacgtaatcgacaaattcaacatcccaactcaaaactatatactaacgcacgtcaccacccaaatcgaaacgatccgtcgtaacgcaccgaacgaactaattttccaaaatatctataacaacgaaaaaaaactaaaaaaatttaacgtaaaactaacgatactcgacga

SEQ ID NO: 6483 - DNA, 554 bp, Artificial Sequence
  chemically treated genomic DNA (Homo sapiens) CpG-island No: 6483
acggtttataattagattaaaaattggagtattagcgaattgcgtgagtatgtgttgagcgatgaaattagcgtggacgatattgtttttattcgtaaagggttgatttcggaagtggtcgcggcggtagcgaagatttgttttaacgcggatttgatttacggcgcgaagaaaatgtcggtaattaaaaaggttaatattattatcggtatttcgggtatttttagcgttcgtttgtagttaaatgatattcgtgacgacgtgtaaagtatcgtcgcgtaaatttacgaagggttttttttcggggtgggcgatgcggtgatcggcgttaattcggtgattgacgacgtggaaaatttaagtcgcgtgttggatattatttatggcgtgatcgataaatttaatattttaatttagggttgtgtattggcgtacgttattatttagatcgaagcgattcgtcgtggcgtatcgggcgggttgattttttagagtatttgtggtagcgaaaaagggttgaaagagtttggcgtggagttggcgatgttcgacga
